United States Patent Application Publication US 2008/0050393 A1 - sequence listing, part 46

SEQ ID NO: 148278 - DNA, 384 bp, Homo sapiens
tgtggatttgagctctgtgatctatgtctgctgcctggctcctagatggctctgcgggcaggtgctggccaaggacatcatctaggcagggggagagcctgggctgaacagctgtgaccaaaactcccttctgccccaccctgccccctccacttcctgccctctgttccatcttcccccttcccaaaggccacagcctttattccaggcccagggatgtaggagggggaaggaggaaacaggaagcccagagagggcaaagggcctacctcggggcgcgaaccatgccccagactattatctcaggaggccttgccagcctgtgtgcttgtgggaacaccttgtacctgagcttacaggtaccaataaagaggctttattttt

SEQ ID NO: 148279 - DNA, 2540 bp, Homo sapiens
ggaggcaggaggaggggctgccacctgtggtggatgccattgatgacgcctctgtggaggaggacttggcagtcgctgtggcaggtggccggttggaagaagtgagcttcctacagccctacccagcccggcgacgtcgagctctgctgagggcttcaggtgtgcgaaggatcgatcgggaggagaagcgggagctgcaggcactgcgccaatcccgggaggattgtggctgtcactgcgataggatctgcgaccctgagacctgcagctgcagcctggcaggcatcaagtgccagatggaccacacagcattcccctgtggctgctgcagggagggctgtgagaaccccatgggccgtgtggagatttaatcaggcaagagttcagacccatttcatccacacactcacccgcctgcagttggaacaggaggctgagagctttagggagctggaggcccctgcccagggcagcccacccagccctggtgaggaggccctggtccctactttcccactggccaagccccccatgaacaatgagctgggagacaacagctgcagcagcgacatgactgattcttccacagcatcttcatcagcatcgggcactagtgaggctcctgactgccccacccacccaggcctgcctggccctggcttccagcctggcgttgatgatgacagcctggcacgcatcttgagtttcagtgactctgacttcggtggggaggaggaggaagattaggaatttagcgtggggaacctggacaacctcagctgcttccatccagctgacatctttggtactagtgaccctggtggcctggccagctggacccacagctattctggctgtagcttcacatcaggcgtcctggatgagaatgccaacctggatgccagctgcttcctaaatggtggccttgaagggtcaagggaaggcagccttcctggcacctcagtgccacccagcatggacgctggccggagtagctcagtggatctcaacttgtcttcttgtgactcctttgagttactccaggctctgccagattaataagtctggggcctcactacacatcacagaaggtgtctgacagcctgggacaacatcgaggcacctcacttccccctgcctgggcctgttctccacctggggatgccagcagttgcttcctgggagtccctcatgggcttctccgaggccagccgccgaagccctagatccctttattgacagccagtttgaggacactgtcccaggcatctctaatggagcctgtgccggtgtgaggaccagggatgtcttttcccagccccaagagacctgttgctgctttcttgtaattatggggctccccagagtctgcgtaacagtctcccactgggctggctcacccacaggtgccatgtgcacaactcctggttttcaaacaattctctggatttatttatttgttttaacttttctgtgctgaagagaggactggggggagggggcttccccctttcagctgcccggcccccccacaccccaagcttgtcttctatctccacaacgtgtagcctgggaagagaagaaaatgtggctcctctggactttggcagaccacttttcggtctttgcgtgatgttccttagcccaaagacggtgagacagggctgaaatcaggtggcttctgccacgctgagccctagacccatgggtggctaaatccactggactgtgaagactataatttatttccataatttatttggagattgaggaggctttggttgcacttctttggctggtgggtaatgccaggggtggggtgggcacaggccctcaagagccccttttgccttgtagtcctacaccttgccctgcctgggctttggtgcagactaggtgtggatttgagctctgtgatctatgtctgctgcctggctcctagatggctctgtgggcaggtgctggccaaggacatcatctaggcagggggagagcctgggctgaacagctgtgaccaaaactcccttctgccccaccctgcccccctccacttcctgccctctgttccatcttcccccttcccaaaggccacagcctttattccaggccccagggatgttaggagggggaaggaggaaacaggaaaccccagaaaagggcaaagggccctaccctcggggcgcgaaccatgcccccagactattatctcagggctttcctgggcactgcacttcaaccgtggccccacctgccccatgccctgaggccagttggcgaggggtggctcctgagggtttttatacccctttgtttgcctaatgtttaatttttgcatcataatttctacattgtccctgagtgtcagaactataatttattccatttctctctgtgtctgtgcccaagaaacgcaggctctgggcctgccccttgcccaggtaggccttgccagcctgtgtgccttgtgggaacacctttgtacctgaagcttacaaggtaccaataaagaggctttatttttaaaaaaaaaaaaaaaaaaa

SEQ ID NO: 148280 - DNA, 696 bp, Homo sapiens
  misc_feature (1)...(696): n = a,t,c or g
tttgganaacantatctcgcttgggtcaaccgaggctgggtgtgcaagttgccatgnatccatgaacttaactgccagcccttgaaactccccgggctcaaagcaaatgctccccacctcagccctcctgggtaagccgggactacagatgtgtacccacccacgccctggctaatttttaaatttttggagagatgggatctcgctttgttgccctaggttgatctcgaattccctggcctcaagggatcctcccacctccacctcccaaagtgctgggattacaggggagctacagtgccaagatcactacaggtttttttttaaagtaactgtatgatacaaaagaaatacatggaaactttttgtgaaatattctggttctgaaaaaaatgacaaaaattacttcagcaaataaatacaaagtgctccaatgcgaaatattttactagcatctggcatattatgtgctgtaacttaatgatatacatatctcctccaccaaacacactgtagaagtctataaacactaaagtaatagtcaagaaatttgtaaaccacatctgtagaaactaatgatctactctgtaagtatggtctctatgcatatctataaatagtaataacattatttgcttaccacagctaccaatacagatatactttattgatgactaaaatacaattcctcgtgcc

SEQ ID NO: 148281 - DNA, 396 bp, Homo sapiens
  misc_feature (1)...(396): n = a,t,c or g
nnnggtgggggaaacagccggcgttgctgtagcgcgtttggtatttacaccgggtgactggccggcccgcttcgtgcctgcgggaagtcggtccgggggactctttggaaactgcgagcctcagagaaatatggcgctcccgacgctgtcgtgctactggtgcagccagcagcgcctgaatcatcggctagcacgacagcgagagcacgaggcccggcttcggcagcagcgggagcagaacagccgatacttcacggatgtctgacatctgcagctccaaacaggcagaatggagctctaaaacctactaccagcggagcatgcatgcctatcatcgggagaagatgaaggaggagaagaggaggagtctgtgggcccgactggaaaagctcatgc

SEQ ID NO: 148282 - DNA, 985 bp, Homo sapiens
acgatttcgtgctcgttgccggtgcaaacagggaggaaacagccggcgttgctgtagcgcgtctgggaattacaccgggggactggccggcccgcttcgtgcctgcgggaagtcgggccgggggactcttcggaaactccgagcctcagagaaatatggcgctcccgacgctgccgtcctactggtgcagccagcagcgcctgaatcagcagctagcaaagacagcgagagaaggaggaccagattcggcagcagtgggagcagaacagccgttacttcaggatgtctgacatctgcagctccaaacaggcagaatggagctctaaaacctcctaccagcggagcatgcatgcctatcagcgggagaagatgaaggaggagaagaggaggagtctggaggcccgacgggaaaagctcaggcagctcatgcaggaggagcaggacctgctggccagagaactggaggagctgaggctgagcatgaacttgcaggaaagaagaatccgggagcagcacgggaagctgaaatcagccagagaagagcagaggaaactgattgctgaacaacttttgtacgaacactggaaaaagaacaacccgaaacttcgagagatggagctgggccttctccagaagcatgtcgtaaactcttgggaaatgcagaaagaagaaaaaaaaacagcaagaagcctccgcagagcaagggaacaaacggtatgaaaatgaatatgaaagggcccgaagggaggcgctagaaaggatgaaagctgaagaggagaggaggcagctggaggacaagctccaggccgaggcactgctgcaacagatggaggagctgaagctgaaggaggtggaggtgggcacaagcccctctcagccgtgacctcctccacagctgctcgttagcatgagatgggcacttgagaggctgccctaagaagaggccatgtatgcggccgctgtgaggtccatcatcgacgattca

SEQ ID NO: 148283 - DNA, 638 bp, Homo sapiens
gagatggagccttgctttgtctcctagactggagtgtagtggcacgatctcagctcactgcaacctccactacccaagttcaagcgattctcgtgtcttaagattcctgagtagctgggattacaggcgcacaccactatgcctggttaacagggtttcaccacgttgaccaggctggtttcgaactcctaacctcaagtgatccacccacctcagcctcccaaagtgttgggattacaggcatgggcgaccacacctggcctactttacacactctaactaaaccctgtgaagtagatgagaacgctgtgatgagggaacttaaattaactggccagggtcccttaagaaagtggcagttcgaacatttgaatccagcttgattccaaagcccaaacacattccgtcatattacacagcttttcacaaaccctgttatctgctagatcccatgctacagtaccaatgacttagatcattttggtacctaaagactcaactcagccttgcgccaaacttccagatctatttttattcttagtggtctttaaaactacctggctttcatgtggtaggttgcaaccatattttgaagctcttcctatcaagaggcagagtctatttccctacctcgtgcc

SEQ ID NO: 148284 - DNA, 2458 bp, Homo sapiens
atgcctacttaccccaagcttgaaaagacagaccagagtacctcatacaccaagttcaatgatctctctcctgattcatcaagggaacgctacacttccttagaaattaagagtgtgtgctacactgctttaccagagcaaggccaaaagcagcttcaattatggtacaactgtgtgaagacacaatgcaaaaccactcaagaatgctcactcaaatggatttttaccatgaatgaaactagtgatcgagaagatggcctccccaaaggacatcatgtgacagactctgagaacgatgagcccttaaatcttaatgctagtgactctgaaagtgaggagcttcacaggcaaaaggacagcgactctgaatctgaggaacgtgcagagcctcctgcaagcgattctgaaaatgaggatgtcaatcagcatgggagcgactctgagagtgaagagaccaggaaattacctggtagtgactctgaaaatgaggaacttcttaatgggcatgcaagtgactcagaaaacgaagatgttgggaagcatcccgccagtgattctgagattgaggagctccagaagagtcctgctagtgactctgaaacagaagatgctctaaaacctcaaatcagtgactctgagagtgaggaacccccaaggcaccaagccagtgactccgaaaatgaggagcctcccaaacctcgaatgagtgattctgaaagtgaggagcttcctaaacctcaggtcagtgattcagaaagtgaggaacccccaaggcaccaggccagtgactctgaaaatgaggagcttcccaaacctcgtatcagtgactcagaaagtgaggaccctccgaggcaccaggccagtgactcagaaaatgaagagcttcccaaaccccgaatcagtgattcggaaagtgaggatcccccaaggaaccaggccagtgattcggaaaatgaggagctacccaaaccccgagtcagtgactctgagagtgaggggcctcagaaggggcctgccagtgactcagaaactgaggatgcgtccagacacaaacagaagccagagtcagatgatgacagcgacagggagaataagggagaggatacagaaatgcagaatgactccttccattcagacagccatatggacagaaaaaagtttcacagttctgatagtgaggaggaagaacacaaaaagcaaaaaatggacagtgatgaagatgaaaaagagggtgaggaggagaaagtagcgaagagaaaagctgctgtgctttctgatagtgaagatgaagagaaagcatcagcaaagaagagtcgtgttgtctctgatgcagatgactctgacagtgatgctgtatcagacaagtcaggcaaaagagagaaggaccatagcatctgacagtgaggaagaagctgggaaagaattgtctgataagaaaaatgaagagaaggatctgtttgggagtgacagtgagtcaggcaatgaagaagaaaatcttattgcagacatatttggagaatctggtgatgaagaggaagtagaatttacaggttttaaccaagaagatctgggaagaagaaaaaggtgaaacacaggtaaaagaagcagaagattcagattctgatgataacataaagagaggaaaacatatggactttctgtcagattttgagatgatgttgcagcgaaaaaagagcatgagtggcaagcgcagacggaaccgcgatggtggcacctttattagtgatgcagacgacgtcgtgagtgccatgatcgtcaagatgaatgaagctgctgaggaccttaaagaaacattcattgacagtggtgtgatgtctgccatcaaagaatggctctcacctctaccagataggagtttgcctgcactcaagatccgggagggagctgctgaagatcctgcaagagctgcctagtgtgagccaggagaccctgaagcatagtgggattggacgaagcagtgatgtatctctataaacaccccaaggagtcaaggtctaacaaggacatggcagggaaattaatcaatgagtggtctaggcctatatttggtcttacctcaaactacaaaggaatgacaagagaagaaagggagcagagagatctagaacagatgcctcaacgacgaagaatgaacagcacttggtggtcagacacccagaaagagacctggaaaaggtgctgacaggagaggagaaggctcttagacctggagatcctggattctgtgccccgtgcaagggtcccaatgccttcaaacaaggactatgttgtcaggcccaaatggaatgtggaaatggagtcatccaggcctggtattcttaaaaagggcctaagccgattggaaaagcataagaggcgatttgcagaacagaaacgactcagcaaagtgcatcgtgctgtcaagttcagcattgaaggcaacaggatgcccctatag

SEQ ID NO: 148285 - DNA, 780 bp, Homo sapiens
accctgaagcaagtaggattgacggagcatgtaatgtatctctataacgacccgaaggagtcaaggtctaacaaggacatggcagggaaattaatcaatgagtggtctaggcctatatttggtcttacctcaaactacaaaggaatgacaagagaagaaagggagcagagagatctagaacagatgcctcaacgacgaagaaatgaacagcactggtggtcagacacccagaagagacctggaaaaggtgctgacaggaaaggagaaggctctaagacctggagattccttgaatctggtgcccgtgcaagggtcccaatgccttcaaacaaggactatggtgtcaggcccaaaatgaaatgtggaaatggagtcatccaggtttcaggcgaccccccccagaagggtatccagtccgactggataaaccagatgagaaagttccacagatattaaggaaaaaaagcagatcttgcacacgcagtggaaaatccagccattgagggcaacaaaatgcccattggtgacccttgccccggaatgtgtccccccatcctcctactctaagaaatgccgcaatggactctttggagaaaagaagatattttaaaacgatttttagtgtgtctgtaaatggttcagcgtgtatcagatgttgtcataggactcacatttctctcacgttatatttaaaaccgttgtgtactttgtacaaaggaatactagtcatacttctataaactttacacaataaaatttcattctggtttttgaaaaaaa

SEQ ID NO: 148286 - DNA, 361 bp, Homo sapiens
tagcactgcaatacaatcgatggagtatgcgtacgtctccagtaaaaaggacaatataataaacatctcaagaacctctcaggacgtctgcacgtctactgtgggcgcacagcacagatggacgcaggggctggtctactcggatctgccgtccatctacagacttcccattcatggccatcatggcatccttagcgtcgtcaatgttctcaaaggtgacaaacccaaatccccgagatctctggtctccctgtctttcacaaccaccacttcagagatctgtccgtactttgagaagacctgctccagcgactgctcattggtgtcaaaactcagcctccaacaaaagtttgccttcatc

SEQ ID NO: 148287 - DNA, 384 bp, Homo sapiens
tactgcaaatacaacatcgatggagtatgcgtacgtcttccagtaaaaaaggacaatataaataaacatcttcaagaacctctcagggacgtctgcacgtctactgtggggcgcacagcacagatggactcgaaccggttccccccatagcctcggtcccctcctcctctagagaacccacggccccgtcctcggcccccacggaagaagccccggcccccggcagagccaccacggtacccacgggatcggttgtctgacgacttgcctgcctggtctactcggatctgccgtccatctacagacttcccattcatggccatcatggcatccttagcgtcgtcaatgttctcaaaggtgcgtgacgggcgagggggcggccgc

SEQ ID NO: 148288 - DNA, 656 bp, Homo sapiens
gcggccgccgctccctcgaagccgagtgcgcctcagatcccgcgagactggagtctccgcgctgcgaaccccctcagtggcgagccccccgcggtcactgctcggacaatgacccttgcagtcttccctgtcgggtcctactcgtgcgctgaaccgaggtccgcaggcttttcttccagtggccccgctccgccgacagacccccctgaaccacagactcggctttctgggtgcacacgtggccctttattcgaatccgactttcacagggctccacatcgttgtgggcaaggactggccgccccgtaagctgccggcgcaccgcagcccgtgctccaggagagactcgaggccctgagcccgcacctcactggcgaagcgcctcctggaaggaggaggaagggagggagaacaggcgcgggctccaggcgggggacccggcgctcccgggaggcgctgccctgcacccaacacacaccgaaaggcgcccgccatggggccataggtgcgggagagcaggactcactgaaacgcccaggtgccgcccgggacagggctcagcgccacatgccactcttcccgaaagcacttacaggggacaagcctcctgggcaagcggctgcctccagctcttgttccaggtgaagtccctcctg

SEQ ID NO: 148289 - DNA, 698 bp, Homo sapiens
aggttttttttttttttttttctgggtgcacacgtggccctttattcgaatccgactttcacagggctccacatcgttgtgggcaaggactggccgccccgtaagctgccggcgcaccgcagccacgtgctccaggagagactcgaggccctgagcccgcacctcactggcgaagcgcctcaggggacaagcctcctgggcaagcggctgcctccagctcttgttccaggtgaaggcccctcctgggacagtgaccccagaggtcatcgctgctctcaggccacccttccccgagtcctggccgggccccttcaaccgtaactgtcataactgtctctgtaggacccgcccgagctccggtcactgtagccaccactctgactccggctgctatagtagtctctggagcctccgtagcccccactcctggactcgaaccggttccccccatagcctcggtcccctcctcctctagagaacccacggccccgtcctcggcccccacggaagaagccccggcccccggcagagccaccacggtacccaacggaatcggtgtctgacgacttgcctgcctggtctactcggatctccgtccatctacagacttcccattcatggccatcatgggcatccctagcgtcgtcaatgttcttcaaggtgacaaaacccaattcccgagaactctggtcttcctg

SEQ ID NO: 148290 - DNA, 594 bp, Homo sapiens
  misc_feature (1)...(594): n = a,t,c or g
cggagtcagagtggtggctacagtgacgggagctgggcggggtcttacagagacagttacgacagttacgaagcaggcaagagagcagaggcacgtggcatcncagggcgacttcagacggccagccggttagctagttctgctgttgcttcacgagttctgagcattctctgctagcctatggaagctgcagccctcggaggacagaagtgttgtgcgcccaacagaacccctctgagacgcaagctgctcccttggctagctcatatgtggaaatagccctgtaattcgaggttgaaggggcccggcccaggactcggggaagggtggcctgagagcagcgatgacctctggggtcactgtcccaggagggacttcacctggaacaagagctggaggcagccgcttgcccaggaggcttgtcccctgaggcgcttcgccagtgaggtgcgggctcagggcctcgagtctctcctggagcacgggctgcggtgcgccggcagcttacggggcggccagtccttgcccacaacgatgtggagccctgtgaaagtcggattcgaataaagggccacgtgtgcacccagaaaaaaa

SEQ ID NO: 148291 - DNA, 602 bp, Homo sapiens
tttttttttttttttttttctgggggcacacgtggccctttattcgaatccgactttcacagggctccacatcgttgtgggcaaggactggccgcccccgtaagctgccggcgcaccgcagccccgtgctccaggagagactcgaggccctgagcccgcacctcactggcgaagcgcctcaggggacaagcctcctggggcaagcggctgcctccagctcttgttccagggtgaagtccctcctggggacagttgaccccagaggtcatcgcttgctctcaggccaccctttccccgagtcctggggccgggcccctttcaaccttgccaaagcaaagcagcgttactcccaacgtcctccacagggctcacagcttgcccctcccggcctccccggaaacagccacagccccttaggaaggtctcaggctagtcagggggctgtgacctcaggctccgtcacaggccagcatgcccagggcgggtctgcaccttggcgcagctggagccagctacccgtatgggatggagctatgtgggccagtgtgggctctagaaaaaaactaatggcggcaacagacatcagagaaagctaagttaag

SEQ ID NO: 148292 - DNA, 1376 bp, Homo sapiens
aattcccgggtccacgatttcgtggaggctcggggtcgttgtggtgcgctgtcttcctgcttgcgtcagggacctgcccgactcagtggccgccatggcatcagatgaaggcaaactttttgttggagggctgagttttgacaccaatgagcagtcgctggagcaggtcttctcaaagtacggacagatctctgaagtggtggttgtgaaagacagggagacccagagatctcggggatttgggtttgtcacctttgagaacattgacgacgctaaggatgccatgatggccatgaatgggaagtctgtagatggacggcagatccgagtagaccaggcaggcaagtcgtcagacaacccgattccgtggggtacccgtggtggctactgccgggggccggggcttcttccgtgggggccgaggacggggacgtgggttctctagaaggaggaggggaccgatggctatgggtgggaacccggttcgaagtccaggaagtgggggctacggaggctccagaagactactatagcagccggagtcagagtggttggctacagtgaccggagctcgggcggggtcctacaaagaacagttacaacagtttcgcttcacaccaacgagtaaaaaccctttctgctcaagatcgtccttccaatggctgtgtgtttaaagatttgtgggaagctttcgctgaaccgttaaatgtgtagtaaatgcaccctccttgtattcccactttcgtagtcatttccggttctgatctttgtcaaaacccagcctggaccgtttctgacgccggggatggcctcgtttacttagactttttctttttttaagggaagtgctgtttttttttttttgaggggtttttcaaaacattttgaaaagcatttacttttttgaccacgagccatgagttttcaaaaaaatcgggggttgtgtgggtttttggtttttgttttagtttttggttgcgttgccttttttttttagtggggttggccccatgaagtgggtgccccactcacttctctgagatcgaacggactgtgaatccgctctttgtcggaagctgagcaagctgtggcttttttccaactccgtgtgacgtttctgagtgtagtgtggtaggaccccggcgggtgtggcagcaactgccctggagccccagcccctgcgtccatctgtgctgtgcgccccacagtagacgtgcagacgtccctgagaggttcttgaagatgtttatttatattgtccttttttactggaagacgtacgcatactccatcgatgttgtatttgcagtggctgaggaattcttgtacgcagttttctttggctttacgagccgattaaaagaccgtgtgaaatg

SEQ ID NO: 148293 - DNA, 1278 bp, Homo sapiens
gataaagtacatcttcctggcaaatttacaaagcattggtttatcttagaatattggaggcttacaaggccaatttgttgaaattgttataaaactgtaaaattgtgttacattttacatgctaaaaaggagtattagttcattaatctttgattcccagtgaaaactaaattgattagtaaattttttttgtccccacttggaaaaacctggggatgattagtaaatttcatttgcctgactttgaaacttgtttggtaaaaatgcataaaaccacatgtggtttataagcattgttattcttattgtttaatcaaaatgttttcatttacaccaggtttggaaacaaaaaggtgaagagtacagagtgacaggatatggtggttggagctggattagtaaaactcatgtttataggtttgttcctaaattgcacggcaatactaatgtgaattacagaaagtcgttagaaggaaccaaaaataatatggatgaaaatatggatgagtcagataaaagaaaatgttcacgaagtccaaaaaaaataaaaatagagcctgattctgaaaaagatgaggtaaaaggttcagatgctgcaaaaggagcagaccaaaatgaaatggatatctcaaagattactgagaagaaggaccaagatgtgaaggagctcttagattctgacagtgataaaccctgcaaggaaagaaccaatggaagtagacgatgacatgaaaacagagtcacatgtaaattgtcaggagagttctcaagtagatgtggtcaatgttagtgagggttttcatctaaggactagttacaaaaagaaaacaaaatcatccaaactagatggacttcttgaaaggagaattaaacagtttacactggaagaaaaacagcgactcgaaaaaatcaagttggagggtggaattaagggtataggaaagacttctacaaattcttcaaaaaatctctctgaatcaccagtaataacgaaagcaaaagaagggtgtcagagtgactccgatgagacaagaacagagcccaaatgcaaataatgatcaacctgaggacttgattcagggatgttcacaaagtgattcctcagttcttagaatgagtgatcctagtcataccacaaacaaactttatccaaaagatcgagtgttagatgatgtctccattctgagcccagaaacaaaatgtcccaaacaaaattccattgaaaatgacatagaaaaaaaagtctctgaccttgccagtagaggccaggaacccatg

SEQ ID NO: 148294 - DNA, 715 bp, Homo sapiens
ttttttttgagacagtctcactgtcgcccagtctggagtgcagtggcacaatctcatctcactgcaacccctgccacctggggtcaagtgactcttctgccttagcctcccgagtagctgagactacaggcgtgcaccaccacacccagctaatttctctatttttagtagagatggggttttaccatgttggccaggctggtcttgaactcctgatctcaagtgatctgacctccttggcctcccaaagtgctgggattacaagcgtgagccactgggcctggccagaaaatgtatacttaaatctccaacagacagagaagtctcttatggtatctgggtaacacacctattcttacatcatcatcactgttttagacattcttgctttaaaaccttttgatatttagtaggacgagacttctcattacagaatcactataaaataaatcactagaaattttggaagttagaggttaaacccaaaaatcttacttttagtcaaataatttgccaatattcttgatttagaaacagtttctctgcttttatttgaatcttaaaattgtttcaaatacactggatgttaatttattttccaaagatctaacatctctctcaaatgtattgctagatattacatcgtttgttgcaattctgaatgggatattttcccagaatgattttcacatggtataaagatacagtatatctg

SEQ ID NO: 148295 - DNA, 533 bp, Homo sapiens
aatcccacgaagtcgtgcatgttagaaggatgaaaccctcatgttcactgtaaactgtgaaggtgctcaggccatcacaggtatgcctatatgaaaagccaccaagtatctgaaatattttcttttacagaaattatgtgtaccatttcagtcttagaaagtggagttggtcgctgtacgcaagacagacattggggctggactcaccatcagtggccccgaaaaggtactgaaatttgcttacaagtgcagagttatgctgaacttaagggtatagatgtagattccctggttattgagcacatccagggaaaaggcacccataatgtaccacctgacttacagaactcatgggcagatgaacccatccacaaactcccctgccacatccagatgatgcttagtgaaaagaaacaccttgttccaaaagcagaaaaggaggatgcacggaagaaaaagataccccagaagaaacataaacttaagagacaaacaaattcagccaaaagaaaatgcaaataaaagttcaaaac

SEQ ID NO: 148296 - DNA, 687 bp, Homo sapiens
gagacagggtctcactctgacgcccaggctggagtgcagtggcatgatctaggcccaatgcaacctctgcctcctgggttcaagcgattctcccacctcagcctccttagtagctgggactacaggcatgcaccaccaggcctggcttatttttgtagagatgggggtttcaccaggttggccaggttgatctcgaactcctcaactcaagtgatccacctgcctcgacctcccaaagtgctgggattacaagtgcgagccaccgtgcctggcccaactgatgtgtcttgatgttttactgaacatgtgggactgcattaggaacagactttgggaagacaatgacatgccacttaaactgtctttcttggggggtccatttggtagtacatagcatcatgtaaagctgtgtaccctgataccctttgtcccagcaatttcagttccagaaatttatcatttgtatgaacagaaaggcatgtaataaggatacttagcatggcatttttgtaatgctgagaaattgaattctacctaaatattcagacaatggtttataattcagttattataaataatatatctaggttcactgacatggagagctgtctaggatatagtctacgaaaaaggcaaactataaaacagcatgtatgatatgactcgtgccgaattcctgcagcccgg

SEQ ID NO: 148297 - DNA, 443 bp, Homo sapiens
gacacgcagagcatgaaatcactgagctcacggccaccttcaccaagtttgacagagatgggaatcgtattctggatgagaaggaacaggaaaaaatgcgacaggacctggaggaagagagggctcacaaggagagttctgcagctggagactgtcctggaaagagtagtggcccagattgatgctttaagctcaaaactggaaatgcttgaaaagaaaggggtgtctctttccttattcacatcattcaatatccgagcatttaaaagtcttttctctcattattcaagtgtgactcctataaactatttataatctggctacacactcagtaattctttacttcacatattaatagccttctactcactatacaaatcaatgcatcttataactccgacttatatacattacctcacgcattagagagtcatctcgtcacg

SEQ ID NO: 148298 - DNA, 461 bp, Homo sapiens
  misc_feature (1)...(461): n = a,t,c or g
cggcacgaggtaatctggctcttcccaaaattatcggtgaccacgttgtcattaatataattggtaacaggtatttggtctgcaacatgtttgtgggttttgttgttgctgttgtttgagaaagggtgtccctctgtccagcccaggctgcagtgcagtaagtgtgatcacagcttgttgtagcctcaacctcctggggctcaaatgatcctcccacctcagcctcccgagtacctggggaccacaggtgttgccactacacctgggctaactttttaatttttttgtgggagatgaggtctcactgtgttggcttcaggctgggtcttggaactcctgtgctcaagcttcaaacgatcctccaacctcagcctcccaaagtgctgggattacaggcatgagccactgttcctggctttctaacttaattgtttctntctcttcctctgtttttgatgtgg

SEQ ID NO: 148299 - DNA, 477 bp, Homo sapiens
  misc_feature (1)...(477): n = a,t,c or g
ccccagcccngnnnnnnttagaattcgtagtncgtgagcaggaactcgcaaaggaaagcaaaaggatgggacatcttttggagagtatggcggctggtacaaagcctgcaaagttgatagtccaactgttacaaccactctaaaaaaccttggggcactttacagacgtcaaggcaaatttgaagctgcagaaacgttagaagaagctgctatgaggtctcgtaaacagggtcttgacaatgttcacaaacagagggtggcagaagtgctcaatgaccctgagaacatggagaagcgcaggagccgtgagagcctcaacgtggacgtggtcaagtacgagagtggccctgacggaggggaggaaggcgtctctggccgagcctctttttgtggaaaacgacagcagcagcagtggcctggaagacgccaccgctaactgaccccaacctggccccgctccaggatgggactgccgag

SEQ ID NO: 148300 - DNA, 501 bp, Homo sapiens
  misc_feature (1)...(501): n = a,t,c or g
natttgaaattcagttccaatagtccagngnggnggaattcagagtatggcggctggtacaaagcctgcaaagttgatagtccaactgttacaaccactctataaaaaccttggggcactttacagacgtcaaggcaaatttgaagctgcagaaacgttagaagaagctgctatgaggtctcgtaaacagggtcttgacaatgttcacaaacagagggtggcagaagtgctcaatgaccctgagaacatggagaagcgcaggagccgtgagagcctcaacgtggacgtggtcaagtacgagagtggccctgacggaggggaggaagatggcactggatctttaaaacgcagtggntcctttagcaaactccgggcttccattagacgcagcagcgagaagcttggtaggaagctgtatggtggaagatcatcagaaacctagctcaaaatatccttctccgcnctctgtcctgcctttttttttgtcaaccctcctccccg

SEQ ID NO: 148301 - DNA, 2356 bp, Homo sapiens
  misc_feature (1)...(2356): n = a,t,c or g
gaattcgggcgagcgggactggctgggtcggctgggctgctggtgcgaggagccgcggggctgtgctcggcggccaaggggacagcgcgtgggtggccgaggatgctgcggggcggtagctccggcgcccctagctggtgactgctgcgccgtgcctcacacagccgaggcgggctcggcgcacagtcgctgctccgcgcgcgcgcccggcggcgctccaggtgctgacagcgcgagagagcgcggccctcaggagcaaggcgaatgtatgacaccatgtccacaatggtgtacataaaggaagacaagttggagaagcttacacaggatgaaattatttctaagacaaagcaagtaattcaggggctggaagctttgaagaatgagcacaattccattttacaaagtttgctggagacactgaagtgtttgaagaaagatgatgaaagtaatttggtggaggagaaatcaaacatgatccggaagtcactggagatgttggagctcggcctgagtgaggcacaggttatgatggctttgtcaaatcacctgaatgctgtggagtccgagaagcagaaactgcgtgcgcaggttcgtcgtctgtgccaggagaatcagtggctacgggatgaactggccaacacgcagcagaaactgcagaagagtgagcagtctgtggctcaactggaggaggagaagaagcatctggagtttatgaatcagctaaaaaaatatgatgacgacatttccccatccgaggacaaagacactgattctaccaaagagcctctggatgaccttttccccaatgatgaagacgacccagggcaaggaatccagcagcagcacagcagtgcagccgcggctgcccagcagggcggctacgagatccccgcgcggctgcggacgctccacaacctggtgatccagtacgcctcgcaggggcgctacgaggtagctgtgcccctctgcaagcaggccctggaggacctggagaagacttcaggacacgaccacccggacgtggccaccatgctcaacatcctggccttggtgtacagggatcagaataaatacaaagatgcagctaacctactgaatgatgccttggctattcgtgagaaaactttgggcaaagatcatcctgcggtggcggcgactttgaataaccttgcagtcctttatggtaaaagagggaagtacaaagaagcagagccgttgtgtaaaagagctctggaaatccgagaaaaggttttggggaaggatcaccccgatgttgccaagcagttaaataacttggccttactgtgccagaaccagggcaagtatgaagaagtagaatattattatcaaagtattcctcgagatctttcagacaaaactgggacctgatgaccccaacgtgggtaagacgaaaaataacctggcatcctgctatttgaaacaaggaaagttcaagcaagcagaaacactgtacaaagagattctcactcgtgcacatgaaagggagtttggttctgtagatgatgaaaagtaaacccatcatggatgcatgctgaagaaagagaagaatgcaaaggacagcaaaaggatgggacatccttttggagagtatggcgggctggtacaaaagcctgcacagttgatagtccaactgttacaaccactctaataaaccttggggcactttacagacgtcaaggcaaatttgaagctgcagaaacgttagaagaagctgctatgaggtctcgtaaacagggtcttgacaatgttcacaaacagaagggtggcagaagtgctcaattgacccttgagaacattggagaaaccgcaggaacccgtggagagcctccaacgtggnacgtggtcaagtacgagagtggccctgacgggaggggaggaagtgagtatgagcgtagagtggaacgggggcgtctctggccgagcctctttttgtggaaaacgacagcagcagcagtggcctggaagacgccaccgctaactgaccccgacctggccccgctccaggatgggactgccgagtgtggcccggagctggcccgggacagccagggcggcagggagggcccctggccgggagccgcagcgctcactcatttctcctgcgtctgtgtgcataggacatgatactaataaccacacggctggcgtgaccttggggctggggctgggcctaagctggtgccctggtgcggcgtggtctctcccaggagacctggggcatgagctgggcccacggctcccttcccatgtgtaacttcctcacgttgtgtgcgataacgtattttattgtacatttttttaaattaaaagtttatatgccttaaaaaaaaaa

SEQ ID NO: 148302 - DNA, 1780 bp, Homo sapiens
aaagttgatagtccaactgttacaaccactctaaaaaaccttggggcactttacagacgtcaaggcaaatttgaagctgcagaaacgttagaaagaagctgctatgaggtctcgtaaacagggtcttgacaatttcacaaaacagaggttgccagaagtgctcaatgacccctgagaacatggagaagcgcaggagccgtgagagcctcaaacgtggacgtggtccaagtacgagagtggccctgacggaggggaggaagtgagtatgagcgtaaagtggaacgggatgaggaaaatgaagctcggggctggttaactgacttgctcagcgtcccatggcctagccgcccttgactctcacactgtctcctgcatgacggggggcgcctcccgcagcttcccttctctctccagtgctgcccgctgtgtctagcagcctctaggatcttgtcagagctgcacctctctgtgaactggccattcctttcggtgctgctgtcctttttgggggggttcctgatttctgtatacatgtagcttttgccccagatatgtacttagtaatataaactgtaattaaataaaaaccccatttacctgtgtaaataacacgaagtttaaaaaattaaagagcgaattaagctgttccactttggtaaacaggtagttaaagtgtccacacaaggtgttgttgcaatggcatgacggtgtcctgttgacgtaaataagcacatagagcaaggcatgtgcccgcacgtgcctcccgtggtaacttaagaaccctgggggccccgctcggactccgggtctccctaggatatgccccagtagcatttgctgtgtagtctgtgtgtgaaatttgggcattctgcttttctctactaatctttgaagtgctcagtgatttgcgccatttgtgtctttctaacttctaataaaactcactccgactgacgctgtgtcttggtgtctgtctgcttggtagaacttctcactctttatccatgaaacgccgcatggcacagctgctaggggtcatggggtgacagttcatctcaccaaggagttccttccaagaagaaatgctgctgtatgcacatcttcttcactctgtgttttttattttcatgttcagatactgccaagtatttcacttattaatacctgaatcaattaagatgagagctgggcactctcacctccctacaaggttgtctgaggatttttagttatttgtatagaatgggcattttatttaattttccaaccacctttgtagttaacatttaatgaaactgttctgtaaaatttactgaaggaaacagtacctccaactattgcatttagacgaaactgttatatggaagagcctttgtcagatgcaaatggtttgggtcctgtactgtgttacttgtaccagatgcttatgtatctgttaaatgtggaagtcgattttgatgatattcttagaagctgctttaattttcctgagactttgtgtgttggcttttgtctgataatagcaggattcacattgcttttgggatgcgatcacttgattgaatgagcttccttatgtccaaaggttttcatgatcattggattatctttaatgaaacttaagctgaacactttatagctaaagtatattcacgtacatggtaattggtgagttctgcaagactctgtcagcagtgagctgctggcaagcagggcggtcttggcggagctcttatttgcacccagggtggctcttgtgggaaggatggagaaccacctg

SEQ ID NO: 148303 - DNA, 450 bp, Homo sapiens; identical to SEQ ID NO: 119663
  misc_feature (1)...(450): n = a,t,c or g

SEQ ID NO: 148304 - DNA, 1118 bp, Homo sapiens
  misc_feature (1)...(1118): n = a,t,c or g
attcggcacacggggcaaggcagcgatggcgatttttagtgtgtatgtggtgaacaaagctggcggcttgatttaccagttggacagctacgcgccacgggctgaggctgagaaaactttcagttatccgctggatctgctgctcaagctacacgatgagcgtgtgttggttgctttcggccagcgggacggcatccgagtgggtcatgcagtgctggccatcaatggcatggacgtgaatggcaggtacacggccgacgggaaagaggtgctggagtatctgggtaaccctgctaattacccggtgtccattcgatttggccggccccgcctcaacttctaatgagaagcttatgctggcctccatgttccactcgctctttgccatcgggctcccagctgtctcctgaaccagggaagctcagggcattgggtgtctggagacggaccctttccaatttcactggttcccggacactaacaggaatcaagttttgtggttctagcagatcctaggccaagctggaatagattctcttctccggaaagattttatggagattttactccagactttgcccctcaagaatcccattcctattcccttagaaatgccttatcaggtgtgagcccctttgaccccagaaccctgaagcttagccnctggaggtggccagagaaggctggaaacttttggaccccgggtccataggctgaaccctgttatgggacccccccaaaatcctgagagttccctgcaacaagaatactgcctgttgacactcccagtggaaatcccagcagcccttgttagtgcaccttgaaaagtgggagaatgctgaccctggatgacttgtactgattcctgagccttaacactgtgctctttccttctgtatatgccatggtcttactttccaactctgtacagatttatttatggaggtagctaggtccataaatgttgtaattaaaaatccctttgatcttagtgtatggcagagcccacgcgtccgggagggaatacttccaaaccttattctatgagactagtattactatgatgccaaaaccaggcaaagacacagcaaaaaagaaaaccataggccaatttccct

SEQ ID NO: 148305 - DNA, 545 bp, Homo sapiens
caggaggaaaagaggataatatcgaatggccctatattttgatttcattagggacaaatgcaaagatcctaatgtcagctggagaagagcttcctagttcagaggtaatgctgagctcaaggctatggatgagctatcaagaaagagggaaggttggagagtgagagaattttggaggaaagataacaaactttgccaagttgtttggctacatactgccttacagtcattatttttggtgtttagaaaaaaatagaaacagggtctcactttgttacccaggctggtctcaaactcctgggctcaagctttccttctgctttggcctcccaaagtgctgagactacaggcctgagatgctgtgcccagcctacattcatttttaatagctgggaggaaagtgggcagaggaagatatagaatgagggggtagccgactttgtacagagcccaccagtggtcttacaagttttcatgccaaaaaaaatcacgaaggatatttaaagccctagtttgagaatccatacttaaccagttctcgtgcc

SEQ ID NO: 148306 - DNA, 613 bp, Homo sapiens
  misc_feature (1)...(613): n = a,t,c or g
tttcagagacggggttttgccatgttgctcaggctggtctcgaacttctagtctcaaggagtcctcctgcctccgtttcccaaagttacaggtatcagccaccaagcccggcccagtattagctatttttatgatcattcagcacccatcactcacactgaccattaaatccatggcggccctgattcggcttgtggtccactaggtcatttgtcagcacaaacactgaactattaggaataacattacctaaaccgtcaactgccctcagggtcccccaagcctatttttgatgatccattccagcaccccatcacctacactggcccattaattcatgggcgggccctggattaggggattgtggggtcactagggtatttgtcagacaaacaatgactattaggggtacattactnaggcgtcactgccctcagggtcccaagctgcccattagagagaggagaacagaggtgcacgctggagagacatctattatgatttttttcttccccttcgggaaggggtggcgggtggtggcagacagaaggggctggttttaaaacaataaagtcaatttggtacggtctgcttcagtgttttgagatctttg

SEQ ID NO: 148307 - DNA, 1006 bp, Homo sapiens
gagacgaagtctcactctgtcaccaagactgaagtggaatggcgtgatcccagctcactgcaacctctgtctcccgggttcaagcaattctcctgccgcagcctacctaattagctgggattacaggcaagcccagctaattttgtatttttagtagagacagggttttaccttgttggccaggctggtctcgaactcctgacctcaaatgatccacctgcctcagcctcccaaagtgctgggattacaggcgtgagccactgtgcccagcctagaatcactaattctctaacaacagcttcattcatacagccaaggaaacacagtgagtttcctgtgatgacatgcccaccatcatcaaatgctactgagtctaaggtgggaggacgtggtccccatggtgcaattgcaaggctcatgtgagttcagaatttgagcgttagaccacacagctgagaatgtattttgtcagactggctctgccacacagcgatacaactgttgctagtgtttaatagacacttgacctgcactgcctcactcaatactcacaacattcccaggaaggaacgattattttctcatcttaaagacaatggagctggggttcagggatatttaagggagccattcaaggtcacacagttagcaagtagaaaagctggactccaagtgggcgtgacccccagggccctcgctctgaacggccttactatgtggcctacgccataaagctgagtgcaggaagtgctttgtcagggagtgacagcagagctccacagagcctttgggacatgagttctcactgacagatcaaggaatcacacggtgatcggaacgctgaaggtcacggtcaaggttggggaggtcccgagtgttctctgatgctgctgggggatgcaaggtgggggcgacagcaaggtcatgatccacctgccctcagaaatttataatctgtttaagggcaaggggatgaacaagtccgaggtccataatcaagatgccc

SEQ ID NO: 148308 - DNA, 432 bp, Homo sapiens
  misc_feature (1)...(432): n = a,t,c or g
agctccagtcacaagctggaccaaccaaaggttggttcatgtccttttagtgagtctaccaagaccatttccctgtatatctcctctgaacagcaattccatctgcccaggccttcagagtcagatgactttattgaagacacagccgatatgctgtgtttcattcagtggatactctagtgccccaaagaatcaagagcaannnnnnnnnnnnnnnnnnnnnnnnnnnnnnnnnnnnnnnnnnnnnnnnnnnnnnnnnnnnnnnnnnnnnnnnnnnnnnnnnnnnnnnnnnnnnnnnnnnnnnnnnnnnnnnnnnnnnnnnnnnnnnnnnnnnnnnnnnnnnnnnnnnnnnnnnnnnnnnnnnnnnnnnnnnnnnnnnnnnnnnnnnnnnnnnnnnnnnnnnnnnnnnnnnnnnnnnnnnnnnnnnnnnnn

SEQ ID NO: 148309 - DNA, 429 bp, Homo sapiens
  misc_feature (1)...(429): n = a,t,c or g
agctccagtcacaagctggaccaaccaaaggttggttcatgtccttttagtgagtctaccaagaccatttccctgtatatctcctctgaacagcaattccatctgcccaggccttcagagtcagatgactttattgaagacacagccgatatgctgtgtttcattcagtggatactctagtgccccaaagaatcaagagcaannnnnnnnnnnnnnnnnnnnnnnnnnnnnnnnnnnnnnnnnnnnnnnnnnnnnnnnnnnnnnnnnnnnnnnnnnnnnnnnnnnnnnnnnnnnnnnnnnnnnnnnnnnnnnnnnnnnnnnnnnnnnnnnnnnnnnnnnnnnnnnnnnnnnnnnnnnnnnnnnnnnnnnnnnnnnnnnnnnnnnnnnnnnnnnnnnnnnnnnnnnnnnnnnnnnnnnnnnnnnnnnnnn

SEQ ID NO: 148310 - DNA, 445 bp, Homo sapiens
  misc_feature (1)...(445): n = a,t,c or g
nctttaaatttggattttggtatcttnggttttgtagttgactgcaagtgtgatgtgaccttacctttataagagcccacttgatggagtagatctgtcacattactaagatncgatatttcttttttttnccgagacgggagtcttntctgccactgtgcccggccaatacattattattaacttaaggctgtactttattaaggcttccttagtttttgttttgttttgttttttgagatggagtctcactctggtcgcccaggctggaatgcagtggcatgatctcagctcactgcaaccttctgcctcctgaggcaggagagttgcttgaacctggggggcggaggttcagtgagccactgcactccagcctgatgacagagcaagactcagtctcaaaaataaataaaaataataaaacctccataagtaatcctgaaaa

SEQ ID NO: 148311 - DNA, 4469 bp, Homo sapiens
agtattacattgtgaattttattttcaaatttgatcaataaagatgaaaataataaaattaagcagtcaaaagaagtagcaaaaacaagatagtcattcatatatacagaacatatagattcatttctagttgattcaatcctatttatgtatttaaaatacaaaataatggccatctggctagttccaacggtagagcatgagactcttaaaatacaaaatacatcttaatgtgtcaagaagaccacagttagcaccaggaaaggaactttactttagcttctgattacttttttatttttatttttactttattattattattattatttttgagatggagtctcactctgtcacccaggctggagtgcagtggcacaatctcagctcactgcaacctccacctcccaggttcaagcgattccccctgcctcagcctccccagtagctgggactctgatagatgcgtgccaccacacctgggctaattttttataatttttaggtagagatggggtttcaccatgttggccaggctggtctcaaactcctgacctcaggtgacccacccgcctcggccttccaaagtgctgggattacaggcataagccaccaagcccggccaagggagaattttttttcttttgagacggagtctcactctgtcacccaggctggagtgcagtgacatgatctcggctcactgcaacctccgcctctcgggttcaagtgattctcctgcctcagcttcctgagtagctgcgattacaggcccacaccaccgtgcccggctgattagtgtgtgtatatatatatatatatacacatatatatatatatacacatatacatatatatatatatatacacacacacatacatacatacatataaatacacatacacacatatgtatatgtatatatagttttttagtagagatggtgtttcaccatgttggtcaggctggcctcgaactcctaacctcgtgatctgcccgcctcggcctcccaaagtgctgggattacaggcgtgagcctccgtgcccggcctgagatttttttttcttttggatggaatacaatttccaagtgtctaggccgacacccctccaccctcctttgcctgtcattcaagtcaataccctggagaaaagaggctgtgggggaggccatgttcgattaggaggtttaagagtccatcaaagtgtcatatgtgttaggtgtgaaatggcgacactgggaattactgttaataaggggtggctgcagcacggtgattgttatgagaacatccccaccgccccacttttgtttgaagactttcgtactgaactacatgttgtttactttcaacaacgtatacactacagttgacaaaagttaatctcggtgataagaatatgcctgttaatttatctccactgtgctgaacggttaaaaaattgtttttcttcaataacaaaaggcttaacattttatttaaaaaaattagaatatcattatttcattattgtaatgggacgaatcctccctcctttctgccctggttggagagaaaggagtgcagcccacttgccctcactaccttcagcctcctcagcagcttctggcgcctccacattcagaggtttcagcttccccgccattttccaacgcagggcctgcgcgcgagcctcgcttgatgactggttaaaaaagaaaccacgtgagggtgaaaggcttttcagcacgcatgcgtgcaacccgcggttacgccagcggttaaatcaggagtcagctctgggcaggcgcagaacacactgcggccctgattgccagcacacatgctacaaccttgaggctgtaactccacaaacaagggcagaactagggtaatggccagttggggagtgagggtagtgtgcacacacacaaaaccctagggaggtctctcctgctttaggctgcttgtcttgtgcaggttgtcaaagtctgggacagacgtgcatgtgctatgtggtggtacacaatagttcgagtctgttttcgtttacaaatcctcatcaaagagttcatgagagagggttacttatctctgtttcacagatgagtaaaacgaggcttagaggctaagtgcatctcctatgtaaaaatgctggatttcagccactgtgtgcagtcaggtgctgtgtcctgggttccacaggtggacactgaaggccaccttctcattaatgttagcagcagccagcattgagggcgggtcatttctggcagggtaaagatgaaaaaagtacaagaagggcaaaggaatatccttgtgggtcttacttttaggccttttatgtagtttttttctttaaaataccctcaggccagtcccaagcatagcctggccctgaagtgccaattccagcacccccgtgggccaccctagacaccttggccagatctggacactcagggctgagattcaactaggaggcagaccacggaagcaagtttggaggggacagtccctgacagaggctagagcatcatccaagtggaggagatgagacagagggaagggagagggaggcctaaggatttccccagagggggaggtgcatgactgggcagggaaagcagcctgctcgcctggcggctgccaccatctctctcatcggtgggccctcagaccttgccccattgcttagggagacaatgactggccacagacacacccccacacacatttccagggtagacagaaggtaaaaaacaaaggtggttgctcccagcactgcctggtctgggagctccaactatcagagtccagtgaacaagccattatgggcagcttggtccgtagaggtggctggtggtgtggagtacttgggtgggtaacgaatgaagagccggtcctcctctttcttcacccagcgcaggagtttggtcactaccaagattgcacctgccttggtcaccagagggctgaggcaggtatagagctcgaatttggaggtcacccaggccagtagtgtctccttctcagccacgtggtaaatgaggcgcaggggtcgggaggtgctgtggagacgagcatgcaggcggtggtacaggtccgacagccgctgccgctcctcctctctgctgtagggggcctctagctcagggctggtaaactggggcagttggcggtggtggtcagggatgtccagcggcttatacaggaagtgccggaggcccggcgccccgacagcctgcacgctgtaggcaggagcactggctgatgaggcattagagaagctggcagcctccccaagggcacgcatggcaccaagggcatgcatcccatcttcgaccaggcgccggcaggcggccatggcatggaaggcttcacgttgggtgccaagcagcagcaggcagacaggcatagcatccaggcgggccacgtaggcgtagaaaaaaccatcagggttgaagcggggcaggcacacaggtgcccaagcctcacccgccgcaaaggctggtgcacccacccagtcgagcagcaactgcaggtcagctgggtccagccggcactcggccagcacattccgctcctgggctgctgttataagtcgaccgcctactgccagcactgacagcgccaggccaggcgctgtgcaacgtcggaggagcgcacctagtgcgtctcgcagcgggcgggcaaggggcacacagcgcacggcacccaggagcagggctcctgggtcctgctccatactgtccagaagtcggtccagtgtgcgctctgaaccagccagcaggcggcggaggtcatagttctgcttgtgtgcgaagatgcgggcgacacttgcacgtgtaagtgtgctcacgatctgtgcgtgcacagctagcagctccccccgcagctgggctgctgactgagaagtccgtgacatggccacgagcaacagtgggccctgttgtaggaacaccagcttgtggtcctcagcgtagatggcacggatggcatctcccgcactctgcacaaaggacaccagggcggtcattacacccatggtagccgacagcgcctccacactaccataccgcgagtagatgggcttgccagcctcactcagcacaaacacatgcttccgctggctgcgccactcctcatcactggggtccccgccctggcctccagagctactctcagggctacatgtgggactattctcaggggctgcaggactccagagccgagaggtgcttgacagggcctctgactggggcggtggtgatgggctgggtggctggtccttgtccttggatcctgtttcctccaggccctcgtcttcgggatccggcgggaccgcgtgaacccctccaccttctctagcttcctcactggggaactgcgtgtcctccaagtcctccgcgcccccgggggccggggcagcagtgtctcctccgacctccatctgcacatccctgttttaactccgaatctcaatt

SEQ ID NO: 148312 - DNA, 720 bp, Homo sapiens
tttttgagacggagtctctgtttcccaggctggagtgcagtggcacgatctcagctcactgcaacctccgcctctcaggttcaagcaatttctggctaattttttgtatttttagtagagatggggtttcaccatgttggccagactagtcttgaactcctgacctcaagtcatccacccacctcggccttccaaagtgctaggattacaggtgtgagccaccgcacctggtgaaacttcatattcttaactgccatggcaaaaaatactgaggcttttccagatatatggctagttgtctgatggaaaccgtggtggaaggtctcagtccccgtcactcttgggtgcttgcctggctgttttacccatcattagttcacgtgctgatggctctcttcagaacactggacaaaccctcttccagtggtcagttttcttacagtgtgcaacctgatttatgcccaaggcacagtgactcggacacccaggtttaggcttcccacctttcagcttcccttgttcaacccaagacccaggagggcaaccccatgtgggaggttagcttaaggttgcaaccaagacctgcaacttgtgggaggtccttcttcctctttccgctacctccgctttgtccctgttattaaaaactaaaaatgccatatccaaagctgttccagagaagtttggggacccatagctgcttttagtagttttctatgg

SEQ ID NO: 148313 - DNA, 405 bp, Homo sapiens
  misc_feature (1)...(405): n = a,t,c or g
ntatccaatgctttcaggcgccagcattatttcctcacatttgatattatctctgtgactggcacacatcagacatctattaactgtggtgatacagctatctctgtcaataagtggaaaacatcactggatcaccaagcatcgtgagtgggagagcaccagcttatgccttggagaacacgttgatgagcagcctcactctcaccctctaggtaccagtgactgggaacagggctggagtatgggtggtggtgagccacatacttcaccaatggcttgtgaaaatgattctcaaaagaagccatcccaggttcatgcaaacaacgtnnnnnnnnnnnnnnnnnnnnnnnnnnnnnnnnnnnnnnnnnnnnnnnnnnnnnnnnnnnnnnnnnnnnnncattttct

SEQ ID NO: 148314 - DNA, 581 bp, Homo sapiens
atttctagcaacttttattcaatctttccaaggccctcgccttcatggaacaacgcactgatagtgtcttaagaagttacagtaagcaggatcacatttaggagcaagcaggtgagggcagaggtgctggagtgaacgtcggctctttggctggtagccttacccactgagggagaggagctgaaacatgaaatggggatgcgtggtacgttgcagttcacctgggatttgatgaagagaagggccagcttgctctggctgactttaaacctcccgtgaaaagccgtgttggtgtacttgagtcattccaggtatatggcaagttttaataattcactggtctgccttgccttttttccccacagaacaatgtctcccttttgcagagctgtattgactttgttcaagaataactgatatgccttcactcagaagaaaagaaatgaatgtgaaagaaagccaagcatcacttgcacttaaatcattaccacggaagatatattagcttcaactttagtttaaaattatgtgaataaatattttgatttctacaaatcttaacatttaaaaaaaaaaaaaaa

SEQ ID NO: 148315 - DNA, 1420 bp, Homo sapiens
atggccgcggttcccgagttgctgcagcagcaggaggaggaccgcagcaagctgagatctgtatctgtggacctgaatgttgatccctcgcttcagattgacatacctgatgcgctcagtgagagagacaaagtcaaatttacagtgcacacaaagaccacactgcccacgtttcagagcccagagttttctgttacaaggcaacatgaagactttgtgtggctacatgacactcttattgaaacaacagactatgctgggcttattattccacctgctcctacgaagcccgactttgatggtcctcgagagaagatgcagaaactgggagaaggtgaagggtctatgaccaaagaagaatttgccaagatgaaacaagaactggaagctgagtatctcgctgtgtttaagaagactgtgtcctcccatgaagtctttcttcagcggctttcttctcaccctgttctcagtaaagatcgcaactttcatgttttcctggaatatgatcaggatctaagtgttaggcggaaaaatactaaagagatgtttggtggcttcttcaaaagtgtggtgaaaagtgctgatgaagtcctttttactggagttaaggaggtagatgacttctttgagcaagagaagaacttccttattaactattacaataggatcaaagattcttgtgtgaaagctgacaaaatgaccagatctcataaaaatgttgccgatgactatatccacaccgcagcctgcttacatagcctggctttagaagagcccacagtcatcataaagtacctattgaaggttgctgagctatttgaaaaactaaggaaagtagagggtcgagtttcatcagatgaagatttgaagctaacagagctcctccgatactaccatgctcaaccattgaagctgctaaggatctcttatacagacgcacccaaagcccctcattgactatgagaactcaaacaaagctctggataaggcccggttaaagagcaaagacgtcaagttggctgaggcacacccagcaggagtgctgcccagaaatttgaacaactttcccgaatctgcaaaagaagaactgataaatttcaaaccggaagagagtggcaagcatttagaaagaatctaattgaaatgtctgaactggaaataaaacatgccaggaacaatgtctcccttttgcagagctgtattgacttgttcgaagaataactggatattgccttcactcagaagaaaagaaatgaatgtggaaagaaagccaagcatcactttgcacttaaaatcattaccacgggaagatatattagcttcaactttagtttaaaattatccgaataaatattttgatttctaccaaatcttaacatttaaccatgttggtttaaaaatattattgcttgctacttgg

SEQ ID NO: 148316 - DNA, 1525 bp, Homo sapiens
  misc_feature (1)...(1525): n = a,t,c or g
atttacattcccagcaacggtgtagaagagttcacttttctctgcattgttgctaacactgatctttcatctatttgagaaaatgcattctagcaggtgtgaggtaatctcattgtggttttaatttgcatttccctaatggctagtgctgctgaacgttgtttgcatgaacctggtatgtcttcttttgagaagcattttcacaagccattggtgaagtatgtggctcaccaccacccatactccagccctgttcccagtcactggtacctagagggtgagagtgaggctgctcatcaacgtgttctccaagtcataagctgctgctctcccactcacgatgcttgggtgattcagtgatgttttccacttaaagacagtgataagctgtattcaccacagtttaatagatgttctgatgtgctcccagtcacagagataatacaaatgtgaggaaataatgccgggtgccctgaaagcattgggagccccatttgtaagaatgcccatttggtagttaaagtgaaccatgaaaattggtttaggtttttccttggtttccataaacattttttccttccctgtagaactgataaatttcaaacggaagagagtggcagcatttagaaagaatcctaattgaaatgtctgaactggaaataaaacatgcccaggaacaatgtctcccttttgcagagctgtattgacttggtcaagaataactgatatgccttcactcataagaaaagaaatgaatgtgaaagaaagcccagcatcacttgcacttaaatcattaccacggaagatatattagcttcaactttagtttaaaattatgtgaataaatattttgatttctacaaatcttaacatttaaccatgttggtttaaaaatattattgcttgcctacttggacataaataaattttccttgagcatataatgcatcagggcagaatccaaatactgggttctcccgtagttcgtctttagctcataagaaagggtgtaggacacattagccttctggaagcaagtagaagccatcacctggccccatgtccctacaaaaccccatgatttgtcaggggaggtgcccagttacagcaggtgattcagctaacttgaggtcggtaacagaccttcccattccctcactgaaggtgggggtttgtgtttttgttttgccccctgttactccactggtagtcatctggtgtttgtactataacaacagcaaaaaaattctcatttaatctttatatactctttgcacctccttttttttagtcggtgattataatatttgaggggagagaaatatctacagggatatatgggaaacaaaataatgtgtggccgcctttataaaagtggccagattctacattacggaaaagttttaaggccccctccctaatgggccgctggggggngtgaggggcggtgttgttgttatgtctttgggtgtttgtttttttttaaagccatataataaaataatccgtgccaccaaaaaaaaaa

SEQ ID NO: 148317 - DNA, 6073 bp, Homo sapiens
caggaaggaggctccgctggttccgctgggtcaggcgctgacgggaccgggctgcggcaatcgttagcgggtcatgtcggccgcccagggcgggggcagtgggggcagcgggggtcgggggacctgccaggccacagacctccaccagcacgaagtgagcatcgttgtgtggcagagggtacctttctctatatgtgtttggaggttataacccagattatgatgaatcgggagggcctgataatgaagactatcctctcttcagggaactctgggaggtatcattttgctacaggagtatgggcaccagatgggcacagatgggctacatgccccggggaattggcatctatgtcacttgtgctgcatggaaacaacctgttagtatttggagatacgggcatcccatttggagagagcaacggcaatgacgtccatgtgtgtaatgtgaagtataagagatgggctttgctcagctgtcgggggaagaaacccagtcgtatatatggacaggctatggccatcatcaatggctccctttatgtctttggaggtacaaccggctatatttacagcacagacctgcacaagttagatctcaataccagagagtggacacaacttaaaccaaacaacctatcctgtgatctaccagaagagagataccgacatgaaattgcacatgacgggcagaggatttacatcttgggagatggtacttcctggacagcatattccttaaacaagatccatgcatacaaccttgaaaccgaatgcctgggaggaaattgcaacaaaaccccatgaaaaaataggctttcctgcagcccgaaggtgtcacagttgtgttcaaataaaaaatgatgtatttatttgtgggggctataatggagaggtgatcctgggagatatctggaagttgaatctgcagactttccaatgggtgaagctcccagctaccatgccagagccagtttattttcactgtgcagctgttacaacagcttggttgcatgtacattcatgggaggagtggtgaacatccatggaaaacaaacggactggggtcattgtttaagatctgggctggtggtacctagcctgctggaactggcatggggagaagctgcttggggccttcccctaaccttgcaaacctcttcccgaacacaacttttgcacccttggattcacacagggactcatcgaacgcttgaaatgaggatttccggactgttccatgaatactggaaatgttaatttaaagagacccctttatttatgggcagtgtagaatgtgcctacaaagaggattggttacccctgatcaaggcccttatttagaaaatacatcagatgccctttctgtaaatttgttttttcagtttatggacatctcactttcccacgtgcttccttctttgcttctgttcctcctgacccattacatgcacatgtactcacatactccctcttccttctcgatggagttaagggaaagcctgaaagtaccttaataatgttattaatcaagacagattcctttttaaaggaattctgaatagttccatgtcatacaatattctagaaattaaaacatcatcaacataaagaaaaatgaaattaaaaaatttttacatctagcaacagcaacaaccacaaatttaggggaagctgagaaggctaaccttgggaatcttgcaggttatacttaaacctagatgtttaacttagtgttttcaagatgtgtctaactgagtagtagctgggtctgatggcagcagtgcttgccatcttgttgcacagataactcaaacctaccctttggctttgaaggaaggttaagcagcccagcaactcttggttagtgatttctttctcatcctcatggtgccagcagtggttagagttggtttgtcaaaagacttacgtgtgtgtcgtggtcgtgctctttgttgttgctcttagaaattatggcaccaagaatgtttcaaacggaaaaacttgtggtggccaaagttcttcattctggcagttttgaaactctcttatgcttattaatggttttaaatatctctttgacttcttcatggggaattgtagaccctaagtatgtggtgtaaatgccatgtaacatgaacacaagctcccgagggaggccagagaagagccaggcagagaaaacctgcatcctctgggcttgttaacttggcttccactcgggctgtggtctttggctatcatcttggccatttccttttgagaacttgtttcttttctaatctctgggccaaggtacctgccattttcctcaggcagttggtccttgatttttcccttagcttgttgccttcttttccgtctgctttaatgtgcatggtgctgtgaataattgtctagtaattggatacaaggtcttgggggtaaagccacaggtcatccttcctgaagaaccaagtatcatttaaaaactagcatgaggaaggaatgaaactgagtagcattcattttgtgtgtgtgaaattttagttctggtttgtttgatttgttttttttttaattctaaaaagaatgacataaattttcactcgctttgccatctggctgctaggggagctgagcaagaggctcaccatgcgcatgtgtaagccgcagttttactcaaggtgctgaaggcgtgcaaggggcagcgctggtcctcccggggccaactcacagcaggagactcgcatgggagagttggaacacatctttcctttaagggcctcttttttgacctagcttttaaagttattctttgtccttcatctcagaagggatctttttagcttatgtgtggatttaaaatgacctttgagctacggttaaaaagctaccatctggtgttcagttctgggaaagagaaaaccgtagcctccagacatgctcctgatttctaggccttatcataccatcccctctgtgatgggttgagttcatggagcctgtattctgggaagtcttataataaccacgcacctgtgaacgtgggtcctttctggggagtgaggaatgtgggagagaggcagaaaaaggagcagctcctctaggggcccatcctcccacatcttgccattaccagtctgtgtagcacttaacctcctgccaccactgccaggcttgctcctccgttctctcccagagcaagtcagtctgagcagctccattagtccaaaacagagctttgctgcatgacttcagcctggcctctggatatttggtggaaatatattctaaattgaacaagccaggctgtccaggggtggcaagagggattttttgacctgggatttatacagggaccaaagactgaatgctcagcctctgtgcttaagactttcatgggtccttaggatagaagtgagtctctagccctgcttacaccagagagctgaagagagatgtggtctggttccatccatacttgctgggcatcctttgtttaagccttctgagggcagtcttctttggaggtaggaccttgggagggcctgacatcgaagacccgttgtgttttatttttcataaaagtatatatccttggtctaaagtgtcttcttttaatataacactagtaaaaatgacatggtatgaccagcactgagtgctatagcaccacacatgtgtacatgttctggatgccaaattatactgtgtgtaaatgactaagtgcagataactagaaattagataggggtcatcaggcgtttcggtatacctataaccagcactcggaattcctgacactgtttacttgatttaggaaagtttatgcctgctgcttctctgcctctttgaggtactcccagccgtcttactacagtcctgtaaatttaagtgcaatatatagaaacatatggatatatacagattatatatagggtgtaacctataaagcaggtagacctacttttttggcaccttggggaagtgagctcattactttaggttcaaattatgcccaagaattttagatgtgatcagctggcttaaaccaactcatgttatggataagctggatttttcaagtccatgttttcttactccaattcttagagactcattgttccttaggtttgttagagttgagattttttttctccctgtcatctttgtactctctcatgtttgcatgtcttacattttgttgccggagaacaaggaagtccatctgtaaggagtttcctaaacggagaattaaaacctagtatttaacactaaccattctcctatgtatatactaatttatctgggaatgtaatactttattaaatgaagaaaatgatgctttcttcatttaatattttccacatcctggaaaaactataaactgacacagaatagattgaaatcttaactggggctaaacaaaaccctttccattggcagaatctccttttttcagggccataatgacatgatgtaaaaatttgctttaaaccattcatgcccttaaatagctagattttaaagcataataagcatattaacatttttaagcaaaagatacgttaacagtgacctttggttatccacagtagcaagagtaaagcacagatcattgaaatccatagataatcagtgaatcaactttcctaccaaacaatagattcatttacatttctttttcctccctatcctttcctgtaagcacctgtttttccatggaatgggggttaatgagtaggtaggataaggataagggaaccaatcagtaggagctgacaaccagtgaccatataagcagctgattgcctgtaattagtcaggctgaacaattagagttgaatgctgaaattaggaaccacaggtggtaatcctgagtagatgtaactcttcagcgtcatctcctgccctgagctccaggccatctctctaaccaccaaagaactcttagtacctacgggaaggaaaagctgtgtgcgacacagaggaaactccattatttgaacacatttctttggctcttgacaaatacttgcttttcctctaatcttgcaagagctatggctcttctattttccaatcacacagcttgggcatgtagggaaaggttgaatgatcctctaaggactgtgttgggtcttcgtattctgtaaaaacccattttttttttgtggtcttacagatgtttaggaaagtgggcacaggttactggaattgtctacctgccagcattctgatatagcaacaaaaagctatttcccctttattttttgtaattattttttatttttcctggcattgagctcctagggtggatgagggtttatggtccctctgatcataagctcccattcctaaaaactgggtcactgttagcctgaaattggttttggttcccccaaatgccttggaactcccagacgccacccgcaggccctggaggtaggcttcatagagttctaggacttccgtgtgcgttgccaccagatcctgcccagcaatggcctttcccttctaaggtcattagattcagccaaaagcgacctcttctctagtccggtgttacgaacagaagttctgagttgtgctacaaaagtagttccatctttttggtgtaataccccatgtttttaatttgaaaaaaaaaaaaaaaaaaaacaactttttataagttttttaagggccctgcttagtcagtgtacagggtggagtcagaggcagttttcagaaaaaaacaaaaaacaaaaaacaatttcaccaagcggtagtaattgttgttttactagttatacatttagaatataaaggaggcatcagaaaacacactctctaaagccacttccttgtgcacagagtctgcacagggagagcacaggcatctccctggaaaagcacctgccaatgacgaatttcatggaagaacctaggcaagaaaggaagcctctttctgagacacagtctctgagaggtgagcctagctttgctcttcctacagggtatgcttgggccatacacaatgctcgccttactttaaagctattttgccacagtcctgttaaatagtgtgggacgtccttttgcaagtctg

SEQ ID NO: 148318 - DNA, 950 bp, Homo sapiens
ttttttgatggagtctcgctctgtcaccaggctggagtgcagtagcacaatcacggctcactgcaatctctgcctcccggtttcaagtgattctgctgtctcagcctcccaagtagctgggactacaggcatgcgccaccacgcccagctaatttttgtatttttagtagagacggggtttcaccatgttggtcaggatggtctccatctcttgacattgtgatccacctgcctcggcctcccaaagtgctgggattacaggcatgagccactgcacccagccttgaatttttaattttatctctgatatacttcaattagtgtctggagacctaattatccctaaagatcatacattttctacctatgaattttgctgcatacagaaagtgccctttcctcaggaagttgctgtggtttcattttctttgggatggattcttatctaggaataacatagcagctctgcaaagggaccagtttttaaaaatgggaactttctaacattgaaaagtccccatttttgtgccaactatgattagtgagaggaagaaatcttattctatgggcatatgtatggaagggtgtaaagatcccttttgaaaggtttattcacattgtaggaacagcaaatgacatttttacagtatttttttgtaaaggcaaactattttgtgccttggaatttgggtatatgtgtattagtgaaacattgtaaaggtgaacttctacctctgtatcctaaatgtataccatccacttgtaaatgactataaactattatgtgattgcttttttttttagaatgtcttgtttaaatagtggccaatgtttaaggctgttaaaataagccaacttttactaattggggagttttataaatgactgattaaatttaaagaattaacttacatgcaattgtgtgattattagttatcagcaaggttgag

SEQ ID NO: 148319 - DNA, 472 bp, Homo sapiens
ttcaagcgtgcaatggatctggttcaagaggagtttctgcagagattagatttctcacaacacagctggctgccagcccgggccttggtggaagaggcccttgcccagcgattccaggtggacccaagtggagagattgtggaactggcgaaaggtgcatgtccctggaaggagcatctctaccacctggaatctgggctgtcccctccagtggccatcttctttgttatctacactgaccaggctggacagtggcgaatatagccggctgtcccctgccagagccatggcggggtcttcgggacgaggccctggaccaggtcagtgggatccctggctgcatcttcgtccatgcaagcggcttcattggcggtcaccgcacccgagagggtgccttgagcatggcccgtgccaccttggcccagcgctcattcctcccgcaaatctcctagtctaataaaaccatccctct

SEQ ID NO: 148320 - DNA, 925 bp, Homo sapiens
  misc_feature (1)...(925): n = a,t,c or g
tcgatgtccctannccncgcggtggaattcccgatatgaccatcaccagaggtctttcacagagaccatgagctccctgtcccctgggaagccgtggcagaccaagctgagcagtgcgggactcatctatctgcacttcggggcacaagctgctggcccagttgctgggcactagtgaagaggacagcatggtgggcaccctctatgacaagatgtatgagaactttgtggaggaggtggatgctgtgggacaatgggatctcccagtgggcagagggggagcctcgatatgcactgaccactaccctgagtgcacgagttgctcgacttaatcctacctgggaaccaccccgaccaagacactgaggcagggttcaagcgtgcaatggatttggttcaaaaagaagtttcttgcagagattagattttttaccaacacagctggctgccagcccggggccttggtggaaaaagccacttgccccaaagaattcccaggtggaacccaagtggaaaagattgtggaactggcgaaaaggtgccatgtcccctggaaggagcatctcttaccacctgggaatctggggctgtccccctccaagtggcccatcttctttgttatctacactgacccaggctggacagtggcgaatacagtgtgttgcccaaggagccccactcattcccaaagccgggctgcccctgccagagccatggcggggtcttcgggggacgaggccctggacgtgattcagtgggatccctggctgcatcttcgtccatgcaagcggcttcatttggcggtcaacgcgacccgagagggtgccttgagcatggcccgtgccaccttggcccagcggctcatacctcccacaaatctcctagtctaataaaaccttccatctcataaaaaaaaaaaaaaaaa

SEQ ID NO: 148321 - DNA, 450 bp, Homo sapiens
actgcagctcgacaggaatggtcaaagaaaacaattatcggggacatggggatagtgtggaccagctttgttggcatccaagtaatcctgacctatttgttacggcgtccggagataaaaccattcgcatctgggatgtgaggactacaaaatgcattgccactgtgaacactaaagctacccagaactgaagcctgtgcagtccatcaacgcccatccttccaactgcatctgtatcaagtttgaccccatggggaagtactttgccacaggaagtgcagatgctttggtcagcctctgggatgtggatgagttagtgtgtgttcggtgcttttccaggctggattggcctgtaagaaccctcagtttcagccatgatgggaaaatgctggcgtcagcatcggaagatcattttattgacattgctgaagtggagacaggggacaaact

SEQ ID NO: 148322 - DNA, 472 bp, Homo sapiens
gcggccgctccaacatcagattgtgagctcggcatggcggtcccggctgcagccatggggccctcggcgttgggccagagcggccccggctcgatggccccgtggtgctcagtgagcagcggcccgtcgcgctacgtgcttgggatgcaggagctgttccggggccacagcaagacgcgcgagttcctggcgcacagcgccaaggtgcactcggtgacctttattgatgccaagacacaccgttccaaagcagaagagcagttcaagttcgaggtcaacgaaatctcctggaacaatgacaataatatgttcttcctgacaaatggcaatggttgtatcaacatcctcagctacccagaactgaagcctgtgcagtccatcaacgcccatccttccaactgcatctgtatcaagtttgaccccatggggaagtactttgccacaggaagtgcggatgctttggtcagcctct

SEQ ID NO: 148323 - DNA, 1753 bp, Homo sapiens
ttttagaaggttagtgttggttcttttattcgattaaacaggaatacacatatgtctaccaaagaataggtaagggagaaataagaacactaaaaaaactcggaatcgttaagtgtgaagcatatttggagttaaaagaaccaaatattactaagtaagcagacgcgggcacgcgctgcataccgggatttgtagtcccttccggggcggggtacagcgcgcctgcgcagaggggccgtcgctcttccgggcgcatgcgtgcggcagcggcgccaggactgactgcgccgtggaggctgctgcagtgttgtgagttggaagctggggagctcggcatggcggtccccgctgcagccatggggccctcggcgttgggccagagcggccccggctcgatggccccgtggtgctcagtgagcagcggcccgtcgcgctacgtgcttgggatgcaggagctgttccggggccacagcaagacgcgcgagttcctggcgcacagcgccaagggtgcactcggtggcctggaagttgcgacgggcgtcgcctagcctcggggtccttcgacaagacggccagccgtcttcttgcttggagaaggacccggtttggtcaaaagaaaacaattatcgggggacatgggggatagtgtggaccagcttttgttggcatccaagtaatcctgaacctatttgttacggcgtcttggagataaaaccattcgcatctgggaatgtgaggactacaaaaatgcattgccacttgtgaacactaaaaggggagaacattaatatctgctggagtcctgattggcagaccattgctgtaggcaacaaggatgatgtggtgacctttatttgatgccaagacacaccgttccaaagcagaagagcagttcaagttccgaggtcaacgaaatctccttggaaccatgaccataatatgttcctcctgaccaaatggcaatggttgtatcaacatcctcagctacccagaactgaaggcctgtgcagtccatcaacgcccatccttgccaactggcatctgtaatcaagtttgaccccatggggaaagtactttgccacaggcaagttgcaagatgcttttggtcagcctctgggatgtgggatgagttagtgtgtgtttcggtgctttttccaggctggattgggcctgttaagaacccttcagtttcagccatgatgggaaaatgctggcgtcagcatcggaagatcattttattgacattgctgaagtggagacaggggacaaactatggggaggtacagtgtgagtctccgaccttcacaagtggcgtgggcaccccaaaaggcctctgctgggcatttgcctcgttgattgacaaagacgggcaaatatgacagcagccgggaagccggaactgtgaagctgtttgggcttcctaatgattcttgagaggaggttgtagggagaggaggccccggcagaggtcttccttcatgtggttagtttggtctgttctctcggagttggtgggcaccctaaatatttgtaagttggtataaattgtaaacgtctctggtcaggctgcgcatttcgttcttttgctttgtctgggtgcatggtagactttgtggcatttgatacaacttggacaatacctagtttggagggaggggaatggaagggcatggaagtttttttaaataattaaaaatatatacatataattttgagaattgagcatttaataaactgacttttgttattatgg

SEQ ID NO: 148324 - DNA, 799 bp, Homo sapiens
ctctgggatgtggagagttagtgtgtgtcggtgctttcaggctggattggcctgtagaacctcagtttcagcccatgatgggaaaatgctggcgtcagcatcggaagatcattttattgacattgctgaagtgaagacaggggacaaactatgggaggtacagtgtgagtctccgaccttcacagtggcgtggcaccccaaaaggcctctgctggcatttgcctgtgatgaccaaaagacggcaaatatgaccagcagccgggaagccggaactgtgaagcctgttggggcttcctaatgattcttgagaaggaggttgtaggggagaggaggcccccggccagaggtcttcccttccatgtggttaaggtttggtctggttctccccggaagttgggtgggcacccctaaaatatttgtaaagttggtataaattgtaaacgtctctgggtcaggctgcgcattttcgttctttttgctttgtctgtgtattaagctctttcccattctttggcccccagcaatgagttaacctcgcgctggaatctcccgtccgagtagttgacccccagcataccttggtcctctggaacctcctggtcttctcctggcttctggggtgcatggtagactttgtggcatttgatacaacttggacaatacctagtttggagggaggggaatggaagggcatggaagtttttttaaataattaaaaaaatatatatataatttctgagaaattgaggcaatttaataaactgacttttgctattatggaaaaaaaaaaaaaaaaaaa

SEQ ID NO: 148325 - DNA, 1068 bp, Homo sapiens
gagaagtacttttgctcttgttgccccggctggagtgcaatggcacgataaccgctcactgcaacctctgcttcccaggttcaagcaactctcctgcctcagcctcctgagtagctgggattacaggtgcccgccacccagcccggctaattttttttatttttagtagagacggggtttcgccatgctggccaggctggtctccaactcctgacctcaggtgatctgcccacctcagcctccaaaagtgctgggattacaggcatggggttgcagtaagccgagactgcaccattgcactgcagcctgggtgacaagagccaaactccatctcaaaaaaaaaaaattttttttttaccacttattccagttcaggggttgggggtggctggaagcctatctcagcagcttagggtgcaaggccggaaccagtcctggacaggacatccactgcagaaagcactcacacttacacacacagctccacacaccagtgaacctcacgtgcacagctttgggatgtgggaggaaatcaagagtacccagagaaaacccatgcagggatagggagaacgtgtaaactccacagacagttttttttctcaacattatcttgaaacaacattattcaaggacctgctgtaatctgtatatacatggactttctggctgaaacataaaagagagcaacttattctcaagaaactatattttatggtaaacaattctcaatgcttaaaaagttttacgttaagcttaattggggaagccactacacattttttaaaaatgtggttggtgtcctttccccagatactaaattgggggtttctttcctaaatcaattttaagagggggtatctttccccatctttccggggtagtcataactaaaacataacatgtaacatttccactgtacctgatcaagctcaaagtacacctacaaaactcaaataacagacctaaaagctgaaaactattcacgaccagaaatttgaaagttatgcaacaaagacatttataatatttataatattcctgtcaacttccattgtaagagagatc

SEQ ID NO: 148326 - DNA, 613 bp, Homo sapiens
gaggcctgcgagcactccggcgaggccaaggccttccaggactatagtgctgcagccgcccccagccctccccacgagcccaggggcatccgagcatgggcggcccaatgcagagggtgacgcctcctcgtggcatggccagcgtggggccccagagctatggaggtggcatgcgacccccacccaactccctcgccggcccaggcctgcctgccatgaacatgggcccaggagttcgtggcccgtgggccagccccagtggaaactcgatcccctactcctcctcatcccccggcagctacaccggacccccaggaggaggtgggccccctggaacacccatcatgcctagccctggagattccaccaactccagcgaaaacatgtacactatcatgaaccccatcgggcagggcgccggcagggctaatttcccgctcggccctggcccggagggccccatggccgccatgagcgcgatggagcctcaccacgtgaacggatccctgggctcgggcgacatggacgggttgccgaagagttcccccggcgccgtggccggcctgagcaacgccccgggcaccccgcgggacgacggcgagatggcggccgc

SEQ ID NO: 148327 - DNA, 555 bp, Homo sapiens
  misc_feature (1)...(555): n = a,t,c or g
gacgatgcctgccgtgcccgcctggggctcgggncggtgaggcccggggcgcggggtagctatggcgacggcaagcgcggcccgcggcgccgcctgacaggtgtgggccccggcggcggcggcgtggagcagcatgtacgccaaggggggcaagggttcggccgtgccctccgacagccaggcccgcgagaagttggcgctgtacgtttatgagtacctgctgcacatcggtgcccagaagtcagcccagaccttcctgtctgagatccgatgggagaagaacatcatgcctagccctggagattccaccaactccagcgaaaacatgtacactatcatgaaccccatcgggcagggcgccggcagggctaatttcccgctcggccctggcccggagggccccatggccgccatgagcgcgatggagcctcaccacgtgaacggatccctgggctcgggcgacatggacgggttgccgaagagttcccccggcgccgtggccggcctgagcaacgccccgggcaccccgcgggacgacggcgagatggcggccgc

SEQ ID NO: 148328 - DNA, 776 bp, Homo sapiens
  misc_feature (1)...(776): n = a,t,c or g
gcngagnccangnccttccagnactatagtgctgcagccgccncagccccggttatgnggagtatggccccaggtgacacaatgncngcaggctccatgcggcntggctctcccagccccttcatgtcaccgcgcttcncagngggcntncggccaccctgcggatgcganngtcagcctcccgcaggcctcctggctccccagcccctcctccctggcgccatggagccctccccacgagcccaggggcatccgagcatgggcggcncaatgcagagggtgacgcctcctcgtggcatggccagcgtggggccccagagctatggaggtggcatgcgacccccacccaactccctcgccggcccaggcctgcctgccatgaacatgggcccaggagttcgtggcccgtgggccagccccagtggaaactcgatcccctactcctcctcatcccccggcagctacaccggacccccaggaggaggtgggccccctggaacacccatcatgcctagccctggagattccaccaactccagcgaaaacatgtacactatcatgaaccccatcgggcagggcgccggcagggctaatttcccgctcggccctggcccggagggccccatggccgccatgagcgcgatggagcctcaccacgtgaacggatccctgggctcgggcgacatggacgggttgccgaagagttcccccggcgccgtggccggcctgagcaacgccccgggcaccccgcgggacgacggcgagatggcggccgc

SEQ ID NO: 148329 - DNA, 457 bp, Homo sapiens
acctcccgctcctatttcaccgtcccgatcccatccgcccccaccccgggacccgcgccccagggcggccttcccatgcatcgcccctcccccgttccctcctgtccccaccccatgtctgcccaggacccagccctgccctgtcccccattgtccctgggggcgggtcccagcctcttccggagctgaactcggcccctgcgcgctgccccctcctctctccgcagtactcgccagggatgaccatgagcgtgtgatggggcggcagccccgggcctctctgcgggcctaggcttctgcccagcgcccctgctcagggcgaggggctgaggtcacacctcgggcacctggactcctggccaatcaaggcttgcccagctgggaggccccacacgaaagactcttaccattttattaaaaacgcaaggacctcagagcggacgcgtgggtcgacccg

SEQ ID NO: 148330 - DNA, 2035 bp, Homo sapiens
atgtacgccaaggggggcaagggttcggccgtgccctccgacagccaggcccgcgagaacctcagcgccttccaagctgccacagagctcacctctcttgacaggttggcgctgtacgtttatgagtacctgctgcacatcggtgcccagaagtcagcccagaccttcctgtctgagatccgatgggagaagaacatcacgctgggggagccccctgggttcctgcactcctggtggtggtacgggctgggctgctgtggcgtcttctgggacctgtactgcgcggcgcctgacagaagagaggcctgcgagcactccggcgaggccaaggccttccaggactatgaaacgccggagcgcccagcccatcgccatggcaacgcgggccgggccggctcctcttcagggatgattgacgtaggggggtcttcagacccacagatcctcaggccgacaaccccagtgtgctcactgaccaatgccagctcgctgtcccatggggccggccacctgcagagaggagggggcacaccccagagtgctgcagccgcccccagccccgttatggggagtatggccccaggtgacacaatggccgcaggctccatggcggctggcttcttccagggcccccccggctcccagccgtccccccacaaccccaacgcccccatgatggggcctcacggtcagcccttcatgtcaccgcgcttcccagggggcccccggcccaccctgcgggatgcggagtcagcctcccgcagggcctccctgggttcccagcccctcctcgcctgggcgccatggagccctccccacgagcccaggggcatcccgagcatgggcggccaaatgcaagaggggtgacgcctcctcgtggcatgggccagcgtggggccccagagcctatggaggtggcatgcgacccccacccaactccctcacccgccccagggcatgcctgcccatgaacatgggccccaggaagttcgtgggcccgtgggcccagcccccagtcgaatactcgatcccctaattcctcctcatcccccggcagctacaccgggacccccaggaggaggtgggccccctggaacaccccatcatgcctagccctggagattcccaccaactccagcgaaaacatgtacactatcatgaaccccatcgggcagggcgccgacagggctaatttcccgtctcggccctggcccggagggccccatggccgcctatgagcgcgtatggagcctcaccacgtgaacggatccctgggctcgggcgacatggacgggtttgccgagagagttcccccaggcgccagtggccggcctgagcaacgccccgggcaaccccgcgggacgacggcgagatggcggccgccgggaccttccatgcacccagttcccagagcgaaaagctactcgcccagggatgaccatgagccgtgtgaattgggcggcagccccgggcgctctctgcgggcctaggcttctgcccaggcgcccctgcctcagggcgaaggggctgaaggtcacaccttcgggcaccctggactccctggccaatcaaggcttgcccatgctgggaggccccacacgaaagactcttaccattttattaaaaacgcaaggacctcgagagacgttcttttctgtatggacccttcctgccatttgtattttggtcccagagagaaaggctctttgggggggcccctcttccccaggacgtcaggggggtggggcccattaaataaattggaagctggttttggtttttggtagcttgtctcagattccctctttggccttctgccaccacactctccaccctgtggtctttgttccgtcccggcccccatctagccccacctttgagaactgggggcagagcgaggctccaggttctgggctctccctgggagttggggtgatgaccatgggcagaggggatgggactgaagctgggcgctcaagagtcggggaagtagagggaggcagagtcaggtcacaggctctcgacgaagaactgg

SEQ ID NO: 148331 - DNA, 1828 bp, Homo sapiens
gaattcgggattcgggtgaatgtagtgattgtgggaaaaccttcagctgtagctctgccctcattctgcatcggaggatccacacgggggagaaaccctatgaatgtaatgagtgtgggaagaccttcagctggagctccaccctcacccaccatcagagaatccacactggtgagaaaccctacgcctgcaatgaatgtgggaaggccttcagcaggagctcaacccttattcaccatcagagaatccacactggagaaaaaccctatgaatgtaatgaatgtgggaaagccttcagccagamctcacacctctatcagcaccagagaatcccacactggagagaagccctacgaatgtatggaatgtggaggaaagtttacctacaagttcaggccttattcagcatcaaagaatccacaccggggagaacccctatgaatgtagtgagtgtgggaaagccttcaggtacagctcggctcttgttcgccatcagagaattcacactggagagaagcctttgaatgggatcggcatgagcaaaagctccctcagagttacgaccgagttaaatatcagagagtccacgtgaaagagccacacacccattttcctcactttccctgagtctcaagagctcttgccttaccctataaatctcaacagcttaggatgtgtccctttcaactcagacttttcattttagagaatggggcagatggggcaaatccgttgaattttcccagaaatcacaccagccattagaaagcgtcaaggcaagtgggatgggcgtgctggggaatagaaagcagctctgggaccagttaccccatttaggaaaggagtttgcactaaactgtttttctcacagcagaggaacctttcccaaggtggggatggaagcacagttcggggacagaattccgatggattcccttagtttggagtccgcgttagtcaggcacagacagcagtgggaaaggacgctctgggtcctgttatttgctagggagggtaaagggaagactatttcaaaagctactgttccctagtccaagctttaaagttcgggtaaaaaaacaatgctgtttttgtttcatgatttcggttaaattaatggaaatttgggcaattgaggggattattttattgaggggtagaagagattcccagaatcatcatctgtgaatgaatggtgtccctttaagggctcttgggagcaggcccagacccatgtttccaagaagaaaccctggtgatattgccaagcaagacccccctgcccatccccccccagttgtcccggggctgaatgggcaaatctgtcccaaacagcttagtaaccggctgtgaagggagagggtcagaagcacttaggcgttgcccttctgattgctgtcctctcttgtcctcttcccactccaatgatgaaaatgattttctctaaatgcctgggtaaggatgctttcaagggagctcacttggcctgcttgccctgccctctcacctctgacacccagccccaggagccagaccactcctgcctccacctctgactcttcagcagctgaagattaatgcagagaaagagcaaagcccaaaagggagaaaaaaaaaaaacaaaaaaacaaaaaaacgaagcccagagaaggcaggctgtgcctgaggcctggtagcagagctcgttgctgggtgaggatggcactccccgagttttcccaaccgacgggatgaccttccattgtgttttcccaaccctgctcatcctgtagcataaatgaagtgcactattaaacagaatagtttttcagaaaaaaaaaaaaaaaaa

SEQ ID NO: 148332 - DNA, 3100 bp, Homo sapiens
  misc_feature (1)...(3100): n = a,t,c or g
actgtcngcctgcgaaaccgcnncggattgattgccctgaccgacgcgnncggacatgcggncggccacacgtgcggggttgatttttgatgactcctttgagcacgatgtatggcaggatgcctcatctttccggctgatattcatcgtggatgggtggcatccggaactgacaccacagcagagacgcagcccttccagcaatttagcatgaattcatgcaagcttgggaaactctggagagaggctgcctttctggttccatctccttgggggtgaggatagaatttcgaacaccaagagtcaattcccttgacttgcagcccgagtaattcaaagcctcctcctagggtcagaagacactaaagggaatatttgcctcgctgcaattcatttaggaaacaccctgctgtgtgtcatctcatgacagcactggtcttctgccagtatttaaggtgaacatttgatagcttctaccttaccagccaaagatattttttccacatagaataggtctaattcaatgtataatgagaacatatgtagaaactgtgaatggattgctttagtttgtaatttttctatgcagttatatttttctagtgtagctagactattttgtcatcatgtaccactacatttttgtttattttaatgacaagctgtataaatgctttacttctagctatttaatggtagcattactggggaactcagacttccctcttttaattcttcttccgtaaaagatactcatgaaaaaagcagttttattttcctaacaaaaaagaaagagctcactatgtcagtgtctatgaactgtacccatcccaactctcaaatcgtttggttttttttatcttgattgagatcctcttctcactatgctagtggtggagatattgacaaaatcctatttctttcaaagaggaacttttcacaccgaaaaaagagcatggaatgtattttatattgttataaaaatcccagatggcaaatttttttaatggccaattattagaggcttctgggggaaaaagtatnagtttcacgggaaataaaactatgttctttcagggttgggtggataggtggctgctagggtgtctggctcctggcggctttgccatccatgagggcaagggctggggacacagtgtctttgcctatggtagatccatgtgaatgtcaggaagccagctcttcagtcttgggagatgatttctgctacaattctgtaggaaaggattaaggatgggcagagttaaaaggtttacccaaggatgccagggatgtttttcttgggcgtaggaggtccagattactttcctttttgatgaaagagtttgaaagactgtccccatcttctctgggctttagaaatctctgcccattttaaacatcactgtgaaatagcaattattatcatctgtatttagttttaacattacccacaacatagaaataataggtaaaaatcgtcttgcctactcattccaaagatgatcaagtcattaatctaggcaaagtattcatgtatcagattttgtatattttgaatcaaagctaactaggaatgttaggatataaggaatgtaatgatattcatgcactggaattctaagccaatatgaaccaaaaatgctggcatggatgggcacatatagggtcacccaaagttcatttcacagggtaggaaaaaacttgtgctttcttttccatctaaaaacaaaaggagactttctttatctcatttaaagaacagctctttgaaattgaaattgaccctttttgcttggacccttagggagattagcttccagtagatgagtttgcaaaatacttttcctgttcttttgttttgctgggattgaaaacatccccactaaatccagatgaagaggccatgggaggaaaaatatccaaattaaattactaaaaatcgagaagagaaggccaaactcttgaaaaggtaaaaaggtgtttgtgaccttcagtatttattggaaccagggggaaataacctgacaaggggcaataccaattccaatggttccatggtaggtaacattcatggtcaccttggttgaatttgggttctcataatgtatattgccatacaccaataaattcaaactataaagtgtcatttttgagccatcattcttacattcatgtaatgaaattatggaagagagtaaaaactaggctcttaacttagtaaatataatatggtatttaaaatcaggtcgactacgagtaaggttctaagtattgccaattgaaaagctagaaatggtattactgttgcaaagtgttgtcaataattgactccaatagcattgtaaatacttgtatcccacaactattttaaacccaagcaataaaatggattttctaattcacttcaattctttatttctcttacctatctatgtcttggtacataagaaaagtgtttccatcactgcattggtagaattatttcagtgttattatttttgtgatttcgtatgtctacacaaaaatgaattagtttaatttatattgtgatacagttgtttgagaaatatttttaattctgtttcaactttatttctccaagtgtataatataaaaattacttctgttattgttctctaccaataggggaaaaaattaaaacattagatccattgagaaagagatgatgtaataaataattaagattagtaataatattatcaggggtgattatgaccaggtgaataatctctttcccttgaattatttagctaacaaattaactctcccaaatatttaaaataatgtaaaatcatattttactgcccattattaactaaaatatttttgtttgactttgagcaccaactggtaatactaataaatacccatgtcatgcagatggctgggcgaataagagatgtctaaaaatatgcactggtcttggaaaacatggcacaagtaaggatatcatatatgatgtctgtttattttatgtctgatttcttttgaatgagttagttggggactccatttctaaggagactaggtaaataaaatgacctttgacatttcaaaaaaaaaaaaaaaaaaaaaa

SEQ ID NO: 148333 - DNA, 4122 bp, Homo sapiens
cagaattcatgaggggtgggggacagggggaccggaattgtcttagcaccccaatgttatgacaaaactatgctactttagaaacgcagtctgtttttcaccaattgacataactactgatctgaagtaaccagtgccatcataagaaattactgcattaagaaaatccttgctgtgccctttgaaaagctgttcagaaatcatttacagtgatctttcatctcggtcgctgtagtgaaaccatttttagtggtggataaatttcaaaattctaaacaaattacccacttttatattggaaatctctaccagaactccctcttcattttttaaggcatacatttgcttgttttcaagatcaagaattctgagctagctttaagtagcaaactgatttatatgtgcaattataggatgcattaagatgaatgatagcctttacatattgaaaactttgcagacgtttttgtttggaaaatggccattgtatagtaaatgcaaattaattttgtaaaattatgttaaagagtatgttcagacactttctgccatggccaaaaaagtatgtatgaaaagtatgtgtgtatttggtttgtaaaaggatgccaatgttttacctgatatcttagtgacacttcagttatctatgcattctttagatcccgtggatttcggtaaacaggcagccatgttcacgatgccttctatgtcttaccatatttttaattaacctgttaaatacagcttaaaatatttttattttatttattctatttttactgaaatatactgcattattgtgttaatgtattatctttcctggatattatctcccagtgtatccagatctaagtaatctcagtgaactatacattgccctaaaaaagtggttttgtaaatgatttgtagtccacatttctaattgggatatgtagaaagaaaaggcaaaatgcttaaagttccttttattttttaaaagcagctagatagacacagactttgccacctcatacatctgctccttggcaacatcaaggggaacgacttagccaacatgcctatggcttaaaaactttcctttgcagactaaaagcactgcttgggtgctttcgttttttctaccctttcacaacatgtgtggatttcatctaaggagatattatacatgttacacatggccctttgttttccacctgggattacaagattcacttcataggctaattagggaccattgtttttttgtttcatctgtctttgtttgcatggaaggggacatttaggaccccttttccctttaaaaataaggttcttgggtggataaaactgtgggcactgctacttctttttaaatccactttatgaatttcaagatgggacacttgttaagatgaactcgaacacaaggccattgccctggaagcccccagagctttccctctgtttgtaatggcccgttccatgtccccaggcattgcaacacaaactcctcaagatttcaccacaacatgacaagcattttccttaactggatattaggcacaattttaactaataagccccttcgctctctagttggccaggcttaacctaatacacatctaacgtgtgtgccacacggccagtagaaagtttaacttcagcttcagggcaaagatacccactcacaccgtgtcaacgcaagcagtagttcctggcctccagagcagcttacttcccctgaaagaacgctttgttttcctttatgcccttttccctgttgaccacttttacacatttaaatgtaatttgttgtgagaataaatttagctgcataaaacgttcggctcatttatctgacatcttagtcacatatacaaggaatagaaatagaaactcggtgtctctagttatttttaaattattcttacctcagacttcttagaaatcactttagtaatggagcattttgctttgattagttactacatatttctgcctggtaagaactaggaagtaacttcaaattttgagtaatcaccctgtacttatttggtgatcaggaaggccagctggccttccggacatagaagcctatttagtcaccaactcgagtcttttgtaagcggtcttgctaggattgtgatattttagcacgaagaagtttatcacttcctttaagaacctgacatcaaagaataaagaatagaggtgtacacacactaaatccaaaatgaaaggtaactagagaaatcagttgaatctggtttagcttaactgttaggcgcaggaaggcagataaacagaatttaaagtatgtccccgctttttgttcatcttgcacttccacagtggtttctctctagtcagtaacaaaatttcattatggtttcaggcattatatggtggtaaataatttcagattaaaaatgtgtttgctattggagtatctgaatactagtaatttcattatttagaattttgcagcacttttatctcaagaagaagtccaagaatgtaaaatgccaaatgaaacatgtcagtggaatcaatattctccttcattagaattccctcatattgctttttttttttttcttcagacagaggagtcttactctggagtgcagtggtgtaatttcagctcaccacaacctccacctcccaagttcaagcaattctcgcctcagcctcctgagtagctgggattacaggcatgcaccgccacgcctggccaatttgtatatttttagtagagacagggtttcgccacgttggccaggctggtctcgaactcctgacctcaggtgatccgcccgccccaacctcccaaagtatgtgagccaccacgtccggcctcatattgcttttatccaaaattcttttcccttttcactctaccaaagtatttaaataatcctgtccttcatagaagattctcaaagaagaaaactgcagtgtaattaatgaatggtttaattcagaatcttcatatacttctaaagagaaaaataatttagtgccaaatgcatgttaggagataatcaatgtaagtggcaacaaattgtgacttcacatgctactgtagagatcagaaaattatcctaaactattccataacaatgagacaacatcacagaaaatacacttgaaaataaaaatctcaagaccagctacttctggacaatggaatacttttcagtctggtatggtggagggcccgaaaaggataagggattcttatgatacacaatgggattctttactgaacaatatgttaaattaagctgcaccgccttccttgaggcatggactaccctaaccaaccagatagaaatctgggtgggataagaggatgagccacacgctataattttagggcaaggagatagtgtttgattttcaaaatcagcaaaataagctgagcactttatatctttctgtacaagagtgataacatgaagaattcttcttcagggatttaaaatacaataagcctggttcaactataaaaagtcttgtttcctttcttcattgacacttttttttttttttttttttgaggcaaggtctcactctgcttcccaggctggagtgcagtggggcaatattggctcactgcaacctgcacctcctggactcaagagatcctcgtacctcagcctcctaagtagctgggactacaggcgtgtcccaccacacccagctaatttttgtattttttgtagagatggggttttggggtttcgccatgttgtccaggctcgtctggaactccggtgctcaagtggcgtgcccacctcagcctcccaaactgctgagattacagatgtggagccactgcacccagcccacttgacacgttttactgataaatgtaaatctaagctaaaataaaaataatgtattaccgctataatacaattcaccattctcttttctcacttcaagtaagaaagtaaaaatagaatatcagagctgaagtagacctaagtattcatcttgaagaagataatattctaaaaatcatgccacctgaattgagcatttaggaatttatgtaacatttctatacaactgaattgcaaaaataaaactttaaattcaaactttaaaaaaaaaaaaaaaaaaaaaaaaaaaaaa

SEQ ID NO: 148334 - DNA, 494 bp, Homo sapiens
  misc_feature (1)...(494): n = a,t,c or g
ctcttctccttctcctcctcatcctcctgcttctcctccctcatccccttctccctccagcatcccctcctcctccttctcttcctcttccttctcctgacttcccccctctatctccttgttcttctctttcccctttctcttctttttctcctcctcccagtcccccttctcctcctttctctcgggggccttctccatctgacaacttccattgatcattccttggggtctcatagcaaaaattcagaaacagtgtgatgcagtagttggggatgctggcctgggctcaaatcccagctccatcccttattttccatgtgaactttctatgcttccttttccctactggttaaaaaaaaaggaggggggggcacaatagtgtctatctcacagacctctttaaataattaaatgagatgatatataagacatttagaatagtacctagtggataataaattgtccataaatgcgagtttttattattntan

SEQ ID NO: 148335 - DNA, 598 bp, Homo sapiens
gcggccgcctactactactactaaattagcggccggtcgactttttctcttttttcgagacagggtctctctgctctgtcacccaggctggagtggcagtgttgcaatctcggcccactgcaacctccgcctcccaggttcaagtaactgggactacaggtgcgtgacaccacacccggctaattttgtattttcagcagagatgggatttcaccatgttggccaggctggtttcgaagtcctgacctcaagtaatccgcctgcctcggcctccacaagtgctcggattacaggcatgagcaaccgcacccggacacctgtttaattttcatccataaatgtgttataaatatagatgtggatctctggccgggcgtggtggctcacgctggtaatctcagcaccttgggacggctgagatggggtggatcacccgaggtgaggagttcaagaccagcctggactgaaagtgagaggcttctttttttttgaataatctttcggctttggcttttagctttcgccttcgttgtttgaacttgggcatgattttagtctaagagccgggggagtcgatggagtccggctcgtggccgaa

SEQ ID NO: 148336 - DNA, 1573 bp, Homo sapiens
cagtgattattccctttatttttacataatgtaaatgtagctagcaggtttaaaaaaaaaaacttttactagaagctgatatatatctcttaacgtcactacccatttaatttttttttttttttttttgagacagggtctcttgctctgtcacccaggctggagtggcagtgttgcaatctcggctcactgcaacctctgcctcccaggttcaagtaactgggactacaggtgcgtgacaccacacctggctaattttgtatttttagtagagatgggatttcacctgcctcagcctcccaaagtgctgggattacaggcgtgagccactgcacccagctgggtgtttttatctgtatttgttatggatcatctcatggagtgaggcagagttggcatcagttttgttcatcaaagctgcttgtaaaaagtggcagagttggagttgggcttctagggtgagccagctgaaactttctccttaaggcctgcgtcatcactggagtcagacctgttcctgtttccatattttccttattggtaagaggggttccacctgggctcctctctacatcgacttttctaagcagtttccgcagatccatctgactttttccaggagtgattaagacgtgtgtaactcgagtcgataacacttttggaggtaggtttcaggggtaacatgctggcaagtcagagacggtaactaaggggatcccgtgcttttggcgatggtataaagctccttctttcatctaaactctggggcttccctttattttacaggacagcagaacctttaacctgttattttgcatgggtccatctttttttaatggtccagcctgaagtgctttagcgagactgggttttctgagcaacacaggtgctacgtggtggtggaggaggtggcagaggtggaggtggaggaggaggaggaaaatggctggctggctgtggcagtgtgggaggaagcacagctttggagtctccaggggtgatcagaacgcaggcaggcacatttgtaagtttaccacttcatgtgacatgtttgaccacagcttggacaggaagaactttctgagatggtcttcgagtgcttctctggagcttgcataatttactttccaaaatgcaaaactgttgttttacactgtaaagttctcggtggcagatacgagatggaaagatggtgtctttcaatacttctaaactctgggttatgcagttctggcaccagctgtatatagaccatactctatttgtccaaagttttattgcatctctgatgttaggaaaattgaagttccagggatgatgttagccagcttctgctttgagatatatctattgaagaaataccgactctttctggtgagggtggtggaggatggaggtgtaattagcttggactgaaagtgagaggcttctttttttttgaataatctttcggctttggcttttagctttcgtcttcgttgtttgaacttgggcatgattttagtctaagagccgggggagtcgatggagtccgggctgtggcctcacgaaatcgtcgacccgggaattgcga

SEQ ID NO: 148337 - DNA, 531 bp, Homo sapiens
tttttttttttttttgagacagagtctcactccattgtgcaggctggagtgcagtggcgtgatctcagctcactgcaacctccacctcccaggttcaagcgattctcctccctcagcctcccgagtagctgggattacaggcacgtgccaccgcgcccggctaagttttgcatttttagtagagatggggtttcaccacgttggccaggctggtcttgaactcctgaccccaggtgatccaccctcctcagcctcccaaagtgctgggatgacaggcgtgacacactgtgcctggccaagatgccttatgttctaggggtgtcaagagagcgacttcctccgcctcgtccccccttcctgggggaagcagttggaatagagcagggagcaggagttgaaattccagaggcttgactcaagtgcatgctagggacggcaatcttctctctctcctgagcaagacaatcagatccacgcggcccgactgcaagacaggaggcccgctctgcctacagccaacactgtctgaca

SEQ ID NO: 148338 - DNA, 2438 bp, Homo sapiens
  misc_feature (1)...(2438): n = a,t,c or g
agcggccgcagaccctgaagggacaccaggagaagattcggcagcggcagtccatcctgcctcctccccagggcccggcgcccatccccttccagcaccgcggcggggattccccggaggccaagaatcgcgtgggcccgcaggtgccactcagcgagccaggtttccgccgtcgggagtcgcaggaggagccgcgggccgtgctggctcagaagatagagaaggagacgcaaatcctcaactgcgccctggacgacatcgagtggtttgtggcccggctgcagaaggcagccgaggctttcaagcagctgaaccagcggaaaaaggggaagaagaagggcaagaaggcgccagcagagggcgtcctcacactgcgggcacggccccccctctgagggcgagttcattcgactgcttccagaaaatcaagctggcgattaacttgctggcaaagctgcagaagcacatccagaacccccagcgtcgcgtacgtcgtgcacttcctcttcgggcctctggacctgatcgtcaacacctgcagtggcccagacatcgcacgctccgtgtcctgcccactgttctcccgagatgccgtggacttcctgcgcggccacctggtccctaaggagatgtcgctgtgggagtcactgggagagagctggatgcggccccgttccgagtggccgcgggagccacaggtgcccctctacgtgcccaagttccacagcggctgggagcctcctgtggatgtgctgcaggaggccccctgggaggtggaggggctggcgtctgcccccatcgaggaggtgagtccagtgagccgacagtccataagaaactcccagaagcacagccccacttcagagcccacccccccgggggatgcccgtaccaccagtcagctccccacatactcacaaggggctaccagccaacaccagccatggccaagtacgtcaagatcctgtatgacttcacagcccgaaatgccaacgagctatcggtgctcaaggatgaggtcctagaggtgctggaggacggccggcagtggtggaagctgcgcagccgcagcggccaggcggggtacgtgcccgtgcaacatcctaggcgaggcgcgaccggaggacgccggcgccccgttcgagcaggccggtcagaagtacttgggaacaccgcagcccgacccacaagctacccccaagcttcccgggggaacaaagacgagctcatgcagcacatggacgaggtcaacgacgagctcatccggaaaatcagcaacatcaagggcgcagccacagaggcacttccgcgtggagcgcagccagcccgtgagccagccgctcacctacgagtcgggttccggacgaggtccgcgccttgcttggaagccaaagccttcagcccgcggatcgtggagaacctgggcatcctgaccgggccgcagctcttctccctcaacaaggaggagctgaagaaagtgtgcggcgaggagggcttccgcgtgtacagccagctcaccatgcagaaaggccttcctggagaagcagcaaagtgggtcggagctggaagaactcatgaacaagtttcattccatgaatcaaaggaggggggaggaccagctaggcccagctgccttgggctggggcctgcggaggggaagcccacccacaatgcatggagtattatttttatatgtgtatgtattttgtatcaagtgacacggagggggtgtggtgctggctagaggtccctgcccctgtctggaggcacaacgcccatccttaggccaaacagtacccaaggcctcagcccacaccaagactaatctcagccaaacctgctgcttggtggtgccagccccttggtggtgccagccccttgtccaccttcccctgtctggaggcacaacgcccatccttaggccaaacagtacccaaggcctctttctctggcctcccctgtgcacctggggggtcctggccccctgcgatgctcccccatccccacccatttctacatccatccacaccccagggtgagctgggagctccagggctnggccagggttgaacctcgcacacacggcagagtttttgcttccctgagggggggcccgggagggtttccagcaggagggccgttngggtgccattttgggggggaaatttggggggaacgaccaacacacttcacctgcaagggccgacaacgccaggggacaccgtgccggcttcagacactctccagcgcccactcttacaggcccaggactggagctttctctggccaagtttcaggcccaatgatccccgcatggtgttgggggtgctggtgtgtcttggtgcctggacttgagtctcaccctacagatgagaggtggctgaggcaccagggctaagcaattaaaccagttaagtctcccaggaaaaaaaaaaaaa

SEQ ID NO: 148339 - DNA, 489 bp, Homo sapiens
aaccaattttcttcaggggaaaaaaatatcttcttggcaagttttgttcatgaaacatatgtccctcctgcattctctgatgacaagttcattttccataaggatctgtgccaagctcagggtgtagcgctgcaaacgatgaagcaagagtttctcattaaccttgtgaagcaaaagccacaaataacagaggaacaacttgaggctgtcattgcagatttctcaggcctgttggagaaatgctgccaaggccaggaacaggaagtctgctttgctgaagagggacaaaaactgatttcaaaaactcgtgctgctttgggagtttaaattacttcaggggaagagaagacaaaacgagtctttcattcggtgtgaacttttctctttaattttaactgatttaacactttttgtgaattaatgaaatgataaagacttttatgtgagatttccttatcacagaaataaaatatctccaaatgtttcctt

SEQ ID NO: 148340 - DNA, 583 bp, Homo sapiens
atggataaactcctggaaacatacagtctccaaagactgagccaggaagaaattgaatccctgaacagaacaataatgagcttcaaaactaaatcagtaataaataccataccaaccaaaaagagcccaggaccagacagactcacagccaatttctaccagatgtgcaaagaagagctggctgacattattatcggacacttatgtatcagacatgaaatgactccagtaaaccctggtgttggccagtgctgcacttcttcatatgccaacaggaggccatgcttcagcagcttggtggtggatgaaacatatgtccctcctgcattctctgatgacaagttcattttccataaggatctgtgccaagctcagggtgtagcgctgcaaacaatgaagcaagagtttctcattaaccttgtgaagcaaaagccacaaataacagaggaacaacttgaggctgtcattgcagatttctcaggcctgttggagaaatgctgccaaggccaggaaccaggaagtctgctttgctgaagagggacaaaaactgatttcaaaaactcgtgctgctttgggagtttaa

SEQ ID NO: 148341 - DNA, 2130 bp, Homo sapiens
tccatattgtgcttccaccactgccaataacaaaataactagcaaccatgaagtgggtggaatcaatttttttaattttcctactaaattttactgaatccagaacactgcatagaaatgaatatggaatagcttccatattggattcttaccaatgtactgcagagataagtttagctgacctggctaccatattttttgcccagtttgttcaagaagccacttacaaggaagtaagcaaaatggtgaaagatgcattgactgcaattgagaaacccactggagatgaacagtcttcagggtgtttagaaaaccagctacctgcctttctggaagaactttgccatgagaaagaaattttggagaagtacggacattcagactgctgcagccaaagtgaagagggaagacataactgttttcttgcacacaaaaagcccactccagcatcgatcccacttttccaagttccagaacctgtcacaagctgtgaagcatatgaagaagacagggagacattcatgaacaaattcatttatgagatagcaagaaggcatcccttcctgtatgcacctacaattcttctttgggctgctcgctatgacaaaataattccatcttgctgcaaagctgaaaatgcagttgaatgcttccaaacaaaggcagcaacagttacaaaagaattaagagaaagcagcttgttaaatcaacatgcatgtgcagtaatgaaaaattttgggacccgaactttccaagccataactgttactaaactgagtcagaagtttaccaaagttaattttactgaaatccagaaactagtcctggatgtggcccatgtacatgagcactgttgcagaggagatgtgctggattgtctgcaggatggggaaaaaatcatgtcctacatatgttctcaacaagacactctgtcaaacaaaataacagaatgctgcaaactgaccacgctggaacgtggtcaatgtataattcatgcagaaaatgatgaaaaacctgaaggtctatctccaaatctaaacaggtttttaggagatagagattttaaccaattttcttcaggggaaaaaaatatcttcttggcaagttttgttcatgaatattcaagaagacatcctcagcttgctgtctcagtaattctaagagttgctaaaggataccaggagttattggagaagtgtttccagactgaaaaccctcttgaatgccaagataaaggagaagaagaattacagaaatacatcagggaggagccagccatgggcaaagggaagctccggcttctccaaaaaataaggagaatattacttacaaactggctcttctctttccttacagcagtgaaggcccccccagctgacctcgtcggagctgatggccatcaccagaaaaatggcagccacagcagccacttgttgccaactcagtgaggacaaactattggccctgtggcgagggagcggctgacattattatccggacacttatgtatcagacatgaaatgactccaggtaaacccctggtgtttggccaagtgcctgcacctccctccatatgccccaacaggaggccccatgcctccagcacctgggtggtggatggaaacatatggtcccctccctgcatttctctgatgaccaagttccatttttccccataaagggatcctggtggcccaagcctccaggggtggtaagcgcttgccaaaccgatgaaagccaagaggtttccctcattaacccttgtgaaagcaaaaggcccacaaatacccggggggaacaactctgaggctgtcattgccagatttcctcaggcctggttggagaaatggctgccaaggccccaggaacaggaagtctgctttgctcaagagggcacaaaaactgatttcaaaaactcgtgctgctttgggagtttaaattacttcgaggggaagagaagacaaaaccgagtctttcattccggtgttgaacttttctctttaattttaactgatttaacactttctgtgaattaatgaaatgataaagactctctatgtcgcagatttccttatcacacgaaataaaatatctcccaaatgttaaaaaaaaaaaaaaaaaaaaaagcgg

SEQ ID NO: 148342 - DNA, 457 bp, Homo sapiens
ttttgattaaagaacaggtttattggtgacctgagggagccaaggtctcctttgtgaccctcactcccaggtggtatcaggctgcaaggccctctatgggtagaaaagccaatcacatgatccatgggcattcctggcaagaggtcagatctctctactcctaattcgaaaacttccaaatcctgatttcagagtcaacagcaaggtcagaggctagagtcctgatgggcatggagctcaggaggctggcgagttgctcagcaacgtctgtggggctgcgcacatggaagtagaggccaggaagggaatgccatgagggaagcgcttgggatccggcatcaggcggccactggcatcgcgaccaccgatccagcagtcatcaatgttgaggtatgtgtagcccatgtcccgccatccatcctgtgccatccggtcagccatctccatgaagagctgt

SEQ ID NO: 148343 - DNA, 2209 bp, Homo sapiens
taagccagtggctgcctttttctgagcccgggccggggccgaaggcgcccgtaggccctcgggactcccagcactgcagagggtgtgaggtctgacatccaagacacgttgtttcgtatttctgaaggaagaactcaagctccgggaagtgatggctggggatggggcgggcaacttggggaccgagtgtacgatccacgcctaaggttgagggcggccgagctagccaggcagccgtgaccccagtgcttttcagacgtttcttagcttccagagcccaacacatacagctgatacacgcagaccagatctggtcaggtcctcggaagctgagtccagagcgatgctgctgaagacagtgctcttgctgggacatgtggcccaggtgctgatgctggacaatgggctcctgcagacaccacccatgggctggctggcctgggaacgcttccgctgcaacattaactgtgatgaggacccaaagaactgcataagtgaacagctcttcatggagatggctgaccggatggcacaggatggatggcgggacatgggctacacatacctcaacattgatgactgctggatcggtggtcgcgatgccagtggccgcctgatgccagatcccaagcgcttccctcatggcattcctttcctggctgactacgttcactccctgggcctgaagttgggtatctacgcggacatgggcaacttcacctgcatgggttacccaggcaccacactggacaaggtggtccaggatgctcagaccttcgccgagtggaaggtagacatgctcaagctggatggctgcttctccacccccgaggaggcggcccaggggtaccccaagatggctgctggcctgaatgccacaggccgccccatcgccttctcctgcagctggccagcctatgaaggcggcctccccccaagggtgaactacagtctgcaggcggacatctgcaacctctggcgtaactacgatgacatccaggactcctggcggagcgtgctctccatcctgaattggttcgtggagcaccaggacatactgcagccagtggccggccctgggcactggaatgaccctgacatgctgctcattgggaactttggtctcagcttagagcaatcccgggcccagatggccctgtggacggtgctggcagcccccctcttgatgtccacagacctgcgtaccatctccgcccagaacatggacattctgcagaatccactcatgatcaaaatcaaccaggatcccttaggcatccagggacgcaggattcacaagggatcctggatgcctaagggatcctgcgtccctggatgcctaagggatcctgggacgcaggattcacaaggaaaaatctctcatcgaagtgtacatgcggcctctgtccaacaaggctagcgccttagtcttcttcagctgcaggaccgatatgccttatcgctaccactcctcccttggccagctgaacttcaccgggttctgtaatatatgaggcccaggacgtctaactcagttgacatcatcagtggcctccgagatgaaacccaacttcacagtgatcatcaaccctttcagggttagtgatgtggtacctgtatcccatcaagaacctggagatgtcccagcagtgaggagctgggacatgtgacaggctgtggtggcaccactgagcctagaccatggagccttggcatgcccagggcaagtggggaggttctctgctccccaggcctgctcgggtgactgacccccatcattaccccaaaagtgcaaatctcaagggccccaggttcttatgcccctgttcccaaggcgtaaacccctcttggaaaacttccttttggggcaaattttccctggtggccttccctggccctcctaacttcccatgtgcgcagccccccacaggacgttgctgaagcaactcgcccagcctccctgagctcccatgccccatcaggactcctagcctctgaccttgctgttgactctgaaatcaggatttggaagttttcgaattaggagtagagagatctgacctcttgccaggaatgcccatggatcatgtgattggcttttctacccatagagagccttgcagcctgataccacctgggagtgagggtcacaaaggagaccttggctccctcaggtcaccaataaacctgttctttaatcaaaaaaaaa

SEQ ID NO: 148344 - DNA, 4253 bp, Homo sapiens
ctgctcattgggaactttggtctcagcttagagcaatcccgggcccagatggccctgtggacggtgctggcagcccccctcttgatgtccacagacctgcgtaccatctccgcccagaacatggacattctgcagaatccactcatgatcaaaatcaaccaggatcccttaggcatccagggacgcaggattcacaaggtactagggtgtggagggaaggaaggggagggctgaggaactgggttctcctgagagaaaggctgccagctccctgggggcaacacctggcgaggtacaggagtcgcccagtccccaaccagggctaccccttctggttgcttatggttgaggactctgatgggagctgctccaactgtcctcctcttgctgggtgagagcagggctgagcaggacagctcaagggagtcggggatgagaggtgtcagccacataagtgcacatagcaagggtgaggcacagagcttctatacacccgtgatggcctgcagagagcttggacttccctccagagcaggaggagctggtttgtttgtttttgagacagggtctcactctgtcacccaggctggagtgcagtggcacaatttcgactcactgcaatctctacctgccaggttcaagcaattctcgtgcctcagcctcctgagtagctggcactacaggcgcctgcaccacacccagctaatttttgtatttttagtagagacaccatgttggccaggcttgtctcgaactcctggcctcaggtgatccacccgtatcagcctcccaaagtgctgggattacaggcatgagcaccgcactcggccaggagaagctgttatagccaaggaatactacgactactggtggctgctatttattgagtacctaccatgtgctgggagttttagataatttttctcagcaaggtagttatcttgccattttacaaatgagaaaaatgaaacttcgagagtctgagtaactttatcccaaggctacacagttggtacaaacaagactggacttcagtgtcacctcaaagcctttttttttttttttttttttgagatggagtctcacgctgtagcccaggctggagtgcagtggcaccatctcagctcactgcaacctctggctcccaggttcaagcgattttcctgcctcagcctcccaggtagctgggattacaggtgtgcgccaccacacccggctaattttttttgtatttttttcagtagagacagggtttcaccatgttggccaggctactctcaaaactcctgacgtcagctgatccactgcctcggcctcacaaagtaatgggattacagcatgagccactgtgcctgtctgcctttgctctttaccaaatcctggattctggtaaaaagaaacctacagaactatggaaggcacctatagaactggtgatgcccagaggaagtaacaattccctgccagaggggctgatggtggagctgggcctggaaaaccttctggaggatgggagttcacatccagctccactctccaccctcctggaacagagttcactgttcccactggacagcaccctccaggccagcactggcagctgtttggggccagcactcatacgctgtactgttgttgcgcttccctgtttctgcgtttatccctcccgttgtcctatgagcttctggggcagggctcatgcagcacttgtctcagtgtgctagcataggggccgggctcagagtaggtgttgatgagtatctgctgagtcagggaaggtgggcagatagggttagataagctggggtgctggaggcccgtgcgatcctccctaaacctgtgtgacatggagctgtgaactgggggacccagaactcagggagggccagggaggcaatgctaggtcctgtctgagcaagggaccccagccagtagccaccttctgtgcccaggaaaaatctctcatcgaagtgtacatgcggcctctgtccaacaaggctagcgccttagtcttcttcagctgcaggaccgaattatgccttatcgctaccacttcctgccttggccagctgaacttcaccgggtctgtgatatatgaggcccaggacgtcttactcaggtgacatcatcagtggcctccgagatgaaaccaacttcacagtgatccatcaacccttcaggggtacgtgatgtggtacctgtattcccattcaaggaacctggggagatgttcccaggcagttgagggagctggggacattgttggacaggctgtggtggcaccactggagcctagaccatggagccttggtcatgcccagggccaattggggaggttctctgctccccaggcctgctcggtgactgaccccatcatatcccaaagtgcaatctcacggccaggttctatgccctgttccaagcgtaaaccctctttggaaacttctttttgggggcaattttcctggggcctttcctggcctctacttccaatgtgcgcgcccccccagacgtttgttgagcaactcgccagcctcctgagctccatgcccatcaggactctagcctctgaccttgctgttgactctgaaatcaggatttggaagtttttcgaattaggagtagagagatctgacctcttgccaggaatgcccatggatcatgtgattggcttttctacccatagagggccttgcagcttgataccttcctgggagtgagggtcacaaaggagaccttggctccctcaggtcaccaataaacctgttctttaatcaagtagttgtaatatggacctggggtacgtttagttagggactctggtggcactacacggggtgctggattcaaatctcacctctatggatgatgtctggcatcgtctggcccctccttttccaaagtgaccagaagattgtacttcctagagatgccagacttgcctcacacccaggagctgcccctgctgtgcctggtatgctggcagtggtgatggtgacaacacaatgaggccaagtagcaatgctcccaggtcctgcagcttgtgctctgcccagcagtgcccctggcccagcacctcagcctgctcttctctctggtggctccaccccaacccctacttctgttcctttatttctctcccaacctggctgcaaaggaggttcatattccccagatgtgtccacaaacctgtccaggagttgtgtcttaaaattgatttcctgtccctcttcctaaggacaggggtaacagtcaaagtgaaggaatgaatgggttcttgcctgtctttgctttgggtccggaatttccaaggcctcctcttttagccaagggctacagggcacttgtcttccctggtggctctcccctttggagagagctagtggcagagcaacctagctaggtcctccttggggctttgaatgcaggagcacccagtgccccaggccttgcactgtgctgcccaaggagtattttctgggtggatctcccatactcctcagggttctgaggtccttgtatttagggtatggtgtaaaaacttacaatatgcacattttgttacatcatttaagatgattgaagctttactggttaaagtacaggggtcaccagagaaagttccctttccccagttgatgtcttgaggctgttgagagacttaggacagaagcgtacctcatcccagggcctgcccctccgtgacatagctctgcctgtgagtctggttcatattgctgtacaggcaaaatggaaatagtcccaggtggggaacaccttcttcttgctagctccaggaaaggctttgtggggaaatggagttgaacccatgggactgtgggagagtgggggccaagagttggagcccgggacttgacccaattaattccccttaccctttcaagccccaagatagcctacatgtctttaacttgctgtataagttttccgttttgtcctgggggtgcctgattgatcctatctcttcacccttcattctttcaacaaacatgccatctatctccccaggacatttattcccttctattcaaggccagttaggaatgcaattatttttttttttcagttaaatacagacttgtttggacgcaaaggtaccctttctctttttaaaaactttttatcatgaaaactttcaaatacaaaaataaaatggtagagagtgaacctccatgtacccagcatccagctccagtaaccatcaatgtgtaccattatttcatctctcttcc

SEQ ID NO: 148345 - DNA, 536 bp, Homo sapiens
cacacacacacacacacacgcacacacagtcaaaacttggtggataatcagggtaaagcagaacttttgttttaacatacagacggaaaactgtgtccatatccattaatgccaggggcctttcttacatttcaataacaatcattaggtttcataccacctttcagaaaaagacaacgtatttcaatttcatatactttttattttgagacagggtcttactctgttgcccaggctggagtgcagtggcacaatcttggctcactgcagcctagacctcctggattcaagcaatcctcctgcctcagccccccaggtagctgggaccactggcgtgcaccaccacatcaggctaatctttgcacttttagtagagacagggtctccccatgccgcccaggctagtctcaaactcctgagctccagtgatccgtctgccttggcctcccaaagtactgggattacaggcgtaagccaccatggccagccttacatttcacatactcttataattatatttattggaaaattctaca

SEQ ID NO: 148346 - DNA, 712 bp, Homo sapiens
caattctcctgcctcagtctcccgagtagtcgggactacaggcatgagcaaccactctaatttttgtatttttggtagagacagggttttaccatgttggccaggctggtctcgaactcctgacctcaggtgatcctcctgccttggcctcccaaagtgctgagatcacaggtgtgagcccccgcacccggcctaacaatctaaaatcttaatgagaaaagaagtactcagaaaaacccctcgaatcttctgtggaatgattgcaaacacatatcttagaactgatgaaataaaggctgaggagtgaaaggcaggcctacttgggagctacccatagtgatttcaatactgaattacaatattcaataattgaattacatacagaactacactgtgaggtaggttcacatatagtgtagttcaggcccagagaccgatggctgaaataataatatgttgaaaacatacctcttctaggctgagttgcaaatactcaaagatcctatatggatttcttctgcatattaacctgtttctttgcaccaactaaagagaaagaaatacaatatatacagaacaaatggaagcactacatgtcatagagaatgtattttaaaatgaacatttttcttataaattcccaggattcacattctattgtgttaatattataaagaatgattaaaacacaatttttttgagacggactctt

SEQ ID NO: 148347 - DNA, 781 bp, Homo sapiens
ttgagcatcctcctgtgaaaaggaatgaagaggctcaagtgcatgacaagcttaactctggaatggtttccaacatggaaggcacagcagggggagagagaccttctgtggtaaacggggactctggaaagtcaggtggtgtgggtgatccccgggagccattaagctgcctgcaggagggctctggctgccacccaacaacagagagctttgagaaaagcgtgcgagaggatgcctcacctctgccccatgtctgttgctgcaaacaagatgctctcatcctccagcgtggccttcatcatgaagacggcagccagcacatcggcctcctgcatcctggggacagagggcctgaccatgagtacttgctggtcgaggaagcggagcgtgccatgagcgagagggaggctcgcccaaatgaggaatcggtgcaaagaaacaggttaatatgcagaacaaatccatataggatctttgagtatttgccactcagcctagaagaggcctttttcttggtctatgctctgggatgtttaagtatttactatgagaaggagcctttaacgatagtgaagctctggaaagctttcactgtagttcagcccacgttcagaaccacctacatggcctaccattactttcgaagcaagggctgggtgcccaaagtgggactcaagtacgggacagatttactgctatatcggaaaggccctccattttaccatgcaagttattctgtcattatcgagctagctgatgaccattttgaaggctctttccg

SEQ ID NO: 148348 - DNA, 2652 bp, Homo sapiens
atgaaaatcctcaccaagcttggctacagcttgatcaccacggccgagtgggagatcatgcatgacaaggagaagctgtgttgcccttcgagcaggagatggccaccgccgcatcctcctcctccctggagaatagctgtgaggtgcccatggcaggtcatcgccattggcaacaagcagttccagtgtctggaggcactgttccagccttccttcctgggcatggaatgttgcagcatccacaagaccaccttcaactccatcatgaagtgtgatgtggacatctgcaaagacttatatgccaacacgatgcagaaggagatcactgccctggtgcccagcaccacgaagatcaagatcattgtgccccgccccaagcacaggtactcagtgtggatcggcagttccatcctggcctcactgtctaccttccagcagatgtggatcagcaagcaggagtcgactctagaggatcccccaatgggattaacagacatccctgagatgaaggccagaggaaacaaagacaccaggggtctgactgcagcaaagaaaccagagctgagcgagaaccaggacaacgggcacaagagagaccagcaaagcaggcgggatggcctgggaggctcctcacgacctccagctctgaagccaagagactacaattcacacagtgcactggctgaagggccaggagttgatgaggtagatccggtccatcatgatggtgatgatgctgtaccagcgctggaagcccctggccaggctgtccttgatgaagaaggtgtggctgaacacaaagccgtgctgctcatctccgaagaagatggggccttcacggccagggcagacctggagggacaccggcgactcagacagccctttcctcgcttagtgacaccaaatcaaaacctcttcttcagacttttcagagtcagctggcacaaatcagccagcgttaataacggggagagtggcacaggtcttagcacatacggtctctcactcagaatattcttccccaagcttgcatgccagcaggtcgactctagaggacccccagggatcaaggtccggcacgatcaagacccaggctacatgcatcacaagtttgccatcgtggacaagagggtgctcatcactggctcgctcaactggaccacgcaagccatccagaacaacagggagaatgttctcatcacggaggacgacgagtacgtgcggctttttctggaagaatttgagcgcatctgggaacagtttaaccctacaaatcacgacctgccacggggtgctttcatgagtgtggtccgtatcttggtttggaatcgaaacttctgctacagcacagaaaaggcacagtgcctcttccagaataccacagaaaaaagctttgatgaagacaacaggaagtcaacacagcagagagtggtgtggacaacccagaatgccagcctcacgcattccatgcccacagttaactgtgacaacgacagcaataataataataataataaaacaacggtacagtccctggattcaaagagcttcaaccgttcttgcaccgtcagaccttccttcagactctgggtagagacagagcaggaggagaaaataaacacaccgttagactccctgcactggagcggatcggaccagaccgggacgctggtggatgcgtcatcagtcagagagccgggtgcagagctggccaatgccaccttcctcttcttccgcctgctcaccctggccaggactgtcctcattcccatccccttgaggaagtggggcgtgcagcacctccgtgcagaagagagtgcgggggccgtggagctcgcagaagtggcagagagccacgatggcattcatggtgccttggagactgcaacaggcctgcgtgggacaggggacattgctgcttatggaccaaaaccctcagtgacggaagaggctaagtcagaatgtcagtcaatgatgtcgctaagcacactgtgtagttcagcaaacattgttcagcaagatttcttgctgcagcagttgcttgatgtatttattcgcgataagctcatggagcggcgtaaccgtcgcacaggaaggacagagaaagcgcggatctgggaagtgacggacagaacggtcaggacctggattggggaggcggttgcgcgactgctgctgacgcttgcatgcctgcaggtcgactctagaggatcccccgttgtcggcggcgtagttggtggcggcgctgaccaccatgcagccctgcggccggccgtgcgggttgtaggtcgacacggcttcgagcagcatcttctcgacggcttcgcggggaaggacagagaaagcgcggatctgggaagtgacggacagaacggtcaggacctggattggggaggcggttgcgcgtctgctgctgacggtgtgacgttctctgttccggtcacaccacatacgttccgccattcctatgcgatgcacatgctgtatgccggtataccgctgaaagttctgcaaagcctgatgggacataagtccatcagttcaacggaagtctacacgaaggtttttgcgctggatgtggctgcccggcaccgggtgcagtttgcgatgccggagtctgatgcggttgcgatgctgaaacaattatactga

SEQ ID NO: 148349 - DNA, 1401 bp, Homo sapiens
cggccgcggcgcgaggcgctgttcttcccgtctcaggtgacctgtaccgaggccctgctgcgggctccgggcgcggagctggccgagctccccgagggctgcccgtgcggccctgccccacggcgagagcgcgctaagccgcctgctgcgtgccctgctggccgcccgcgccagcctggatctctgcctgttcgccttctccagcccgcagctgggccgcgccgtgcagttgctgcaccagcgtggggtgcgagtgcgggtcgtcaccgactgcgactacatggccctcaacggctcgcaaatcggtctgctgcgcaaggcagggatccaggtccggcacgatcaagacccaggctacatgcatcacaagtttgccattcgtggacagaagggtgctcatcactggctcgctcaactggaccacgcaagccatccagaacaacagggagaatgttctcatcacggaggacgacgagtacgtgcggctttttctggaagaatttgagcgcatctgggaacagtttaaccctacaaagtatacctttttcccaccaaagaaaagtcacggaagctgtgccccacctgtctccagagctggagggagattgctttcatggcacagaacttgcggcacctccagcgaaagccaaacctaaccaagaatggggctgagccctccctgcgggctgctgtgcgttctgagggagggaagacctcggcactagaaaaaaatcgttaaactaaagtctcgtctattagaatactaaattgaactaaagaaggttaggaaagggaaatttctgttacttcgggtcagttatttcgggccagacctttttcttgctcctttgccaaaataacttcagtcacgacctgccacggggtgctttcatgagggtggtccgtatcttggtttggaatcgaaacttctgctacagcacagaaaaggcacagtgcctcttccaggtcgatcccattcccttccctgattctagaaaagtccctcctgctttggctgatgtgggccctttcagcatctccctgagatttcatccctctctccatgtggcacgactggggttggttggggcctacagtctccttgtccctcacagtctgcccctgtcagggctcggtcctcagagtaaggaaaggaaatggaagtcaggaggaagggaagatgtgagtgtgcggtgcgggtggcaaaagcagccttcggggcaaccccgtgagcgtcattgccaccaaaggctggctggacccttgattggttgcataattgctctttaaaaccagtatgcacgccagtgccaagctcttcatcagcctgtccttgggtagcaagtgctgtggtctgtcaggactgatggccagcagctgtttctatgttgggcttttaac

SEQ ID NO: 148350 - DNA, 449 bp, Homo sapiens
tttttaatatggagtctcagtcgcttgccagtctgaagtgcagtggtgcagtctcggctcactgcaacctctgcttcctgggttcaagcaattctcctgcctcagcctcccgagtaagtgggattacaggggtgctctaccacacctggctaatttttgtatttttagtacagacagggtttcaccatgttggtcaggctggcctcgaactcctgacctcgtgatccacccgcctcggcctcccaaagtgctgggattacaggcatgagccactgcgcctggccagatagaacatatttttagacgaataaaaattaaggacaaagaagagcattccttatagaatgataaaggacacaattcaaccagaagatctagcctaagtatgtacagaccaacatgtgggcaggagattgcgaaacgggttgagctggcgggtggtagaagag

SEQ ID NO: 148351 - DNA, 446 bp, Homo sapiens
ttttttttttgagacagggggggcctttgtcacccaggctggagtgcagtggcccaatcttagctcactgcaaccttcgcctcctgggttcaagccatcctcccacctcagccttccaagtacctgggattacaggtacacaccaccatgcccggctagtttttgtatttttagcagatacagggttttgccatgttgaccaggctggtcttgaactcctggcctcatgtaatctgcctgcctctgcctcccgaagtgctgggattacaggcgtgagccaccatgcatgcccattccttcttttttcatttttcaaatctggtataacatccccaaattatcccatttcacaccatgaaatcatagaatccaatgtggcaccagttttcttatttgaagattctactgcaatatatgtttattacttttaacacttattttcataa

SEQ ID NO: 148352 - DNA, 613 bp, Homo sapiens
agagtttcttttttttgagacggagttttgctctgtcacccaggctggagtgcagtggcgcgatctcggctcactgcaagctctgcctcctgggttcacgccattctcctgcctcagcctcccgagtagctaggactacaggcacccgccaccacgcccagcgaattttttgtattttcagtagagacggggtttcaccgtgttagccagggatggtcttgatctcctgacctcgtgatccacccacctcagcctcccaaagtgctggggattagagggcgtgagccaccatgcccagcctgtttttttgctttctaaatgctatgatctgaatatttatgtccccacaaaattcctatgtggaaacctaatcgcaaatgagttgaggcctttgggaggtcattagggcatgaggatggaaccctcacaaacaggactagtgaccttctgaaagaggctcaagggactgtgctcaccccttctgccatgtgaggccacatgcaaggcactatctatgaggaacgggcccgacatggaatctcctggcaccttgatctgagacttctcacgtccagaactgtaagcaataaatgtctgttgtttataaaaaaaa

SEQ ID NO: 148353 - DNA, 1056 bp, Homo sapiens
atggagtgtgaggaagccagtgtgcaaagttggggatgccttgttggacattctgaggagtttggtgtcgggttgaaggacacctgggagcaggctgacggactgaagctggagtgtgagcagtgtgtggacctgagctgtaatgagctaagtgaagtcacattaccagaaaacctgcctcccaaactgcaggagctagacctgactggaaacccgcgccttgtccttgatcacaaaaccctggaactactgaataatatccgctgtttcaagattgatcagccttctacaggagacgcttccggagccccagctgtatggagtcatggttacactgaagcttcgggggtaaaaaacaatcattcagaagaacaaccaccccaaatgtggctaagccagccagtcaacaagagcgctaggattgttaccttcttcaaaacaatacctctcagcaaagccatcaaatgtcaaccaacacaccaaggaaggtccttgcagatggaacacagggaaactgttatctcacaggagtggtaccagcacccgtcatcctatttcaggattcttatccccaaaacaggaatattaacacagctccgcctgtctctgcaggtcatcaagagcaagcacctagtttccaagagtcttcaggagcataatcgtattaatagcacactcccaggctgttctgacatccctgttgatgtcttccctggggcagaatgttcttcagacagaggatggctgagttgtaactactcatatgtgagtgtaggtcttccaggcctggccagagctgccaagcaggataagcccatcatggtcctcagcaaggatagagaagggccattggcaagtaaaatggcgaaactggaggaacttgaagaaattgatctcagtgggaataagctgaaagccatcccaacaacgatcatgaattgcaggcgcatgcacaccgtgattgctcactccaactgcatcgaggtctttcccgaagttatgcagctcccagagatcaagggtggttatgaggctcaaaggctgacgctggtgtaa

SEQ ID NO: 148354 - DNA, 4032 bp, Homo sapiens
  misc_feature (1)...(4032): n = a,t,c or g
tcactccaacggctgccgggactgatgcacaacttacagacatttttgttggatggaaactttctccaatcccttcctgctgagttggagaacatgaagcagcttagttatctgggtctttctttcaatgaatttactgacattcccgaagtattggagaaattgactgctgtggataaactttgtatgtctggaaactgtgtggagacccttaggctacaggctttaagaaaaatgcctcacattaaacatgtggatctaaggttgaacgtaattaggaagctgatagcagatgaagtggactttctacagcatgttactcagcttgacctacgagacaataagcttggtgatctagatgctatgattttcaacaacattgaagttttacactgtgaaaggaatcaactggtcacattagacatctgtggctatttcctaaaagcgctctatgcctcttctaatgaacttgttcaacttgatgtttacccagttccaaattatctgtcctacatggatgtttcaaggaaccgcttaggaaaatgtgcctgagtggggtatgtgaaagccgaaagctaggaagttttgggatattgggccataattcaaatatgtggaacttcctgcccgcttattttgtaataggcagtctccggaaactacttgggcagggacacaacccagttggcaaggctgcctgaaaggctagaaagaacctcggtggaggtcttggatgtgcaacacaaccagctccttgagctcccacctaaccttctgatgaaggctgacagcctgagattcctgaacgcctctgcgaacaaactggaaagccttcctccagccacgctttccgaagagacaaacagtatcttacaagagttgtatttgacaaataacagcctcacagacaaatgtgtgcccttgttaacgggacacccccatttgaagatccttcacatggcctataaccgacttcagagttttccagcaagtaaaatggcgaaactggaggaacttgaagaaattgatctcagtgggaataagctgaaagccatcccaacaacgatcatgaattgcaggcgcatgcacaccgtgattgctcactccaactgccaccggggtcctttccccgaagttatgccagctccccagagatcaagtgtgtggaccctgagctgtaatgagcctaagtgaagtcacattacccagaaaacctgccctccccaaactgcaggagcctagacctgactggaaacccgcgcccttgtcccttgatcacaaaacccctggaactactgaataatatccgctgtttcaagattgatccagccttctacaggagacggtttncggagccccagctgtatgggagtcatgggttacactgaagctttcgggggtaaaaaacaagttgtgtgttcgtagccctgtcggtgaataacttctgtgacaaccgcgaagccctgtatggtgtgtttgacggagaccggaatgtggaggtgccctaccttctccagtgcactatgagtgacattttggctgaagagctgcaaaaaaaaacaaaaaacgaagaagaatacatggtcaatacattcattgtcatgcaaaggaaacttggaactgctgggcagaagcttggtggtgccgctgtcctttgtcatatcaagcatgaccctgtggatccaggaggatccttcaccttgacctctgctaatgtgggcaagtgccaaacagttctctgtcgaaatggaaagccgctgcctctgtccagatcttacatcatgagctgtgaagaagagctgaagaggattaaacagcacaaggccattatcactgaggatggcaaggtgaacggagtgactgagtccacgcgcatcctgggctacaccttcctccatcccagtgtggtgcctcgcccccacgtgcagtccgtgctcctgactccccaggatgagttcttcatcctaggcagtaaggggttgtgggacagcctgtccgtcgaggaggccgtggaagccgtgcgcaacgtgcccgatgccctggctgctgccaagaagctgtgtaccctggcccagagctacggctgccacgacagcatcagcgctgtggtggtgcagctcagtgtcactgaggacagcttctgctgctgcgagctcagcgccggtggggctgtgccaccacccagtcctggcatctttcctccctcagtgaacatggtgatcaaggatcggccctcagatgggctgggcgtgccgtcctccagcagcggcatggcttcccgagattagcagtgagctctccacttctgagatgagcagcgaggtggggtcaacagcctccgatgagcccccgcccggaagccctaagcgagaacagccctggcctaccccagtgagcagcgctgcatgctccaccccatctggctgtccaactccttccagcgccagctatccagcgccacgttctctagcgccttctccgacaacggccttgacagtgacgatgaggagcccatcgagggcgtcttcaccaacggcagacgggtggaggtggaggtggacatccactgcagccgggccacggagaaggagaaacagcagcacctgcttcaggtgccatcagaggccagtgatgagggcattgtcatcagcgccaacgaggatgagccaggtctgcccaggaaggcagacttctctgccgttgggaccattgggcgccggagggccaatggctctgttgcgccccaggaaaggagccacaatgtgatagaggtggctacagacgcacctcttcgaaagcctggaggctattttgctgccccggctcagccggatcctgatgatcagtttatcatacccccggagctggaagaggaggtcaaagaaatcatgaagcatcaccaggagcaacagcagcagcagcagccgccaccaccccctcagctccagccgcagctgccgcggcactaccagctggaccagctgccagattattacgacacgccactatgacccagccgagctgtttaacaaataaactaaccacaaaagactgagttgcaagagtctcccaggctcacattaaaccaggggttttactccacatccttcccccagacactgttcccaacctgtcatcgcagctaatctgtaggttctctttctttgggttatttttttaagtaatcaccactttcttctagtgatgctttaccaatatgatttacattttgtttaacttctccccctaacatatcagatatgtaaagacaaagaacaaaaggtttaatatattacagagaaacagttaatgataatgtaatattttttaaaatggctttttgttgtttgtttggaaggcagggcaggctgccgttggctaaatggatttaataatattgtaatttctgtatttctttggggggaaaaggcttttgttttgttttgttttgttttgttttgtttttgtcttgaaaataatagacatttgtagaatatggagactaactcctaggagttgctttactctgtcaggtgacttaagtcactgggattcactaattttctctgagagaacagctgattgagaatttcccattgtaaatagctcagtgttgtattagtggaggtttacggatgttttgtaagtcttggcgtaaaggacacagcccaatgtaactgacgtttccccctcctccgtcccctctgaggaacctgcctgccctcacaacttcaccctcacttcactgaatgaggaggctgagcagctgcagtgtttctgtccgtgaggaaatggatcttagggccactgggacaagaacctgcgacccaagggccctgaacccattttcctcccctgtcccagccttcccactttgacagacacttttaactgtgttccttactgctgccacaatcagcatggttgtatagtgccccattaggccatttacatacccagagttatactcaagcagaatgcacaaatggacatgtcataatttttgttacaataaatatgaaatttacaagt

SEQ ID NO: 148355 - DNA, 554 bp, Homo sapiens
ttgcccacgctggagtgcagtggcatgatctcggctcactgcaacctccgcctcccgggttcaagcgattctccctgcctcagcctcccaagtagctgggattacaagtgcccaccactacgcctggctagtttttgtattctcagtagagatggggtttcaccatgttggccaaggatggtctcgatctcttgacctcgtgatccgcccacctcagcctcccaaaatgctgggattacaggcgtaagccaccatgtccagccaagaaccccctactcttatagcccacacagacaaagttggtcacagcccagacagctttgaacatagagtgaagtctgtgcttgaatcaaatcctgaccacctccaaatcacccaggtaatcatggacaagctgtttggcgtgggtgggctctgtctagtttgcattctgcaagtgacactggggacccatgtgtataggacactgcaaactgctgggctgaattcagactatacaaatgggcaaagccccccagacacatacaaagtcccgtggccagtgtgctcgtgcc

SEQ ID NO: 148356 - DNA, 527 bp, Homo sapiens
ggcacgagggcataacacaattaaggtgttcccaaaactggaaatccaaagcatccgagtgatgctctgaatcatgcgccgtgtggaaggaatgtgctggcaggcgcaaatcgccggctgagtgttccactgaaattaaactcaagtgctgacttctcgttttttacctccccaccccttccctcaagggtggtctccgccagctggacatgtccttgctctgccaactgtacagcctctacgagtcgattcaggagtacaagggggcatgccaggcagcctccagcccaaactggacttacgctctggagaacgggttcttcgatgaagaggaggaatattttccggagcaaaactccctgcacgacaggagggaccgaggccctcctcgggacttgtcactgcctgtctcctccctctccagcagcgactggattctggagtccatctagagggtcttgggagggatgtgactgttgggaagcccttcctactggacacgctgtcatcatttgctgcttctcttg

SEQ ID NO: 148357 - DNA, 732 bp, Homo sapiens
aattccggccgcgtcgacttttttctgctttttgagacagagtctcactctgtggccccatgctggagtgcagtggtgtggtctcagctcactgcaccctccgcctcccgggttcatgctattctcctgcctcagcctcccgagtagctgggactataggcgcccgccaccacgcccggccaagttttctgtatttttagtagagacggggtttcaccgtgttagccaggatggtctcgatctcatgacctcatgatccgcccgccttggcctcccaaagtgctgggattacaggcgtgagccactgcacgcggcctaaagaggcctatttttatttcctagctttggatcccagatgcaaggacggtgtaaggtagtgaaaagagcacaggttccattccaaagctatagagtcacagcatgtcatgcctcccagctgtatgacctcgggcacatgacttcctcagaatctcaattttcctgcctgtaccttgaacatagcaatacccccatcacacggggactgtgatgcttgggggacacaacataagaaagcatccagtacagattttagaatttaggactttttcaacaaaggcttgtttcctttcatgcaccggggccactgccctcctttttgaccagggctgagcccacttcaagctcgctagaggaagcccatccaatgctgagacttcacctgtctcacgatatctattctcccctcgtgcc

SEQ ID NO: 148358 - DNA, 474 bp, Homo sapiens; identical to SEQ ID NO: 110969

SEQ ID NO: 148359 - DNA, 882 bp, Homo sapiens
tttttttttttttcagccttccgaatagctaggacttcaggcatgtgctaccctgcctggctaattttattttttatagagacaaggtctcactatattgcctaggctggttttgaactcctgtgcctcaagctatcctcccacctcagcctcccaaagtactgggattataggcaagagccaccgtgcctggcaatttcaattattttttttaaaaaatcattaatctattacttgaatttggcaattttgtattttaaatgcaaataaaggctcaaaatatttcaaaatactctgattaaaacccaacaaaaataaaatcctcccaaatctaggggggaaaaaataaaattttcaggataactctgtttaattctatttttcagcctatatatgtatgtggagattgcttgccatccaacatatgttaggatgtctactgaagcacagccaagtgtaacagcaatagtttccaaactttcttcttcattcattaatctattcaacagacaacttattaagcactaccctattgggcttggcattccactgaggataaaaagtgattattaaaatagtgtgtcaccaagattataatcttatgaggaaataataaatgtaacaaaacaaattacattatatcctactagttaaagactgtatattatttcctgacatcaatgtcctagtttggattaaagctgaagttattcaggatttggtgctgagcctccttttcttctcactctgcactcatcacaatgaggtcacgtacgcaagcagtaaacaagaaggattctgactttatgaccatcgacttgaacttttatgtataagaaaaataaactttccagctcatttaagccagtggtttttttcggg

SEQ ID NO: 148360 - DNA, 975 bp, Homo sapiens
atggcatcagaggcactccatcaagtgggagatggggaggaggctgtactgaagaaagaaaacttcaacatgatgaatgcccttgaccaactgccaaaacccttttcaaaccccaagtctatgaaccggaccgtcactaccaaaggactcccactagcctcaaagggcaatttggtcaacttcttggaggatgataccatcaacctactgaagccgctgccagtagaggattcagactgcagctctgatgagaccagcatctctgccttctcatccaccttgctgaaccccatcaaattagctgtgacccagcccaacagcagcttctttgcagggatgctggagggggagctgaacaaactcagcttctccccaatggccaagaatgcagaaaatgaggacctggcgctcggcccctgcccatgcccatcgaagtcccagatggccacaaggggcctgctggaccttgacaaccctgagctggagacagaaacctcctcaacgcactcagaatcttctgtggttgtggacctgccggacacccccttcatctttgagcacaccgtcaacaattccacagctgtgatttcctggacctacgccttgggcaagcagccggtcagtttctaccagctcctgttacaggaggtggccaagacacaggagaatgagttgcccgaggcaaagaatcgtccatggatcttcaacaagattttgggcactactgtcaagctgatggagctaaagcctaacacgtgttactgcctcagtgtccgtgcagccaacacagctggggtggggaagtggtgcaagccctacaaatttgcaaccctggccactgacttcagcagctttcctgagaactaccccatccagatcaccgtgcggcgcaaggaaccccggcaaaagatcgtgtccatcgggccggaggagatgcggaggctggaggatctggaatacctatttccctgttaa

SEQ ID NO: 148361 - DNA, 678 bp, Homo sapiens
cccaagcctcaggagattgagttgcccgaggcaaagaatcggtccatggatcttcaacaagattttgggcactactgtcaagctgatggagctaaagcctaacacgtgttactgcctcagtgtccgtgcagccaacacagctggggtggggaagtggtgcaagccctacaaagtgagccctgggaaaagaggggccttgggggtggagagaagtccaaagcccagggaaccagggctttggaggttgggaacacccctatgcccacatgactcatctggctagctttccttctgcctgggtcaagaagcatcaattccagaatgcatgcttctgggaggtttaaggattaagccactctggggcccacttaggaatgcaaacgaatgtatttttcaacatcacgtataatgttcccctcccaaagccattggtttttagactctgcaattcagtgcccatgattgtgagtaggctgggaagtcaagggcattgaaagaaatagggaagacaagaggctaaagggggacgaagaagggaacagcctgggtatggggtaggggtatgggggtatagaggcctgagtacagacagccctttggttggaaatatcccataatgaggaggtacaggcttgagtcatgcatctttgcacctgtttcctgcgtcaatggctaggt

SEQ ID NO: 148362 - DNA, 518 bp, Homo sapiens
gacgtgcggaggaattcgctttttttacactgacctggtggttcaaaggtgtggggataccagggaggaggggctgtgtgaaagtcagagctgcgctttttcctggttttatccagtctgagtctcccacggaagagacgtttgggagtgggaggtgagtgcggatggatctaaatatatctcttcccagcctactttgaaaactgtttttctaacttgtgctttttctgaaagagttttttctctttgttaccaaattatgcaggcagaggtagacatttctgtacagacttgcctagtggtgttagtggaggcggtgtcatcacttgtctttctttctttcagaccggaacatgaacattttgcagtactgcccctcttccgacatgtggacgctctttgaaacatgtgacgtccacattcgcaagcagcagatggtgtctgtggaagagaccatctacatcgtgggggggtgtctccacgagctggggcccaaccgcagagcagccagagcgagg

SEQ ID NO: 148363 - DNA, 1717 bp, Homo sapiens
atgtcggccgaggagatggtgcagatccgcctggaggaccgctgctacccggtgagcaagaggaagctcatcgagcagagcgactacttccgcgccctctaccgctccggcatgcgcgaggccctgagccaggaggccggcggcccggaggtgcagcagctgcgcggcctcagcgcgccgggcctgcggctggtgctggacttcatcaacgccggcggggcccgcgaaggctggctcctgggcccgcgcggggaaaagggcggcggggtggacgaggacgaggagatggatgaggtgagcctgctgtccgagctggtggaggcggcctccttcctgcaggtcacgtccctgctgcagctgctgctgtcccaggtgcggctcaataactgcctggagatgtaccgcctggcgcaggtgtacgggctgcccgacctgcaggaggcctgcctgcgcttcatggtcgtccacttccacgaggtgctgtgcaagccccagttccacctcctggggtctcctccccaagctccaggggatgtcagcctgaagcagaggctgagggaggcccggatgactgggactcctgtcctcgtggccctcggggacttcctggggggacccctggcccctcacccctaccagggggagcccccgtccatgctcaggtacgaggagatgactgagcgttggttcccgctggccaacaaccttcctcccgacctggtcaatgtcaggggctatgggtctgccatcctggacaactacctcttcatagtgggcgggtacaggatcactagccaggagatctccgctgcgcacttcctacaagggccagcaccaacgagtggctccaggtggcctccatgaaccagaagaggtctaacttcaaacttgtggctgttaattcaaaactctatgccatcggagggcaggccgtttctaacgttgagtgttacaaccccgagcaggatgcgtggaatttttgtggcgcccttacccaatcctctggctgagttctctgcctgtgagtgtaagggaaaaatttatgtcattggaggatactctaccagagaccggaacatgaacattttgcagtactgcccctcttccgacatgtggacgctctttgaaacatgtgacgtccacattcgcaagcagcagatggtgtctgtggaagagaccatctacatcgtgggggggtgtctccacgagctggggcccaaaccgcaggagcagccagagcgaggacatgctcaccgtgcagtcctacaacaccgtcacccgccagtggctctacctcaaggagaacacgtccaaatcgggtcttaactttgacttgtgcgctccataacgacggcatctacatcatgagcagagaacgtcaccctgtcgaccagcttggaacaccgagtgttcctcaagtacaacatcttttcagatagttgggaagcatttcggcgttttccagcttttggacataacttgctggtttcttctctttatctgcccaataaagcagaaacatgactgaattgaattggtagatgaaaaaaacctggttcaagttttttttaaaatgtggtgtcccattccaagggagaccaattcctaaagggtaaagaagggttaaagtaggtcacatatatacagtagcagctgtaaataagcttacttgaactaattacttgaaaactggtggaaaaaagagaccaactttgtt

SEQ ID NO: 148364 - DNA, 1162 bp, Homo sapiens
  misc_feature (1)...(1162): n = a,t,c or g
ttaccaactctatgccacccatgatgtctatgagctatagaatatgtgcgatgctcaagggagaggtgtccaagccctgaggcgagcccaccagcgcaatgtcaagcacatgcgccagctactcatggacaggggccttccctgtcatcccctgccccnagccaacatcaatccaatccgggtgagagcccccacccatgccccattgccctctcccaccctatttattcctggagcctcacgctccccaacaaacctacatctgttgctgtcttcaattatttgctttcctgcctaaccattccctttattgccagctttgtttccctttttgaaaaattatcagccattctggattaaccagtcttttccttgcatcagccattacctcatgcttattagattatcctaaccctaacaatagcgagtgctcacagcctataattcagagtttttcaaactggatcaagacaattaatgggtcacaaaatcagcttagtgggttatcattagcattaaaaaaagaaaagaaacagaaaatgttggagtacatcacatactaagggtatcatcaatttgtgaaaaatttgtatgcattttgggtatttgcatatacacatgtatgtgtatgtgtgcgtttatggtcacggtgtaaaacgtacttcttattgagaaatgagggcagaaaaataaaatcaaaagccataggattagctgctactttggatcctcaatatgagcatttactgcctttaaaaatgaactgctacttctttcttaaataacacgtatttgtgtgagtcagtaagccagggcagggaaaggacacttatttgtgacaattttgtggatgagaaatagtcactgctctttagactaacctagtatttcctttaaacactcattttatgaattaatttagtgacagcaccccagaattggcttggcgggggttccagaattggcttggtggggggtatcttctcacccagaaccatcccaaactaagatattagctaagnaaaatcagtgtgcttgctctgcaaacagcttccaaacagggctcctggtaccacctctgctccatccttttcaaaccaaattgctagctctgagctcctccttgatagaaattctggagctgccactaagcccctaatgg

SEQ ID NO: 148365 - DNA, 432 bp, Homo sapiens
ggcagcaccacacctgccatggaatttgcaagtctttttaaaaaaattttattgattgattgtagagatggggtcttgctttgttgcccaggctggtcctgagctcctggcctcaagtgattttccttccttggcctcccaaatttttgggattacgtacataagccaccatgcctgaccacaatttgtggttccaagagtgtgatttttatcatcatttgggaggatgttggggcctctggcatggactgatgactgtctctgagtgggagtgggctttgggaagggcgatggggcttgctgggacaccccattggaccgtcattttgatgtaggaggcctgtgggttgtcttgccctttaaatgtgggttggtggaacaaaactctggtttgtcacaggcatatagaatgcttttggccctgcacaaggg

SEQ ID NO: 148366 - DNA, 648 bp, Homo sapiens
tttttttttttgagacagagtctcactctgtcgcccagtctggagtacaggggcaccatcttggctcactgcatcctctgtcgccagggttcaagcaattctcctgcctcagacccccaggtagctgggaccacaggcacccgccaccgcgcccagctaaccttcgtagtttttagtacagatggggtttcaccattttggccaagctggtctcgaactcccgaacttggggatccaccccacttcggcctccccaaaatgctgggatttaccagcgtgagccacccacgcccagccgccactagcatgattttaaaaatagtatcaaaaattcagacaatcaaaatgtgatttaggctctgactgaaataaaatttattttattcaacttaatattaaacaatatggactactgggtaggttttgtctgcaatgatactcaacctggttttgagtttttttcctcatttactttggcatcatgaataaagttaagaaaaatcaagttttaaggacaaaaaaaaaaagcaccaccttaaataaaatattctgtgaattgtaaattatttggccaagatcctagtatagagtttacctgcagcagccttttcaaacagtttatattactgaaatatttacatgattacc

SEQ ID NO: 148367 - DNA, 571 bp, Homo sapiens
  misc_feature (1)...(571): n = a,t,c or g
atgcacaacaccagcctatgaatatcttcccatatccagtgggtgttcatgctcctttgatgaacatccaacgcaatccatttaacattcatcctcagctacccttgcatctccacacaggagtgcccctcatgcaggtagccactcctaccagtgtatctcagggactaccaccaccaccaccccctcccccaccatcccaacaagtcaactacattgcttcacaaccacgatggaaacgcaattgcacgaaattgcaaacttcaagaaaaagcagcacaagaggtaaaatttggccatcaagccattttaccaaaataaagatatcaccaaggaagaatataaagaaattgtacggaaagcagtagataaagtttgtcatagtaagagtggagaagtaaattctactaaagtgggcaatctgggttaaagcctatgtagaccaatacgaatattcacggaaggggagccaaaggaaactctgggaaggacctgtgtctactggaaaaaaccntaggctgaatgggggacgctgttcagggcattgtcagggtttctggnaagtgcnttt

SEQ ID NO: 148368 - DNA, 524 bp, Homo sapiens
  misc_feature (1)...(524): n = a,t,c or g
tctctagatgtgttgatgncccagtaaattactggtaatatcttataattgtttttagaaatgtttgatatgttttagtaaataaactgttttatatttgtcacgttaatagttggagagtctcttattgtaaatatgaagtattttcaatttcttgtttgggattttgtgagagcagtatgactggcaaataataaattatacattttcttctcatcagaaattgcaaattcaagaaaaagcagcacaagaggtaaaattggccatcaagccattttaccaaaataaagatatcaccaaggaagaatataaagaaattgtacggaaagcagtagataaagtaagttatggctttagtggagtatgtgcacgttgttttgaatccacctctgttttaataaatgaatgctgaagtttaattaaaataataaaagctagctcctactaattcctgtctacttttttgccttttgattagtttgtgtgagataatgaaacatgaaaataagtctgggtttcttttg

SEQ ID NO: 148369 - DNA, 948 bp, Homo sapiens
cttactacaagccatttgacttgtactgccttgttttttccaggctttaaagtgagggcactttaatatttgttaatattcctaaagatccttgcaggaaagatataattctttaaatgctattctcctccttgtgtttagtattgctgtcaaaatgttacaatacatatatataatttaaaagtcatcttgacatatctaaataaggccccgtttaagaatgttactcatttttctttaaagggccctttacgatataattacctggaaatatggcatttttctttaggtactaagggttgggtttgctttgtgttttttaatgttatttcctaatggcatcactaaaagacttctatcgagtacaagtaattcattaaccggatgataacctctttaaaccagggtattccctagttcttcctcatggtaagtaattaacatggagtacaccagttttgcctgctccgacagcagcccccagggaaatacgggaatgggtttcagggaccaagttctggtaatacttcgtcatcaagtcacagccaaaggcctctaatggctgctgtaaaattggcagaaagcaaagtaagtgttgcagtggaagccagcgcagatagctcgaagacagacaagaaattgcaaattcaagaaaaagcagcacaagaggtaaaattggccatcaagccattttaccaaaataaagatatcaccaaggaagaatataaagaaattgtacggaaagcagtagataaatgtgtactgctggaatgttccatccaaaagatgtagcttcagaagcacagtgattgccccagggtccatgagatattgtttgtattatgaagttggagtgctgtctactgaaattatactcttaaataaatatgtatgtagtgtgtaatattttctaataaattcttttgataaactaaaaaaaaaaaaaaa

SEQ ID NO: 148370 - DNA, 5322 bp, Homo sapiens
gaataacagttaagttttggggagtaaaaactgtttcaatttttgactgtgttgggggttggtgctcctaatccctgtgttgttaaagggtcgactatattgtatttttgaaaattgctagagagtggacgtaaagtgttctcactaaacaaattataactatgtgaggtagtgcatatattaagtagctagatttggtcattccacaatgtatatgtacttcaaaacatcatgttgtacatgagaaacacagttttatctgttagtcagttttaaaaataaaaaatattccaactagaaactctgttgtagtttttgaaattacaacttggaggctttgaggaactgattagaagtctcctttctgtttcaggctttcatatccaaaccatagatctttagaagtaacatctgttaattaattattaataaatagtttgagtctttattaattcatggataacttgaccattttctctctccttttgcttagataatcccagatcatggccgggcacagtagctcacgcctgtattcccagcagtttgggaggccgaggcaggcagatcacttgaactcaggagtttgagaccagcttgggcaacatggcaaaaccctgtctctattaaaaatacaaaaattagctgggcatggtagtgcatgcctgtagtcccagctacctgggaggctgaggtgggaggatcgcttgagcctgggaggttgaggcttctgtgcgcgatgattgctccagtgatcacgccattgcactccagcctgggtgacagagtgagaccctgtctccaaaaaaaaaaaaaattaagcaagtagcagttacaagaccaaaagttattttcctttttttttttctctataaaattgcccatttggaccaaatctagttataacttatttcagtgtcattaagaaagttgatgaataagtcatattactcagatgttagtagctatgcatttattaatagttttatttataagtatttagtttcactctgttgcagactattttatgctaaaattagctaaagccaaattactatttcttaaaacatattttttactttttttttttttttaaatattattaggtacttcttgcaagggatatgcattagcacatactcaagaaggggaagaaaagaagcaaacttctggtacatcaaataccagaggatcaagacgaaaacctgcaatgacaactcctacaaggaggtctacacgtaacacaagagctgaaacagccagtcagtctcagagatccccaatatcagacaattctgggtgtgatgccccaggtaacagtaatccatctttaagtgttccctcttcagctgagtcagaaaagcaaacaagacaggctccaaaacggaagtctgtaagaagaggaagaaaaccacctttactgaaaaagaaacttcggagctctgtagctgcccctgaaaaatcatcttccaatgattcagtagatgaagaaacagcagaatctgacacatcacctgtgttagaaaaagagcaccaaccagatgtagacagtagtaacatttgtactgtgcagactcatgtagaaaaccagtctgctaattgcttgaaaagttgcaatgagcaaatagaagaaagtgagaagcatactgcaaattatgatacagaggaaagagtaggatcttcatcttctgagtcttgtgctcaagatcttcctgtgctagttggtgaggaaggggaagttaaaaaactcgagaatacaggtatagaggctaatgttttgtgtttggaaagtgagatttctgaaaatattcttgaaaaaggaggtgatccattggaaaagcaagaccagatatctggactttcacaatcagaggtaaagacagatgtatgtacagttcatcttccaaatgattttcctacatgtttaacatctgaaagcaaagtgtaccaacctgtatcttgtcccctaagtgacttatctgagaatgtagagtcagtggttaatgaagaaaaaataacagagagttccctagtagaaattactgaacataaagattttacactaaaaacagaggagcttatagagagccccaagttagaatcttctgagggtgaaattatacagacagtggacagacaatctgttaagagcccagaggttcaattgcttgggcatgttgaaactgaagatgtagaaataattgcaacatgtgatacttttgggaatgaagatttcaataatattcaagactctgaaaataacttactaaaaaataatcttctgaacaccaaattggaaaaatctttagaagaaaagaatgaatcgctgaccgaacatcctagatctacagagttgcctaaaacacacattgaacagattcagaagcattttagtgaggacaacaatgaaatgatacctatggagtgtgattcattttgcagtgaccaaaatgaatctgaagttgaaccatctgtaaatgctgatcttaaacaaatgaatgaaaattctgtgacacactgttctgaaaataatatgccgtcttctgatcttgcggatgaaaaggttgaaactgtttctcaaccatctgaaagcccaaaagataccatagataaaaccaaaaagcctcgtactcgaagatctagatttcattctccatctacaacttggtcacccaacaaagacactccacaagaaaagaagcggccccagtctccatctcccagaagagaaactgggaaagaaagcaggaagtctcaatcaccatctcctaagaatgagtcagccagaggccggaaaaaatcccgttctcagtccccaaaaaaggatattgcaagagaaaggaggcaatctcagtctcggtctccaaaaagggatactactagggaaagcagaagatctgaatcactgtccccaagaagagaaacttctagagagaacaaaagatctcagccaagagtgaaagattcttccccaggagaaaaatccaggtcccagagcagagaacgagaaagtgatagagatgggcagaggagagagagagaaaggagaaccagaaagtggtctaggtccagatctcattctaggtccccctcaagatgtagaacaaaaagtaagagttcatcatttggtagaattgacagagatagttactctccccggtggaagggaagatgggcaaatgatggttggagatgtccacgaggaaatgatcggtacagaaagaatgacccagagaaacagaatgaaaatacaagaaaagaaaaaaatgacatccatctagatgctgatgatccaaattctgctgacaaacatagaaatgactgtcccaattggataacagaaaaaataaactctgggcctgatccaagaaccagaaatccagaaaagttgaaagagtctcattgggaagaaaatagaaatgaaaattcaggaaattcttggaataaaaactttggttctggttgggtatctaaccgtggtagaggcagaggcaaccgtggcagaggcacttacagaagtagttttgcctataaagatcagaatgaaaatcggtggcaaaatcgaaaacccctctcagggaattcaaacagttcagggagtgaatctttcaagtttgtggaacagcaatcctataagcgaaaaagtgaacaggagttctcatttgatacaccagcagatagatctggatggacatctgcatccagctgggccgtgagaaagactttgccagcagatgtacaaaactactactcacgacgaggcagaaattcttcaggtccacagtctggatggatgaaacaagaggaggaaacatctggacaggattctagcctaaaagaccaaacaaaccagcaagttgatggttctcagctacctataaatatgatgcaaccgcaaatgaatgtaatgcagcaacaaatgaatgcacaacaccagcctatgaatatcttcccatatccagtgggtgttcatgctcctttgatgaacatccaacgcaatccatttaacattcatcctcagctacccttgcatctccacacaggagtgcccctcatgcaggtagccactcctaccagtgtatctcagggactaccaccaccaccaccccctcccccaccatcccaacaagtcaactacattgcttcacaaccagatggaaagcaattgcagggtattcctagttcttctcatgtaagtaataacatgagtacaccagttttgcctgctccgacagcagccccaggaaatacgggaatggttcagggaccaagttctggtaatacttcgtcatcaagtcacagcaaagcctctaatgctgcttgtaaaaattggcagaaaggcaaagtaagtgttgcagtggaagccagcgcattatagttcgaagacagacaagaaatttgcaaaattccaagaaaaagcagcacaagtggttaaaatttgggccatccaagccattttaccaaaataaagatatcaccaaggaagaatataaagaaattgtacggaaagcagtagataaagtttgtcatagtaagagtggagaagtaaattctactaaagccggcaaatctggttaaagcctatgtagacaaatacaaatattcacggaaggggagcctaaagaaaactctggaagaacctcgggttactgaaaaagacttaggctgaaatggtgaacgctgtcaaggacattatcaggatatctgtcgagtgcaatttcaacatgtaccattaactgaaaatcatacataactgtgattgaaaatttggttttgataaaattatttttttaacataggatatgatgttttgttctaaataaatataggtctgcactgcaacttctgtatccttccttcccctccaccctcccccacaaaattcaagggaaagtaaagggtttaaaggaatgtgcatctttactaggactgtgttatagtgtggatactggaaaatgtatagctttttgattagggcaatggagtgcataaattagaaactttctaagtgcactggttttcaaagagatatatataatgcatttattctgtcaggttaaaatataaagtatgatctttatgattttttccctctaattatagaaagttaaataatgtattaccatgaaaaatgtttctaatattaaatagaacatatcagttgcaaagttcctaatgtgtatttttaaagcacatatctgaataaattgcctagatagaaaaaaaattatcatcgagtaaaatttagtgttcaaaacattgagacactcttcacctattgtatgaccaaataaaggttatgctgcttgttacgcgaaggcc

SEQ ID NO: 148371 - DNA, 770 bp, Homo sapiens
tgcgtgtggcagttttaagttattagtttttaaaatcagtactttttaatggaaacaacttgaccaaaaatttgtcacagaattttgagacccattaaaaaagttaaatgagaaaaaaaaaaaaaaaagggcggccgccctttttttttttttttttagtttatcaaaagaatttattagaaaatattacacactacatacatatttatttaaagagtgataatttcagtagaacagcgactccaacttcataatacaaacaatatcttcatgggaccctgggggcaatcactgtgcttctgaagctacatcttttggatggaacattccagcagtacacactgtgggccatttaaaggaagggtaaggaggaaaaaaatgtggataattacccaaaacaaatttttaaaaaggcacaaaacttttggggatttttaatgggataacctactattaggtctcaaaattctagggcatttctataaaacattgggtcaatgtgactaggtaagggttaaccggggacccgggtttcaaaggatcaatactgaaccttgataaataataagaggaaatgtaactcccacaaaatgtttctgattaagtttgtggcccatgcaaaattaacataaatttcttaactcaagaatgagggaatattaaagccatggtattttttccacataaagcatgcattttctaatacattcttaaacatttcaaaattttaaaagttcgaattctaatcaagtagctattaatgcagtcta

SEQ ID NO: 148372 - DNA, 470 bp, Homo sapiens
gcgtcgacttttttttttttttgagacagagtctcgctctgttgtccaggctggagtgcagtggcagtctcagctcactgcaacctccatctccaggttcaagcaattctcctggctcagcctcccgagtagctgggattacaggcgcctgccaccacgcccagctaattttttgtatttttagtagagacggggtttcaccatgttggccaggctggtcttgaactcctgatctcatgatttgcccacctcagcctcccaaagtgctgggattacaggcgtgagccaccgcgcccggcccagttactaaaccttcttactttcaagttttgttttttagactacaccccatctttataaatcacttgaatacatgaaaagacttcatgtttaacatctttaattcaaatgtaaaagttcaatacaagccatttatagggcttgagatttgttggtcttttaaaaacaag

SEQ ID NO: 148373 - DNA, 1189 bp, Homo sapiens
cgctcgactttttttttttttttcctcgagagagtgtattgctctgtcacccaggctggaatgcagtggcacggatctcggctcactgcaacctccgcctccccggttcaagtggttctcatgcctcagtttcccaagtagctgggattacaggtgcgcaccaccacacccagccaatttttgtatttttagtagagacagggtttcaccatattggccaggctggtctcgaactcctgacctcatgatccacccacctcggcctcccaaagtgctgggactacaggtgtgagccaccgcacctgtccgcaagaacctctttattatattaagtgttcacagccatgaaagtatttgaatatgtcttacaccgacctttttgacataaattgtcctatcctagttgatgctactattacaatgaaatgatcatgattcatgagatcccaattcacaaactgacaaagcaaacaggaaacaatccaacataacaggcaataattagaaaacatttttgtcactacgaagagaaatcctttggtaagatgaaatcattttgaagccctctgctttgcttctaacctggttcggtcttatcctgtgtccggcttctgggtattggcttcatctcgtatttcagattccgctctcatgtttgcatttgagtttggcatctcatctccctgccttttgatctactttcctcttctataactatcatttttctgattggtcagtgggtttatttgcagcattgcctcattatttgtaaatattgtttattgcagagaacgtgactacagaaaaggaaactgtgatgctcaaagaagaatgttttaagtactaagtttgactggattctttttcttatactgtatctactgctcaaaaatcatgccattgatttaggttcctatttgtacttcaactttccaacaaatatttttttcccctcttttcagagtttctgcccttttgttttctcattgatagaaacaatgtacgcctttttccttattacctaatattatctagcttcttaatcgtgttgtttgctgagattaattctgtactgactgcttttaagactgaaatttctttttattgtacactttggcaagttccactatttcttccacttccctctctttctctcccttcaccgcctccggcctctacctccctttct

SEQ ID NO: 148374 - DNA, 1452 bp, Homo sapiens
atggataggagctgcagcggaggggatcaccagggtagagaggagcagcagcaggaccagcagatgccgccttgcgggggcagttcaggcaactcccacaccgcgctcatttcccccactgcttcactttgggaggccgaggcggacctgaactggggcccaagtggtgaggaggcaggggccggtggcagcatcagcagtggtggcttctacggagtgagcagccagtatgagagcctggaacacatgaccctcacctgttcctccaaggtctgctcttttggcaagcaggtggtggagaaggtggagacggaacgggcccagctggaggacggcagatttgtgtaccgcctgctgcgctcgcccatgtgcgagtacctggtgaatttcttgcacaagttgcggcagctgcctgagcgatacatgatgaacagcgtcctggaaaacttcaccatcctccaggaaactgatgcagcggggagtggcctccgagagctatatgatcgtggccccccccatgccttcttcctggtcaagttctggcaccaatggcccaccatccccaacaaatctgacttaacccatcgttcacttcatcttctctgctcctactcccagaagaaaacaacaacaaatacagccatgaagactgcaacccacattcctgatgtccagtcagcattctgcagtcctcactcaggaactcagcggggagatggcttgggaaagcgaaagcgtggcaggggccggacctgggagcggaggaggcgggtctccatagaaacctccacctgtttccggccgggctgtgagagattaggggctgctgcgggggccaatctcagccagctcgcctcttcccagcggcctctgcgggagcggtgggtgttgtacacaatcatcatggcggcggccggggccccggatggcatggaggaacctggcatggacacggaggccgagactgtggctactgaggctcccgcgcggcccgtcaactgcctggaggctgaagccgcggcgggggcggcggccgaggactccggcgccgcacgaggcagcctgcagccggccccggcccagccccctggggaccccgcagcccaggcctcggtcagcaacggcgaagacgcgggcggcggcgcgggcagggagctggtggacttgaagatcatctggaataagaccaagcatgacgtgaagttccccctggacagcacaggctccgagctgaaacagaagatccactcgattacaggcatcccgcctgatgagagcccccgccggggcggtcctgctgggccctaccagcaatctcagcggttggagctgtatgcccaggccacagaagcgctgctgaagaccggagctgcttacccctgtttctgctcaccccagcggctggagctcctgaagaaggaggccttgcggaaccaccagacgccccggtaa

SEQ ID NO: 148375 - DNA, 8160 bp, Homo sapiens; identical to SEQ ID NO: 138957

SEQ ID NO: 148376 - DNA, 1355 bp, Homo sapiens; identical to SEQ ID NO: 144460

SEQ ID NO: 148377 - DNA, 1981 bp, Homo sapiens
atgggctcgcgctgccttaaccctcctccgcccgcccactctgacaccaccggaaaggattcattcgggaacattcgtggggcggagacgggacagggggcctcggcctgtagcgtcacgtccgccagggttacctgtggggctgggagcgaaccgcactcgcaccgcaaccccggcatcagtgcccaggttggcctcgcgccgtcctacggggcggccagaggccgccgaaggcctctcgcgctgcagcagtctcctcaggagcgccgccatgtgggatggaatagcacacgtgggcttctccctgcgtcacttccggggactgcttccagccaatcggcctccgccacagccagcgcagccttgccccttaaagtcacaggccccctagcgcgaaatcccacgcccccctggacggctgcggccgcactcgccaccagggggcagaggccagagaaagggctatttcccggacccgcccccttcagcttgggaaagcgaaagcgtggcaggggccggacctgggagcggaggaggcgggtctccatagaaacctccacctgtttccggccgggctgtgagagattaggggctgctgcgggggccaatctcagccagctcgcctcttcccagcggcctctgcgggagcggtgggtgttgtacacaatcatcatggcggcggccggggccccggatggcatggaggaacctggcatggacacggaggccgagactgtggctactgaggctcccgcgcggcccgtcaactgcctggaggctgaagccgcggcgggggcggcggccgaggactccggcgccgcacgaggcagcctgcagccggccccggcccagccccctggggaccccgcagcccaggcctcggtcagcaacggcgaagacgcgggcggcggcgcgggcagggagctggtggacttgaagatcatctggaataagaccaagcatgacgtgaagttccccctggacagcacaggctccgagctgaaacagaagatccactcgattacaggtctcccgcctgccatgcagaaagtcatgtataagggactcgtccccgaggataaaacattgagagaaataaaagtgaccagtggggccaagatcatggtggttggctccaccatcaatgatgttttagcagtaaacacacccaaagatgctgcgcagcaggatgcaaaggccgaagagaacaagaaggagcctctctgcaggcagaaacaacacaggaaagtgttggataaaggaaaacctgaagatgtgatgccatctgttaagggggcccaggagcgcctgccaacggtaccgctgtccggcatgtacaataaatctggaggaaaagtgagactcacctttaaactagaacaagaccagctgtggattggcactaagaacgggactgagaaattgcccatgggctccataaaaaaatgtggtcaagtgaccctatccgaaggacatgaagactaccacaatgatggccgtttccagttggcccccacggaagccctcttactactgggtgtactgggttccaactcaatatgtggatgcaatcaaaagacactgtgctggggaaatggcagtatttttgaaagcactttcacctcttggccccaggaggactgaccccaaagtgaaggacatttgccgggaagaggcctgcagcatccctggaatttcagagttctggaactttgttcataaaaaatctatattcaatctgaggtgatgtggtgactgaagccagaggtgatgtactttcaccattaagcttaattttaactttaaattaccagttcccttccttgcagtcaagcttcataccatttttaaagtcaatacgatggaaatcaataaatctgaattccgaacatgttgtgtggaatactcttaagtgtgtttgagagtagatctgccaattatgttgacaagggaatgatcaaaagctttgttttttttaaaa

SEQ ID NO: 148378 - DNA, 915 bp, Homo sapiens
atggccatgagagtgacctctggtcgtcctcactgctacactcccaccagcgccatgacagtttacaaatgccacggacccaaggttccgatccgcgccaaggcgttccggtcagcagcagccccgcggctcctcgggccccgccgcgctggcaagccccagtccccgccagcccaatcgtgctggcgctttaaggacgggcggggcgggctgggcgacagcgctggacacctggagctgcccgaggacgcggaggagagctcccatgggatcatgcctttgagcagccgcacagcaatgtgtgacgggagccacttggcctccaccctccgctattgcatgacagtcagcggcacagtggttctggtggccgggacgctctgcttcgcttggtggagcgaaggggatgcaaccgcccagcctggccagctggccccacccacggagtatccggtgcctgagggccccagccccctgctcaggtccgtcagcttcgtctgctgcggtgcaggtggcctgctgctgctcattggcctgctgtggtccgtcaaggccagcatcccagggccacctcgatgggacccctatcacctctccagagacctgtactacctcactgtggagtcctcagagaaggagagctgcaggacccccaaagtggttgacatccccacttacgaggaagccgtgagcttcccagtggccgaggggcccccaacaccacctgcataccctacggaggaagccctggagccaagtggatcgagggatgccctgctcagcacccagcccgcctggcctccacccagctatgagagcatcagccttgctcttgatgccgtttctgcggagacgacaccgagtgccacacgctcctgctcaggcctggttcagactgcacggggaggaagttaa

SEQ ID NO: 148379 - DNA, 2023 bp, Homo sapiens
atgcctgcccaggacaccatgaacagagataactactggcccaaggtcccagggccagttagtgccagagccacaagcagtgcccagtctgtctttgaagagcctgaggaccccagtaaccgctcattcttctcggaaatcatctcctccgtgtccgacgtgaagttcagccacagcggccgctacatgctcacccgggactaccttacagtcaaggtctgggacctgaacatggaggcaagacccatagagacctaccagctcagaggtcagccgtgtgcctggtcgtgggcccccgataagatgagcagggctgtattgggctgtgtcacggtggaggtcagccgtgtgcctggtcgtgggccccccgataagatgagcagggctgtattgggctgtgtcacggtcggggtccatgactaccttcggagcaagctctgttccctgtacgagaacgactgcattttcgacaagtttgaatgtgcctggaacgggagcgacagctggctctgctctgcccggctggaacctctgtccttgtttgcctcccgcaatgggtggggtgccctggggggctactatgactcaacctgttctgagcccttcactggggacctcagcgtcatcatgaccggggcctacaacaacttcttccgcatgttcgatcggaacaccaagcgggacgtgaccctggaggcctcgagggaaagcagcaagccccgggctgtgctcaagccacggcgcgtgtgcgtggggggcaagcgccggcgtgatgacatcagtgtggacagcttggacttcaccaagaagatcctgcacacggcctggcacccggctgagaacatcattgccatcgccgccaccaacaacctgtacatcttccaggacaagccaacattgaccaattgccagctctgggatcttgcagatgtgattaaggtcatggacctgaagatggaatttagcctggattatccatgtgggacccatctaatcacccaagtccgtgaaagtgtaggaccgttcctggttgtattggagacagctgtagcaacagaaaaaggctcagcaaggcatgacatgaagactcgaccagcgagccccaaggtcttaattactaaactgtatcctggaccttctggctacctggtggggcctcaggcctcggaaggtgacattctgcccaggccccctggcactggcacggacacagatgctcgagagtcaaagaagggatcaaaacaaagagaacgggagctggaccgtggccttgaagatgggaagcaagaaggcacatgggggagtggaaacagcttagagactgagagagcagagcccaagcccgcgagaaaggaagcaaagatgttgccggaaaggggtcccaatccagaccccaagagagggctcttggatctcgtggaagaaagaattcagggcaagtccatggagaaaagtgaaagcaagtttattaggaaagtaaaggaatacaagaatggctactccatggacagagcatccctgagggctgctggttgcctatttttatggttatttcttgatgatatgctaaacaaggggtagattattcatgcctcccctttttagaccctatagggtaactttctgacattgccatggcattttgtaaactgtcatggtgctggtgggagggtagcagtgaggacgaccagaggtcactctcgttgccatcttggttttagtgggttttggctggcttctttactgccaactgttttatcagcaaggtctttatgacctgtgtcttgtaccgaccgcctatcttatcctgtggctaatgccttggctgtctgggaatgcagcccagcaggtctcagcctcattttacccatcccctactcaagatggagttgctgtggttcagatgcctctgacaattagatggggctaaggttgactcctgggtggcaggcctgagaacagggtggatgacagtgccatcttccaggctggctgatcctggaagaggaccaggcttcgggga

SEQ ID NO: 148380 - DNA, 709 bp, Homo sapiens
gcgaccgctacatgctcacccgggactaccttacagtcaaggtctgggacctgaacatggaggcaagacccatagagacctaccaggtccatgactaccttcggagcaagctctgttccctgtacgagaacgactgcattttcgacaagtttgaatgtgcctggaacgggagcgacagcgtcatcatgaccggggcctacaacaacttcttccgcatgttcgatcggaacaccaagcgggacgtgaccctgggaggcctcgagggaaagcagcaagccccgggctgtgctcaaagccacggcgcgtgtgcgtgggggggcaagcgccggcgtgatgacatcagtgtgggacagcttgggactttcaccaagaagatcctggcacacggcctgggcacccggctgagaaacattcatttgccattcgccgccaccaacaacctgttacatctttccaggggcaaggtaaactctgacatgcactaggtatgtgcagttccccggcccctgccacccagcctcatgcaagtcatccccgacatgaccttcacgaccgcaatgcaaggaggggaagaaagtcacagcactgatgaggacagctgcagaggtggcagtgtgtggacacaggaagtttgggccccctccctgccccagctttcctaggccagaattgtgtttggcagtatttgctgtttaaaaaatagaaaggg

SEQ ID NO: 148381 - DNA, 1320 bp, Homo sapiens; identical to SEQ ID NO: 116212

SEQ ID NO: 148382 - DNA, 1531 bp, Homo sapiens
  misc_feature (1)...(1531): n = a,t,c or g
ttcggcacgagaaaacctggtgcagtaggggcaggagagtttgtgagcccctgtgagagtggagacaacaccggtgaaccctctgccctggaagagcagagagggcctttgcctctcaacaagaccttgtttctgggctacgcatttctccttaccatggccacaaccagtgacaagttggccagccgctccaaactgccagatggtcctacaggaagcagtgaagaagaggaggaatttttggaaattacctccattcaacaagcagtatcaagaatcccagcttcgagcaggagctggctatatccttaaagaattcaaagaagcccaggtgaggagtttctttgtgtaacctaatatagtggcaatgataagagccaacttgctgtgttgagaagaggcctgggaggggttggggaacctggataaagttacccagagatttcaggaactgagaaactgccaaaatgtttttgcatgaaatagaatttttgttgtgtatagggaagagaaggtaggaccttgggttagttaatgggctatgggttctgttgctggggacaaaagaagattgatgtttatgtttagtagtagaaacccctattagggtttgctgattttttagcctgaaaacgtgnaggttcataggtttttggttgtccgttgaggatttaggtcctcagtatgctgcaggtgaggcagagagaacatctatggaaattacttgggccttccagtgagaagagtggccttgggcaggatagactaaatcacattttgggtagtagttgggagtcttcagatctgctcttcgatggctcagtgtatggctgctgcttaggagctttccacagaagtcaccaaacccattggctctgcttcttttcttgcagtgtaaccaccagcttaccagtgtcttctaaattgcgggaaccagcattgtccgaaacccggaagtacttccctgtgccttgcccagtgggattcccttgtgtgtcctcatgtcctgggtcccatgaataagttgcccatgcccaaccagctcccagaactacccgtaattaatctgttgcccagctgggtaacacccttgaaggagccaaagaattcctggactggtaagtatttgaagccccatcccagaattgtataggcaggaggaacagcaagctttggagggaagagaatctaggtgagagagtaaagctttctagaaattggaatgtctgtgggataaatttgagtgggtttgaaatgacttcaggagtttatctagtttatttccataggttacattggctaggaaccttttgcaaatgtgtgaagatttgtatataggttcaatattctcaacctgtaaagtcagagaactaagttttaagcaagcattaaaaatatataggctcaggagcatgatttggattattctcagccccagaacaaacatggaaattagaaagccaggaatgcaaggaatacagatcattcatagaaagaaaaaagagaagggggaccctaatatagggcttag

SEQ ID NO: 148383 - DNA, 485 bp, Homo sapiens
tgcggcggggtcttactctgtcatctaggctggaatacagtggtataattaagactcactggaatcttcacctcctgggctcaagcaatcctcccacctcagcttcccaagtagctgggaccacaggtacatgtcaccatgcccagctaaatttttttttttaacgtttttagtagcgacaagatctcatgatattgcccaggctggtcttgaactcctggactcaagccatccccctgcttcagcctcccacagtgccgggactacaggtgttaaccaccatgcctggcctgcagtagcacttctgtggataaattaatgccagcaaattataccagatggttcattttaatgaaattaaccaagtatctgctacgggttcttcatatttatagggttctctcattctattctcactctccacttggtttaaaacaaaaattgtatggtaggagtctttgttcttcaaagtttgacagaatatt

SEQ ID NO: 148384 - DNA, 487 bp, Homo sapiens
  misc_feature (1)...(487): n = a,t,c or g
taagcaaggaatcatcatgacctatgttttaagaaggccattctttttttcgagatggagtcttgctctgtctcccaggctggagtgcagtggcgcgtttttggctcactgcaagctccgcctcctgggttcctgccattctcctgtacaggtgccagccaccaagcccggctaatttttttttgtattttttagtagagacagggtttcttttttagtagagacagggtttcaccgtgttagacaggatggtctccatctcctgacctcgtgatccgcctgccttggcctcccaaagtgctgggattacaggcgtgagcccccgcacccggcaagaaggccattcttagcgctaagaggagaatggaataggataataagtagtaaggggataaagatcggacgcgtggctcgacccgggccttccggnccggtngctcgtgcgtacgctatcantanggngttctatgggggggggcctcccctc

SEQ ID NO: 148385 - DNA, 418 bp, Homo sapiens; identical to SEQ ID NO: 115881
  misc_feature (1)...(418): n = a,t,c or g

SEQ ID NO: 148386 - DNA, 539 bp, Homo sapiens; identical to SEQ ID NO: 145243

SEQ ID NO: 148387 - DNA, 1502 bp, Homo sapiens
agcctagcactctgacctagcagtcaacatgaaggctctcattgttctggggcttgtcctcctttctgttacggtccagggcaaggtctttgaaaggtgtgagttggccagaactctgaaaagattgggaatggatggctacaggggaatcagcctagcaaactggatgtgtttggccaaatgggagagtggttacaacacacgagctacaaactacaatgctggagacagaagcactgattatgggatatttcagatcaatagccgctactggtgtaatgatggcaaaaccccaggagcagttaatgcctgtcatttatcctgcagtgctttgctgcaagataacatcgctgatgctgtagcttgtgcaaagagggttgtccgtgatccacaaggcattagagcatgggtggcatggagaaatcgttgtcaaaacagagatgtccgtcagtatgttcaaggttgtggagtgtaactccagaattttccttcttcagctcattttgtctctctcacattaagggagtaggaattaagtgaaaggtcacactaccattatttccccttcaaacaaataatatttttacagaagcaggagcaaaatatggcctttcttctaagagatataatgttcactaatgtggttattttatattaagcctacaacatttttcagtttgcaaatagaactaatactggtgaaaatttacctaaaaccttggttatcaaatacatctccagtacattccgttcttttttttttttttttttttttttgagacagtctcgctctgtcgcccaggctggagtgcagtggcgcaatctcggctcactgcaacctccacctcccgggttcacgccattctcctgcctcagcctcccgagtagctgggattacgggcgcccgccaccacgcccggctaattttttgtatttttagtagagacagggtttcaccgtgttagccaggatggtctcgatctcctgaccttgtgatccacccacctcggcctcccaaagtgctgggattacaggcgtgagccactgcgcccggccacattcagttcttatcaaagaaataacccagacttaatcttgaatgatacgattatgcccaatattaagtaaaaaatataagaaaaggttatcttaaatagatcttaggcaaaataccagctgatgaaggcatctgatgccttcatctgttcagtcatctccaaaaacagtaaaaataaccactttttgttgggcaatatgaaatttttaaaggagtagaataccaaatgatagaaacagactgcctgaattgagaattttgattttttaaagtgtgtttctttctaaattgctgttccttaatttgattaatttaattcatgtattatgattaaatctgaggcagatgagcttacaagtattgaaataattactaattaatcacaaatgtgaagttatgcatgatgtaaaaaatacaaacattctaattaaaggctttgcaacac

SEQ ID NO: 148388 - DNA, 566 bp, Homo sapiens
tttttgaggcagagtctcactccgtcaccaggctggagtgcagtggcgcagtcttggctcactgcaagctccgcctcccaggttcacgccattctcctgcctcagcctcctgcgtagctgggaccacaggcgcccgccaccacgcccagctaatcttttatattttttagtagagacggggtttcaccgtgttaggcaggatggtctcgatctcctgaccttgtgatccgcctgccttggcctcccaaagtgctgggattacaggcgtgagccaccgcgcccacccaacatactaacaaattaaactatttctatattgaacagtttggggcctttgtcccagactggtatttctactagttactcaaacaatgacaccctgttggagtttagtttaaaaatacacgcagaagttcatgattatctatattacaaggaataaatacaggaaatcaaagaatcttccaggcttacttgaactatattaaccagtttgccatactgagtggtaagttggatgacttcagtgtttatttatttataaagttacatcttaaagtggccag

SEQ ID NO: 148389 - DNA, 5637 bp, Homo sapiens
tgtttttctcacaatttcatggattatgggtttgggacaggaagaccacaaagataaagggccattttcattatatcatattaaaggtacatgtgatcaacatgacatcactgtttatgttaaccttgatgatgaccttgttttcatctggtttctccactataagttactcctctcctcacttcccatttccagactctgctctctggaaggaagtcactgtgtgtagcccatatttaagtgatagaaagtaatgttctacctccttgaaccaggggtattatccacataaattatttggaattcttctgcacaaaaaacttacctcttctcctctacatattaatttattcaatcacttacatatatcagtgtagactcatagatacttattttgtactttagcttataatttggcttttctttctttctttttttttttttttttgctctatttgttacaactttagctgtgggagctctttcaggtggctcttgtgtcccttttactccctcagtgtgtgtgtgtctgtgtgtgtgtgtgtgttgagcattttcttactttctggcactgaaagatatatctggtataaaagacaaacgatacacctatctacatggggcacttactgtgaatagaacttgcaggactggaagttgctttcggtgagtcattgagtgagtggtgggtgaatgtgaaggctcagttcattactgtacactactgtagactttataaatactaaggatacacacgaaatttattttaaaaaactatcttcaataattaaccttggcttattgtaacttttcattttataaactttttaattttttgaaactttttactcttttgtaatcacacttagcttaatcacaaacatgtatagctgtacaaatttttttctttttttctttttttttttttttgagacagggtcttgctctgtcatccaggctggagtacagtgacgcgatcatgggtcactgcagccttgacctctctagctccagtgatcctcccacctcagcctcttgagtagctgggaccacaggtgcacgccaccacacccagctaatttttgtattttttgtagagacaagttcttcctgcgctggccaggccagtttcacacgcctgggctcaaacagtcctcctgcctcaatctccccaagtgctaggattgcaggtgtgagctgccacatctggctttttactttgtatccttattctataagctcttttcttttcttttttcttttttttttttgagacggagtctcgctctgttgcccaggctggagtgcagtggcgcgatctcggctcactgcaagctccgccttccgggttcacgccgttctcctgcctcagcatcccgagtagctgggactacaggtgcccgtcaccgaattttttttgtatttttagtagagatggggtttcaccgtgatctcgatttcccgacttcatgatctgcccgagggattacaggcgtgagccactgcacccggcccttttctttttttttttttttttttttttttgagacggagtctcactctattgcccaggctggagtgcaatggcgctatcttggctcgctgcaacctctacctcctgggttcaagcaattcgcctgcctcagcctctcgagtagctgggattgcaggcatgcaccaccacgcccggctaattttttgtattttagtggagatggggtttcaccatctctaacttgaactcctgatctcaagtgatccacccgcctcggccttcaaaagtgctaggattacaggtgtgagccaccgcgcctggcctatacgcttttttctgttaaaaaatatttttaagtttttaaacttttgttaaaaattgagacagaagcaaacacattacttactaggcctacacagagccaggattatcagtatcaatcccttccgcctccacatcatgtcccactggaaggtcttcggggcagtaacggacatggagctgttatctcctaacatgccttcttctggaatacctcctgaaagacctgcctgaggctatttaacagttaactttttttttatatgtaagtaggagtactctaaaataacaatataaaatgtagtacaataaaataaataagccagtaacgtagttgtttattatcaagtatgtactgtacataattgtatatgctagacttttatacagctggcagcacagtaggtttatttataccagcacctccacaaacatgtgagtaatgctttgcacttgaccttctgtcagctatgacatccctaggttgcaggatttttcagcttcattataatcttatgggaccatcttcatatgtgagtggtctcttgacccaaacattgttatgtagcacatgactgtaaattttggaatcaccttgtcagtatttacaaaatagctttctgagatttagtggcaggatctcagctcactcctacctgcacctcccaggttcaagcgattcttatgcctcagcctcccaagtaactgggattatagacgtgcaccaccaagcatggctaatttttgtatttttagtagagacagggttttgccacattggccaggctggtctcaaactcctggcctcatgtgatctgcccgcctcagcctcccccagagtgctgggattacaggtatgagccactgcgcctggccaaaattgcctaaatttttaaaatcctaaattggtgttgaattttgtcaaatgctttcctgcattgattttgatgatcacttgatttttctccattcttttgttaatgtgctaaattatgttgcttaatttttgaatgaaaaaataatcttacattcctgaaataatttcggtttggttgtgatgttttattcattctatttcgtgctgaattcagtttgctaatattttgtttaggaattttgcatctatgttcatgagacagatcggcctgtaattttacttttttgtaatgtccttgtcaggtttaggcctcaaagttatgttgactttataaaatgaactgtgaagtatttcctcttttttatgctttagtttgagtaagattgattttttttaaaacttatgtcgtccttaaatatttattagaattcactagggaagttatcttggcctgttactttctttcttgagtaaattttgttttcattctttttttatagttaagtatattgagttagaatgcatacacaaacaaatgcacacaacttaaagtccagttctatgaattttgactaatgtataaacctgtttaacttccactgtaagcaaaatatagtgaattttcgtcaactaaaaagtccccttgtacccatttaccttcagtacctatccctaccccagccacaggcaacaaatgattttcatgtgcttatttgccatctgtatacctctttggttagttttctgtttatatcttttgcccatttatttttttttttttttgagacagagtcttgctatgttgcccaggcaggtcttgagctcctgggcttaggggatcctcccgcctcagcctcccaagtagttgggactacaggcacacactactactcttggtttgcctatttttaaatcaggttgtttgttttcttattattgtgttctctacactgtaggatattctacctttcctagaatttcatgtaaatggactcagacatactgttgtgtctggcctcttttgttcagtgtaatgtttttgagcttcatccttgcatgttatgtgtatcagtgattgattcaatttttattgctgcatagtattggattgtatagctataccacaatttgtttattcattctcctgttgatggaatattggttgtttccagtatttagctattattattattattttttttttttgagacggagtcttgctctgtcgcccaggctggagtgcagtggtgccatctctgctcactgcaagctccgcctcccgggttcacggccattctcctgcctcagcctcccgagtagctaggacttacaggcgcctggccaccacgcccagctaatttttttgtatttttagtagagatggggtttcactgtgttaaccaggatggtctcgatctcctgaccttgtgatctgcctgcctcggcctcccaaagtgctgggattacaggtgtgagccaccgcgcctggtcttttttgtttgttttgttctttttttagacagagtctcactctgtcaccccaggccggactgcggactgcagtggcgcaatctcggctcactacaagcctgcgcccctcaggttcaagagattcttgtgccccagcctcctgagtagctggggttacaggcgtgtgccaccatgcctggctaatttttctttttttttttttttttgtatttttttttagtagagacaggagtttcacccgtgttagccagggatggtctcgatctcctgacctcaagtgatcttcctgccttggcctcccaaaagtgctggggattacaggcgtgagccaccgcgcccggccagggatgtcattttttataactagccataaactttagctttgaagtaaaactatttctagcaagtgattcttacctgatattttttgttgttcttgcccatattttaattgggttgtgttattatggttctctatgtattctagatttaagtttttgtatatggtgtgaggcaagtgtcaagtttaattttttttctacaaacatcctgttgttccagtaccttttgatgataagactgtcttttcccccattgaattatcttaacgccctcatgaaaagcaattggccatatgtatgtggatctacttttggactctcaattctgttccagtgatttatatgtccacccttatgtcaataccacattattttgattattgctgctttatagtaagtgacatcatgttgcctgaaatcacgttttccacctttattcttctgttgatggttgctttggcaattaggggtcctttgcattttcgtagacattttagaatcaacttatctattgctactaaaaatgcttgattgggattgtggtaaatctagaaactaatttaggaagaatggtcatattaacagtttcaagtttcagatccatgagcatattttcactctccattaggtcttttaaaatttatcctagcagtgttttatggtttttactgtagaggtcttacacattttgttacatttgttgctatgtgtttgaccttttttgatactagtgtaaatggaaattttttcttttatgttctagttgttcattattacactaaatcatctttgggtgactactaaacattctattgaaaatttgtgaatggcgtgaacccgggaggtggagcttgcagtgagccaagatcgcgccactgcactccagcctgggcgacagagcaagactccatcttaaaaaaaaaaaaaaaaaaaatttattaagggaaactatggcctggtttttaaacttcaattctgatttaagggcaaaattgtatcaatcccctaatgccaaaaattactacttggcactaacacatttttatttatttttccttcaacggggccaggggactctggttcaatttaattttttgaaatttaacgggctg

SEQ ID NO: 148390 - DNA, 812 bp, Homo sapiens
tttgctttcaaattattttattgcccatcaaattgtaaatgtttcttcaagactcttgatcagataattatgagaagtcacacaacatacaggagatgactgggcttcaatcgactttacttgtcaataacagagtacaactgaactttaagtgggagctgaatttctttctttcttttttgaaacagagttccactcttgttgcccaggctggagtgcaatggcacgatctcggctcactgcaacctccgcctcctggggtcaaacgattctcctgcctcagcctcccgagtagctgtgattacaggcatgtgccaccatgcctggctaattttgtatttcttttttttttagtagagacggggtttctccatgttggtcaggctggtcccgaactcctgacctcaggtggtccgcccgcctcggcgtctcaaagtgctgggattacaagcgtgacgcatccgacccctgcctgaggattctgccttttaccaatgcaggttgaacctctggcaaagaagccccttggagtgtaggtgttccttggtcttgaagacttagaggtggccatagagaggacagtggcctcaggtggggaactccccccccactctcattctgcaagtgcacaaactatcaaacatagcggactctggaactgggccaactcttcactgtatgcattagtcctcgcagtgtttttttcttcttcagatattggcatgttccctggattttgtatttaaagaaaaagatatattcttgggcctcagtatctgaagataccatccgggcctcggccaagctggcgt

SEQ ID NO: 148391 - DNA, 506 bp, Homo sapiens
tttttttttttaagacagagtctcgttctgtcaccaggctggagtgcagtggtgcagtcttagctcactgcaacctccaactccctggttcaagcaattctcctgcctcagcttcccgagtagctgggattaccaggcatgtgccaccacacccggctaatttttgtatttttagtagagacagggtttcaccatgttggccaggatggtctcgatctgctgaccttgtgatccacccgccctcggccctcccaaagtgcctgggattacaagtatgagcgactgtgcctgggcccaaacagttctttaaaattctccatcctatgattaaaaagcagcatgttgttctttctttagattcagggaaacagaagtgaagtctttgaaataaatattttgctgctttttacatacttcacctttggatacatctagacttataggattataaacattgttaaaaagtgctgattagtcttcagaattataaaggagcacaatagtca

SEQ ID NO: 148392 - DNA, 4118 bp, Homo sapiens
gggctggctgcggcggtctcgctcggctgtccgttccttgctggagaatttggccacaaagagctgccaagatagctgggccaggaagaaagcgccgcagccctgacccagacgctgttgccgaccccggggcactctggctgtcgaccaagcggctcaagatgtctggcggggccagtgccacaggcccaaggagagggcccccaggactggaggacaccactagtaagaagaagcagaaggatcgagcaaaccaggagagcaaggatggagatcctaggaaagagacagggtctcgatatgttgcccaggctggtcttgaacctctggcctcaggtgatccttctgcctcagcctcccatgcagctgggatcacaggctcacgccaccgtacccggctgttctttccttcatcgtcagggtcagcatccactcctcaagaggagcagaccaaagagggagcttgtgaagaccctcatgatctcttggctactcccactccagagttgttgctcgattggaggcagagtgcagaagaggtgattgtcaagcttcgtgtgggagtaggtcccctgcagctggaggatgtagatgctgctttcacagatacagactgtgtggtgcggtttgcaggtggtcagcagtggggtggtgtcttctatgctgagataaaaagctcttgtgctaaagtgcaaacccgcaagggcagtctcctgcacctgacactgcccaaaaaggtgcctatgctcacgtggccctccctcctggttgaggctgatgaacagctttgcataccaccgctgaactcccaaacctgcctcctgggctcagaggagaatttagcccctttggcaggagagaaagcagtgcctcccgggaatgacccagtctctccagccatggtccggagcagaaaccctgggaaagatgactgtgccaaggaggagatggcagtggcagcagatgctgcaaccttggtggatgagcccgagtcgatggtgaacctggcgtttgtcaagaatgactcgtatgagaagggcccggattcagtggtggtgcacgtgtacgtgaaggagatctgcagggacacctcaagagtacttttccgtgagcaggacttcacgctcatcttccagaccagggatggaaacttcctgaggctgcacccgggctgtgggccccacaccaccttccgttggcaggtgaagctcaggaatctgattgagccagagcagtgcaccttctgtttcacggcttctcgcatcgacatctgccttcgtaagaggcagagtcagcgctgggggggcctggaggccccggctgcacgagtgggtggtgcaaaggttgccgtgccgacaggtccaacccctctggattcaaccccaccaggaggtgctccccaccccctgacaggccaggaggaggcccgggctgtggagaaggataaatccaaggcacgatctgaggacacagggctagacagtgtggcaacccgcacacccatggagcatgtaaccccaaagccagagacacacctggcctcgcccaagcctacatgcatggtgcctcccatgccccacagcccagttagtggagacagcgtggaggaggaggaagaggaagagaagaaggtgtgtctgccaggcttcactggccttgtcaatttaggcaacacctgcttcatgaacagcgtcattcagtctctgtccaacactcgggaactccgggacttcttccatgaccgctcctttgaggctgagatcaactacaacaacccactagggactggtgggcgtctggccattggctttgccgtgctgcttcgggcgctgtggaagggcacccaccatgccttccagccttccaagttgaaggccattgtggcgagtaaggccagccagttcacaggctatgcacagcatgatgcccaggagttcatggctttcctgctggatgggctgcacgaggacctgaatcgcattcagaacaagccctacacagagaccgtggattcagatgggcggcccgatgaggtggtagctgaggaagcatggcagcggcacaagatgaggaatgactctttcatcgtggacctatttcaggggcagtacaagtcgaagctggtgtgccctgtgtgtgccaaggtctccatcacttttgacccgtttctttatctgccggtgcccttgccacaaaagcaaaaggttctccctgtcttttattttgcccgagagccccacagcaagcccatcaagttcctggtgagcgtcagcaaggagaactccactgcgagcgaagtattggactccctctctcagagtgttcatgtgaagcctgagaacctgcgtttggcggaggtaattaagaatcgttttcatcgtgtgttcctaccctcccactcactggacactgtgtccccatctgatacgctcctctgctttgagctgctatcctcagagttggctaaggagcgggtagtggtgctagaggtgcaacagcgcccccaggtgcccagcgtccccatctccaagtgtgcagcctgccagcggaagcaacagtcggaggatgaaaagctgaagcgctgtacccggtgctaccgtgtgggctactgcaaccagctctgccagaaaacccactggcctgaccacaagggcctctgccgacctgagaacattggctaccccttcctggtcagtgtacctgcctcacgcctcacttatgcccgcctcgctcagttgctagagggctatgcccggtactctgtgagtgtattccagccaccctttcagccaggccgcatggccttggagtctcagagccctggctgcaccacactgctctccacaggttccctggaggctggggacagcgagagagaccccattcagccacctgagctccagctggtgacccctatggctgagggggacacagggcttccccgggtgtgggcagcccctgaccggggtcctgtgcccagcaccagtggaatttcttctgagatgctggccagtgggcccattgaggttggctccttgccagctggcgagagggtgtcccgacccgaagctgctgtgcctgggtaccagcatccaagtgaagctatgaatgcccacacaccccagttcttcatctataaaattgattcatccaaccgagagcagcggctagaggacaaaggagacaccccactggagctgggtgacgactgtagcctggctctcgtctggcggaacaatgagcgcttgcaggagtttgtgttggtagcctccaaggagctggaatgtgctgaggatccaggctctgccggtgaggctgcccgggccggccacttcaccctggaccagtgcctcaacctcttcacacggcctgaggtgctggcacccgaggaggcctggtactgcccacagtgcaaacagcaccgtgaggcctccaagcagctgttgctatggcgcctgccaaatgttctcatcgtgcagctcaagcgcttctcctttcgtagttttatctggcgtgacaagatcaatgacttggtggagttccctgttaggaacctggacctgagcaagttctgcattggtcagaaagaggagcagctgcccagctacgatctatatgctgtcatcaaccactatggaggcatgattggtggccactacactgcctgtgcacgcctgcccaatgatcgtagcagtcagcgcagtgacgtgggctggcgcttgtttgatgacagcacagtgacaacggtagacgagagccaggttgtgacgcgttatgcctatgtactcttctaccgccggcggaactctcctgtggagaggccccccagggcaggtcactctgagcaccacccagacctaggccctgcagctgaggctgctgccagccaggcttcccggatttggcaggagctggaggctgaggaggagccggtgcctgaggggtctgggcccctgggtccctgggggccccaagactgggtgggccccctaccacgtggccctaccacaccagatgagggctgcctccggtactttgtcctgggcaccgtggcggctttggtggccctcgtgctcaacgtgttctatcctctggtatcccagagtcgctggagatga

SEQ ID NO: 148393 - DNA, 899 bp, Homo sapiens
ttccctgttaggaacctggacctgagcacgtactgcattggacagaaagaggagcagctgcccagctacgaactatatgctgacatcaaccactatggaggcatgattggcggccactacactgcctgtgcacccctgcccaatgatcgtagcagtcagcgcaatgacgtgggctgtcgcttgtttgatgacagcacattgacaacgagagaccagagccaggctgtgactcgttatgcctatgtactcttctaccgccggcggaactctcctgtggagaggccccgccaaggcaggtcactctgagcaccacccagacctaggccctgcagctgaggctgctgccagccagggactaggccctggccaggcccccgaggtggcccccacgcggacagcccctgaacgcttcgccccccctgtggatcgggcagaccccccccctaaaacaaacatgaagaagggtgaattagcaggtccctggctgaatgggggggaactgggtttgggacacccccacacagagggccagctcccttgcccgcttctccttcctctaacccaaaggacactgggttctgtcagtgggaagctgaggggtatgatttgggtgtggagacctctcaggttgggacttcttgtcagcttggacccctgaccagtgggctttggcttttccagccgcctccagtgctgcgtgatttgattctgttgtaccttcaattcttctgacccgcattataaacattataattttattctaaaaattgtaattttttttgcattttggaagtgactgctgctgtttaaatatattttaaaaataaataataagtaagtagacttagtgactgtgatccaccacatgctggggccacctcccctccccatcatttgcg

SEQ ID NO: 148394 - DNA, 398 bp, Homo sapiens
aataaccaggagtcctgctctgtcactgaggctggagtgcagtggcatgatcttggctcattgcaacctccgccttctgggttcaagcaattttcatggctcagctcctgagtagccaggaccacaggcacatgccaccatgcccagctaatttttatgtatttttattaatagcagagatggggttttaccatgttagtcaggctggtctcgaactcctgacctcaagtgatctgcctgccttggcttcccaaagtgctggcattataggtgtgagccaccgtgcctgggccaaataaattctcttttaaactacattctgacttttgattattttaggttgataggaattatgtttgtttaaaagaaatatttcttctaaaaagggaaaaatcttt

SEQ ID NO: 148395 - DNA, 1340 bp, Homo sapiens
tgttttttttttttttgtttgagacacagtctcacgtctcacatcaggctggagtgcagcggagtgaatctcagattactgcaacctctgtctcccaagttcaagtgattctcttgtcctagcctccggagttagctgggactatgggtgtgcgtcacaacgcccggctaatcttcgtattcctagtaaagatgaggtttcaccatgttggccccaggctgggtcctcaaattccctggactggcatatggatcccatcccacttcggccctccccaaagtgcctaagatttataggtgtgtgcccaccgtgcccaagtcttttacttttaaatgtgggtaactttgaagctctaaatatcaaagaattttttgaacaagagacacttcagcacacatttagaagtaaaatataaccagtcgcctttggatttacctccactactcaaatactagaatactgaggaccgtagcctgaggaccatagccagctggtccttaatgtcagccaatccctggcaccctggaatcaatgtatcatattcactaatcttcctattgcccagaatcttagcactatttcaccaattcagtttggtgatgctgagagaattgattctagggataaagactactaagaatgcacaatgtactaattccaatttcaaatactagcactgaagaatgccattctaaatatattaatgttatgcttaggcagttttatccatagttttggtcactaaaatcgtccaagtagagcaatatcaaaaacttatttcattataaaaattagacttcgctaattctgtcttttaaaaaccccaattaaagttcatttactgtaattaacaaacaaatatatgacttaagaactaaagagacagacttatcttaaatgcatagttagctacatgacttgggagctgattatctggtttctagattatgaagtcccttgtatttgacttctgattaatttctccaatcagttatgagaaaaggaaaggtaggaaaaagaaacagggaaaatcttagaaattattagctgctcttacaaaagtttaggtcaaagatttaagaaagataaacccgacggctaaatgtaggcttcattaaaaattaccaaaagacagttgtatgctgatcatagagttttcaactatacatagacccataacattttgttgaaataatactgtggtatacatctatattcttatatgcaaaggccagaaactgtctctggttggacctatttacatctgtaaaagatgaagcagtagccctttctaggaagctggaaagggtatgtaagattatatatatacatacatatcc

SEQ ID NO: 148396 - DNA, 1425 bp, Homo sapiens
ctcgcgcaagcggcgtgcggtcccgcggcgctgcagttgtgtccagccggtcacggggcggctatggcggccacgttcttcggagaggtggtgaaggcgccgtgccgagctgggactgaggacgaagaggaggaggaggaggggcggagggagacgcccgaggacagggaggtgaggcaccgggataagggcagcgcgctcaccgcagctggaaggtgcgcgggcctggcagccgcgacggcgcctaaggccggggctccgcggtcttccgagtggcccccgcggttgccgccgctccttggctctgcttgggccctgggtctccgtgaagccgcggcgtccagcggcgccagccccagggacttatcttccgaagaggaaaggtttatgaaacctaaagtaacaatgatagcttggaatcaaaatgatagcattgttgtcacagctgtgaatgatcatgtcctcaaagtgtggaattcttacactggacaactgcttcataacttaatgggacatgctgatgaagtatttgttctggagacacatccctttgattccagaattatgttatctgcaggacatgatggcagcatatttatatgggatattacaaaaggtaccaagatgaaacattattttaatatgattgaaggacaaggacatggagctgtgtttgactgtaagttttcacaggatggacagcattttgcctgtacagattctcatgggcaccttctgatatttggttttggatgcagcaaaccatatgaaaagattcctgatcagatgttcttccatactgactatcgaccacttattagagattctaataattatgtcttagatgagcaaactcagcaggctcctcatcttatgcctccaccattcttggtagatgtagatggaaatcctcatccaaccaagtatcagagattagtaccaggccgagaaaattctgcagatgaacatttgattccacagctgggctatgtggcaacaagtgatggagaggtgattgaacaaattataagcctgcaaaccaatgataatgatgaacgcagcccagaatcgagtattcttgatggaatgataagacagttgcagcagcagcaagatcagagaatgggagcagatcaggatactattccaagaggactttcaaatggtgaagaaacaccccggagaggttttagaaggctgagcttagacattcagtcccctccaaatattggtctgcgtcgtagtggacaagttgaaggtgttcgtcagatgcatcaaaacgctccacgcagtcagattgctacagaacgtgacctgcaggcttggaaacgaagagtggttgtaccagagaatattccccaaagcactgagatactaaagaaattgatgacaacaaatgagattcagagtaacatttatacatga

SEQ ID NO: 148397 - DNA, 612 bp, Homo sapiens
atttgaaagatggatgaatcttgggtagaagtgtgcagagggaagcagtgtgagcagagtgggaaagtgtgaggagagccgtgaggagtgtggtgttggtggagaggggaggaagacatcttgtggggaaggtcgggcgggttagagcatagacttcctccagaggccaggagactatctgttgccaggagatcatcggcgagtgtggcagggaaagggcctgttgaactgactttcccacttgccttttcgttgagaaggagagtaaaggccacgcctgtcccatggctgtttttaagtctcgagtgtggagattgttggtcgtggagggaggggtgttgcctctgcctgaatccctggggtctcactgtattcacttttttctctcctttcagaatattccccaaagcactgagatactaaagaaattgatgacaacaaatgagattcagagtaacatttatacatgatcttaaacattgttttgtagtggatattacttggccattcctttaaggggagcagcctgcactcttttgtagattacttttgggggatatattttgagaatgatgaaacggaataaaattgtaaaaaactaattgtagtttt

SEQ ID NO: 148398 - DNA, 1719 bp, Homo sapiens
  misc_feature (1)...(1719): n = a,t,c or g
tttttttttttttttgtcgagatgggggtctctctattgctcaggatggtttcaaactcctgggctcaaacaatcctcccgcgttggcctccccacaagagcttggattacaggcatgagccaccatgngcacncccaagctgagaagcaaacttctatcttgtacaagcaattgctgtttcggggacacagccaaccatcatacatatgaactaatgcatgccaagttttaatttccttaactgaaaaggctgatgcaaatgacatattgcacctgggttggcagggcagctacatctactgctaaaatgacataaggataggaaggaagttttctgtaggagaacattgtgtgtcacaaacagtgacattttccaaaagttgcttgaattcaatatggacttcccagcgggcaaagcttgcacctatggtttttagggaaaacaacaacaaaaagtttagtctagcttaagatgcaaaatgactgacaaagtccctccccacaagagaactgtaacgagcaatttaaacaaatcaaaaatggtttgttttatttacaatactcaatgcatcttatgagtaacatatttgcattccctaagtccttttggaaagtaattccagtttgtgcagtgagtttacaggaaaatcttaaagatatctagtagacatcttaaacctaaactctaaattttgaaagatatttcacactatattaatagaggactgtttttaattaagaaaaactaaactctgtaaatattgccctccagtatctttaatgcaaatataaaccagattagcctatgaaataagaccactagatttgggtgaattattctgacctcccctccccaataaaatgcatgcataaagtaaacatggtaaattacatcaatcacattttaatactttttttttttggactctctcaactgttgtttgctcaattgtcggtacagataggtaggattccagtctggagaaaccccataaaccaactacacgcctgcctacagagttagggaagaattttcagtatgtatgtggagacaggctggattagggagccttttgagtggcttctctaggatacctttcttgctaacatgagcaaggttcccctccaggcctgataaagcctgaagaggttagttatttccctactagttctggaagcatcttaattcatgccaccataggaggctgtcttcccctgctcctcccttgaatcaccacctagattttaagttgcttttctggagtttgatgatggaaaccagttcctgtttcaggtgccagaaactttttttttttttgagattgagtctcgctctttcatgctggagtgcagtggtgcgatctcagctcactgcaacctccaccccccgggttcaagcgattctctgcctcaacctcctgagtagctgggattacaggcgcccactaccacacccatctactttttgcaaattttgtagagatggggtttcaccatattggccaggctggtctcaaactcctgacctcaggtgatccacctgcctcagcctcccaaagtgctaggattacaggcgtgagccaccgtgccagaaactgtttttatgtcacataaagatctatgaaacaaggtaaaaggtaattaaaatactttgtgacagagtttgcacctcatgcatgtgaaagagaatgtaattaattttatcatttatatagctg

SEQ ID NO: 148399 - DNA, 624 bp, Homo sapiens
gtgtcagcctggctttgtcatgaaaggaccccccgcaccgtgtgcaatgccaggccctgaacaaatgggagacagagctaccaagctgctccaggggtgtgtttgcctgaggcctagaagggccctgcaagtgacatgcattgctgttggatcaggagatgagtatttgtttagggggagggatgtatgttgaggagggtggaaagtaagttttgggggaagaagcatgaaattaagaatctggggtgtgcatgcacccatgcatatgtgtcttcattttgaaaagcatgaccttaattatccaaaaaaactggtattctggactcacctattaatcaattgtcaggtcatagtaccagctgcgatctctctcaattatattgaaaaattatatggactttatggtcagctgtgccctaagcactttgtatacattatctcatttattatttaaaacaacactgtcttatttaagggcttgtgtttttgatggctcatcttgtctactgatgccacaatagctggcttatcagcggagtggggaggtgttatgggcagatacataggggacagaggaaagagcttacaattcttctaccaacccatgttaggccttgtgcaacc

SEQ ID NO: 148400 - DNA, 688 bp, Homo sapiens
cttttttttttttttttttaagagaagatcttgctctctttcttactcaggctggagtgcagtggtatgatcacaactcactgcagcttcaacctcctgggctagagtgaccctcctgctcaccactacacctggctaattttttttttggtagagacagggtttccctatgttgcccaggttggtcttcctactcctaggctcaagtgctccttctgtctagcctcccaaagtgctcgggattacaggtgtgatgccaccacacccaggcctcagggtttcttttgcatattcttcaactagacagcacaagacatacaactgtttacttaataaatatttgctccattaattattgactaaataattaattgtggcacctgctaagaatccaggtactggtggtttagcttaatctgtaatatcaaagcaataacatttctctattatctcttattctttctcaagattccactagtctttccttcagtttaccattactagttgtcctttttcactcagttgagcctgcagctgaatagcagttaagctacctcattaacatgattctgaaatacaagggaataatgacttttctctcaaaatattccaagaaaaatcagaaagaataatgagcagtaagtttccgaaggctatttgaccaactggaggtttctcacaattgtcc

SEQ ID NO: 148401 - DNA, 2085 bp, Homo sapiens; identical to SEQ ID NO: 141311

SEQ ID NO: 148402 - DNA, 1281 bp, Homo sapiens; identical to SEQ ID NO: 119783

SEQ ID NO: 148403 - DNA, 2748 bp, Homo sapiens; identical to SEQ ID NO: 116383

SEQ ID NO: 148404 - DNA, 3300 bp, Homo sapiens; identical to SEQ ID NO: 118076

SEQ ID NO: 148405 - DNA, 2205 bp, Homo sapiens; identical to SEQ ID NO: 122554

SEQ ID NO: 148406 - DNA, 2871 bp, Homo sapiens; identical to SEQ ID NO: 116399

SEQ ID NO: 148407 - DNA, 3240 bp, Homo sapiens
atgaaggcagaaataaagatgttctttgaaaccaacgagaacaaagacacaacataccagaatctctgggacgcattcaaagcagtgtgtagagggaaatttatagcactaaatgcccacaagagaaagcaggaaagatccaaaattgacaccctaacatcacaattaaaagaactagaaaagcaagagcaaacacattcaaaagctagcagaaggcaagaaataactaaaatcagagcagaactgaaggaaatagagacacaaaaaacccttcaaaaaattaatgaatccatgagctggttttttgaaaggatcaacaaaattgatagactactagcaagactaataaagaaaaaaagagagaagaatcaaatagacgcaataaaaaatgataaaggggatatcaccaccaatcccacagaaatacaaactaccatcagagaatactacaaacacctctacgcaaataaactagaaaatctagaagaaatggataaattcctagacacatacgctctcccaagactaaaccaggaagaagttgaatctctgaatagaccaataacaggagctgaaattgtggcaataatcaatagcttaccaacaaaaaagagtccaggaccagtcggattcacagccgaattctaccagaggtacaaggaggaactggtaccattccttctgaaactattccaatcaatagaaaaagagagaatcctccctaactcattttatgaggccagcatcattgtgataccaaagccaggcagagacacaaccaaaaaagagaattttagaccaatatccttgatgaacattgatgcaaaaatcctcaataaaatactggcaaaccgaatccagcagcacatcaaaaagcttatccaccatgatcaagtgggcttcatccctgggatgcaaggctggttcaatatatgcaaatcagtaaatgtaatccagcatataaacagaaccaaagacaaaaaccacatgattatctcaatagatgcagaaaaagcctttgacaaaattcaacaacccttcatgctaaaaactctcaataaattaggcattgatgggacgtatttcaaaataataagagctatctgtgacaaacccacagccaatatcatactgaatgggcaaaaactggaagcattccctttgaaaactggcacaagacagggatgccctctctcaccactcctattcaacatagtgttggaagttctggccagggcaattaggcaggagaaggaaataaagggtattcaattaggaaaagaggaagtcaaattgtccctgtttgcagacgacatgattgtatatctagaaaaccccatcatctcagcccaaaatctccttaagctgataagcaacttcagcaaagtctcaggatacaaaatcaatgtacaaaaatcacaagcattcttatacaccaacaacagacaaacagagagccaaatcatgagtgaactcccattcacaattgcttcaaagagaataaaatacctaggaatccaacttacaagggatatgaaggacctcttcaaggagaactacaaaccactgctcaaggaaataaaagaggatacaaacaaatggaagaacattgcattctcatgggtaggaagaatcaatatcatgaaaatggccatactgcccaaggtaatttacagattcaatgccatctccatcaagctaccaatgactttcttcgcagaattggaaaaaactactttaaagttcatatggaaccaaaaaagagcccgcatcaccaagtcaatcctaagccaaaagagcaaagctggaggcatcacactacctgacttcaaactatactacaaggctacagtaaccaaaacagcatggtactggtaccaaaacagagatatagatcaatgcaacagaacagagccctcagaaataatgccacatatctacaactatctgatctttgacaaacctgagaaaaacaagcaatggggaaaggattccctatttaataaatggtgctgggaaaactggctagccatatgtagaaagctgaaactggatcccttccttacaccttatacaaaaattcattcaagatggattaaggacttaaatgttagacctaaaaccataaaaaccctagaagaaaacctagggattaccattcaggacataggcatgggcaaggacttcatgtctaaaacaccaaaagcaatggcaacaaaagacaaaattgacaaatgggatctaattaaactaaagagcttctgcacagcaaaagaaactaccatcagagtaaacaggcaacctacaaaatgggagaaaatttttgcaacctactcatctgacaaagggctaatatccagaatctacaatgaactcaaacaaatttacaagaaaaaaacaaacaaccccatcaaaaagtgggcaaaggacatgaacagacacttctcaaaagaagacatttatgcagccaaaaaacacatgaaaaaatgctcatcatcactggccatcagagaaatgcaaattaaaaccacagtgagataccatctgacaccagttagaatggcaatcattaaaaagtcaggaaacaacaggtgctggagaggatgtggagaaataggaacacttttacactgttggtgggactgtaaactagttcaaccattgtggaagtcagtgtggcgattcctcagggatctagaactggaaataccatttgacccagccatcccattactgggtatatacccagaggactataaatcatgcttctataaagacacatgcacacgtatgtttattgcggcattattcacaatagcaaagacttggaaccaacccaaatgtccaacaatgatagactggattcagaaaatgtggcacatatacaccatggaatactatgcagccataaaaaatgatgagttcatgtcctttgtagggatatggataaaattggaaatcatcattctcagtaaactatcggaagaacaaaaaaccaaacactgcatattctcactcataggcaagagaacttttgcaggaaaactcccagttataaaaccatcagatcttgtgagacttattcactaccatgagaacagtatgggggaaactgaccccataattcgattatctccacctagctatgcccttgacacatggggcttattacaactgaagattttggatggtggcttgcctgtaacctcagttcctgatgggtctaagaaaaatcattga

SEQ ID NO: 148408 - DNA, 2004 bp, Homo sapiens; identical to SEQ ID NO: 122556

SEQ ID NO: 148409 - DNA, 2985 bp, Homo sapiens; identical to SEQ ID NO: 121567

SEQ ID NO: 148410 - DNA, 4728 bp, Homo sapiens
aaaaatggcaaatttaaaatattttttattcagaaatattttttcaaccaagcaatcaggagtgccaagatcgcatgatttgtgtaaaacacaactttggtctgaaagtaacaagtgaattttacaaaagaaaatatcctgatcctagttccagacttagagagaaaatgcttttgctgaatgttaaccaggaaagttggtaaccagcacttcagtcttatggaagaatcttgatttgttcattctgtaatctctttgagagctcagcacaaaaactgtactcaggagtttgtttgtttttttttgaactttttttttttaatttaagttttagggtacatgtgcacaatgtgcaggtttgttacgtatgtatacatgtgccatgttggtgtgctgcacccattaactcatcatttacattaggtatatctcctaatgctatccctcccctctccccgcaccccacaacaggccctggtgggtgatgttccccttcctttgtccatgtgttctcattgttcatttcccacctatgagtgagaacatgtggtgtttggtttttgtccttgcgatagtttgctgagaatgatggtttccagcttcacccatgttcctacaaaggacatgaactcatcctttttatggctccatagtattccatggtgtatatgtgccacattttcttaatccagtctatcattgttggacatttgggttggttccaagtctttgctattgtgaatagtgctgcaataaacatatgtgtgcatgtgtctttatagcagcatgatttataatcctttgggtatatacccagtaatgggatggctgggtcaaatggtatttctagttctagatccttgaggaatcgccacattgacttccacaatggttgaatgagtttacagtcccaccaacagtgtaaaagtgttcctatttctccacatcctctccagcacctgttgttccctgactttttaatgatcgccattctaactggtgtgaaatggtatctcattgtggttttgatttgcatttctctgatggccagtgatgatgagcattttttcatgtgtttgttggctgcatcaatgtcttcttttgagaagggtcttttcatatccttagcccgttgattgggttgtttttttcttgtaaatttgtttgagttcattgtagattctggatattagccctttgtcagatgagtagattgcaaaaatcaccactcctattcaacatagtgttggaagttctggccaaggcaatcaagcaggagaaggaaataaagggtattcaattaggaaaagaggaagtcaaattgtccctgtttgcagatgacatgattgtatatctagaaaaccccactgtctcagcccaaaatctccttaagctgatgagcaacttcagcaaagtctcaggatacaaaatcaatgtgcaaaaatcacaagcattcttatacaccaataacagacaaacagagagccaaatcatgagtggactcccattcacaatcacttcaaagagaataacatacctaggaatccaacttacaagggatgtgaaggacctcttcaaggagaactacaaaccactgctcaaggaaataaaagaggatacaaacaaatggaagaacattccatgctcatgggtaggaggaagaatcaatctcgtgaaaatggccatactgcccaaggtaatttacagattcaatgccatccccatcaagctaccaatgactttcttcacagaattggaaaaaactactttaaagttcatatggaaccaaaagagagccctcattgccaagtcatccctaagccaaaagaacaaaactggaggcatcacgctacctgacttcaaactatactacaaggctacagtaaccaaaacatcatggtactggtaccaaaacagagatatagatcaatggaacagaacagagccctcagaaataatgccacatatctacaactatctgatctttgacaaacctgacaaaaacaagcaatggggaaaggattccctatttaataaatggtgctgggaaaactggctagccatatgtagaaagctgaaactggatcccttccttacaccttatacaaaaattaattcaagatggattaaagacttacatgttagacctaaaaccataaaaaccctagaagaaaacctaggcaataccattcaggacataggcatgggcaaggacttcatgtcgaaaacaccaaaagcaatggcaacaaaagccaaaattgacaaatgggatctcattaaactaaagagcttctgcacagcaaaagaaaccaccatcagagtgaacaggcaacctacagaatgggagaaaatttttgcaacctactcatctgacaaagggctaatatccagaatctacaatgaactcaaacaaatttacaagaaaaaaacaaacaaccccatcaaaaagtgggcaaaggatatgaacagacacttctcagaagaagacatttatgcagccaaaaaacacatgaaaaaatgctcatcatcactggccatcagagaaatgcaaatcaaaaccacaatgagataccatctcacaccagttagaatggtgatcattaaaaagtcaggaaacaataggtgctggagaggatgtggagaaataggaacacttttacactgttggtgggactgtaaactagttcaaccattgtggaagtcggtgtggcaattcctcagggatctagaactagaaataccatttgacccagccatcccattactgggtatatacccagaggattataaaccatgctgctataaagacacatgcacacgtatgtttattgcggcactattcacaatagcaaagacttggaaccaacccaaatgtccaacaatgatagacgggattaagaaaatgtggcacatatacaccatggaatactatgcagccataaaaaaggatgagttcatgtcctttggcagggacatggatgaagctggaaaccatcattctgagaaaactatcacaaggacagaaaaccaaacaccgcatgtactcactcataggtgggaatttaacaatgagaacatttggacacagtgcagggagccatcacacaccagggcctatcatgaggtgtggggctgggggagggatagcattaggagaaatacctaatgtaaatgacgagttaatgggcacagcaaaccaacatggcacatgtatacctatgcaacaaaactgcacattgtgcacatgtaccctaaaacttaaagtataataataaaaaaaaaaaaaaagaaagttagttttcagttatggaaggttgggcttgtaatctcaactacttgggacgctgaggcaggaggatcatttgagccccgcagtttgaggctgtagtaagttatgactgcaccactgcactccagcctgggtaacagtgagaccctatctcttaaaaaaattatgctgagaatattttctgagttgtcacatgggtcttgtgataaactaataatgcaaacttttatttttcattatatataaatattggatttatcccaaccaaactagtttgcagggaacctctgcctttatttcacggctggagaatgagatacaaaagatgtcaatttccatcgtaagaactttccacagtagtgttctttggacattctctcccttgtattaggctcctcagaaatctatctccagactgaaaccagcacattctgatgagatcatagcttagtactcagaaaaatcactactcagtggaattcttgaaattttgaaacaactgattttagcatacagaatttcaaaaagaacatacattacagccagaaacgattgtttgctcatgaattttgattattggcagacacatttgctgtagcggcaactgtgcaagagttcattttaacagaataatatgttctgaaatactcttttataatcaatataaaattctagaatgttaattcctatagcaagaacttgtgacattataaaatgtggtttaccatagaaagtcgctagatttcccatgttttcttaaaattaaatgtactaaaaaatccaaatgtaatagaaaaatgcaatcacataggtgctttaaacagacatttctgaataacactgcattctaactcatgagtacaaagaaatgtgtatgctatttatacattttcttagtgttccctacctttggactccaatcattttaacgtatccgtatactggagatttgatcacagtatatggcacttcacaataacattccatgtcctaataatgtgaaatgcctgtatacaatctgagtatattgtttagtcagaaaacatcaaaattaaggatataggacatggaatgtctgttaagtgctgagtttttctgactagagtttaatctagccagtgttaatgtggaagctgtatgcttttttcatgggcatgttcgaattttttctttcaaaatgtttctcaactttttgatgtgacactttgttttctcccaagtcactctaagggttctatcaacatctttctttgaaaacagcccaaaaacatatttttaaaatgaaaaaaaaattcacaagagaatcaagatttggttttaatctattatttacatatttgtaaactgctgttaaaatgctctcaaaaatgttatttaggaaggcacaatttggtagcatcaattttttatttatagttttttctaaacaagatccgaag

SEQ ID NO: 148411 - DNA, 5988 bp, Homo sapiens
cctccggtctacagctcccagcgtgagcgacgcagaagacgggtgatttctgcatttccatctgaggtaccgggttcatctcactagggagtgccagacagtgggcgcaggccagtgggtgcgcgcaccgtgcggagccgaagcagggcgaggcattgcctcacctgggaagcgcaaggggtcagggagttccctttccgagtcaaagaaaggggtgacggacgcacctggaaaatcgggtcactcccacccgaatattgcgcttttcagaccggcttaaaaaacggcgcaccacgagactatatcccacacctggccttcggagggtcctacgcccacggaatctcgctgattgctagcacagcggtctgagatcaaactgcaaggccgcagcaaggctgggggaggggcgcccgccattgcccaggcttgcttaggtaaacaaagcagccggggaagctcgaactgggtgcagcccaccacagctcaaggaggcctgcctgcctctgtaggctccacctctgggggcagggcacagacaaacaaaaagacagcagtaacctctgcagacttaaatgtccctgtctgacagctttgaagagagcagtggttctcccagcacgcagctggagatctgagaacgggcagactgcctcctcaagtgggtccctgacccctgacccccgagcagcctaactgggaggcaccccccagcaggggcacactgacacctcacacggcagggtattccaacagacctgcagctgagggtcctgtctgttagaaggaaaactaacaaacagaaaggacatccacaccgaaaacgcatctgtacatcaccatcatcaaagaccaaaagtagataaaaccacaaagatggggaaaaaacagaacagaaaaactggaaactctaaaacgcagagcacctctcctcctccaaaggaacgcagttcctcaccagcaacggaccaaagctggatggagaatgattttgacgagctgagagaagaaggcttcagacgctcaaattactctgagctacgggaggacattcaaaccaaaggcaaagaagttgaaaactttgaaaaaaatttagaagaatgtataactagaataaccaatacagagaagtgcttaaaggagctgatggagctgaaaaccaaggctcgagaactacgtgaagaatgcagaagcctcaggagccaatgcgatcaactggaagaaagggtatcagcaatggaagatgaaatgaatgaaatgaagcaagaagggaagtttagagaaaaaagaataaaaagaaacgagcaaagcctccaagaaatatgggactatgtgaaaagaccaaatctacgtctgattggtgtacctgaaagtgatgcggagaatggaaccaagttggaaaacactctgcaggatattatccaggagactttccccaatctagcaaggcaggccaacgttcagattcaggaaatacagagaacgccacaaagatactcctcgagaagagcaactccaagacacataattgtcagattcaccaaagttgaaatgaaggaaaaaatgttaagggcagccagagagaaaggtcgagttaccctcaaagggaagcccatcagactaacagcggatctctcggcagaaaccctacaagccagaagagagtgggggccaatattgaacattcttaaagaaaagaattttcaacccagaatttcatatccagccaaactaagcttcataagtgaaggagaaataaaatactttacagacaagcaaatgctgaccgattttgtcaccagcaggcctgccctaaaagagctcctgaaggaagcgctaaacatggaaaggaacaaccggtaccagccactgcaaaatcatgccaaaatgtaaagaccatcgagactaggaagaaactgcatcaactaacgagcaaaatcaccagctaacatcataatgacaggatcaaattcacacataacaatattaactttaaatgtaaatggactaaattctccaattaaaagacacagactggcaagttggataaagagtcaagacccatcagtgtgctgtattcaggaaacccatctcatgtgcagagacacacataggctcaaaataaaaggatggaggaagatctaccaagcaaatggaaaacaaaaaaaggcaggggttgcaatcctagtctctgataaaacagactttaaaccaacaaagatcaaaagagacaaagaaggccattacatgatggtaaagggatcaattcaacaagaggagctaactatcctaaatatgtatgcacccaatacaggagcacccagattcataaagcaagtcctgagtgacctacaaagagacttagactcccacacattaataatgggagactttaacaccccactgtcaacattagacagatcaacgagacagaaagtcaacaaggatacccaggaattgaactcagctctgcaccaagcagacctaatagacatctacagaactctccaccccaaatcaacagaatatacatttttttcagcaccacaccacagctattccaaaattgaccacatacttggaagtgaagctctcctcagcaaatgtaaaagaacagaaattataacaaactatctctcagaccacagtgcaatcaaactagaactcaggattaagaatctcactcaaagccgctcaactacatggaaactgaacaacctgctcctgaatgactactgggtacataacgaaatgaaggcagaaataaagatgttctttgaaaccaacgagaacaaagacacaacataccagaatctctaggacgcattcaaagcagtgtgtagagggaaatttatagcactaaatgcccacaagagaaagcaggaaagatccaaaattgacaccctaacatcacaattaaaagaactagaaaagcaagagcaaacacattcaaaagctagcagaaggcaagaaataactaaaatcagagcagaactgaaggaaatagagacacaaaaaacccttcaaaaaatcaatgaatccaggagctggttttttgaaaggatcaacaaaattgatagaccgctagcaagactaataaagaaaaaaagagagaagaatcaaatagacacaataaaaaatgataaaggggatatcaccaccgatcccacagaaatacaaactaccatcagagaatactacaaacacctctacgcaaataaactagaaaatctagaagaaatggatacattccttgacacatacactctcccaagactaaaccaggaagaagttgaatctctgaatagaccaataacaggagctgaaattgtggcaataatcaatagtttatcaaccaaaaagagtccaggaccagatggattcacagccgaattctaccagaggtacaaggaggaactggtaccattctttctgaaactattccaatcaatagaaaaagagggaatcctccctaactcattttatgaggccagcatcattctgataccaaagccgggcagagacacaaccaaaaaagagaattttagaccaatatccttgatgaacattgatgcaaaaatcctcaataaaatactggcaaaccaaatccagcagcacatcaaaaagcttatccaccatgatcaagtgggcttcatccctgggatgcaaggctggttcaatatacgcaaatcaataaatgtaatccagcatataaacagagccaaagacaaaaaccacatgattgtctcaatagatgcagaaaaagcctttgacaaaattcaacaacccttcatgctaaaaactatcaataaaataggtattgatgggatgtatttcaaaataataagagctatctatgacaaaaccacagccaatatcatactgaatgggcaaaaactggaagcattccctttgaaaaccggcacaagacagggatgccctctctcaccgctcctattcaacatagtgttggaatttctggccagggcaatcaggcaggagaaggaaataaagggtattcaattaggaaaagaggaagtcaaattgtccctgtttgcagatgacatgattgttgatctagaaaaccccatcgtctcagcccaaaatctccttaagctgataagcaacttcagcaaagtctcaggatacaaaatcaatgtacaaaaatcacaagcattcttatacaccaacaacagacaaacagagagccaaatcatgagtgaactcccattcactattgcttcaaagagaataaaatacctaggaatccaacttacaagggatgtgaaggacctcttcaaggagaactacaaaccactgctcaaggaaataaaagaggatacaaaaaaatggaagaacattccatgctcatgggtaggaagaatcaatatcgtgaaaatggccatactgcccaaggtaatttacagattcaatgccatccccatcaagctaccaatgactttcttcacagaattggaaaaaactactttaaagttcatatggaaccaaaaaagagcccgcatcaccaagtcaatcctaagccaaaagaacaaagctggaggcatcacactacctgacttcaaactatactacaaagctacagtaaccaaaacagcatggtactggtaccaaaacagagatatagatcaatggaacagaacagagccctcagaaataacgccgcatatctacaactatctgatctttgacaaacctgacaaaaacaacaagaaaaacaagcaacggggaaaggattccctatttaataaatggtgctgggaaaactggctagccatatgtagaaagctgaaactggatcccttccttacaccttatacaaaaattaattcaagatggattaaagacttaaatgttagacctaaaaccataaaaaccctagaagaaaacctaggcaataccattcaggccataggcatgggcaaggacttcatgaataaaacaccaaaagcaatggtaacaaaagccaaaattgacaaatgggatctaactaaactaaagagcttctgcacagcaaaagaaactaccatcagagtgaacaggcaacctacagaatgggagaaaatttttacaatctacccatctgacaaagggctaatatccggaatctacaatgaactcaaacaaatttacaagaaaaaaacaaacaaccccatcaaaaagtgggtgaaggacatgaacagacacttctcaaaagaagacatttatgcagccaaaaaacacatgaaaaaatgctcatcatcactggccatcagagaaatgcaaatcaaaaccacaatgagataccatctcacaccagttagaatggcaatcattaaaaagtcaggaaacaacaggtgctggagaggatgtggagaaataggaacacttttacactgttggtgggactgtaaactagttcaaccattgtggaagtcagtgtggcgattcctcagggatctagaactagaaataccatttgacccagccatcccattactgggtgtatacccaaaggactataaatcatgctgctataaagacacatgcacacgtatgtttattgcggcactgttcacaatagcaaagacttggaaccaacccaaatgtccaacaatgatagactggattaagaaaatgtggcacatatacaccatggagtactatgcagccataaaaaaggatgagttcacgtcctttgtagggacatggatgaagctagaaaccatcattctgagcaaactattccaacgacggaaaaccaaacactgcatgttctcactcataggtgggaattgaacaatgagatcatatggacacaggaaggggaacatcacactctggggactgttgtggggtggggggaggggggagggatagcattgggagatatacctaatgctagatgacgagttagtggtgcagtgcaccagcatggcacatgtatacatatgtaactaacctgcacaatgtgcacatgtaccctaaaac

SEQ ID NO: 148412 - DNA, 730 bp, Homo sapiens
gaaacggagtctctctctgccttccaggctggagtgcagtggcgtgatcttggctcactgcaagctccgcctcctaggttcacgccattctcctccctcagactccggagcagctgggactgcaggcgcccgccaccacgcccggcttttttttttgtattttttagtatttcaccgtgtttgcctggatggtctcgatctcctgaccttgtgatccacctgcctcggtctcccaaagtgtggggattacaggcgtgagccacgtgtgcccgtccaaatccagaatccttcaccagtacccaacagtccatccacaatcttacaccgattgccctctactgctccttgggccccctgtccccaaaagcctgtccaggcaagactcacagattcagatgagtggcaaccaccagaagcggccgtctcagggctactgccatttgcctttccgtgttccctcttcgctgcctgctggaaacacccagggcgggtttctctgccaaatattctttgaactttttccttggctgccagcctaatttactctgtcccagtttcttctgcccattgtggggtggggagggaggcggggctggggccacgtcagccaaactcccagcgagcgctgattcaacacgtccagtcacccttaaagaatcagaaataaatagggtgggcatgggtggttcatgaatttaattcccagcatttttggggagggcaaaagtgt

SEQ ID NO: 148413 - DNA, 2832 bp, Homo sapiens
gagcagatgggcaatgagctggaacggctgcgggccgcgctgatggagagccaggggcagcagcaggaggagcgtgggcagcaggaaagggaggtggcgcggctgacccaggagcggggccgtgcccaggctgaccttgccctggagaaggcggccagagcagagcttgagatgcggctgcagaacgccctcaacgagcagcgtgtggagttcgctaccctgcaagaggcactggctcatgccctgacggaaaaggaaggcaaggaccaggagttggccaagcttcgtggtctggaggcagcccagataaaagagctggaggaacttcggcaaaccgtgaagcaactgaaggaacagctggctaagaaagaaaaggagcacgcatctggctcaggagcccaatctgaggctgctggcaggacagagccaacaggccccaagctggaggcactgcgggcagaggtgagcaagctggaacagcaatgccagaagcagcaggagcaggctgacagcctggaacgcagcctcgaggctgagcgggcctcccgggctgagcgggacagtgctctggagactctgcagggccagttagaggagaaggcccaggagctagggcacagtcagagtgccttagcctcggcccaacgggagttggctgccttccgcaccaaggtacaagaccacagcaaggctgaagatgagtggaaggcccaggtggcccggggccggcaagaggctgagaggaaaaatagcctcatcagcagcttggaggaggaggtgtccatcctgaatcgccaggtcctggagaaggagggggagagcaaggagttgaagcggctggtgatggccgagtcagagaagagccagaagctggaggagaggctgcgcctgctgcaggcagagacagccagcaacagtgccagagctgcagaacgcagctctgctctgcgggaggaggtgcagagcctccgggaggaggctgagaaacagcgggtggcttcagagaacctgcggcaggagctgacctcacaggctgagcgtgcggaggagctgggccaagaattgaaggcgtggcaggagaagttcttccagaaagagcaggccctctccaccctgcagctcgagcacaccagcacacaggccctggtgagtgagctgctgccagctaagcacctctgccagcagctgcaggccgagcaggccgctgccgagaaacgccaccgtgaggagctggagcagagcaagcaggccgctgggggactgcgggcagagctgctgcgggcccagcgggagcttggggagctgattcctctgcggcagaaggtggcagagcaggagcgaacagctcagcagctgcgggcagagaaggccagctatgcagagcagctgagcatgctgaagaaggcgcatggcctgctggcagaggagaaccgggggctgggtgagcgggccaaccttggccggcagtttctggaagtggagttggaccaggcccgggagaagtatgtccaagagttggcagccgtacgtgctgatgctgagacccgtctggctgaggtgcagcgagaagcacagagcactgcccgggagctggaggtgatgactgccaagtatgagggtgccaaggtcaaggtcctggaggagaggcagcggttccaggaagagaggcagaaactcactgcccaggtggagcagctagaggtatttcagagagagcaaactaagcaggtggaagaactgagtaagaaactggctgactctgaccaagccagcaaggtgcagcagcagaagctgaaggctgtccaggctcagggaggcgagagccagcaggaggcccagcgcctccaggcccagctgaatgaactgcaagcccagttgagccagaaggagcaggcagctgagcactataagctgcagatggagaaagccaaaacacattatgatgccaagaagcagcagaaccaagagctgcaggagcagctgcggacgctggagcagctgcagaaggaaaacaaagagctgcgagctgaagctgaacggctgggccatgagctacagcaggctgggctgaagaccaaggaggctgaacagacctgccgccaccttactgcccaggtgcgcacgctggaggcacaggttgcccatgcagaccagcagcttcgagacctgggcaaattccaggtggcaactgatgctttaaagagccgtgagccccaggctaagccccagctggacttgagtattgacagctcccaggccaacagtagccaaacccctagagacagtgatgcctgcccgcaccctggcctggtccctggtccttcactggcgccttctcggagctggcccagggggcctggagcatggacagtgtgggcgctctccctaccttgcctccttttttcttaaagcaaagtcacttctccatcacaaccagatttgaggctggttttgatggctgggtccttgggcctggccagtcttcctcttagcctctggatctagaagggaccataagaggagtaggccctggttcctgctgtcctggtggctgggcccagcaggggccctcactcttgaagtccaggactgggtctgacctggtgggagcacctgccagaggatgctctttcccaggacggatgggccctgtgtctcaggagtggggttgggggacagccttcagcagcagctcacaccctaccttccccagacttgcactggggtgggatttggagtgatgggaaggtttttaagggccggggatggatcttttctaaatgttattacttgtaaataaagtctatttttctcccgtgaaaaaaaaaaaaa

SEQ ID NO: 148414 - DNA, 7154 bp, Homo sapiens
acgaagaggtacgattccggagaatcgcgaggcagagcgggagcgcgcagccaggtggaaactaattctaagccagactgctggagatcaccctgttctagtgtgtggaggcttccaccaggaggcgcattggagtgactgtctggcatcaccaagatgacactccacgccacccggggggctgcactcctctcttgggtgaacagtctacacgtggctgaccctgtggaggctgtgctgcagctccaggactgcagcatcttcatcaagatcattgacagaatccatggcactgaagagggacagcaaatcttgaagcagccggtgtcagagagactggactttgtgtgcagttttctgcagaaaaatcgaaaacatccctcttccccagaatgcctggtatctgcacagaaggtgctagagggatcagagctggaactggcgaagatgaccatgctgctcttataccactctaccatgagctccaaaagtcccagggactgggaacagtttgaatataaaattcaggctgagttggctgtcattcttaaatttgtgctggaccatgaggacgggctaaaccttaatgaggacctagagaacttcctacagaaagctcctgtgccttctacctgttctagcacattccctgaagagctctccccacctagccaccaggccaagagggagattcgcttcctagagctacagaaggttgcctcctcttccagtgggaacaactttctctcaggttctccagcttctcccatgggtgatatcctgcagaccccacagttccagatgagacggctgaagaagcagcttgctgatgagagaagtaatagggatgagctggagctggagctagctgagaaccgcaagctcctcaccgagaaggatgcacagatagccatgatgcagcagcgcattgaccgcctagccctgctgaatgagaagcaggcggccagcccactggagcccaaggagcttgaggagctgcgtgacaagaatgagagccttaccatgcggctgcatgaaaccctgaagcagtgccaggacctgaagacagagaagagccagatggatcgcaaaatcaaccagctttcggaggagaatggagacctttcctttaagctgcgggagtttgccagtcatctgcagcagctacaggatgccctcaatgagctgacggaggagcacagcaaggccactcaggagtggctagagaagcaggcccagctggagaaggagctcagcgcagccctgcaggacaagaaatgccttgaagagaagaacgaaatccttcagggaaaactttcacagctggaagaacacttgtcccagctgcaggataacccaccccaggagaagggcgaggtgctgggtgatgtcttgcagctggaaaccttgaagcaagaggcagccactcttgctgcaaacaacacacagctccaagccagggtagagatgctggagactgagcgaggccagcaggaagccaagctgcttgctgagcggggccacttcgaagaagaaaagcagcagctgtctagcctgatcactgacctgcagagctccatctccaacctcagccaggccaaggaagagctggagcaggcctcccaggctcatggggcccggttgactgcccaggtggcctctctgacctctgagctcaccacactcaatgccaccatccagcaacaggatcaagaactggctggcctgaagcagcaggccaaagagaagcaggcccagctagcacagaccctccaacagcaagaacaggcctcccagggcctccgccaccaggtggagcagctaagcagtagcctgaagcagaaggagcagcagttgaaggaggtagcggagaagcaggaggcaactaggcaggaccatgcccagcaactggccactgctgcagaggagcgagaggcctccttaagggagcgggatgcggctctcaagcagctggaggcactggagaaggagaaggctgccaagctggagattctgcagcagcaacttcaggtggctaatgaagcccgggacagtgcccagacctcagtgacacaggcccagcgggagaaggcagagctgagccggaaggtggaggaactccaggcctgtgttgagacagcccgccaggaacagcatgaggcccaggcccaggttgcagagctagagttgcagctgcggtctgagcagcaaaaagcaactgagaaagaaagggtggcccaggagaaggaccagctccaggagcagctccaggccctcaaagagtccttgaaggtcaccaagggcagccttgaagaggagaagcgcagggctgcagatgccctggaagagcagcagcgttgtatctctgagctgaaggcagagacccgaagcctggtggagcagcataagcgggaacgaaaggagctggaagaagagagggctgggcgcaaggggctggaggctcgattacagcagcttggggaggcccatcaggctgagactgaagtcctgcggcgggagctggcagaggccatggctgcccagcacacagctgagagtgagtgtgagcagctcgtcaaagaagtagctgcctggcgtgagcggtatgaggatagccagcaagaggaggcacagtatggcgccatgttccaggaacagctgatgactttgaaggaggaatgtgagaaggcccgccaggagctgcaggaggcaaaggagaaggtggcaggcatagaatcccacagcgagctccagataagccggcagcagaacgaactagctgagctccatgccaacctggccagagcactccagcaggtccaagagaaggaagtcagggcccagaagcttgcagatgacctctccactctgcaggaaaagatggctgccaccagcaaagaggtggcccgcttggagaccttggtgcgcaaggcaggtgagcagcaggaaacagcctcccgggagttagtcaaggagcctgcgagggcaggagacagacagcccgagtggctggaagagcaacagggacgccagttctgcagcacacaggcagcgctgcaggctatggagcgggaggcagagcagatgggcaatgagctggaacggctgcgggccgcgctgatggagagccaggggcagcagcaggaggagcgtgggcagcaggaaagggaggtggcgcggctgacccaggagcggggccgtgcccaggctgaccttgccctggagaaggcggccagagcagagcttgagatgcggctgcagaacgccctcaacgagcagcgtgtggagttcgctaccctgcaagaggcactggctcatgccctgacggaaaaggaaggcaaggaccaggagttggccaagcttcgtggtctggaggcagcccagataaaagagctggaggaacttcggcaaaccgtgaagcaactgaaggaacagctggctaagaaagaaaaggagcacgcatctggctcaggagcccaatctgaggctgctggcaggacagagccaacaggccccaagctggaggcactgcgggcagaggtgagcaagctggaacagcaatgccagaagcagcaggagcaggctgacagcctggaacgcagcctcgaggctgagcgggcctcccgggctgagcgggacagtgctctggagactctgcagggccagttagaggagaaggcccaggagctagggcacagtcagagtgccttagcctcggcccaacgggagttggctgccttccgcaccaaggtacaagaccacagcaaggctgaagatgagtggaaggcccaggtggcccggggccggcaagaggctgagaggaaaaatagcctcatcagcagcttggaggaggaggtgtccatcctgaatcgccaggtcctggagaaggagggggagagcaaggagttgaagcggctggtgatggccgagtcagagaagagccagaagctggaggagaggctgcgcctgctgcaggcagagacagccagcaacagtgccagagctgcagaacgcagctctgctctgcgggaggaggtgcagagcctccgggaggaggctgagaaacagcgggtggcttcagagaacctgcggcaggagctgacctcacaggctgagcgtgcggaggagctgggccaagaattgaaggcgtggcaggagaagttcttccagaaagagcaggccctctccaccctgcagctcgagcacaccagcacacaggccctggtgagtgagctgctgccagctaagcacctctgccagcagctgcaggccgagcaggccgctgccgagaaacgccaccgtgaggagctggagcagagcaagcaggccgctgggggactgcgggcagagctgctgcgggcccagcgggagcttggggagctgattcctctgcggcagaaggtggcagagcaggagcgaacagctcagcagctgcgggcagagaaggccagctatgcagagcagctgagcatgctgaagaaggcgcatggcctgctggcagaggagaaccgggggctgggtgagcgggccaaccttggccggcagtttctggaagtggagttggaccaggcccgggagaagtatgtccaagagttggcagccgtacgtgctgatgctgagacccgtctggctgaggtgcagcgagaagcacagagcactgcccgggagctggaggtgatgactgccaagtatgagggtgccaaggtcaaggtcctggaggagaggcagcggttccaggaagagaggcagaaactcactgcccaggtggagcagctagaggtatttcagagagagcaaactaagcaggtggaagaactgagtaagaaactggctgactctgaccaagccagcaaggtgcagcagcagaagctgaaggctgtccaggctcagggaggcgagagccagcaggaggcccagcgcctccaggcccagctgaatgaactgcaagcccagttgagccagaaggagcaggcagctgagcactataagctgcagatggagaaagccaaaacacattatgatgccaagaagcagcagaaccaagagctgcaggagcagctgcggagcctggagcagctgcagaaggaaaacaaagagctgcgagctgaagctgaacggctgggccatgagctacagcaggctgggctgaagaccaaggaggctgaacagacctgccgccaccttactgcccaggtgcgcagcctggaggcacaggttgcccatgcagaccagcagcttcgagacctgggcaaattccaggtggcaactgatgctttaaagagccgtgagccccaggctaagccccagctggacttgagtattgacagcctggatctgagctgcgaggaggggaccccactcagtatcaccagcaagctgcctcgtacccagccagacggcaccagcgtccctggagaaccagcctcacctatctcccagcgcctgccccccaaggtagaatccctggagagtctctacttcactcccatccctgctcggagtcaggcccccctggagagcagcctggactccctgggagacgtcttccaggactcgggtcgtaagacccgctccgctcgtcggcgcaccacgcagatcatcaacatcaccatgaccaagaagctagatgtggaagagccagacagcgccaactcatcgttctacagcacgcggtctgctcctgcttcccaggctagcctgcgagccacctcctctactcagtctctagctcgcctgggttctcccgattatggcaactcagccctgctcagcttgcctggctaccgccccaccactcgcagttctgctcgtcgttcccaggccggggtgtccagtggggcccctccaggaaggaacagcttctacatgggcacttgccaggatgagcctgagcagctggatgactggaaccgcattgcagagctgcagcagcgcaatcgagtgtgccccccacatctgaagacctgctatcccctggagtccaggccttccctgagcctgggcaccatcacagatgaggagatgaaaactggagacccccaagagaccctgcgccgagccagcatgcagccaatccagatagccgagggcactggcatcaccacccggcagcagcgtaaacgggtctccctagagccccaccagggccctggaactcctgagtctaagaaggccaccagctgtttcccacgccccatgactccccgagaccgacatgaagggcgcaaacagagcactactgaggcccagaagaaagcagctccagcttctactaaacaggctgaccggcgccagtcgatggccttcagcatcctcaacacacccaagaagctagggaacagccttctgcggcggggagcctcaaagaaggccctgtccaaggcttcccccaacactcgcagtggaacccgccgttctccgcgcattgccaccaccacagccagcgccgccactgctgccgccattggtgccacccctcgagccaagggcaaggcaaagcactaaagggccagtaccagtgagtggccccacctgtgtccccgatgctgccgtcacctggtcctccgcctactgtccctctcagtgccttctctcagctcccaggccaacagtagccaaacccctagagacagtgatgcctgcccgcaccctggcctggtccctggtccttcactggcgccttctcggagctggcccagggggcctggagcatggacagtgtgggcgctctccctaccttgcctccttttttcttaaagcaaagtcacttctccatcacaaccagatttgaggctggttttgatggctgggtccttgggcctggccagtcttcctcttagcctctggatctagaagggaccataagaggagtaggccctggttcctgctgtcctggtggctgggcccagcaggggccctcactcttgaagtccaggactgggtctgacctggtgggagcacctgccagaggatgctctttcccaggacggatgggccctgtgtctcaggagtggggttgggggacagccttcagcagcagctcacaccctaccttccccagacttgcactggggtgggatttggagtgatgggaaggtttttaagggccggggatggatcttttctaaatgttattacttgtaaatcccgaattc

SEQ ID NO: 148415 - DNA, 3204 bp, Homo sapiens
  misc_feature (1)...(3204): n = a,t,c or g
ctggaaaccttgaagcaagaggcagccactcttgctgcaaacaacacacagctccaagccagggtagagatgctggagactgagcgaggccagcaggaagccaagctgcttgctgagcggggccacttcgaagaagaaaagcagcagctgtctagcctgatcactgacctgcagagctccatctccaacctcagccaggccaaggaagagctggagcaggcctcccaggctcatggggcccggttgactgcccaggtggcctctctgacctctgagctcaccacactcaatgccaccatccagcaacaggatcaagaactggctggcctgaagcagcaggccaaagagaagcaggcccagctagcacagaccctccaacagcaagaacaggcctcccagngcctccgccaccaggtggagcagctaagcagtagcctgaagcagaaggagcagcagttgaaggaggtagcggagaagcaggaggcaactaggcaggaccatgcccagcaactggccactgctgcagaggagcgagaggcctccttaagggagcgggatgcggctctcaagcagctggaggcactggagaaggagaaggctgccaagctggagattctgcagcagcaacttcaggtggctaatgaagcccgggacagtgcccagacctcagtgacacaggcccagcgggagaaggcagagctgagccggaaggtggaggaactccaggcctgtgttgagacagcccgccaggaacagcatgaggcccaggcccaggttgcagagctagagttgcagctgcggtctgagcagcaaaaagcaactgagaaagaaagggtggcccaggagaaggaccagctccaggagcagctccaggccctcaaagagtccttgaaggtcaccaagggcagccttgaagaggagaagcgcagggctgcagatgccctggaagagcagcagcgttgtatctctgagctgaaggcagagacccgaagcctggtggagcagcataagcgggaacgaaaggagctggaagaagagagggctgggcgcaaggggctggaggctcgattacagcagcttggggaggcccatcaggctgagactgaagtcctgcggcgggagctggcagaggccatggctgcccagcacacagctgagagtgagtgtgagcagctcgtcaaagaagtagctgcctggcgtgagcggtatgaggatagccagcaagaggaggcacagtatggcgccatgttccaggaacagctgatgactttgaaggaggaatgtgagaaggcccgccaggagctgcaggaggcaaaggagaaggtggcaggcatagaatcccacagcgagctccagataagccggcagcagaacgaactagctgagctccatgccaacctggccagagcactccagcaggtccaagagaaggaagtcagggcccagaagcttgcagatgacctctccactctgcaggaaaagatggctgccaccagcaaagaggtggcccgcttggagaccttggtgcgcaaggcaggtgagcagcaggaaacagcctcccgggagttagtcaaggagcctgcgagggcaggagacagacagcccgagtggctggaagagcaacagggacgccagttctgcagcacacaggcagcgctgcaggctatggagcgggaggcagagcagatgggcaatgagctggaacggctgcgggccgcgctgatggagagccaggggcagcagcaggaggagcgtgggcagcaggaaagggaggtggcgcggctgacccaggagcggggccgtgcccaggctgaccttgccctggagaaggcggccagagcagagcttgagatgcggctgcagaacgccctcaacgagcagcgtgtggagttcgctaccctgcaagaggcactggctcatgccctgacggaaaaggaaggcaaggaccaggagttggccaagcttcgtggtctggaggcagcccagataaaagagctggaggaacttcggcaaaccgtgaagcaactgaaggaacagctggctaagaaagaaaaggagcacgcatctggctcaggagcccaatctgaggctgctggcaggacagagccaacaggccccaagctggaggcactgcgggcagaggtgagcaagctggaacagcaatgccagaagcagcaggagcaggctgacagcctggaacgcagcctcgaggctgagcgggcctcccgggctgagcgggacagtgctctggagactctgcagggccagttagaggagaaggcccaggagctagggcacagtcagagtgccttagcctcggcccaacgggagttggctgccttccgcaccaaggtacaagaccacagcaaggctgaagatgagtggaaggcccaggtggcccggggccggcaagaggctgagaggaaaaatagcctcatcagcagcttggaggaggaggtgtccatcctgaatcgccaggtcctggagaaggagggggagagcaaggagttgaagcggctggtgatggccgagtcagagaagagccagaagctggaggagaggctgcgcctgctgcaggcagagacagccagcaacagtgccagagctgcagaacgcagctctgctctgcgggaggagctcgagcacaccagcacacaggccctggtgagtgagctgctgccagctaagcacctctgccagcagctgcaggccgagcaggccgctgccgagaaacgccaccgtgaggagctggagcagagcaagcaggccgctgggggactgcgggcagagctgctgcgggcccagcgggagcttggggagctgattcctctgcggcagaaggtggcagagcaggagcgaacagctcagcagctgcgggcagagaaggccagctatgcagagcagctgagcatgctgaagaaggcgcatggcctgctggcagaggagaaccgggggctgggtgagcgggccaaccttggccggcagtttctggaagtggagttggaccaggcccgggagaagtatgtccaagagttggcagccgtacgtgctgatgctgagacccgtctggctgaggtgcagcgagaagcacagagcactgcccgggagctggaggtgatgactgccaagtatgagggtgccaaggtcaaggtcctggaggagaggcagcggttccaggaagagaggcagaaactcactgcccag

SEQ ID NO: 148416 - DNA, 428 bp, Homo sapiens
agccatgaacgtgggcataatccaatgtcgtcctgcttggcgagcccaatcaccaagcttcctgaacagcaactaaccacaccccactccatgctcatgtcctttcccctggtctgcttcatctcctctcacctagactcatcatggcactgacagaggaagatgagtggtgacaagccaagaactcaggccaggctgcccagggtcaaaccccagctctaccactggggaaccttgggcaagtgactgcccctctatgccccagattcatctgttaaaggagacagaataaacctacctcagagggttgttgggggacaaatcaggtataattgtcatgagtgctttatgtctagcacaaaataagtaaatgtaagtgtttaataaaaacatttttccagtcttaacttctaaaaaaaaaaaaaaaa

SEQ ID NO: 148417 - DNA, 515 bp, Homo sapiens
  misc_feature (1)...(515): n = a,t,c or g
ggagaaagccaaaacacattatgatgccaagaagcagcagaaccaagagctgcaggagcagctgcgtagcctggagcagctgcatgaaggaaaacaaagagctgcgagctgaagctgaacggctgggccatgagctacagcaggctgggctgaagaccaaggaggctgaacagacctgccgccaccttactgcccaggtgcgcagcctcggaggcacaggtaagaatttggctggcagactcacctcactcctattccactggacccctgtgccctctcctcctaggccactgctgccttaggcttttcttcactctccccctggccctctccttctcaaggttgcccatgcaagaccaagcagcttccgagacctgggcaaattccaggtggcaacttgatgcttttaaagagccgggagccccagtctaagccccagctggacttgagtattgacagcctggatctgaagctgcgaggaggggaccccantcagtatcancaggttaggaggg

SEQ ID NO: 148418 - DNA, 6361 bp, Homo sapiens
atgacactccacgccacccggggggctgcactcctctcttgggtgaacagtctacacgtggctgaccctgtggaggctgtgctgcagctccaggactgcagcatcttcatcaagatcattgacagaatccatggcactgaagagggacagcaaatcttgaagcagccggtgtcagagagactggactttgtgtgcagttttctgcagaaaaatcgaaaacatccctcttccccagaatgcctggtatctgcacagaaggtgctagagggatcagagctggaactggcgaagatgaccatgctgctcttataccactctaccatgagctccaaaagtcccagggactgggaacagtttgaatataaaattcaggctgagttggctgtcattcttaaatttgtgctggaccatgaggacgggctaaaccttaatgaggacctagagaacttcctacagaaagctcctgtgccttctacctgttctagcacattccctgaagagctctccccacctagccaccaggccaagagggagattcgcttcctagagctacagaaggttgcctcctcttccagtgggaacaactttctctcaggttctccagcttctcccatgggtgatatcctgcagaccccacagttccagatgagacggctgaagaagcagcttgctgatgagagaagtaatagggatgagctggagctggagctagctgagaaccgcaagctcctcaccgagaaggatgcacagatagccatgatgcagcagcgcattgaccgcctagccctgctgaatgagaagcaggcggccagcccactggagcccaaggagcttgaggagctgcgtgacaagaatgagagccttaccatgcggctgcatgaaaccctgaagcagtgccaggacctgaagacagagaagagccagatggatcgcaaaatcaaccagctttcggaggagaatggagacctttcctttaagctgcgggagtttgccagtcatctgcagcagctacaggatgccctcaatgagctgacggaggagcacagcaaggccactcaggagtggctagagaagcaggcccagctggagaaggagctcagcgcagccctgcaggacaagaaatgccttgaagagaagaacgaaatccttcagggaaaactttcacagctggaagaacacttgtcccagctgcaggataacccaccccaggagaagggcgaggtgctgggtgatgtcttgcagctggaaaccttgaagcaagaggcagccactcttgctgcaaacaacacacagctccaagccagggtagagatgctggagactgagcgaggccagcaggaagccaagctgcttgctgagcggggccacttcgaagaagaaaagcagcagctgtctagcctgatcactgacctgcagagctccatctccaacctcagccaggccaaggaagagctggagcaggcctcccaggctcatggggcccggttgactgcccaggtggcctctctgacctctgagctcaccacactcaatgccaccatccagcaacaggatcaagaactggctggcctgaagcagcaggccaaagagaagcaggcccagctagcacagaccctccaacagcaagaacaggcctcccagggcctccgccaccaggtggagcagctaagcagtagcctgaagcagaaggagcagcagttgaaggaggtagcggagaagcaggaggcaactaggcaggaccatgcccagcaactggccactgctgcagaggagcgagaggcctccttaagggagcgggatgcggctctcaagcagctggaggcactggagaaggagaaggctgccaagctggagattctgcagcagcaacttcaggtggctaatgaagcccgggacagtgcccagacctcagtgacacaggcccagcgggagaaggcagagctgagccggaaggtggaggaactccaggcctgtgttgagacagcccgccaggaacagcatgaggcccaggcccaggttgcagagctagagttgcagctgcggtctgagcagcaaaaagcaactgagaaagaaagggtggcccaggagaaggaccagctccaggagcagctccaggccctcaaagagtccttgaaggtcaccaagggcagccttgaagaggagaagcgcagggctgcagatgccctggaagagcagcagcgttgtatctctgagctgaaggcagagacccgaagcctggtggagcagcataagcgggaacgaaaggagctggaagaagagagggctgggcgcaaggggctggaggctcgattacagcagcttggggaggcccatcaggctgagactgaagtcctgcggcgggagctggcagaggccatggctgcccagcacacagctgagagtgagtgtgagcagctcgtcaaagaagtagctgcctggcgtgagcggtatgaggatagccagcaagaggaggcacagtatggcgccatgttccaggaacagctgatgactttgaaggaggaatgtgagaaggcccgccaggagctgcaggaggcaaaggagaaggtggcaggcatagaatcccacagcgagctccagataagccggcagcagaacgaactagctgagctccatgccaacctggccagagcactccagcaggtccaagagaaggaagtcagggcccagaagcttgcagatgacctctccactctgcaggaaaagatggctgccaccagcaaagaggtggcccgcttggagaccttggtgcgcaaggcaggtgagcagcaggaaacagcctcccgggagttagtcaaggagcctgcgagggcaggagacagacagcccgagtggctggaagagcaacagggacgccagttctgcagcacacaggcagcgctgcaggctatggagcgggaggcagagcagatgggcaatgagctggaacggctgcgggccgcgctgatggagagccaggggcagcagcaggaggagcgtgggcagcaggaaagggaggtggcgcggctgacccaggagcggggccgtgcccaggctgaccttgccctggagaaggcggccagagcagagcttgagatgcggctgcagaacgccctcaacgagcagcgtgtggagttcgctaccctgcaagaggcactggctcatgccctgacggaaaaggaaggcaaggaccaggagttggccaagcttcgtggtctggaggcagcccagataaaagagctggaggaacttcggcaaaccgtgaagcaactgaaggaacagctggctaagaaagaaaaggagcacgcatctggctcaggagcccaatctgaggctgctggcaggacagagccaacaggccccaagctggaggcactgcgggcagaggtgagcaagctggaacagcaatgccagaagcagcaggagcaggctgacagcctggaacgcagcctcgaggctgagcgggcctcccgggctgagcgggacagtgctctggagactctgcagggccagttagaggagaaggcccaggagctagggcacagtcagagtgccttagcctcggcccaacgggagttggctgccttccgcaccaaggtacaagaccacagcaaggctgaagatgagtggaaggcccaggtggcccggggccggcaagaggctgagaggaaaaatagcctcatcagcagcttggaggaggaggtgtccatcctgaatcgccaggtcctggagaaggagggggagagcaaggagttgaagcggctggtgatggccgagtcagagaagagccagaagctggaggagaggctgcgcctgcttgcaggcagagacagccagcaacagtgccagagctgcagaacgcagctctgctctgcgggaggaggtgcagagcctccgggaggaggctgagaaacagcgggtggcttcagagaacctgcggcaggagctgacctcacaggctgagcgtgcggaggagctgggccaagaattgaaggcgtggcaggagaagttcttccagaaagagcaggccctctccaccctgcagctcgagcacaccagcacacaggccctggtgagtgagctgctgtcagctatagcacctctgccagcagctgcaggccgagcaggccgctgccgagaaacgccaccgtgaggagctggagcacagcaagcaggccgctgggggactgcgggcagagctgctgcgggcccagcgggagcttggggagctgattcctctgcggcagaaggtggcagagcaggagcgaacagctcagcagctgcgggcagagaaggccagctatgcagagcagctgagcatgctgaagaaggcgcatggcctgctggcagaggagaaccggtggctgggtgagcgggccaaccttggccggcagtttctggaagtggagttggaccaggcccgggagaagtatgtccaagagttggcagccgtacgtgctgatgctgatacccgtctggctgaggtgcagcgagaagcacagagcactgcccgggagctggaggtgatgactgccaagtatgagggtgccaaggtcaaggtcctggaggagaggcagcggttccaggaagagaggcagaaactcactgcccaggtggagcagctagaggtatttcagagagagcaaactaagcaggtggaagaactgagtaagaaactggctgactctgaccaagccagcaaggtgcagcagcagaagctgaaggctgtccaggctcagggaggcgagagccagcaggaggcccagcgcctccaggcccagctgaatgaactgcaagcccagttgagccagaaggagcaggcagctgagcactataagctgcagatggagaaagccaaaacacattatgatgccaagaagcagcagaaccaagagctgcaggagcagctgcggagcctggagcagctgcagaaggaaaacaaagagctgcgagctgaagctgaacggctgggccatgagctacagcaggctgggctgaagaccaaggaaggctgaacaagacctgccgccacctttacttgcccaggttgcgcagcttggaaggcacaaggttgcccatgcaagaccaagcagctttcgagacctgggcaaattccaggtggcaacttgatgctttaaagagccgtgagccccaggctaagccccagctggacttgagtattgacagcctggatctgagctgcgaggaggggaccccactcagtatcaccagcaagctgcctcgtacccagccagacggcaccagcgtccctggagaaccagcctcacctatctcccagcgcctgccccccaaggtagaatccctggagagtctctacttcactcccatccctgctcggagtcaggcccccctggagagcagcctggactccctgggagacgtcttccaggactcgggtcgtaagacccgctccgctcgtcggcgcaccacgcagatcatcaacatcaccatgaccaagaagctagatgtggaagagccagacagcgccaactcatcgttctacagcacgcggtctgctcctgcttcccaggctagcctgcgagccacctcctctactcagtctctagctcgcctgggttctcccgattatggcaactcagccctgctcagcttgcctggctaccgccccaccactcgcagttctgctcgtcgttcccaggccggggtgtccagtggggcccctccaggaaggaacagcttctacatgggcacttgccaggatgagcctgagcagctggatgactggaaccgcattgcagagctgcagcagcgcaatcgagtgtgccccccacatctgaagacctgctatcccctggagtccaggccttccctgagcctgggcaccatcacagatgaggagatgaaaactggagacccccaagagaccctgcgccgagccagcatgcagccaatccagatagccgagggcactggcatcaccacccggcagcagcgtaaacgggtctccctagagccccaccagggccctggaactcctgagtctaagaaggccaccagctgtttcccacgccccatgactccccgagaccgacatgaagggcgcaaacagagcactactgaggcccagaagaaagcagctccagcttctactaaacaggctgaccggcgccagtcgatggccttcagcatcctcaacacacccaagaagctagggaacagccttctgcggcggggagcctcaaagaaggccctgtccaaggcttcccccaacactcgcagtggaacccgccgttctccgcgcattgccaccaccacagccagcgccgccactgctgccgccattggtgccacccctcgagccaagggcaaggcaaagcactaa

SEQ ID NO: 148419 - DNA, 7277 bp, Homo sapiens
gcccacgaagaggtacgattccggagaatcgcgaggcagagcgggagcgcgcagccaggtggaaactaattctaagccagactgctggagatcaccctgttctagtgtgtggaggcttccaccaggagtctggagtgcaatggcacgatctcggctcactgcaacctccacctcccaggttcaagcgattctcctgcctcagcctcccaagtagctgggattacaggcgcattggagtgactgtctggcatcaccaagatgacactccacgccacccggggggctgcactcctctcttgggtgaacagtctacacgtggctgaccctgtggaggctgtgctgcagctccaggactgcagcatcttcatcaagatcattgacagaatccatggcactgaagagggacagcaaatcttgaagcagccggtgtcagagagactggactttgtgtgcagttttctgcagaaaaatcgaaaacatccctcttccccagaatgcctggtatctgcacagaaggtgctagagggatcagagctggaactggcgaagatgaccatgctgctcttataccactctaccatgagctccaaaagtcccagggactgggaacagtttgaatataaaattcaggctgagttggctgtcattcttaaatttgtgctggaccatgaggacgggctaaaccttaatgaggacctagagaacttcctacagaaagctcctgtgccttctacctgttctagcacattccctgaagagctctccccacctagccaccaggccaagagggagattcgcttcctagagctacagaaggttgcctcctcttccagtgggaacaactttctctcaggttctccagcttctcccatgggtgatatcctgcagaccccacagttccagatgagacggctgaagaagcagcttgctgatgagagaagtaatagggatgagctggagctggagctagctgagaaccgcaagctcctcaccgagaaggatgcacagatagccatgatgcagcagcgcattgaccgcctagccctgctgaatgagaagcaggcggccagcccactggagcccaaggagcttgaggagctgcgtgacaagaatgagagccttaccatgcggctgcatgaaaccctgaagcagtgccaggacctgaagacagagaagagccagatggatcgcaaaatcaaccagctttcggaggagaatggagacctttcctttaagctgcgggagtttgccagtcatctgcagcagctacaggatgccctcaatgagctgacggaggagcacagcaaggccactcaggagtggctagagaagcaggcccagctggagaaggagctcagcgcagccctgcaggacaagaaatgccttgaagagaagaacgaaatccttcagggaaaactttcacagctggaagaacacttgtcccagctgcaggataacccaccccaggagaagggcgaggtgctgggtgatgtcttgcagctggaaaccttgaagcaagaggcagccactcttgctgcaaacaacacacagctccaagccagggtagagatgctggagactgagcgaggccagcaggaagccaagctgcttgctgagcggggccacttcgaagaagaaaagcagcagctgtctagcctgatcactgacctgcagagctccatctccaacctcagccaggccaaggaagagctggagcaggcctcccaggctcatggggcccggttgactgcccaggtggcctctctgacctctgagctcaccacactcaatgccaccatccagcaacaggatcaagaactggctggcctgaagcagcaggccaaagagaagcaggcccagctagcacagaccctccaacagcaagaacaggcctcccagggcctccgccaccaggtggagcagctaagcagtagcctgaagcagaaggagcagcagttgaaggaggtagcggagaagcaggaggcaactaggcaggaccatgcccagcaactggccactgctgcagaggagcgagaggcctccttaagggagcgggatgcggctctcaagcagctggaggcactggagaaggagaaggctgccaagctggagattctgcagcagcaacttcaggtggctaatgaagcccgggacagtgcccagacctcagtgacacaggcccagcgggagaaggcagagctgagccggaaggtggaggaactccaggcctgtgttgagacagcccgccaggaacagcatgaggcccaggcccaggttgcagagctagagttgcagctgcggtctgagcagcaaaaagcaactgagaaagaaagggtggcccaggagaaggaccagctccaggagcagctccaggccctcaaagagtccttgaaggtcaccaagggcagccttgaagaggagaagcgcagggctgcagatgccctggaagagcagcagcgttgtatctctgagctgaaggcagagacccgaagcctggtggagcagcataagcgggaacgaaaggagctggaagaagagagggctgggcgcaaggggctggaggctcgattactgcagcttggggaggcccatcaggctgagactgaagtcctgcggcgggagctggcagaggccatggctgcccagcacacagctgagagtgagtgtgagcagctcgtcaaagaagtagctgcctggcgtgacgggtatgaggatagccagcaagaggaggcacagtatggcgccatgttccaggaacagctgatgactttgaaggaggaatgtgagaaggcccgccaggagctgcaggaggcaaaggagaaggtggcaggcatagaatcccacagcgagctccagataagccggcagcagaacaaactagctgagctccatgccaacctggccagagcactccagcaggtccaagagaaggaagtcagggcccagaagcttgcagatgacctctccactctgcaggaaaagatggctgccaccagcaaagaggtggcccgcttggagaccttggtgcgcaaggcaggtgagcagcaggaaacagcctcccgggagttagtcaaggagcctgcgagggcaggagacagacagcccgagtggctggaagagcaacagggacgccagttctgcagcacacaggcagcgctgcaggctatggagcgggaggcagagcagatgggcaatgagctggaacggctgcgggccgcgctgatggagagccaggggcagcagcaggaggagcgtgggcagcaggaaagggaggtggcgcggctgacccaggagcggggccgtgcccaggctgaccttgccctggagaaggcggccagagcagagcttgagatgcggctgcagaacgccctcaacgagcagcgtgtggagttcgctaccctgcaagaggcactggctcatgccctgacggaaaaggaaggcaaggaccaggagttggccaagcttcgtggtctggaggcagcccagataaaagagctggaggaacttcggcaaaccgtgaagcaactgaaggaacagctggctaagaaagaaaaggagcacgcatctggctcaggagcccaatctgaggctgctggcaggacagagccaacaggccccaagctggaagcactgcgggcagaggtgagcaagctggaacagcaatgccagaagcagcaggagcaggctgacagcctggaacgcagcctcgaggctgagcgggcctcccgggctgagcgggacagtgctctggagactctgcagggccagttagaggagaaggcccaggagctagggcacagtcagagtgccttagcctcggcccaacgggagttggctgccttccgcaccaaggtacaagaccacagcaaggctgaagatgagtggaaggcccaggtggcccggggccggcaagaggctgagaggaaaaatagcctcatcagcagcttggaggaggaggtgtccatcctgaatcgccaggtcctggagaaggagggggagagcaaggagttgaagcggctggtgatggccgagtcagagaagagccagaagctggaggagagctgcgcctgctgcaggcagagacagccagcaacagtgccagagctgcagaacgcagctctgctctgcgggaggaggtgcagagcctccgggagggaggctgagaaacagcgggtggcttcagagaacctgcggcaggagctgacctcacaggctgagcgtgcggaggagctgggccaagaattgaaggcgtggcaggagaagttcttccagaaagagcaggccctctccaccctgcagctcgagcacaccagcacacaggccctggtgagtgagctgctgccagctaagcacctctgccagcagctgcaggccgagcaggccgctgccgagaaacgccaccgtgaggagctggagcagagcaagcaggccgctgggggactgcgggcagagctgctgcgggcccagcgggagcttggggagctgattcctctgcggcagaaggtggcagagcaggagcgaacagctcagcagctgcgggcagagaaggccagctatgcagagcagctgagcatgctgaagaaggcgcatggcctgctggcagaggagaaccgggggctgggtgagcgggccaaccttggccggcagtttctggaagtggagttggaccaggcccgggaaaagtatgtccaagagttggcagccgtacgtgctgatgctgagacccgtctggctgaggtgcagcgagaagcacagagcactgcccgggagctggaggtgatgactgccaagtatgagggtgccaaggtcaaggtcctggaggagaggcagcggttccaggaagagaggcagaaactcactgcccaggtggaagaactgagtaagaaactggctgactctgaccaagccagcaaggtgcagcagcagaagctgaaggctgtccaggctcagggaggcgagagccagcaggaggcccagcgcttccaggcccagctgaatgaactgcaagcccagttgagccagaaggagcaggcagctgagcactataagctgcagatggagaaagccaaaacacattatgatgccaagaagcagcagaaccaagagctgcaggagcagctgcggagcctggagcagctgcagaaggaaaacaaagagctgcgagctgaagctgaacggctgggccatgagctacagcaggctgggctgaagaccaaggaggctgaacagacctgccgccaccttactgcccaggtgcgcagcctggaggcacaggttgcccatgcagaccagcagcttcgagacctgggcaaattccaggtggcaactgatgctttaaagagccgtgagccccaggctaaggccccagctggacttgagtattgacagcctggatctgagctgcgaggagggggaccccacttcagtatcaccagcaagctgcctcgtacccagccagacggcaccagcgtccctggagaaccagcctcacctatctcccagcgcctgccccccaaggtagaatccctggagagtctctacttcactcccatccctgctcggagtcaggccccccctggagagcagcctggactccctgggagacgtcttccttggactcgggtcgtaagacccgctccgctcgtcggcgcaccacgcagatcatcaacattcaccatgaccaagaaagctagatgtgggaagagccagacaggcgccaaacttatcgttctacagcaacgcggtctgctcctgcttcccaggctagcctgcgagccacctcctctactcagtctctagctcgcctgggttctcccgattatggcaactcagccctgctcagcttgcctggctaccgccccaccactcgcagttctgctcgtcgttcccaggccggggtgtccagtggggcccctccaggaaggaacagcttctacatgggcacttgccaggatgagcctgagcagctggatgactggaaccgcattgcagagctgcagcagcgcaatcgagtgtgccccccacatctgaagacctgctatcccctggagtccaggccttccctgagcctgggcaccatcacagatgaggagatgaaaactggagacccccaagagaccctgcgccgagccaggcatgcagccaatccagatagccgagggcacgtggcatcaccacccggcagcagcgcaaacgggtctccctagagccccaccagggccctggaactcctgagtctaagaaggccaccagcatgtttcccacgccccatgactccccgagaccgacatgaagggcgcaaacagaggcactactgaggcccagaagtaaagcagctccagcttctactaaacaggcctgaccggcgccagtcgatgggccttcagcattcctcaacacacccaagaagctagggaacagtccttctgcggacggggtagcctcaaaggaaggccctgtccaagggcttcccccaacactcgcagtgggaacccgccgttctccgcggcattgccaccaccacagccagcgccgccactgcttgccgccattgggtgccacccttcgaggccaaggggcaagggcaaagcattaaaggggccagtaccagtgagtgggccccacctgtgttccccgatggttgccgtcacctggtcctccgcctactgtccctctcagtgccttctctcagctcccaggccaacagtagccaaacccctagagacagtgatgcctgcccgcaccctggcctggtccctggtccttcactggcgccttctcggagctggcccagggggcctggagcatggacagtgtgggcgctctccctaccttgcctccttttttcttaaagcaaagtcacttctccatcacaaccagatttgaggctggttttgatggctgggtccttgggcctggccagtcttcctcttagcctctggatctagaagggaccataagaggagtaggccctggttcctgctgtcctggtggctgggccccagcaggggccctcactcttgaagtccaggactgggtctgacctggtgggagcacctgccagaggatgctctttcccaggacggatgggccctgtgtctcaggagtggggttgggggacagccttcagcagcagctcacaccctaccttccccagacttgcactggggtgggatttggagtgatgggaaggtttttaagggccggggatggatcttttctaaatgttattacttgtaaataaagtctatttttctcccgtgaaaaaaaaaaaaaaa

SEQ ID NO: 148420 - DNA, 4842 bp, Homo sapiens
gagaaggagaaggctgccaagctggagattctgcagcagcaacttcaggtggctaatgaagcccgggacagtgcccagacctcagtgacacaggcccagcgggagaaggcagagctgagccggaaggtggaggaactccaggcctgtgttgagacagcccgccaggaacagcatgaggcccaggcccaggttgcagagctagagttgcagctgcggtctgagcagcaaaaagcaactgagaaagaaagggtggcccaggagaaggaccagctccaggagcagctccaggccctcaaagagtccttgaaggtcaccaagggcagccttgaagaggagaagcgcagggctgcagatgccctggaagagcagcagcgttgtatctctgagctgaaggcagagacccgaagcctggtggagcagcataagcgggaacgaaaggagctggaagaagagagggctgggcgcaaggggctggaggctcgattacagcagcttggggaggcccatcaggctgagactgaagtcctgcggcgggagctggcagaggccatggctgcccagcacacagctgagagtgagtgtgagcagctcgtcaaagaagtagctgcctggcgtgagcggtatgaggatagccagcaagaggaggcacagtatggcgccatgttccaggaacagctgatgactttgaaggaggaatgtgagaaggcccgccaggagctgcaggaggcaaaggagaaggtggcaggcatagaatcccacagcgagctccagataagccggcagcagaacgaactagctgagctccatgccaacctggccagagcactccagcaggtccaagagaaggaagtcagggcccagaagcttgcagatgacctctccactctgcaggaaaagatggctgccaccagcaaagaggtggcccgcttggagaccttggtgcgcaaggcaggtgagcagcaggaaacagcctcccgggagttagtcaaggagcctgcgagggcaggagacagacagcccgagtggctggaagagcaacagggacgccagttctgcagcacacaggcagcgctgcaggctatggagcgggaggcagagcagatgggcaatgagctggaacggctgcgggccgcgctgatggagagccaggggcagcagcaggaggagcgtgggcagcaggaaagggaggtggcgcggctgacccaggagcggggccgtgcccaggctgaccttgccctggagaaggcggccagagcagagcttgagatgcggctgcagaacgccctcaacgagcagcgtgtggagttcgctaccctgcaagaggcactggctcatgccctgacggaaaaggaaggcaaggaccaggagttggccaagcttcgtggtctggaggcagcccagataaaagagctggaggaacttcggcaaaccgtgaagcaactgaaggaacagctggctaagaaagaaaaggagcacgcatctggctcaggagcccaatctgaggctgctggcaggacagagccaacaggccccaagctggaggcactgcgggcagaggtgagcaagctggaacagcaatgccagaagcagcaggagcaggctgacagcctggaacgcagcctcgaggctgagcgggcctcccgggctgagcgggacagtgctctggagactctgcagggccagttagaggagaaggcccaggagctagggcacagtcagagtgccttagcctcggcccaacgggagttggctgccttccgcaccaaggtacaagaccacagcacggctgaagatgagtggaaggcccaggtggcccggcgccggcaagaggctgagaggaaaaatagcctcatcaccatcttggaggaggaggtgtccatcctgaatcgccaggtcctggagaaggagggggagagcaaggagttgaagcggctggtgatggccgagtcagagaagagccagaagctggaggagaggctgcgcctgctgcaggcagagacagccagcaacagtgccagagctgcagaacgcagctctgctctgcgggaggaggtgcagagcctccgggaggaggctgagaaacagcgggtggcttcagagaacctgcggcaggagctgacctcacaggctgagcgtgcggaggagctgggccaagaattgaaggcgtggcaggagaagttcttccagaaagagcaggccctctccaccctgcagctcgagcacaccagcacacaggccctggtgagtgagctgctgccagctaagcacctctgccagcagctgcaggccgagcaggccgctgccgagaaacgccaccgtgaggagctggagcagagcaagcaggccgctgggggactgcgggcagagctgctgcgggcccagcgggagcttggggagctgattcctctgcggcagaaggtggcaagagcaggagcgaacagctcagcagctgcgggcagagaaggccagctatgcagagcagctgagcatgctgaagaaggcgcatggcctgctggcagaggagaaccgggggctgggtgagcgggccaaccttggccggcagtttctggaagtggagttggaccaggcccgggagaagtatgtccaagagttggcagccgtacgtgctgatgctgagacccgtctggctgaggtgcagcgagaagcacagagcactgcccgggagctggaggtgatgactgccaagtatgagggtgccaaggtcaaggtcctggaggagaggcagcggttccaggaagagaggcagaaactcactgcccaggtggagcagctagaggtatttcagagagagcaaactaagcaggtggaagaactgagtaagaaactggctgactctgaccaagccagcaaggtgcagcagcagaagctgaaggctgtccaggctcagggaggcgagagccagcaggaggcccagcgcctccaggcccagctgaatgaactgcaagcccagttgagccagaaggagcaggcagctgagcactataagctgcagatggagaaagccaaaacacattatgatgccaagaagcagcagaaccaagagctgcaggagcagctgcggacgctggagcagctgcagaaggaaaacaaagagctgcgagctgaagctgaacggctgggccatgagctacagcaggctgggctgaagaccaaggaggctgaacagacctgccgccaccttactgcccaggtgcgcacgctggaggcacaggttgcccatgcagaccagcagcttcgagacctgggcaaattccaggtggcaactgatgctttaaagagccgtgagccccaggctaagccccagctggacttgagtattgacagcctggatctgagctgcgaggaggggaccccactcagtatcaccaggtcaggaggcagccttcctccctatgtctgtttatggagtgcctgctgtttatcaggctgtatcctagtgagataaataagatgtgatctaaatttattcttagagaagaataaagaaaaaccgggtattataccagatatctattttagggcacagtttggaattaaaaagccaattggtcaagaaaggcttccgttggaagctatcgctccctgctgagtcttgaaagcatccataggtgtgtgtgccaggttgacgagaagagcagtgttgaacagaggctgtgaaagagcctgactaagctgagatgttgaggccaggaaggccccattgggagaccgggctattaagacttgatcctaaaggcattgaggaaaccttggtggctgtaattgaaaggtttaggagaaaaaaaaaggaaccttggaagaatttgaaactgaagagtacatggttaatttgcatcttaaaaagattattctaatagctagtatagaagttaagactggaaaaatgtttttattaaacacttacatttacttattttgtgctagacataaagcactcatgacaattatacctgatttatcccccaacactcgcagtggaacccgccgttctccgcgcattgccaccaccacagccagcgccgccactgctgccgccattggtgccacccctcgagccaagggcaaggcaaagcactaaagggccagtaccagtgagtggccccacctgtgtccccgatgctgccgtcacctggtcctccgcctactgtccctctcagtgccttctctcagcttcccaggccaaacagtagcctaacctcctagagaccagtgatgccttgcccgcaaccctggccctggtccctggtcctttcacttgccgccttctcggagctggcccagggggcctggagcatggacagtgtgggcgctctcccctaccttgccctcccttttttccttaaaaagcaaaagtcactttctccatcacaaccaagatttgaaggcttggttttgatggctggggtcccttgggctctgtctatttcttcctcttagccttctggatctagcaagggacccataagaggagtaggcccctggttccttctgttcttggtggctggggcccagccaggggccctcactttttaagttccaggactgggtctgaccctggtgggagcacctgccagaaggatgctcttttcccaggacggatgggccctgtgttctcaggagtggggttgggggacagccttcagcagcagctcacaccctaccttccccagacttgcactggggtgggatttggagtgatgggaaggtttttaagggccggggatggatcttttctaaatgttattacttgtaaataaagtctatttttctcccgtgagtactgagttgacttgatcggtgtgggaaaaagaggaatatagg

SEQ ID NO: 148421 - DNA, 424 bp, Homo sapiens
tttttctacattaaagtccctttttcctttttaaagctttggaagttttgatcttcttgacaacacagacatccatctgcacttcccagctggagctgtcacaaaagatggaccatctgctggagttaccatagtaacctgtctcgcctcactttttagtgggcggctggtacgttcagatgtagccatgactggagaaattacactgagaggtcttgttcttccagtaagtatgaaaaaacaatttatatggttattttttatttaatttttgaaaattaatattatttttaaatacgggtttgccttctttctatgaaaaccttggttttaagtatatattatatttttatgcctgtaactaattcatattttaaaattttgatcaaataaaagaaaaactgacaaaaaaaaaaaaaaaaaa

SEQ ID NO: 148422 - DNA, 937 bp, Homo sapiens
gactgccagttacacatctagcaaagtacacaccgttttgaacccctgtgttaaatcctagttcccatttcaggactatttgactagtgcctgaactagaaactaattcaaaaggtttattttgttttaatacgacttagagtagaatggaactgttcttccacaccctcacccaaattgtactgtccaccaatattttgaagaattcatttacccaaaacattcatttttgtttgtgactttttttttaggagaaaaagaaaacaggtttaatttttctacattaaagtccctttttcctttttaaagcttttggaagttttgatcttcttgacaacacagacatccatctgcacttcccaagctggagctgtcacaaaagatggacccatctgctggagttaccatagtaacctgtctcgcctcactttttagtgggcggctggtacggttcagatgtagccatgactggagaaattacactgagagggtcttgctcttccagtgggtggaattaaagacaaagtgctggcggcacacagaagcgggactgaagccaagtcattatttcctcgagaaaatgaaaaagaccttgagggaatcccaggcaacgtacgacaggatttaagttttgtcacagcaagctggcctggatgaggatcttaaatgcagcttttgatggtggctttactgtcaagaccagacctggtctgttaaatagcaaactgtaggtccaaatctcaattttttagaattttaagttatgaagtgctcaaaggtactgacacagttgattttattcacaccattaggggtatgcaagatgtccctgttttataaacataatcacaacagtaattaacctcaagtagtggctaatgtttagtataggaatttaaggatgttgatttagtaaacctgataaaaatcgaaaaaa

SEQ ID NO: 148423 - DNA, 691 bp, Homo sapiens
ggacatttacggaggagactatgaacgatttggccttcaaggatctgctgtagcatcaagctttggcaacatgatgagtaaagaaaagcgagattccatcagcaaggaagacctcgcccgggccacattggtcaccatcaccaacaacatcggctccactgcctcggctgtgtgcgttgaatgagaacatagacagagttgtgtttgtgggaaattttctcagaatcaatatggtctccatgaagctgctggcatatgccatggatttttggtccaaaggacaactgaaagctctgttttttgggaacatcagggttattttgggagccgttggggcactgttgggaactgttcaaaatgacttgatgacaagtaggagacgaggcagtgggagggaaacagcctcccaaaagggacagagaactaaaaaattgctgctggagaaggtgaaagtcgctttgggacggaagccaagccatttatggcagatgaacctgctgggattttgttaaataattttaaaatcctttccagatgatcttttactcttaggtttttgagcctaatgatttcaaaacgggggaatataaaagggtttttttctgtatactgtatttttttaaaaaaatggtgcagcgtggccaaacctaccaattgtatgcattaactttgaaaagttgtttgatgttta

SEQ ID NO: 148424 - DNA, 590 bp, Homo sapiens
tactccagatcatctgactaactcttaaaaatcacggccaggcacagtggctcatgcctgtaatcccagcactttgggaagcagaggtggcaggatcattccagcccaggagttcaagaccagcctgggcaacacagtgagtgagaccctgtctctatttaagaaaaaataattaagaaattttattaaaaaagaagaatcaggaaaccaagtccaacccaactaaacctcaaatgaaccagcccctaacacagatgaggggatttgggactgataagctctgtgctgtgtccatggcccgtcatttatcaaggctgcagctttgtaaatgtggctatttttatgttgtgtatagtttctatcatttatttttccactggatttgagtaaagttttttttcttttttttgggaaagacccttctgtctcagttttgctatgagaaaagggatttttgggccctgaacgcgggcatgctggtggcctcaggaatacgaggaaaagagctggagctccctctatcttctctgctgtcacactggaaggcagcctacattttgtcctaataaggacagctcttcaagaaggcc

SEQ ID NO: 148425 - DNA, 575 bp, Homo sapiens
ttttttcactcaacaattctcaatatattccattttgagttgctatttaagttgaaatgaaaaattgtacatttatgtgctaaagaacagaacaattattacaatatagacatgtacagattacttgttagatgaatttaaacaaaacaagttagttgaaacttaactgaaaatttttcccctttcagtctttgtggtgggaacgacgggcttttccactgaagggtgaagacatggcagccttattatgtcaagatgaaaaaaaggatcaggttgaaaggtcaagcacagctttccatggtgaaatcttcggtaccagtgtaccagagaatgggccaccatccaaaaaagcagtcagatggaatggaagaatacaaaacctttggtctaggacttactaatgttaaaaaaaataggtgacagggaacaggttaagaaaactatgtaaatgtaggaaagatgggaggaaataaagccctgttctggatcccccatcccctccagaataagagcatgttctgcatggattaatcttttatgcctgttaatgaacaggcaagaaaagtctgtttttc

SEQ ID NO: 148426 - DNA, 1212 bp, Homo sapiens
gtggccttcaaaagaaacagcatttttaaacactacacaaatgccttgcctgcaatcagcttcaacttggagtagctatgaacacaattcggagtcttacctattaagagaacatgtatcagagttagattcctctttccattctgttctatcattgccatcagatgtgcctcttcattttcactttgaaacactgttaaaaaagactgaaataaaaggcaatcttgctgaaaataaatttgtagatgaatatatcatatctccatcacctgtacatagtactctgaatcaatggagaaatggatattcacctatatgtaagcctcaaataaggtcagaatcttctgcacaactgttacagggaagaaagaaaagacatttgagtgaaacagcattaggagaaagaactaaactttaaagaatttgattttcaccacacagaatcaggatcccatagcaattttactgctgtttccaatgtcaacgttttatcaagaatccagaattcatcacgaaatactgcacgacggaggattgagaagtgagagctcttatgacataggataacattgtggattcccatgtcattaggtagccccagctaaattagagaaactccaatataaggaaatacttactccaagctggaggatggttgttcttcagcctttggatgaatataatttaggcaaagaagagatagaagatctttctgatgaagtcttctccctaaggcacaaaaaatatgaagagagagagcaagccaggtggtcactatgggagcaaagcaagtggcacagaagaaacagcagagcttacagtaaaaatgttgaaggacaggacttgcttttgaaagaataccctaataacttcagtagcagtcagcaatgtgctgctgcaagtcctcctgggcttccttcagagaaccaggatctgtgtgcatatggcttaccttctttaaatcaaagtcaagaaaccaagtctttgtggtgggaacgacgggcttttccactgaagggtgaagacatggcagccttattatgtcaagatgaaaaaaaggatcaggttgaaaggtcaagcacagctttccatggtgaaatcttcggtaccagtgtaccagagaatggccaccatccaaaaaagcagtcagatggaatggaagaatacaaaacctttggtctaggacttactaatgttaaaaaaaataggtga

SEQ ID NO: 148427 - DNA, 621 bp, Homo sapiens
cattaacaaagatggtgcttatggggcaggttccctaacagtcaggattccggttgcagtttttctcccccgccccaaagatacgtggttgcagacggagaaatggaggccagagacaaacaagtactccgctcacttcgcctggagctgggtgcagaggtattggtggagggactggttcttcagtacctctaccaggaaggaatcttgacggaaaaccatattcaagaaatcaatgctcaaaccacaggcctccggaaaacaatgctcctgctggatatcctaccttccaggggccctaaagcattggataaatccctagattccctacaggagttttcctgggtcaggaagaagctgaagaagcaaggggaagagcccatgaccgacctgcctgcagttgccatcatcaggcttcctagagaattgagcctgcccactctgttatgaagtctacccagaagagctggcagagtaggccccttcactgggactgcagcaacactgaccaaagcaaatccttctcttggaagaaacaaactcattcctcacacctgcctcaccccgctcccaccgccaccccctgcaccacacgccagcccttaataaaaactaaaactg

SEQ ID NO: 148428 - DNA, 733 bp, Homo sapiens
  misc_feature (1)...(733): n = a,t,c or g
gaacaacaagtactccgctccacctgcctgggagtgggtgcaaaggtatggtgaagggatggttcttcagtactctacccagaaaggaatcttgacggaaaccatattcaagaaatcaatgctcaaacacaggcctccggaaacaatgctcntgctggatatcctaccttccaggggccctaaagcatttgatacatcctagattccctacaggagtttccctgggtcagggagaagctgaagaaggcaagggaagaggccatgaccgacctgcctgcagggttagaggaaaaaggaaggactggccgaagaatggggtggggagctggagaagagaagggccaaaagtgtcagactgtggggatgaggacctgaaggaggcccatgagacctcaggcatgggccctggaactctgcctttttgaagcctgttgacaatctcaccctaatttaaccctttgtggaattcttccaatgagatgcagttgccatcatcaggcttcctaaagaattgagcctgcccactctgttatgaagtctacccagaagagctggcagagtaggccccttcactgggactgcagcaacactgaccaaagcaaatccttctcttggaagaaacaaactcattcctcacacctgcctcaccccgctcccaccgccaccccctgcaccacacgccagcccttaataaaaactaaaactgatgtcattgtaaaaaaaaaaaaaaaaa

SEQ ID NO: 148429 - DNA, 960 bp, Homo sapiens
actccagtgtggtggaattccttatggggcaggttccctaacagtcaggattccggttgcagtttttctcccccgccccaaagatacgtggttgcagacggagaaatggaggccagagacaaacaagtactccgctcacttcgcctggagctgggtgcagaggtattggtggagggactggttcttcagtacctctaccaggaaggaatcttgacggaaaaccatattcaagaaatcaatgctcaaaccacaggcctccggaaaacaatgctcctgctggatatcctaccttccaggggccctaaagcatttgatacattcctagattccctacaggagtttccctgggtcagggagaagctgaagaaggcaagggaagaggccatgacccgaccttgccttgcagttgacagattgactgggatccccttcgcacatcctcaacagctccccatcagaccggcagattaaccagctggcccagaggctgggccctgagtgggagcccatggtgttgtctctgggactgtcccagacggatatctaccgctgtaaggccaaccacccccacaacgtgcagtcgcaggtggtggaggccttcatccgctggcggcagcgcttcgggaagcaggccacctttccgaacgctggacaacgggcttgcgggctgtggaggtggacccctccctgctcctgcacatgttggagtgatggtgcctccagcaaccgctggggagtgtgtccctgagtcatgtgggcttgaatcctgactttcactcagagcaggtggttttttgtgtaggtttgttttttatttttgatgatcttcagatggaaggagaaaacagggtttccactagacattacttgaaaggccagattactcagcagatctcccatgttggctcaacaattctttgtttttaattgcttgaagattgcattgttgtaattgttcag

SEQ ID NO: 148430 - DNA, 1527 bp, Homo sapiens
  misc_feature (1)...(1527): n = a,t,c or g
cggccgcttaattaagacgggccgcaaacgttttttttttttttttttttaaataagaaatagggtttattgagaaaagttcggcaagcagagaaacagaacagacacacaaccccctggctgttcacagctcaggcctaagatggttgtgttctgtggccaggccccctaaggctctgtgctttcataggaactggagagcaattgtcaacaagggaaactgaaagcatggccttcagaactctgggctgacggcagcctggttcttttggttaaagcctaatttaagacctttgttcaagctaacaggagaagaaaattaggtgtagggagccctggggccccaagctctgggtctttaaaacaccatcatcctgcttttaccttttacaaccatcccacgggccctattattatggggatgagggttaaaggaaacacggtcccaagggcggggtcatcccccttcccagtgcttatcacctagttgagggatccaaacaaggaccaaccttgacaaaacataaggaccaggaccagggcccagccaaggtgaaggggcccgcctcacggtcagactcacaggtccgtctcctctgctcaattgcccagtctttgcctagacctgctacgtgaactttgtcacagtggcaagtcagagctagcgtggctgcgactcctttgtgggaggaaaagtaaggccttgaacatctaggtgtagggaatccacccccagaaacactgcccagggaaggcagcagagcaggctgctgcagtgagcggcccctgacactttctccacggtcccctggcacaggaagacaagtccgagagagagcgctggcaagcacctggctgaccctggccgacttcgcgctggcccatgaaggatacgctcaccaacatcaacaaccagtccttcaataacttcatgctgcgcataggtgagcacaccccagctgggctgccccgcagcaggctcccttcccatgcaggggcctggccccccaccaggagagacatgaggctcaggacaactgaggcaattcgggtggggaggttcacgcactcacagggcaaggagacctgaaagacctttagtccagacgactctagatgactaaaccaaaaacccagctgatgtgatgatccgactatactgtgcctactgttacaacagaagcttggcctgcctggctgagaagtgagtttgtgatccatttccagaggggttgctgtgcctgctgagcacatggcttcccagccccgcccgctttttgaaaggagttaagctcaataactaaattttactgagggggtatcattcctgagtgaggtcccaggagacttgaaataccagctgtgttagaagctggccactaccatgccgagtaaatctgcatatnnnnnnnnnntggcggctgacacctaacaagcactcggataaacaggagatgtgatttccaccctccaatagcatacagccaagttgaatgaggacaatgatgtgttacattaggagctttg

SEQ ID NO: 148431 - DNA, 243 bp, Homo sapiens
  misc_feature (1)...(243): n = a,t,c or g
gggccgaggaagactttgagtctctggcctcacagtncagcgactgcaagtcagccaaggcctggtcagcagagccgccccgtgtccccccaggtgctggaggcagactcgagggccgaattgtttctagttaggccacgctcctctgttcagtcgcaaaggtgaacactcatgcggcccagccatgggccctctgagcaactgtgcagcaccctttcacccccaattaaacccagacccact

SEQ ID NO: 148432 - DNA, 618 bp, Homo sapiens
atggcggacgaggagaagctgccgcccggctgggagaagcgcatgagccgcagctcaggccgagtgtactacttcaaccacatcactaacgccagccagtgggagcggcccagcggcaacagcagcagtggtggcaaaaacgggcagggggagcctgccagggtccgctgctcgcacctgctggtgaagcacagccagtcacggcggccctcgtcctggcggcaggagaagatcacccggaccaaggaggaggccctggagctgatcaacgggatccctgtggctgtgtccccagccctggccgctgggggctgtggcaaggtgatgcttgttcagggcctgggcctggctcctcagacgctcagtgcctgcaggcagtcctgcttccccgaagtaggctacatccagaagatcaagtcgggagaggaggactttgagtctctggcctcacagttcagcgactgcagctcagccaaggccaggggagacctgggtgccttcagcagaggtcagatgcagaagccatttgaagacgcctcgtttgcgctgcggacgggggagatgagcgggcccgtgttcacggattccggcatccacatcatcctccgcactgagtga

SEQ ID NO: 148433 - DNA, 1072 bp, Homo sapiens
  misc_feature (1)...(1072): n = a,t,c or g
cccggctgggagaagcgcatgagccgcagctcagtagtaaacactcaggaagcgttacccactgctgccattcccagagatgcaaaaggccgagtgtactacttcaaccacatcactaacgccagccagtgggagcggcccagcggcaaacagcatgcagtggtggcaaaaacgggcagggggagcctgcagtggttccgctgcttcgcacctgctggtgaagcacagccagtcacgggcggccctcgtcctgggcggcagggagaagatcacccggaccaagggaggaggccctgggagcttgatcaacggtttacatccagaagattcaagttcgggagaggaggactttggagtctctggcctcacagttcagcgactgcaagcatcagccaaggccaggggaagacctgggtgcctttcagcagaaggtcagattgcagaagccatttttaaagacgcctcgttttgcgcttgcggacggggggagatgagcggggcccgtgtttcacggatttccggcatccacatcatccttccgcacttgagtgagggtggggagcccaggcctggcctcggggcagggcagggcggctaggccggccagctccccctttgcccgccagccagtgggcggaaccccccactccctgccaccgtcacacagtatttattgttccccacaatggctgggaagggggcccttccaagattgggggcccctggggttcccccacttccctgtccagtccccagttggggctgcgaccggccagattctccctttaaggaaattgactttcaagcaggggtgggaggctcccagacccagggcaagtgtggtgggaggggtgttccaaagagaaggcctggtcagcagagccgccccgtgtccccccgaggtgctggaggcagactcgagggccgaattgtttctagttaggccacgctcctctgttcagtcgcaaaggtgaacactcattgncgcccagccatgggccctctgagcaactgtgcagcaccctatcacccacaattaaacccagaaccactgcaaaaaacggacgcgtgg

SEQ ID NO: 148434 - DNA, 504 bp, Homo sapiens
gagacagtgtttcactctgtcactcaatctggaatgcagtggcacaatcttgcctcactgcaacgcctgcctctcaggctcaagcaaacctctcacctcagcctgctgagtagctgggactgcaggcacatgccaccaaacttggccattttttgtcttacgtagagacaagatttcaccgttttgcccaggctgggcctcaaacccccccgggctcaagcaatgtattggaattttaaaatacccccaggcactcactccttatgaattaataaacatttgggagggtatataaagtaaaaagttaaagtctttccctgtaagttaacacaaatgttaactattgttaaaaactttacaggtagctctctagatatttttctatttttgtatgtatacttatgcatacatgtaagtatataaacatttagaagtgtacctatctaacaaactattatgaaatactttcaaatctgtaaatagatctattatactattttaaaa

SEQ ID NO: 148435 - DNA, 774 bp, Homo sapiens
atgcccacagttgattctgcaccagcatcaccacatttgaggttgacaagatctcagttccagaactaccctgccattgatcacaagctttccataaccattttggagggtgccgttgcttttgtcgtagatgggagtcatactggaaccttctgggaccacggtcccactcgtatcgtcggtctgattattagtctgggaccacggtcccactcgtatcgtcggtctgataatcagactgggaccacggtcccactcgtatcgtcgagtagcaaaagtggacggactatgcctaacattcttgatgacataattgcttcagctgttgaaaacaaaattccaccaagtaaaacctccaagataaatgtaaaaccagagcttaaagaagagcctgaagaaagcataatatctgcagtggatgaaaataataaattatacagtgatataccacattcttggatctgtgatgcacttcaaaaagcctttacagataaagaggaattacttaagcagcaggcatctaaccttcatgagcagaaaaaagctggggtgatatttgaagctgaagaagttatcactcttttaacttctgtgcttaaaacgtcatctgcatcaagaactagtttaagctcacgacatcagtttgctcctggagcgacagtattgtataagggcgataaaatggtgcttaacctggacaggtctcgtgttccaactgagtgtatagagaaaattgaggccattcttaaggaacttgaaaagccagcaccctga

SEQ ID NO: 148436 - DNA, 1079 bp, Homo sapiens
atgccagtaaatgctggtggtaaagttcaagaatcacagaagcctccaactctaatacccgaaccaaaagactcccaggcaaattttaagagttcttcagaacagagtttgacggagatgtggagacctaataataacctcagcaaagagaaaactgaatggcatgtggagaaaagcagcggaaagttacaggctgctatggcatctgtcattgtgcgtccatcttctagtacaaaaactgatagtatgccagcaatgcagttagcttctaaagatcgtgttagtgaaagatcttcagctggggcacataaaacagattgcctcaaactagcagaagccggagaaactggaagaatcattttgccaaatgtgaattcagacagtgttcacacaaaatctgaaaaaaactttcaggctgtctcacagggcagtgttcccagttcagtcatgtctgctgtaaatacgatgtgtaataccaaaacggatgtaatcacatctgctgccgatactaccagtgtttccagctggggtggttcagaagtaatttcctctttatcaaataccattttggcctctacatcatcagaatgtgtatcttcaaaaagtgtcagtcagccagtggctcaaaaacaagaatgcaaggttacttggagtgatatagcaggtttagatgatgtcattacggatctgaaagacacagtcatcttacctatcaaaaagaaacatttgtttgagaattccaggcttctgcagcctccaaaaggtgtagttgctgctaaagatcatgatataggaacaacaaatctccatattgaagtttctgatgttgtaaatatactagtttatgttggcatagcaaaaggaaatggcattctctcaaaagcagctggtgagcggcactctggcccggtgcggtctcctaactcgcagtgtctattgggcacccctctggctgtgctgcacagtcaccctgctgccggcggaccagccctctcccatgcaccctctctccttgtccgctcgaggctgcaggtggcactgcctccttcccaggattctgcagggcagcagccagacag

SEQ ID NO: 148437 - DNA, 2386 bp, Homo sapiens
cttaccttagaaaaccaaattaaagaagaaagagaacaagacaactctgaatctccaaatggcagaacatcacctcttgtgtcccagaataatgaacaaggctcaaccttacgggatttgctgactacaacagctggaaagctacgtgtggggtctacagatgctggcattgcctttgccccagtatatgcaatgggagccccaagtagcaaaagtggacggactatgcctaacattcttgatgacataattgcttcagttgttgaaaacaaaattccaccaagtaaaacctccaagataaatgtaaaaccagagcttaaagaagagcctgaagaaagcataatatctgcagtggatgaaaataataaattatacagtgatataccacattcttggatctgtgagaagcatattttatggcttaaggattataataatagcagtaattggaagcttttcaaagaatgttggaaacaaggacagcctgcagtggtttctggtgtgcataagaaaatgaacattagcctatgggaaggcggaatcaattagtcttggattttgggagaccaccaagctgatctcctgaactgcaaaggatagcatcatttcaaatgcccaatgttaaggaattctgggatggttttgaagaagtttcaaaacgggcagaaaaacaagagtggagaaacagttgttttaaaattgaaagattggccttcaggagaagacttcaagactatgatgccagcaagatactatagatcttttaaaaagtctgccattgccagaatattgtaatccagaaggaaaattcaatttggccatctcatttgccagggattttttgtacgtcctgatctagggacccagggttgtgcagtgcctatggtgtagttgctgctaaagatcatgatataggaacaacaaatctccatattgaagtttctgatgttgtaaatatactagtttatgttggcatagcaaaaggaaatggcattctctcaaaagcaggaattctcaagaaatttgaggaagaagatttggatgacattttaaggaaaagattgaaggactcaagtgaaatacctggtgctctgtggcatatttatgctgggaaagatgttgacaagataagggaatttcttcaaaagatttcaaaagaacaaggccttgaagttctaccagaacatgatccaatacgtgaccaaagttggtatgtgaacaaaaagctccgtcaaaggctgcttgaagaatatggagtcagaacctgtactcttattcagttccttggggatgctattgttttgccagcgggagcacttcatcaggttcagaattttcacagctgtattcaggtaactgaagattttgtgtctccagaacatcttgtagagtcatttcatttaacacaggaactgagacttttgaaggaagaaatcaattatgatgataaactacaggttaaaaatattttgtatcatgcagtcaaagaaatggtgagagccttgaagatacacgaggatgaagtagacgatatggaagaaaattaagtgtgatccagtttgatatttttaggttgttgaactgggattacttaaccttgaatgatgatatgtatgcacactgactttaagcttcataaaaccatcagtgccaagaaattctcctttgtagtaattacttgttactgacaccacagcagtatagcatatgtcacagctcctgtgattcaatgttataaaacaagcagaattttaaaagcagcactatatagctgttttgtattatagtgtatatgatgtttgtgaaaatgccagatttaaaatgatgtatttatttttggtaaaaaataaaaaattctatgctatattgttgatcaagtgtaaatgtgaccttgtacagtttactaaaattactggatatttttcactacattggagaccagttactgtgagaataggacacaaacaccagctattgcctgcatctgggaaattgctgaatcgcacagcagtcatgtcataatcagaaaattactgccaaataattgtaaaatttgtaaagtataaagtatataaagtagatactaaatacagacacttcaattattttgttgaagcctattgactgtacaattaaacattttccaaaaggtgtaaatttatttaaaattgtctcattttggtaaaaatttatgtgaacttttaaagctaaaatattaaaacttaatatgctatgtaaatatatacatatatacatttaatgatgtatttttttaacaacattggcttgcttttgtctaacgtgcaagctgttacatctgcgccttgctacattaaagttgcacgggctcttacactttccattaaaaggactttatcaaaaattg

SEQ ID NO: 148438 - DNA, 619 bp, Homo sapiens
  misc_feature (1)...(619): n = a,t,c or g
tttaaagaaagggtggattttttgtggatctctttgtaagaggtatctaaccaagttgcagttaacatgtacaagcagttgggctacagtgtatataggacggtcatagagtactattcggccagcaacggggagcctgatgaggacgcttatggtaagctcccttccatggcagtatccccaagaagtcgaaacagttacattctttctacagattgtagtatttgattattttaataaatgtaggaatatttgactttaaaatttaaatttccctcaacctacctttatcaacctattaggtagtagtaattaactttacctatttaactaaccatggggttaatttctgtaccttactggttttcactctgtttacatacatattattttgctaacaagaaaacgtgtattgtgagctgaatactgggtgaggtctggttagcatgtggtacacttggcaattgggagacatttataaatacattttgcttagaatatggtgaagtgggggtagggatagaacctcttatgggaactttacctatacactttacatttgatataatacattgtgcattccgacngtctatcaagggntaccaggnncntnacctcc

SEQ ID NO: 148439 - DNA, 1120 bp, Homo sapiens
  misc_feature (1)...(1120): n = a,t,c or g
agggcgggcgcggggtcttggcgaactgttttctgaagcggcggcggcgcgatgaccacgctacgggcctttacctgcgacgacctgttccgcgtgtcaacaacattaacttggatccacttacagaaacttatgggattcctttctacctacaatacctcgcccactggccagagtatttcattgttgcagaggcacctggtggagaattaatgggttatattatgggtaaagcagaaggctcagtagctagggaagaatggcacgggcacgtcacaagctctgtctgttgccccagaattttcgacgccttggtttggctgctaaacttatggagttactagaggagatttcagaaagaaagggtgggatttttttggtggatctctttggtaagagtatctaaccaagttgcacgttaacatgtacaagcacgttgggctacagtgtatatagggacggtcataggagtactatttcggcccagcaacgggggagccctgatgagggacgcttatcgatatgagggaaagcacttttcccagggatactggagaaagaaatcccatcatacccattacctcatcctggtggaggccttgaagaccattgaattaacccctggggcagtggcttcttaggcagatactctagattgctttatggaccaatattattttccattgggatgattctgggaagcttcntattaggagaaaagtaatccattttaggtcttaaagacttccaagaaaatacggggttatccaatttattttaaatctcattgtttccagttagccaatatcataccctattaaagctgttcattgtaaccaaattccatccaaaaggccagctaggtcagaaggaaacataccacctctcatggttccatagtatccacgggtaatgtatgctagggaaaagacttgctccagtctcctcctcagttctgtgcctgagaaccactgctgcatatatttgtttttaaattttgtattgaactgttaattgaagctttaaaagcatatatgaaatgtataaatctaagatgtataatacattattgactccaaaaaaaaaaaaaaaaaaaaaagtacctcggccgcgaccacgc

SEQ ID NO: 148440 - DNA, 600 bp, Homo sapiens; identical to SEQ ID NO: 133875
  misc_feature (1)...(600): n = a,t,c or g

SEQ ID NO: 148441 - DNA, 1981 bp, Homo sapiens
tctcagtcgccgctgccagctctcgcactctgttcttccgccgctccgccgtcgcgtttctctgccggtcgcaatggaagaagagatcgccgcgctggtcattgacaatggctccggcatgtgcaaagctggttttgctggggacgacgctccccgagccgtgtttccttccatcgtcgggcgccccagacaccagggcgtcatggtgggcatgggccagaaggactcctacgtgggcgacgaggcccagagcaagcgtggcatcctgaccctgaagtaccccattgagcatggcatcgtcaccaactgggacgacatggagaagatctggcaccacaccttctacaacgagctgcgcgtggccccggaggagcacccagtgctgctgaccgaggcccccctgaaccccaaggccaacagagagaagatgactcagattatgtttgagaccttcaacaccccggccatgtacgtggccatccaggccgtgctgtccctctacgcctctgggcgcaccactggcattgtcatggactctggagacggggtcacccacacggtgcccatctacgagggctacgccctcccccacgccatcctgcgtctggacctggctggccgggacctgaccgactacctcatgaagatcctcactgagcgaggctacagcttcaccaccacggccgagcgggaaatcgtgcgcgacatcaaggagaagctgtgctacgtcgccctggacttcgagcaggagatggccaccgccgcatcctcctcttctctggagaagagctacgagctgcccgatggccaggtcatcaccattggcaatgagcggttccggtgtccggaggcgctgttccagccttccttcctgggtatggaatcttgcggcatccacgagaccaccttcaactccatcatgaagtgtgacgtggacatccgcaaagacctgtacgccaacacggtgctgtcgggcggcaccaccatgtacccgggcattgccgacaggatgcagaaggagatcaccgccctggcgcccagcaccatgaagatcaagatcatcgcacccccagagcgcaagtactcggtgtggatcggtggctccatcctggcctcactgtccaccttccagcagatgtggattagcaagcaggagtacgacgagtcgggcccctccattcgtccaccgcaaatgcttctaaacggactcagcagatgcgtagcatttgctgcatgggttaattgagaatagaaatttgcccctggcaaatgcacacacctcatgctagcctcacgaaactggaataagccttcgaaaagaaattgtccttgaagcttgtatctgatatcagcactggattgtagaacttgttgctgattttgaccttgtattgaagttaactgttccccttggtatttgtttaataccctgtacatatctttgagttcaaacctttagtacgtgtggcttggtccccttcgtggctaaaggtaagaacgtgcttgtggaaagacaagtctgtggcttggtgagtctgtgtggcccagcagcctctgatctgtgcagggtattaacgtgtccagggctgagtgttctgggatttctctaaaggcctgccaagaaccagttgtttttgtcttgcgggtctgtcagggttggaaagtccaaagcgtaggaacccagtttcctttctttgcttgatgtctttggccagaacaccgtgggctgttaacttgccttgagttggaagcggtttgcatttacgcctgtaaatgtattcattcttaatttatgtaaggttttttttgtacgcaattctcgattctttgaagaagatgacaacaaacttttggttttctacatgttatgtgagaacattagcgccccacgcaacactgtcattgtgtaaggaaaaataaaagtgctgccgtaacccaaaaaaaaaaaaaagggcggccggtttaaaagattccataaagg

SEQ ID NO: 148442 - DNA, 1013 bp, Homo sapiens
  misc_feature (1)...(1013): n = a,t,c or g
ggtcccggtttccggaaggcctcttccaacctttctttccgggttatgaaatcttgcggcatccacgagaccacctttcactcccattcataaagtttgacgtggcaatccgccaaagacctttacgccaacacgttgcttccgggcggcaaccaccaggtatcgggggcattgttgacagggatgcagaaagaaatccacgcccctgccgcccaggcaacattgagattcaagatcattgcacccccaggaagcgcaagtactcggtgggtggatcggttggctccatcctggcctcactgtccaccttccaggcagatgtgggattagcaagcaagaagtacgacgagtcggggcccctccattcgtccaccgcaaaatgctttctaaacggactcagccagattgcgtagccatttgctgcatgggttaattgagaatagaaatttgcccctgggcaaatgcacacacctcatggctagccctcacgaaactggaaataagcccttcgaaaaggaaattgtccttggaagcttgtatccgaaaatcaagcaactggattgtaagaaacttgttgcctgaaatttgacccttgtattgaaagttaaactgttcccccttggtaantaaacgtgtccagggctgagtgttcctgggatttcctctagaggctggcaagaaaccagttgtttttgtcttgcgggtctgtcagggttggaaagtccaagccggtaggacccagttttcctttcttagctgatgtctttggccagaacaccgtgggctgttaacttgccttgagttggaagcggtttgcatttacgcctgtaaatgtattcattcttaaatttatgtaaggttttttttgtacgcaattctcgattctttaaagagatgacaacaaatctttggttttctcctagttatgtgagacacattagggccccagcgggctcgtctttgtgtaaggaaaaataaaagtgctgccgtaaccaaaaaaaaaaaaaaaaaaa

SEQ ID NO: 148443 - DNA, 1894 bp, Homo sapiens
tttcgtgcgaatccggccggagtgatgccatctgcagttttgtgatctgcaatgattcttcccttcgaggtcagcccattatctttaatcctgacttttttgtggagaaactccgacatgagaaacctgagattttcactgagttggtggtcagcaatatcacaaggctcatcgatttacctggaactgagttggctcagctgatgggggaagtggaccttaagttgcctggcggggctggcccagcatcaggattcttccggtctctcatgtctctcaagcgaaaggaaaaaggagtgatatttgggtccccactgacggaggaaggcattgcccagatataccaactgattgagtatctacacaaaaacttgcgagtagagggtttgtttagagtaccgggtaatagtgtccgacagcagattttaagggatgctctcaataatggaactgacattgacttggaatcaggggaatttcactcaaatgatgttgccactttgctgaagatgtttctaggagagttgccggagcctctgctgacacataaacacttcaatgcacacctcaaaatcgctgatttgatgcagtttgatgataaaggaaacaagaccaatataccagacaaggaccggcaaattgaggctctccagttgctcttcctcattctccctcctcctaatcgtaatttgctgaagttattgcttgatctcctataccagacagcaaagatacaagacaagaacaagatgtcagcctataaccttgcccttatgtttgccccccaatgttccggtggccaaaaaatgtcactgcaaatgaccttcaggagaatatcacaaagttaaacagtgggatggcttttatgattaaacactcccagaaactttttaaggctcctgcttatattcgagagtgtgcgagattgcactatttgggatccagaactcaggcatcaaaggatgaccttgacctcatagcttcatgtcatactaagtcctttcagctggcaaagtctcagaaacggaaccgggtagattcctgccctcaccaggaggagacccagcaccatacggaagaggcactgagagagctgtttcaacacgttcatgatatgccagagtcagcaaagaagaaacaacttattagacagtttaataagcaatcattgacccagacaccagggcgagaaccttctacttcccaggtacaaaagagggctcgttcgcgctccttcagtgggcttattaagcggaaggtcctgggaaatcagatgatgtcagaaaagaaaaagaagaaccctactccagaatctgtggccattggtgaattgaagggaaccagcaaagaaaataggaacttattattttctggctctccagctgtcgcgagtgtctccaacaagatttaagtggtctgaagggaagaaagaggggaaaaaagcatttctctgaaggatccagagttgtctcctatggtccatgcagaattttctgtttagtgggcaggtgttattcctgcccacagcaacgcttgggcttgcagcttgcttgctgcattttgaaatgacaaagccaatgtaataccgtgacccgactgatacctctaaccccactcactggatgatgtttgcaagctgtgccttctgagagagtgcttaggccctgtctctcttttttaatattatggggaaaccactaactatccaaccagcttatacagcacactaaggtgggcttcagtgctcactcaatgtgtttaggcagattccacttttgaaaaaaaatatgaaatgtgtgctcaactgccagtaattttttaaaaagcactgtcccagtggattgatgttgtttttaatggatattttgggtttttctctgttttgatagtaaaa

SEQ ID NO: 148444 - DNA, 480 bp, Homo sapiens
attcacacataacagtattaaccttaaatgtaaatgggctaaatgctccagttaaaagacacagactggcaaattggataaagagtcaagatccaccagtgtgctttattcaggagacccatctcacatgcagagacacacacaggctcaaaataaagggatggaggaagatctaccaagcaaatggaaaacaaaaaaggcaggggttgcaatcctagtctctgataaaacagattttaaaccaacaaagatcagagacaaggccattacataatggtaaagggatcaatgcaacaagaagagcaagtccttagagacccacaaagagacttagactcccacacaatgataatgggagactttaacaccctactgtcaatattagacagatcaacgagacagaaagttaacaaggatatccaggaattgaaatcagctctgcaccaagcagatctaatagacatctacagaactctccac

SEQ ID NO: 148445 - DNA, 834 bp, Homo sapiens; identical to SEQ ID NO: 133798

SEQ ID NO: 148446 - DNA, 583 bp, Homo sapiens
atgggagactttaacaccccactgtcaacattagacagatcaacaagacagaaagttaacaaggatatccaggagttgaactcagctctgtaccaagtggacctaatagacatctacagaactcttcaccccaaatcaacagaatatacattcttctcagcaccacaccacacttattccaaaattgaccacatagttggaagtaaggcactcctcagcaaatgtaaaagaacagaaattataacaaactgtctctcagaccacagtgcaatcaaactagaactcacgattaagaaactcactcaaaaccgctcaactacatggaaactgaacaacctgctcctgaatgactactggaaatacaaacaaccatcagagaataaacacctctacgcaaataaactagaaaacctagaagaaatggataaattccttgacacatacaccctcccaagactaaaccaggaagaagttgaatccctgaatagaccaataacacgctctgaaattgaggcaataactaatagcttaccaaccaaaaaagtccaggaccagatggattcacagccgaattctaccagag

SEQ ID NO: 148447 - DNA, 1470 bp, Homo sapiens
atggaacaaagctgggtggagaatgactttgatgagttgagagaagaaggcttcagacgatcaaacttctccgaggtaaaggaagaaagtcgaacccaacccaaagaagctaaaaaccttgcaagaagagacacacataggctcaaaataaaaggatggaggaagatctatgaagaaaatggaaaacaaaaaaaggcaggggttccaatcctagtctctgataaaacagacttcaaaccaacaaagatcaaaagagacaaagaaggccattacacaatggtaaagggatcaattcaacaagaagagctaactatcctaaatatatatgcacccaatacaggagcacccaggttcataaagcaagtccttagagacctacaaagagacttagactcccacacaataataatggaagactttaacaccccactgtcaacattagacagatcaacaagacagaaagttaacaaggatatccaggaattgaactcagctctgcaacaagtggacctaatagacatctgcagaatgctccaccccaaatcaacagaatatacattcttctcagcaccacatcacacttattccaaaattgaccacagagttggaagtaaagcacttctcagcaaatgtaaaagaacagaaattataacaaactgtctctcagaccacagtgcaatcaaactagaactcaggattaagaaactcactgaaaaccgctcaactgcatataatctgaacaacctgctcctgaatgactatggggttcataacgaaatgaagtcagaaatcaagatgttctttgaaaccaacgagaacaaagacacaacataccagaatctctgggacacatttaaggcagtggaaatacaaactaccatcagagaatactacaaacacctctacagaaataaactagaaaatctagaagaaatggataaattcctcgacacatacaccctccctagagtaaaccaggaagaagttgaatctctgaatagaccaataacaggctctgaaattgaggcaataattaatagcctaccaaccaaaaaaagtccaggaccagatggattcacagccgaattctaccaaaggtacaaggaggagctggtaccattccttctgaaactattccagtcaatagaaaaagaaggaatcctccctaactcattttatgatgccagcatcatcctgataccaaagcctggaaaagacacaacaaaaaaagagaattttagaccaatatccctgatgaacattgatgcaaaaatcatgaataaaatactggctaaccaaatccagcagcacatcaaaaagcttatccaccatgatcaagtgggcttcatccctgggatgcaagtctggttcaacataggcaaatcaataaatgtaatccagcatataaacagaaccaaagaccaaaaaaaaccacaggattatctcaatagatgcagaaaaggcctttga

SEQ ID NO: 148448 - DNA, 4150 bp, Homo sapiens
ctatctcattgtggttttgatttgcatttctctgatgaccagtgatgatgagcattttttcatgtgtctattggctgcataaatgtcttcttttgagaagtgtctgtttatatccttggcccactttttgatggggttgtttgtttctttcttgtaaatttgtttaagttctttgtagattctggatattagccctttgtcagatgggtagattgcaaaaattttctcccattctataagttgcttgttcactctgatattagtttcttttactgtgcagaagctctttagtttaattagatcccatttgtctattttggcttttgttgccgttgcttttggtgttttagtcatgaagttcttgcccatgcctatgtcctgaatggtattgcctaggttttcttctagggtttttatggttttaggtctaacatttaattctttaatccatcttgaattaatttttgtataaggtgtaaggaagggatcctgtttcagctttctacatatggctagcccagttttcccagcacccatttattaaatacggaatcatttccccatttcttgtttttgtcaggtttgtcaaagatcagatggctgtagatgtggggtgtcatttctgaggcctctgttctgttccattggtctatatctctgttttggtaccagtaccatgctgttgtggttactgtagccttgggcaatatggccattttcacgatattgatttttcctatccatgagcatggaatattcttccatttgtttgtgtcctcttttattttgttgagcagtggtttgtagttctccttgaagaggtccttcatatcctttgtaagttggattcctaggtattttattctctttgcagcaatcgtgaatgggagttcactcatgatttggctctctgtttgtctgttattggtgtacagaaatgcttgtgattcttgcacattgattttatatcctgagactttgctgaagttgcttatcagcttaaggagattttgggctgagatgatggggttttctagatatacaatcatgtcatctgcaaacagggacaatttgacttcctcttttcctaattgaataccctttatttctttctcttgcctgattgccctggccagaacttccaacattatgttgaataggagtggcgagagacggcatccctgtcttgtgccagttttcaaagggaatacttccagtttttgcccattcagtatgatattgactgtgggtttgtcataaatagctcttattattttgagatacgtttcatcaatatctagtgtattgagagtttttagcatgaagggctgttgaattttgtcaaaggccttttctgcatttatttcttgccttctgctgtcttttgaatgtaaagtttgctcttgcttctctagttcttttaatcgtgatgttagggtgtcaattttagatctttcctgctttctcttgtgggcatttagtgctataaatttccctctacacattgctttaaatgtgtcccagagattctggtatgctgtgtctttgttctcattggtttcaaagaacatctttatttgtgccttcatttcattatgtacccagtagtcattcaggagcaggttgttcagtttccatgtagttgagcggttttgagtgagtttgttaatcctgagttctagtttggttgcactgtggtctgagcaacagtttgttataatttctgttcttttatatttgctgaggagtgctttacttccaactatgtggtcaattttggaataagtgcggtgtggtgctgagaagaatgtatattctgttgattttggatggagagttctgtagatgtctattaggtccgcttggtgcagagctgagttcaattcctggatatccttgttaacgttctgactcattgaactgtctaatgttgacagtggggtgttaaagtctcccattattattgtgtgagagtctaagtctctttgtaggtctctaaggacttgctttatgaatttgggtgctcctgtattgggtgcatatatatttaggatagttagttcttcttgttgaattgatccctttaccattatgtaatggccttctttgtctcttttgatctttgttggtttaacgtctgttttatcagagactaggattgcaacccctgcctttttttgttttccatttgcttggtagatcttcctccattcctttattttgagcctatgtgtgtctctgcacgtgagatggatctcctttggtctttgatgatggtgacgtacagatgggggtatggtgtggatgtcgtttctgtttgttagttttccttctaacaggaccctcagctgcaggtctgttggagtttgctggaggttgactccagaccctgtttgcctgggtatcagcagtggaggcaggagattccctcgggtgcctacaccaccagggccctgggtttcaagcacaaaactgggcagctgtttgggcagataccgagctagctgtaggagttttctttcgtactccagtggtgcctggaatgacagcgagttagaaccattcactcccccggaaaggggctgaagccagggagccaagtggtctacctcagcggatcccacccccatggagccaagcaagctaagatccactggcttgaaattctcgctgccatcacagcagtctgaggtcgaccacagctccctaaatccgctgtagccagactgcctttctagattcctcctctctgggcagggcatctctgaaagaaaggcagcagccccagtcaggggcctatagataaaactcccatctacctcctggcaggaatcaacagacacctcatacaggagagttccagctgccatctggtgggtacccctctgggacgaagcttccagaggaaggaacaggcagcaatctttgctcttctgcaacctccactggtgataccaggcaaaaagggtctggagtggacttccagcaaactccaacagacctgcagctgagggtcctgaccgttagcaggaaaactaacaaacagaaaggacatccacaccaaaaacccatctgtatgtcaccatcatcaaagaccaaagagaagtccttaaaggacctgatggagctaaaaatcatggcacaagaactatgtgatgaatggacaagcctcagtagccgatgcaatcaactggaagaaagggtatcagtgatggaagatgaaatgaatgaaatgaaagacaagcataggcccaaaataaaggaatggaggaagatctaccaagcaaatggacaacaaaaaaagacaagggttgcaaacctagtctcagataaaacagagtttaaaccaacaaagatcaaaagagacaaagaaggccattacataatggtaaagggatcaattcaacaagaagagctaactatcgtaaatatatatgcacccaatacaggagcacccaggttcataaagaaagtccttagtgacctacaaagagccttagactcccacacaataataatgggagactttaacaccccactatcaacattagacagatcaacgagacagaaagtcaacaaggatatccaggaattgaactcagctctgcaccaagcggacctaatagatatctacagaactctccaccctaaatcaacagaatatacattcttttcagcaccacattacacctatcccaaaattgaccacatagttggaagtaaagcactcctcagcaaatgtaaaagaacagaaattataacaaactgtctctcagaccacagtgcaatcaaactagaactcaagattaagaaactcactcaaaacctctcaactacatggaaactgaacaacctgctcctaaaggactactgggtacataaagaaatgaaggcagaaataaagatgttctttgaaaccaacaagaacaaagacacaacataccagaatttctgggacacattcaaagcagtgtgtagagggaaatttatagcactaaatgcccacaagagaaagcaggaaggatttaaaatagacaccctaacattacaattaaaagaactagagaagcaagagcaaacacattcaaaagctagcagaaggcaagaagtaactaagatcagagcagaactgaaggaaatagagacataa

SEQ ID NO: 148449 - DNA, 3379 bp, Homo sapiens
atggaggaagatctaccaagcaaatggaaaacaaaaaaagcaggggttgcaatcctagtctctgataaaacagactttaaacccataaagatcaaaagagacaaagaaggccattacataatggtaaagggatcaattcaacaagaagagctaactatcctaaatatacatgcacccaatacagaagcacccagattcataaagcaagtcctgagtgacctacaaagagacttagactcccacacaataataatgggagactttaacaccccactgtcaacattagacagatcaacgagacggaaagttaataaggatacccaggaattgaattcagctctgcaccaagtggacctaatagacatctacagaactctccaccccaaatcaacagaatatacattcctttcagcaccacaccacacctattccaaaactgaccacatagttggaagtaaagctctcctcagcaaatgtaaaagatcagacattataacaaactgtctctcagaccacagtgcaatcagactagaactcaggattaagaaactcactcaaaaccgctcaactacatggaaactgaacaacctgctcctgaatgactactgggtacataacgaaatgaaggcagaaataaagatgttctttcaaaccaacgagaacaaagacacaacataccagaatctctgggacacattcaaagcagaagaagttaaatctctgaatagaccaataacaggatctgaaattgtggcaataatcaatagcttgccaaccaaaaggagtccaggaccagatggattcacagtcgaattctaccagagatgcagaaaggcctttgacaaaattcaacgacccttcacgctaaaaactctcaataaattagctattgatgggatgtatctcaaaataataagagctatctatgacaaacccacagccaatgtcatactgaatgggcaaaaactggaagtattccctttgaaaactggcacaagacagggatgccctctctcaccactcctattcaacatagtgttggaagttctggccagggcaattaggcaggagaaggaaataaagggtattcaattacgaaaagagaaagtcaaattgtccctgtttgtagatgacatgattgtatgtctagaaaaccccatcatctcagtccaaaaactccttaagctgataagcaacttcagcaaagtgtcaggatacaaaatcaatgtgcaaaaatcacaagcattcctatacatcaataacagacaaacagagagccaaatcatgagtgaactcccattcacaattgcttcaaagagaataaaatacctaggaattcaacttacaagggatgtgaagggcctcttcaaggaaaactacaaaccactgctcaacaaaataaaagagggcacaaacaaatggaagaatgttccatgctcatggataggaaaaatcaatatcatgaaaatggctatactgcccaaggaaaccccatctcacatgcagagacacacataggctcaaaataaaaggatggaggaagatctacccaagcccaatggaaaacaaaaaaaaaaggcaggggttgcaatccctagtctctgataaagcagactttaaaccaacaaaattcaaaagagacaaagaaggccattacatagtggtaaagggatcacttcaacaaggaagagctaactatcctaaatatttatgcaccccaatacaggagcacccagattcataaagcaagttctgagtgacctacaaagagacttagactcccacacaataataataatgggagacctttaacaccccactgtcaacattagacaagatcaatgagacagaaagttaataaggatatccaggaattgaactcagctctgcaccaagcggaccttaatagacttctacagaactctccacccccaaatcaacaggaatatacattttttttcagcaccacaccacacccacacctattcccaaaattggaccaccatagttggaagtaaagcactcgtcagcaaatgtaaaagaacagaaattataaccaaactatctctcagacccacagtgccaatcaaactagaactcaggattaagaaactcaactcaaaaccgctcaactaccatggaaactgaacaacctgctcctgaatgactactgggtacataacgaaatgaaggcagaaataaagaaagatgttctttgaaacccaacgagaacaaagacaccaacataccagaatgctctgggacacattcaaagccagtgtgtagagggaaatttataagccctaaatgcccacaagagaaagcaaggaaggtcccaaaattgacaccctaacagacatcacaattaaaagaactagagaagcaaagagcaaacaaacacattcaaaagctagcagaaggcaagaaataactaaaatcggagcagaactgaaggaaatagagacacaaaaaacccttcaaccctttcagaaaaatcaatgaatccaggagctggtttttttgaaaagatcaacaaaatagatagaccactagctagactaataaagaagagaacagagaagaatcaaatagatgcaatagaaaatgataaaggggatatcaccactgatcccacagaaatacaaattaccttcaggggatactacaaacacctctatgcaaataaactaaagaatctagaagaaatgggtaagttcctggacacatacaccctcccaagactaaaccaggaagaagttgaatccctgaatagaccaataacaagttctgaaattgaggtagcaattattagcctaccaaccaaaaatgtccaggaccagatggattcacagctgaatcctaccagaggcataaagaggagctggtaccatttttgaaagaaaataaagtgggagaagaaagacaacataaaaagaatagggtataattaaattcattttctctctgaaaacatatttatatcttcatgcagcttttcaaccagccatgcgccgaaataagcaaatcgaaagctgcaaaagctgcagcagtgggaagtgttatgtgttaggccgaaaggctgtgggtgtgaatttactagtatagccaaaagaaaaaaaggtattcagcagctgttgttcagttctggggggattatctgcttagtgccatgacaagagcaaattctgattgagaagcacaagtcataacagcagctttacctctggcccaccaacctttctttccgagggtaggacagaagttttcttcacctggtcatacacaaattatataaaattcagttgccttgcaatgcaacaacaataccgtcaaaggtggaagaggtatccccagagcatggaaatagtatcccaattgt

SEQ ID NO: 148450 - DNA, 471 bp, Homo sapiens
tattcataatagacaaaaagcagaagcaactcaagagtccatcgatagatgaatggataaaacaaaatgtggtatatccataaaatagaatatcattcagccataaaaggaattaagttctgatacatactacagcatagatgaaccttgaaaacattgtactaagtgaaagaggccaggcagctaaacttccaaagactaatatacaattccactgaataggcaaattcatagacagaggatagaataaaggctaatgaggggtgggggagaagagaatgggcagttattgctaatggatacaaagtttctgttggggatgatgaaaaaattgtggaactggacagtggtgatggttgtaaaacacggtgaatgtacttaatgccactgaattgtacacttaagaataaacttgtaaattttatattatatatactttgccacaataaaaattttttttaaaatgtcaaa

SEQ ID NO: 148451 - DNA, 296 bp, Homo sapiens
ctcccgcctcagcttcccaagtagctgggactacatatgtgcaccaccacacctggctaatttttgtatttttttggtagagatggagtgtcgctatgttgcctaggcttgtctcgagctcctgggctcaagcaatcctcccgccttggcctcctaaagcacagggttttacaggcatgggccaccacgcccagtcagcagctggactgtatatattctctgggctaggttctaatgccatctgacatttgagcctcacaacccttgccaactgggggaccctggttattactcta

SEQ ID NO: 148452 - DNA, 2619 bp, Homo sapiens
atgattatctcaatagatgcagaaaaggcctttgacaaaattcaacaactcttcatgctaaaaactctcaataaattaggtattgatgggacatatctcaaaataataagagctatctatgacaaacccacagccaatatcatactgaatgggcaaaaactggaagcattccctttgaaaactggcacaagacagggatgtcctctctcaccactcctattcaacatagtgttggaagttctggccagggcaatcaggcaggagaaggaaataaagggcattcaattaggaaaagaggaagtcaaattgtccctgtttgcagatgacatgattgtctatctagaaaaccccattgtctcagcccaaaatctccttaagctgataagcaacctcagcaaagtctcaggatacaaaatcaacttgcaaaaatcacaagcattcttatacaccaataacagacaaacagagagccaaatcatgagtgaactcccattcacaattgcttcaaagagaataaaatacctaggaatccaacttacaagggatgcgacagatctcttcaaggagaactacaaaccactgctcaatgaaataaaagaggatacaaacaaatggaagaacattccatgctcatgggtaggaagaatcaatatcgtgaaaatggccatacttcccaaggtaatttatagattcaatgccatccccatcaagctaccaatgacttccttcacagaattggaaaaaactactttaaacttcttatggaaccataaaagagcccacactgccaagtcaatcctaagccaaaagaacaaaactggaggcatcatgctacctgacttcaaactatactacaaggctagagtaaccaaaacagcatggtactggtaccaaaacagagatgtagaccaatggaacagaacagagccctcagaaataatgctgcatatctacaactatctgatctttgacaaacctgagaaaaacaagcaatggggaaaggattccctatttaataaatggtgctgggaaaactggctagccatatgtagaaagctgaaactggatcccttccttacaccttatacaaaaattaattcaagatggattaaagacttaaatgttagacctaaaaccataaaaaccctagaagaaaacctaggcaataccattcaggacataggcatgggcaaggacttcatgtctaaaacaccaaaagcaatggcaacaaaaaccaaaattgacaaatgggatctaattcaactaaagagcttcttctgcacagcaaaagaaactaccatcagagtgaacaggcaacctacagaatgggagaaaatttttgcaacctactcatctgacaaagggctaatatctagaatctacaatgaactcaaacaaatttacaagaaaaaaacaaacaaccccatcaaaaagtggacaaacgatatgaacagacacttctcaaaagaagacatttatgcagccaaaaaacacatgaaaaaatgctcatcattaccggccatcagagaaatgcaaatcaaaaccacaatgagataccatctcacaccagttagaatcgcgatcattaaaaagtcaggaaacaacagcaaagtggatgatatccatgctatctgtagccttcttaaagactttcttcgaaacttcaaagaacctcttctgacctttcgcctaaacaaagcctttatggaagcagcagaaatcacagatgaagacaacagcatatctgccatgtaccaggctgttggtgaactgccccaggccaacagggacacattggttttcctcatgattcacttgcagagagtggctcagagtccatatactaaaatgaatgttgccaatctggctgaagtctttggctctacaatagtggcccatgctgtgcccaatccagaaccagtgacgatgttacaggacatcaagtgtcaacccaaggtggtcgagcgcctgccttccttgcccctggagtactggaaccccgatgtaaaacctgctgttcttcctttaagtctccattttgatgtttccaattgcctcctctccggctgtggcaagtttgctgacccaacagtaattcttgactcaaatattccttgctaccatgcactaaagaaaaatggaatacttgtttttcggcctcattttcatctaaggatagccagcccatcagttgctcaagtgacaaccaacaccggagagccagggttcgcccaacaggagtacgcggagacaccccagacgacagcgcgtcccccccacccccaccccgccctccgggcgctccaggccagcgtccaccagaccccacgcctgggggactgcttgggctctagcgagagtgccacggctctgcacggcagcggggagccgaacaagttagccccgccggggcgccctacggaacgcggtgggcttttcaagtgctcagtccctctgcggacagtgcgaggctgccgggccgggctccgggggaccgagactgtaccttccagccttcagcgccaggccgggtggtccagggatctgggagcgccggcggtgcgcactgcgcccagggagagccggtttgggaacttcctggagcatctcgagctttag

SEQ ID NO: 148453 - DNA, 930 bp, Homo sapiens
cagacttctccaatgatcccctccattgttgtgcattgtgtaaatgagattgagcaaagaggtctgactgagacaggcctgtataggatctctggctgtgaccgcacagtaaaagagctgaaagagaaattcctcagagtgaaaactgtacccctcctcagcaaagtggatgatatccatgctatctgtagccttctaaaagactttcttcgaaacctcaaagaacctcttctgacctttcgccttaacagagcctttatggaagcagcagaaatcacagatgaagacaacagcatagctgccatgtaccaagctgttggtgaactgccccaggccaacagggacacattagctttcctcatgattcacttgcagagagtggctcagagtccacatactaaaatggatgttgccaatctgggctaaagtctttggccctacaatagtggcccatgctgtgcccaatccagacccagtgacaatgttacagggacatcaaggcgttcaacccaaggtggttgaggcgcctgcttttccttggcctctgggagtattgggagttcagtttcatggatgggtgggagcaaggaggaacatttgaccccctacatgtcattgaaaactcaaatgccttttcaacaccacagacaccagatattaaagcagtccctggaggaggattgtgtgtccattttacagctggagaagccgagatccagaaaggacccccaagttgtgggcagaataaatctacagcagcttttaactattaaaccaacttagattttggtagtctttcagaggcactgaatctcaaatcttagtttcctgggtccctcctgggttcctaccacccttagggcttattcaacagctttctggggatcctgtaatgctgacagagagcctggagacggcttctttgaccca

SEQ ID NO: 148454 - DNA, 1029 bp, Homo sapiens
tgcggccgggtgagagcgtgcggccgggtaagggagccgtcttctcagattcaccacaacatggcaaatctttttataaggaaaatggtgaaccctctgctctatctcagtcgtcacacggtgaagcctcgagccctctccacatttctatttgggatccattcgtaggtgcagccccccgtggctgtgggaaccctggggcagcagtgcgcttcacttctctcaccgggcctccctgcccccatctgcctgcctgcggctgggggttcaaaaaacaagactgtcccttaagaaagcgctgcaaggactgttaccctggtgaagaaggcggggtcggtggtacgtctactgtaaaaccccatccgaggcacaagcagaagacaagatgtaggacccttttccctccagagtcacgcacataattcgttcattcgcattcacttgggaagaatgggtgtaatcttatgggaagggatttattcaacattcaagggagttcagggggaaaagtgacttgggaaagcaaacggccctaaaagtttacccattcacgttttcagtgttaaatgagtaactattggaagacaattgcgttaacctattttccaaaacgttccaactaaaaaacatttctcctattaaaatagaccttccggggagcttagttcattcattctctctgaactcaggctgcaggtagggattggatggtgctgggtgaggctgggcaggacttctctatgtctccgtgaggctgcttatagcctcttggaagaagtggggttttggtcacccgtcgctgtacaagccaaggcttggtggcttaaatcacccattttacattgttcacgattttgtgaggcatttgggatgggctcagctgagcagtttgtctgatctgtgtggcattaactgcaggacccactttcaagatggcaccggctctcctgtctgggggtctcagtgctcctcaggctgtacgtagcacctcctcaggcagggcccacagcgtggctttgcactgcccca

SEQ ID NO: 148455 - DNA, 9234 bp, Homo sapiens; identical to SEQ ID NO: 145209

SEQ ID NO: 148456 - DNA, 1323 bp, Homo sapiens
atggtatttttcattggtacgaagcaccatgttcccaacccaaacactgcctccaccaccaccaccaccaccatcaccaccaccactgctactaccaacatcaccaccaccatcaccaccaccgtgttcaaacaaagcagcattctcctgtgtcttttcctcataagtaagaacaagtggtttcagagcacagtgagcaaagaggacgccatgccggaagcactgaaaagtctcatattcccgaattttgaacctttgcacaaatttcatactaattttctcaaggaaattgagcaacgacttgccctgtgccaggtagcatttaccccggaggccatggatgggtttggtggccgtgggaagtgggggcaagccagcgcagctgctcccgagggtagaagcctggctaatggcacaccccccatgggtgcagcctctaaggtccctgctgtgcagtcggtgtgtgccagaggcatggcggggcagctggcacccctgcaagtgaccgagggctccaccagcagtgggactgagtccagtgagtcagactctgagatgctgatccccgggagtcagcccctcatatttggtaaccccgcagtgatgcgttccccgtccctgctgagaagccgggggtccttgggtggcctgcgtttgagtgaggaacaggaggaggatgaccttccacctattacccaagaagaagctttacatattctgggctttcaacctccatttgaagatattaggtttggtcctttcacggggaatacaacacttatgaggtatgaagaccctcttagaggcaatatcgtgtttctagttttgcaaaataataatgatgtagatggtttcactaagatcaatgccttcaactgggccaaggtgcggaagctgagcttcaagaggaagcgctttctcatcaagctccggccagatgccaatagtgcgtaccaggataccttggaattcctgatggccagtcgggatttctgcaagtccttctggaaaatctgtgttgaacatcatgccttctttagactttttgaagagcccaaaccaaagcccaagcccgtcctctttagccgggggtcatcatttcggttcagtgtgcttgctgaagattctatgccaactctggtgaaggtggtggcagttcaccacgttgccggcaggtttgatcccggaacagacctagctccggagacagtgatggacctgctcagtgtttggagtcggatggccataggttcctgttcaggctctgtgcctgaagacaagtcacataatcgtcagaaaatggagctcgtgcctcctccgtag

SEQ ID NO: 148457 - DNA, 5419 bp, Homo sapiens
tgtttttctcacaatttcatggattatgggtttgggacaggaagaccacaaagataaagggccattttcattatatcatattaaaggtacatgtgatcaacatgacatcactgtttatgttaaccttgatgatgaccttgttttcatctggtttctccactataagttactcctctcctcacttcccatttccagactctgctctctggaaggaagtcactgtgtgtagcccatatttaagtgatagaaagtaatgttctacctccttgaaccaggggtattatccacataaattatttggaattcttctgcacaaaaaacttacctcttctcctctacatattaatttattcaatcacttacatatatcagtgtagactcatagatacttattttgtactttagcttataatttggcttttctttctttctttttttttttttttttgctctatttgttacaactttagctgtgggagctctttcaggtggctcttgtgtcccttttactccctcagtgtgtgtgtgtctgtgtgtgtgtgtgtgttgagcattttcttactttctggcactgaaagatatatctggtataaaagacaaacgatacacctatctacatggggcacttactgtgaatagaacttgcaggactggaagttgctttcggtgagtcattgagtgagtggtgggtgaatgtgaaggctcagttcattactgtacactactgtagactttataaatactaaggatacacacgaaatttattttaaaaaactatcttcaataattaaccttggcttattgtaacttttcattttataaactttttaattttttgaaactttttactcttttgtaatcacacttagcttaatcacaaacatgtatagctgtacaaatttttttctttttttctttttttttttttttgagacagggtcttgctctgtcatccaggctggagtacagtgacgcgatcatgggtcactgcagccttgacctctctagctccagtgatcctcccacctcagcctcttgagtagctgggaccacaggtgcacgccaccacacccagctaatttttgtattttttgtagagacaagttcttcctgcgctggccaggccagtttcacacgcctgggctcaaacagtcctcctgcctcaatctccccaagtgctaggattgcaggtgtgagctgccacatctggctttttactttgtatccttattctataagctcttttcttttcttttttcttttttttttttgagacggagtctcgctctgttgcccaggctggagtgcagtggcgcgatctcggctcactgcaagctccgccttccgggttcacgccgttctcctgcctcagcatcccgagtagctgggactacaggtgcccgtcaccgaattttttttgtatttttagtagagatggggtttcaccgtgatctcgatttcccgacttcatgatctgcccgagggattacaggcgtgagccactgcacccggcccttttctttttttttttttttttttttttttgagacggagtctcactctattgcccaggctggagtgcaatggcgctatcttggctcgctgcaacctctacctcctgggttcaagcaattcgcctgcctcagcctctcgagtagctgggattgcaggcatgcaccaccacgcccggctaattttttgtattttagtggagatggggtttcaccatctctaacttgaactcctgatctcaagtgatccacccgcctcggccttcaaaagtgctaggattacaggtgtgagccaccgcgcctggcctatacgcttttttctgttaaaaaatatttttaagtttttaaacttttgttaaaaattgagacagaagcaaacacattacttactaggcctacacagagccaggattatcagtatcaatcccttccgcctccacatcatgtcccactggaaggtcttcggggcagtaacggacatggagctgttatctcctaacatgccttcttctggaatacctcctgaaagacctgcctgaggctatttaacagttaactttttttttatatgtaagtaggagtactctaaaataacaatataaaatgtagtacaataaaataaataagccagtaacgtagttgtttattatcaagtatgtactgtacataattgtatatgctagacttttatacagctggcagcacagtaggtttatttataccagcacctccacaaacatgtgagtaatgctttgcacttgaccttctgtcagctatgacatccctaggttgcaggatttttcagcttcattataatcttatgggaccatcttcatatgtgagtggtctcttgacccaaacattgttatgtagcacatgactgtaaattttggaatcaccttgtcagtatttacaaaatagctttctgagatttagtggcaggatctcagctcactcctacctgcacctcccaggttcaagcgattcttatgcctcagcctcccaagtaactgggattatagacgtgcaccaccaagcatggctaatttttgtatttttagtagagacagggttttgccacattggccaggctggtctcaaactcctggcctcatgtgatctgcccgcctcagcctcccccagagtgctgggattacaggtatgagccactgcgcctggccaaaattgcctaaatttttaaaatcctaaattggtgttgaattttgtcaaatgctttcctgcattgattttgatgatcacttgatttttctccattcttttgttaatgtgctaaattatgttgcttaatttttgaatgaaaaaataatcttacattcctgaaataatttcggtttggttgtgatgttttattcattctatttcgtgctgaattcagtttgctaatattttgtttaggaattttgcatctatgttcatgagacagatcggcctgtaattttacttttttgtaatgtccttgtcaggtttaggcctcaaagttatgttgactttataaaatgaactgtgaagtatttcctcttttttatgctttagtttgagtaagattgattttttttaaaacttatgtcgtccttaaatatttattagaattcactagggaagttatcttggcctgttactttctttcttgagtaaattttgttttcattctttttttatagttaagtatattgagttagaatgcatacacaaacaaatgcacacaacttaaagtccagttctatgaattttgactaatgtataaacctgtttaacttccactgtaagcaaaatatagtgaattttcgtcaactaaaaagtccccttgtacccatttaccttcagtacctatccctaccccagccacaggcaacaaatgattttcatgtgcttatttgccatctgtatacctctttggttagttttctgtttatatcttttgcccatttatttttttttttttttgagacagagtcttgctatgttgcccaggcaggtcttgagctcctgggcttaggggatcctcccgcctcagcctcccaagtagttgggactacaggcacacactactactcttggtttgcctatttttaaatcaggttgtttgttttcttattattgtgttctctacactgtaggatattctacctttcctagaatttcatgtaaatggactcagacatactgttgtgtctggcctcttttgttcagtgtaatgtttttgagcttcatccttgcatgttatgtgtatcagtgattgattcaatttttattgctgcatagtattggattgtatagctataccacaatttgtttattcattctcctgttgatggaatattggttgtttccagtatttagctattattattattattttttttttttgagacggagtcttgctctgtcaccaggctggagtgcagtggtgcaatctcggctcactgcaacctccgcttcccaggttcaaacgattctcctgcctcagcctcctgagtagctgggactacaggtttgtgccaccacgcccagctaatttttatatttttagtagagacgggatttcaccatgttagccaggatggtcttgatctcttgacctcgtgatctgcccaccttggcctcccaaagtgctgggattacaggcgtgagccaccgcgcctggtcttttttgtttgttttgttctttttttagacagagtcttgctctgtccgcccaggctagagtgcagtggcgcgatctcggctcactacaagcctgcgcccctcaggttcaagagattcttgtgccccagcctcctgagtagctggggttacaggcgtgtgccaccatgcctggctaatttttttgtatttttagtagagacggggtttcagcgtgttagctaggatggtctcgatctcctgacctcaagtgatcttcctgccttggcctcccaaggcaagtgctgggattacagggcgtgagccaccgcacccggccagggatgtcattttttataactagccataaactttagctttgaagtaaaactatttctagcaagtgattcttacctgatattttttgttgttcttgcccatattttaattgggttgtgttattatggttctctatgtattctagatttaagtttttgtatatggtgtgaggcaagtgtcaagtttaattttttttctacaaacatcctgttgttccagtaccttttgatgataagactgtcttttcccccattgaattatcttaacgccctcatgaaaagcaattggccatatgtatgtggatctacttttggactctcaattctgttccagtgatttatatgtccacccttatgtcaataccacattattttgattattgctgctttatagtaagtgacatcatgttgcctgaaatcacgttttccacctttattcttctgttgatggttgctttggcaattaggggtcctttgcattttcgtagacattttagaatcaacttatctattgctactaaaaatgcttgattgggattgtggtaaatctagaaactaatttaggaagaatggtcatattaacagtttcaagtttcagatccatgagcatattttcactctccattaggtcttttaaaatttatcctagcagtgttttatggtttttactgtagaggtcttacacattttgttacatttgttgctatgtgtttgaccttttttgatactagtgtaaatggaaattttttcttttatgttctagttgttcattattacactaaatcatctttgggtgactactaaacattctattgaaaatttgtgaatggcgtgaaccccggggggcggagcctgcagtgagccgagatcgcgccactgcactccaacctgggcgacagagcaagctccgtctcaaaaaaaaaaaaa

SEQ ID NO: 148458 - DNA, 2017 bp, Homo sapiens
tcttttactttacccctaaggcaaacgtcatctagacctataaaagtctttcgagacctaaggttcttgtcaatatttgattattacaaaccacatcaagaaattttaaaaatctgaatcaatgcactaagtcacccatttgcaccaaaaaaaaggatccgtctttttttttttttttttttttgagacagagtcttgccctgtcgcccaggctggagtgcagtggcgcgatctccgctcactgcaagctccacctcccgggttcacgccattctcctgcctcagcctctcgagtagctaggactacaggtgcccaccactacacccggctaattttttgtatgtttagtagagacggggtttcaccatgttagccaggatggtctcgatctccaggatcagtttccttggagtcttttcctcttttgccctccttagtcagaatccctaagaacataaccagggaaacaaatgagggcaagcaagatcctgctattaaatcaaaggaactactaggactcatggaaataattttaaatgcggtgtttaaccatggaggtggaaaactaggaaatttgacagccccaatttttttttaagggcagatggtactttacatcttggtcttaggcataaaactatctgtaacaaatgtctagggatcgagtcattataaaagtcacttcatgcttaagtatttcaaatcttgatgctattaagtcaatttgtgtttcacttatttagacaacagttgtaattttattgaattttgtgaaattttctgtccagattatatactcttaacttgaaaggacaataatctgtgcttatctgcttatatatctgaaatcacccaccataatcatatacaagcttagtatctggagaactacaaggttattttttataccacaagatctgctcctatttaatgtaggcttactaaaatcttctactgtctttatacagtcctgtatatagcagtttcatatataatgccagctgttcagtaggcaagcataggtcaatcattccccatcggtaatcactgtaaccctggtaaccactgttccttctctcatggatactagacatctttttccatgccgagtcctgatggaaactagcactgaaagaccggcccagacgcccatgctgcttcttggaaatattgtcttcactctcagatttggcaattccctgggcatgtgttggaggttgtgattcttgtcctaaaggttcccaaatggaaagttccaaaggcccaaatctttgcccagttaagtctctggaatgctatggatgcaatgcaaatttcccccaaccttctttgtttttctatactgcagtcccctctctaagtgccggatatccaggtattctggattttgagtgtttagatcagtaacaatatctgcccattttttacagtgaatggcaggaatgtttctacttgattcttcaattaagaaaccaaaatttaacttcctgtggtgagagaggtcccctgctgaatgctttattagctttaacaggggttgcttcgaagccaattggacaaaaataatgattttggcaatgatagatataagccagcgattcatctttcaatccacgggttaactttgacagggcccctgaaacagttactcctgctgttttattcttcccatgaggcttatatagagcataagagcatccttttacatggaagtggtcattaatttgtctaaaccacctcataagtgttgtattccccgtgaaaggaccaaacctaatatcttcaaatggaggttgaaagcccagaatatgtaaagcttcttcttgggtaataggtggaaggtttccagctcccattgtgctgtataagaaattccaacaagaaattaatgaagagatgccacaagaagtcttatactgtggtcggcttatgcagtaccatcgtctgaggtctaatactttccgctgtctaatatcttcaagaggagaatgctgaggacattccttctgatatctt

SEQ ID NO: 148459 - DNA, 340 bp, Homo sapiens
  misc_feature (1)...(340): n = a,t,c or g
aaaaaattttcaaccgccaggcttttccggttgtttttcccccttttccccttaaaaatttttattttccccaaaagctttaaattccgtaaggaaatttttccaatattttcccccccccaaaaaaaggttccttcccaaaattcccaagtagggttttaaaaagccccccataaggggaaaaattttaactttgcaagcccggttaaaattgggccccccaagggttcttttaaaagggcccccccnnnnnnnnnnnnnnnnnnnnnnnnnnnggnnnnnnnnnnnnnnnnnnnnnnnnnnnnnnnnnnnnnnnnnnnnnnnnnnncccacgcgtccg

SEQ ID NO: 148460 - DNA, 1065 bp, Homo sapiens
  misc_feature (1)...(1065): n = a,t,c or g
ttccagttgcaccagcattctcttgaacccgaaacatgactaccggggctgggccaagtggaacagaaactccctttacgagaagatgaaggaaggagagagacgaaagctgaaggagtgcaatcccatatctacaaggacagagactggataatgttgttgcaaagaagtctgtcccccaattcttcccgctgagggtaagggatcccggagtaaagagcagctgctaggcgaaaacccaacattaccctgttaggccctccagcatgggcttattggcacgtgtaaatggaggtcccgtggaaggacagcatgtttcttaccatagataattatggataccaaagccagcctgtatgtaagaatagtgtattggcccctccacacccgatgattcctgccttttgcccaaattaagaaataagagccttttttgtttccttgggtttttaaaatgtggaatctgccaatgatccataaaaattaaaatgtgaatgtccaacaataaaaaagcaagacctatgaaagggctcagatttccttgcagtttaaaatgggtgtctgagggttgtactattttgggcccaagtctgtaggaaagctgtccatttggattttggattatggtaagttccatcccagcccttggggaattggttatacaccagtaaagaaggctgtactcaagaggaggagctgacacatttcacttggctgccgtcttaataaacatgcaatgcaagcnnnnnnnnnnnnnnnnnnnnnngggggggcccttttaaaagaacccttggggggcccaaatttaacggggcatggaaaggaaaaacttttcccctaaaggggggcctattaaaaccttggccctggcccggttttaaaaaaggtggaaagggaaaaatcggaaactggggaattttggaaaggaacctttttttgggggggggaaaaaatgggaaaaatttccttccaaaatttaaagctttaggggaaaataaaaatttttaaggggaaaagggggaaaaaaaaccggaaaaacctggcgcttaaaaaatttttttaccg

SEQ ID NO: 148461 - DNA, 1110 bp, Homo sapiens
tttcgtgctgcggagtcgggaatcaatttaaaggtcctggggggggcggggggaaggcggcggggccggaatgtgagcggaggtggagccggcggcagagggtggaagaatgaaagaaaagaaagatgaaaggatgttgaatcactttgcatggctgtatgatggaaggaaacggaactgagaactcctgcagtagaacacgtggatggcttcaacaagataatgatgctaagccatggctttggaaattctctaattgcttttctcgtcctgagcagacgctgccacatagtccccaaacgaaagagtacatggagaacaagaaagttgctgtggaactaaaggatgtaccatcaccccttcatgctggctctaagctttttccagcagtcccacttcctgatattcgttctcttcagcagcctaaaatacagctttcttctgtccccaaagtaagctgctgtgctcattgccctaatgaaccctccacttcgccaatgcgttttggtggtggtggtggcggtagcggaggtaccagtagcttgattcacccgggcgcactgttagactcgcaaagcaccaggacaatcacgtgtcaggtagggtcagggtttgctttccagtctgcatcttcactccagaatgcctcagctaggaacaatttggcaggcattgcaagtgactttcccagcatgtgtctagagagtaacctgtcttcctgcaaacacctgccctgttgtggaaaactccacttccagtcatgtcatggtaatgtgcacaagctgcatcagtttccgagtctgcagggctgcacctccgctggctatttcccctgttctgatttcacaagcggggctccagggcatttggaagagcacatttcacagtcggagctaacgcctcacttgtgcaccaactctttgcaccttaatgtggtacctccggtttgtttaaagggctcactttactgcgaagactgtctaaacaagccagcaagaaatagcataatcgatgcggctaaagtctggccaaatataccacctccaaatactcaacctgcacctcttgctgtccctctgtgtaatggctgtggaaccaaaggaacaggga

SEQ ID NO: 148462 - DNA, 1021 bp, Homo sapiens
  misc_feature (1)...(1021): n = a,t,c or g
atgccaaggctggaagcttttgttaataatcagacctgtcctaaaaaagaatgcggggctgcctctgaaggagatactattggcaagcagtcagagctaagttttgggaaagcgaagatggcccgggagacgcactggcccaaaaaggtggggaaactgaggtctacggtggttaaacaattgcccaagacctttcaggcaataagcagcacagaaaccaaggatcaaggtcccatagtcccagcacctgtcaagggtgaaggtcccatagtcccagcacctgtcaaggatgaaggtcccatggtctcagcacctatcaaggatcaagatcccatggtcccagagcatccgaaggatgaaagtgccatggccacagcacccataaagaatcaaggttccatggtctctgagcctgtaaagaatcaaggtttaagtggtctcagggccagtcaaggatcaagatgttgtagtcccagagcattgcaaagggtcacgattctgcagttggtggcaccctggtaaagaatcaagggtccttgtggtcccccgaagtnccgtgaagaatcaagaccccattctcccagtactagttaaggatcaaggccccacagtcctacagcctccaaagaatcaaggtcgtatagtccctgaacctctgaagaatcaagttcctatagtcccagtgcctctgaaggatcaagatcctctggtgccagtaccagcaaaggaccaagagccccgctaccagggctctcggctcggaaacagcagcccccgtccccgcgcactcgcacagccccccgcctgcaggctcatctccggccccgccccgggctccgggctccgggctccgcctcccgtgcagcctggccccgcgagacctcgggacgcgggatcgggccggtacggtgtcaggagccctaaggaccatgaggcatccaaccggaggactgtgtcaaaaaggaccgtgttgggtgcctcctcctcccctgctacaaatccaacacttcgggccacctaa

SEQ ID NO: 148463 - DNA, 607 bp, Homo sapiens
tcgagccgtaaagatcaaggtttagtggtctcagggccagtcaaggatcaagatgttgtagtcccagagcatcaaaggtcacggttttcctgccaagttgtggcacctgtaaagaatcaaggtcctgtggtccccgagtccgtgaagaatcaagaccccattctcccagtactagttaaggatcaaggccccacagtcctacagcctccaaagaatcaaggtcgtatagtccctgaacctctgaagaatcaagttcctatagtcccagtgcctctgaaggatcaagatcctctggtgccagtaccagcaaaggaccaaggtcctgcagtccctgaacctgttaaagactcaaggtcccaagggaccctcagcttacctactgtctcacctctaccccgagtcatgatcccaactgccccccatacggaatacattgagagctccccttgacactcaccccttgacacaccaatgaaggagctgacagtgagagtgctcccctcccaggggcagtgaagacacatatttaatttgcatgaaacatgtacagtagtcttgctggaatctaataaaaatggtccctttggctcagcaaaaaaaaaaaaaa

SEQ ID NO: 148464 - DNA, 2254 bp, Homo sapiens
gacccccaatttatttcaggaagccctgaatctccaattcgtttatggtgtgtggggctgggaaacacaaaagtgacatttacaaatcccaaaaatccagttagggctgtggttatacatccaagacattacacatttgcatctggttctccagataacataaagcagtggaaattccctgatggaagtttcattcaaaatctttccggtcataatgctattattaacacattggcggtaaattttgatggagggcttgtatttggagctgccaatggccccatgcatctttgggactgggagacctgggctccaattttcaagagagttcacgcaagctgtgcaacctggggtctttggacagtgaatcaggaatatttgcttgtgcttttgatcaggtctgaaagtcgattactacacagctgaagctgataaaccccattaaagtatacagagaggatgacacagccacagaagaaactcatccagtcagctggaaaccagaaattatcaagagaaagagatttttaatgaatgtggaattttttctctctctttttttttctttttaattaaaaaaaaaaaagcttggcgtttcatgaggatatccagtcattttgtgctctggctgggaatataaaggagaaattcacttgcttcaatcattgctgcttcatattttacaataaactgtcccctgtcccctacccctgtgtttttatttctaaaacaatttgtgatactagggaagatgcagatatcaagtaagtgcaggtttattgaacataactattctagatgtaatattttgacagtcttattaggaaaccccctttttttaaaaaaaatgtatgaaaccgataattaggacatttgaaggagcagtagtttttttttagtcctttaaaaaataacatctgtgactaataatttgagattaaaagatttgaagtcttaatttatgtatgtttattccaaaaacagtttttgagtgtatgttctacaaagttctgcactagatactgttcaggaaatagacaagtaagatgtgtctatcctctaagacttccagtttggtagcttagtatagaaattctgtaacagaggtgcaggtgaaatgctgggggaacagaagggataagaccatttatttttctcaggaaggattgtggaagacttcatagagtaagtggcattggagattaccttgaagtgaaggaagacaaaggaaggaaaagagatggaggccttaaagtgatggaaaccaggcaccaggaaagtgtgcggtgtgttctgggacaaagaatgttctgctactgtcgaataatggggactaaagctggcttgttctggggaaagctcatataagtatggattttattcctcaactagtaggataccaatactggtattgaaacttggggaaaataactggagataccagtgcagctatttaaagctgtagcaagggctgcaatcttgcggagattttaaagagaagttttaaagtttctaatactgatgcctctttttggtaaatacaagttttataaatcctgccctgggatcctgattccccattaatcaagatttgtcagacttcaccttctataattagaaaacacagttataagaacagtcaattttttaaattttccaaattaaaaaattgcaccatgattttgaacaagcacttccaattacattacccatcttgtatgccataggggggagtataattgccacagcctttaggaatgtagttttctgggatttattgaaactttgaacccttttggcctactaagttcattcctaggaaactgccctaatgggaatgatctgaccaagtgtacacaaggcaaagtcattgcacctttgttctttaatacttaaaactagccccaaatgccctgtcagtaagggactgggtttaatagatggtacctttatgcaatttgtttcctaagtattccgttaagagagtgaggaatgtcctggattattagggcaagatttcctaaacttgggtaaaaaaaaaagttgtgcaagcatttttgtggacaacttgatgctctaaaatataagtaacaccacattactaacagtggctttgttaggaagcagaattatggaagaactttcatgggtggctttacatatttctataatgttttaattttctataagcatgtatttcgtaaacttaaataaagaaaaaagaacactacacttgcaaaaaaaaaaaaaaaaa

SEQ ID NO: 148465 - DNA, 1911 bp, Homo sapiens
gaagatttgagaaagtgtacatttattttcataattggtggtcctggctctggcaaaggcacacagtgtgaaaagctggtggaaaaatatggatttacacatctctcaactggcgagctcctgcgtgaggaactggcatcagaatctgaaagaagcaaattgatcagagacattatggaacgtggagacctggtgccctcaggcatcgttttggagctcctgaaggaggccatggtggccagcctcggggacaccaggggcttcctgattgacggctatcctcgggaaggtgaagcaaggggaagagttcggacgcaggattggagaccccacagttggtgattgggaaggaatggctcgccagacacccatgaccaaccgcctttctccaaaggagccggagcagcctgcctgtggacgacaccaccaagtaccatggccaagcgcctagaagcctactaccgaggcgtccatccccgtgatcgcctactacgagacaaaaacacagctacacaagataaatgcagagggaacaccagaggacgtttttcttcaactctgcacagctattgactctattattttctgaaggcaaaaatgcataattgttacacatggaaacagaaaaacattaaaaagttcattccttaacacaatgtttcaagttaaaccttttgtgtcaccgcccccaccaaccaccacctcctaaatcctgacagcactgtttgcttcccagctagacctgtgtgagaggtgtctggaaatcatgcatggtgtatttgggactatatcaacctattctccacacttcagacaactgtctgcactcacggcacgcacactttgtatcatgcaggccacactcagagctagtcagtacatgaacagtggtgcggtgccagtctgtgtccgttgtgatcacaggccttgctagaccctgatcatctggttctcctctcattaagcatccctaacccccagtcacaccttcctcttacatactgttccccaatggaggcccctggcataggggacagccctgggcatcttcctttggtgtctggcttgttttgtcaactctcatccactggtggctcagagccataaggtgggttgattacacaatgccttgtacatgatatagaggcatcaagcaagtaaaatttgacagaaattttaaaatatggagatgttatagctttcccaagatgatggtaaaacccaggttaagtcatcagtaaccttctctattattattattttttaaaaacttggaatactgtctttatggctaaaagaacaaatctgataaattgtgtaacctagtctcttctctacatggtgatgcatttcagccattataaattaatttaaatgaccaaaagtaacttaaaagcatgagatatttgctatttcattcattgggcacatatcaaattattattttgattttaaatggtcacccatgtatttgttgccaagcaagtaaaaaaataccctaacaaacctgatgtgggtgggaggggcatgtcagtaagtggtgtgttcaatgtgtttgtttcatatgggccctttccaggagtttgcaaaccttgtcatacccatatgcaaaactgtgttccccttgccattaaacccagtgaagtttgggttctcttttgtgcctatccaatccagttgtaaaatccagagcttcttacatattctactggaataactgcatcttccactcagtcactacaaaaaagcatagtttcagtttgcatgaatttttttttttttcttcaatggttgtgcagataaggatccatttctgggatagaattgtatttttttaagtcatttttttttcttgaaatggatatgtacaaataaaataaatggaagacaggaaaaaaaaaaaaaaaaaaa

SEQ ID NO: 148466 - DNA, 1648 bp, Homo sapiens
  misc_feature (1)...(1648): n = a,t,c or g
aagctgctcagccccaagcagcctctcctgcgggcacagctgaagaccttggtccggctgctgtgcttctcccatgcttttgtgggcctctccaagatcactacctggtaccagtatggctttgtgcagacccagggcccgaaggccaacatcctcgtctcaggcaatgagatccggcagtttgcacggttcatgacagaaaagctgaacgtgagccacacaggagtccccctaggcgaggagtacattctggtctttagccgaacccagaacagactcattctgaatgaggcagagctgctgctggcactggcccatgagttccagatgaagacagtgacagtgtccctggaggaccacacctttgactgatgtcgtgcggctggtcagcaatgcctccatgctggtcagcatgcatggggcccagctggtcaccaccctcttcctgccccgtggggcaactgtggtagagctcttcccatatgctgtcaatcccgaccactacactccctataagacgctggccatgctgcctgggcatgggacctccagtatgtagcctgggcggaacatgatgccagagaacacagttcacacaccctgagcggccctggggatcaaggggggcatcacccatctggaccgggctgagcaagcccttattccttgcaaagccgtgaggtcccacggcatctnttgtttgccggaaccccgagcggctcttcctaatctaccaggacaccaaggaggacatcccgtccctcattcaaaccatacggcgcgtggtgaagggccggccaggaccacggaagcagaagtggacagtcggcctatatccaggcaaggtgcgggaggcacggtgccaggcgtcaatgcatggcgcctccgaggcccgcctcactggctcctggcagaacccatggaaccttaaataacctgaagggagggaggatgaggatcaaggggtggctgcaggagcagggggagaacacctacgtgccttacatcctggctctgcagaaccacaccttcactgagaacatcaagcccttcaccacctacctggtgtgggtccgctgcatcttcaacaagatcctcctgggaccctttgcagatgtgctggtgtgcaacacgtagcgagcaggccacagcctggcctcgggaaggtggctccctgcaaagttcaaccgtccctgggccccattaaaccccactgtggatacttcctgggaactatttattgaagccaggcctgtgccctcccacatcatcttgttgtcctctggggtggggggtcacagcactcctctttgccctagagataagggacctgacttccccttctcccatcctgaacatttgtacccctggagaagttccttagcaaggaggaggaagaggagaggaggaagcaaagaatcacaaggaacctctggctaggtgatcctgatgtttcctactgagtttttctggtatccagatttctggaaaccgagtaatcatgtactgtttgattgggtggttcatctgcttccatcccagtgaaatttacctgtagcccagtgaagggtgtgtttggaacattcattaaatgattctaagcaaaaaaaaaaaaaaaaaaaaaaaaaaaaaaaagtcgtatcgatgt

SEQ ID NO: 148467 - DNA, 1773 bp, Homo sapiens
  misc_feature (1)...(1773): n = a,t,c or g
aagaactcacattaatacaattaatgtctgttttcaaagtagccattgcaattaagccaagctctacatgtgtaatataaagcagaatataatcaataagtctttaaatctggttatttattgtttagtgatgaacagttttaatttctgcagtggtttaagtgtattccttcaagaaataagaggaattatattacctgttttactctctgtttccccaatgctttttccatttactgggtccttattctgttatttaaacaaacaaaagcaaaatgctgtttttctcttcaggccctgacaagcccacatttgggacagnaatgaagagcttatgcccaaggggagactttacccaccgcttgctaatattcaggaagtttctattaacattgctattaaagttacagaatacctatatgctaataaaatgggctttcccgatacccaggaacctgaaggacaaggccaaatatgttaaaggaaaggaacatgggcggagtggaatatggattccctgctgccagatgttgtatgaatggccagaaatctgcaatcaagcccctcctgtgaatacagaaatagaagcactccccttgataaatactttcgtgtgctccaggggaacccccttttttcagacaagaaagagataatgtcttcagttttatggcgttttctgtgttttgttctccctgaccactttggttgatgtattttttccatgcgtctccacattggttgggggtagacgtgttgattgattgcattgcccaccagcaccctacaatcaagatagttgtgatgctttaattctaacatacagcccgtaccacatcccaggagatgtaaaaagtgtgtttgtgaatgtcttcacttgtactctaattcagacttgcccaaagtatttggcctatttacctattnatggggtaatacctccttctctggccctagttccttaccagagctacctaaaatagaaatttaccttttaagggatagaagtaccagaatttggagaagaaactaaattttccaccccaaattttaaagggaaaaattggtccattatcctaaaaatggntccttaatatatcctgcctccatccttacccttccatactcctgaaattcccctatagcagacagagtctagggaaatattaaaaatttaccctatttattttctggaactaaatcaagccttaactataacattatgagagtaatgggaactactgctggctttaagtaaataaaagtcatttgttttcaacagtgtataaaaatcatagtgtaacctttttatttaataaatatcttacatttaattgcttcagttatgctatcttattgcccaactagaaatttagatttgcctatgaaaaacacatatttttgttacttctagatgattctaggagggagtataagatacctaatcatatgggaacatcacgtgactttttaaatctaaattagtcatgcttcacatcaaaatgagtcatatttaactggagaaactatgcccttattccagaactgatgctctttattgcttgagataattttggaatgttactatgatactgtttctttgaatatcattagtagtgacaactctttctccattgaaggcagacttaatttttttaaaccaccaacattaatttagagctaaatggggatgaataaggttggtgttcatctgggaaatgccttttttaatcccagtaaaatgggtaataatggctatccagaaaaaaaaaa

SEQ ID NO: 148468 - DNA, 2086 bp, Homo sapiens
ttttttttttttttttttgtaggtacaataaatctggattgatttttattacacatccttagtttagaatcacttttacattccctagacaaagagatgatacaagatgaatatcaattgtagaacttagagcccccaagtattgaattggcgtattctttgtctaaaggtagccaaagagaaggtcaagatcagtaataacttcaaggagccatgaagcccactgcctcctgcctgccccagggatcactccttttaataaataaccccagaaggcatttcattcagggaaacaaggggcagggcaggaaagggtgacaggattttctggaacaggtacaaaaccaaaagcccttgccgtgaatagacaatcacccaggccccactaatccttagcccagttcccctcagaagccatttttaagtatgggcttttaggagttttttaacagcccccattttcatcccacttgattggggttcaagatggtctgaggtgttgtctcccagtacgcccctcaaccctcaagtgggaaatgtgaggcagaactgatatccatgttaccagggattcgacacttctcagaaacttgacaacgattttaccttcagtgagggaggacttgtcagagtcagacaggaaaagcagagagcggcccacgcccccagttgccagccactctggcgcccttggtcatggaggtgtgggtggagcaattcaagcagcatgcaggcattggacgggaaataatccagcgttaggtcagtcttaagaaagtgcttcatgcctatgatttgtggccttgggttctgaatccaggggtctgagagacatgtgacttgaaaatagaaagcccagaatacattccccagatcagagtaaaagggggtcctattgggggttgccatacacagtctcaaaactcccttctccctgaatggtcatccttaagaaccctgttaaaacttgcctttcctgggctttgcctagctgctgcccggcatgaaaggcccctcagacggcctcaagaacattcctaggtatgaactagagacatgaaaacctagtcccctcagtgggcttggtaggtcctcctacatatttggctcaatgcagaacccaaaacagcagctttctggtgacagcacgacattctacaatctgctctattcaaatatttatcggataccattttgagagaagaaaagcaccagagactgcttggaaagggtacagcttcatttccaaatgagtcttcttttctttccacagtaccaccacatgcaacacagctgagtacaaggtcatgcctgtacaacttgtcttgtcttctcttagaaaagttctatgtgtcacttaaccacccttggtcagaagagtcacctcgagataccagtattaatgtatagggttatctgcagttttctttttctttctttctgttttttttttttttttttttttttttgaggtggagtctcactctgtcacccaggctggaatgcagtagtgttatctcgactcactgcaacctccgcctcccaggttcaagtgattctcgtgcctcagcctcccaagtagctgggaccacaggcgcacaccaccacgcccggctaattgtttgtgtttttggtagagagagtgtttcaccatgttggccaggctggtcttgaagtcctaacctcaggtggtccacccacctcggcctcccaaagtgctaggattacaggcatgagtcaccatacccggccggttatctgcagttttcaattctcagatttgccacatgaatatttttagcctacagaattccagattagcctttgaggaaatgtggtgtgaagagacacgtgtaaccagcagaaaatccagcttaggctaccccaccttagcgttttgttccttattcaaacaggcaaattccttagtaaataagaaagaagtaaagtttgatctcaagaaaatatgagggaaataatccagcgttaggtcagtcttaagaaagtgcttcatgcctatgatttgtggccttgggttctgaatccaggggtctgagagacatgtgacttgaaaatatgaagccag

SEQ ID NO: 148469 - DNA, 3930 bp, Homo sapiens
atggatggcgggcatttattttcaaatttgacaggcaaggaggaagtcatccataaaggtgctaagctgcaccccaacggatacaggatggcgcagggaagtgagactctggtggcaagaggaggcccgtgcagatccgtggagccctcagctgcttctccgcaggagctcaggggctggtgggaggcccaagctctgaaacggtggggcctgatgggaggcgtttgggtcatggaggtggatccctcgtggcttggtgccatctctgcaatagtgagttctagtgccagccggttgttgaaaagtgtgtggcacatcccctgcccccacttcctcctgctccggccacagctgaaagaagcccagcgaaggaagaagcagctggaagaaagatgcagagtcgaggaaagcattggaaacgctgtgctcacctggaataatgagatcttacctaactgggaaacaatgtggtgctctagaaaagttcgagatttatggtggcagggaatccctccaagtgtgagaggcaaagtctggagcttagccattggcaacgagttaaatatcacccacgagctctttgacatctgtcttgcccgagccaaggagaggtggcggtcccttagcacaggaggctctgaagtggagaacgaaggactgtgtgtagcagtctgcgctcagcaaggccatgttggtgtgatgggcttcggctcagatgagcccagtgcagtgagcccgtgtgagaaagggaaatccctggcagcctgggttctcatctttgtggatttccgtgtgggtcttcagaaatcttttcagaagaggaaagagagggaatctacaaagctccagcagctttggtcctggtgtctgatgttgacttattttgctgcatttgaagtattctttgaagaaaatttgccgaaattatttgcgcatttcaagaagaacaacctaactccagatatctacctaattgattgtgattcaggctccttgttgggtgctgacagttcggtgaaagctcagatcagaaacaggttgggcagtagggaggaagcaaaggggaagaacagactttacataagacctgtcctagaagctgccatttcagaagcactcgtcactgtggtcttcagtgttcaggagcaggtgtacctatttctgggcacagaagaagtcactgaggcccatggtgtgaggtccagcagccatcggagcctcctggaaactggcctcttgagtcggctgtgtatgcagcagcccctccgcagccttggacagaagctggtgtcgagggctggagaagctgcacaggccaaggccggctctgcccctgccgcccgcctgcgcggtggaagcacagacgaagatatggctgcccacgttggtgcttcccggactccccaagaggtgatggagcattacgtgagcatgtacatccacgggaacctggggaaggcctgcatccccgacaccatccccaaccgcgtgacagaccacacctgtcccagcggaggccccctctcacccagcctcaccaccccgctgcccccgctggacatctctgtggctgagcagcagcagctgggctacatgccgctgcgggatgattacgagatcgagtatgaccaggatgccgagacgctcatcagcgggctctctgtcaactatgatgacgacgacgtggagatcgagctgaagcgcgcccacgtggacatgtacgtgcggaagctgaaagagagacagcggcggaagaacatcgcccgtgactacaatctggtgccagccttcctggggaaggacaagaaggagaaggaaaaggcgctgaagcgcaagatcaccaaggaggagaaggagctgcgcctgaagctgaggccgctgtaccagttcatgtcatgcaaggagtttgatgacctttttgaaaacatgcacaaagaaaaaatgctccgggccaagatccgagaactgcagcggtaccggcgaaacgggatcaccaagatggaagagtcggcagagtacgaggcagcgcggcataaacgggagaagaggaaggagaacaaaaacctagccggctccaaacggggaaaggaggacggcaaagacagcgagttcgccgccattgagaaccttccaggcttcgagctcctgtcagatcgcgagaaggtgctctgcagctctttaaacttgagtccagcccgctacgtgactgtgaagactattataattaaagaccacctccagaagcggcaaggaatcccctccaaaagccgccttcctagctacctggacaaagtcctaaagaaaaggattttgaatttcctcacagaaagcggctggatctccagggacgcgctcccgttttctgagcccacgctgcccacagctgaccccagcgcagccccgggcacgcggcactttacatgggggcagcttgggcccagactcctccgctgtgtagcagatgaggaaaatcaggccagaggacaacaggctggcgttttgttgggaactgaagaggaatctgttgaacacagcgaccagatgaccttccatttcaccggcggcagcagtttcagcgtgcagttcccaaaccccaaagctgaccctgcgccccatttgaatacggccagagcctgctggttcactttgggtagagccgtgcctcttgggcaggctcccatagtgaccacgtccccacgaatgggaaagcacgttagtgggagggacgtaggacacgtgtggaccgccaggccctctcagtccattttccggggctgctcggtgctgctgttaagactttctccttggaccaagatgactgatggaaaactctccacctctacaaatggcgtagccttcatgggtattctggatggtcgaccaggaaacccccttcagaacctgcaacacgtcaatctcaaggcgccccgactcctctccgcgcctgagtacgggcccaagctgaaactcagggctttagaagaccggcacagcctccagtccgtggactcggggattcctaccctggagatcgggaacccggagcctgtaccctgcagcgcggtccacgtgaggaggaagcagtccgactccgacctcatccccgagcgggccttccagagcgcctgcgcgctgccatcctgtgcgccaccagctcctagcagcaccgagcgggaacagagcgtgcgcaaatcctccacgtttcccaggacaggctatgactcggtaaagctctatagcccgacctccaaagccctgacccgcagcgatgatgtctccgtctgcagcgtgtccagtcttgggacagagctgtccaccacgctgtccgtcagcaatgaggacatcttggaccttgtggtcacgagcagctccagtgccattgtgaccctggagaatgacgatgacccacagtttaccaacgtcaccttgagctctatcaaggaaacccgtggcttacaccagcaggactgtgttcatgaagctgaggaggggagtaaattgaaaatattggggccatttagtaacttctttgcaagaattagctctagtgacctgagatggaacattgtaactatgccttttctgtgcaaacagtttgttaatattgctggtgactttgccctggcattatggatatacagatggcacctgctatggacctgcgttgctgctggtgtgtatgagcttagttgcggcgatgaaaggaccattctaatcaaggtgttgggctgcagttgtcagggagtaaggaagcaagaagattcgaaggtgggcagactagtgctggaggccactgggtcagtccctctactgtgtgatgaggatctggagagagatgtgaacaaagcagcaaagcccgttgacagctcagaaagaagtaacagggctgagatgccagctggccttcgaaagtgctgtccacccgcctga

SEQ ID NO: 148470 - DNA, 1860 bp, Homo sapiens; identical to SEQ ID NO: 123584

SEQ ID NO: 148471 - DNA, 3169 bp, Homo sapiens
  misc_feature (1)...(3169): n = a,t,c or g
ggaattccagcagcagacagaagaagccagtctggagcttattaaactggacatttctagaacatttcctaatctctgcattttccagcaaggtggtccatatcatgacatgttgcacagtattttgggcgcttatacttgttaccggccagatgtgggttatgtccagggcatgtccttcatagcagcagtgttgatcttgaacttagatactgcagatgcctttattgccttttctaaccttctgaataaaccctgtcaaatggcgttttttagagtggaccatggccttatgttgacttattttgctgcatttgaagtattctttgaagaaaatttgccgaaattatttgcgcatttcaagaagaacaacctaactccagatatctacctaattgattggatctttaccttatatagtaaatctctgcccctcgacctggcctgtcgtatctgggacgtgttctgtcgcgatggggaagagttcctgttccgcacggccctgggcatcctgaagctgttcgaggacatcctgaccaagatggacttcattcacatggcccagttcctgaccccggctgcccgaggacctgcccgccgaggagctgtttggcccctccatcgccacgatccagatgcagagccgaaacaagaagtgggctcaggtactgactgcattgcagaaagacagccgggaaatgagagaagggaagtccgtccctccgacactgaggctgcagcgggaattcgcactcggcaccaatcagagccccatgccgcggcccctctgttgtttcagactgacacccgggcagccgagaagaacagacgctctttaagtttgattcctaacactggagttggccttaaacaaaacaaacacaaaaacttttaaagaattaaaccaaggcttggccttaagcagctcagtggaaggatgagctgctgcggaccacagccagccactgcatctgctgcacagttgaacgatgggcagtggctcacccccactcctttatttcagcaaaagctaattaaattgtaatgtttctatgtcaactactgggaagtatgttacagtcttagccaggatgcatgagagatgttatttgggagacttgagatgctttggctgatatttacatgttttcgataagaaagggatcgctgattgatttattgagatagtttttccagagctggaggtcacgtttctaaaactcacctacgaaagatagcattaaaggaacaggggctctctgaggatggccactgatgtgtgtttgtggatacctgggcatcgacccagcctgcaggtgagctctgggccatgttgccttgacacagtcacagtgtaggaggctgcaggtgcacacgtgggctcccagtgggacttgcgctctggggagacttgctccctgggcatcggtcctgcggaggtgggaaagttccgagaggaggagctatttgcgaaggaagccctgtgggcaatagagataggcttaaaagcggagagaacacagagtggaatcagccccctgtaagttaaagggttagagaaagagatgtgtggctgggccctctcccacctgcctgttcagtggaggccagggcagcagcccagaacagcacatgtgggggaggtggccccttgtgccagcagtggctcctctctgcctttgagcccatgcacagctggacccatcctaagtgccagtgagtccctcacacatttgactttagaacgtgtgcttcatgacccgttgtacagacggaggagcgagcaacacacgtctaacagcctagacaatctcgtcagatgctcatactggaccatcagcctccccattttagctgactttcccagggtcgttggcaaattttttgttctgtcttttccttgactaattgtagaactttgtgtgaggactttggttatccaaaatcacagaaatgaaccgttttgcagctgcgcagtcttaaagggcaggccagtgtctgggaaggcagggcccacgtgggcgggtccgttgggcagggctgggtcctgggggggagcattctgcgggacccggtcacggcttttgggtttagttcatggcgttacatgtgtgccttggggtgctctgcactccacggcccttcttcagccacacttcccaccccagggggttncccccagggcttgatcttcatttctgatgttgagggctgtttgggctctgtctgtatagcttgtaacagggagccttgggttagggggctgggggaaggaaagccgagctgggcattcgtttctctgggacttttttaattgcctgccataacctggttaatggttcctcgaggtgcaggagcaggttgctgagccagtggctgccccgtgccctccttcccagcactatcatgtgtcacgtttcccggactctgcccctacatctcagatgaatctccaggggaggctgcagagcattcgtgggagaccacttttcttgccttcggccttttaaatgctgactcacctccttttcgggaggagggcgtcctgtttttcacgggggggtcccggtggcctccagacgtagccatttcctgacatcaagatgttgaatgtaatctggtctgagctgggcctgtgggaggggccgcctgaggcctgtggcgctgttgtcctcgcagatgtacttatttttgttcatgatacgggcgttccgttccttaaagatgtatatattttcttactgtacataaagatgttccttaagtcgtacagaaggtgggcgcggcaaagggccttcgtgcagtgttgtttcagattgcccctgggggatcttctgtgtcttccagcgcccagccctgcgtgtttccgggttgaagcagttttcacattcagtgttcttccagatgagcaataacgatgtattccgcttctgaacaggatcccatgccagtgtgggaacaccttgcccaattcttagttcagaagtgggcttgttatggacctgttcaggggtcacatgaggtctcgccagtttcctgggtcctcttcagaggccagaaagttctaagttctgagtccccggccagggtcccttaacacctcggcacaaaggctgttggccagggtaaagagcttgcctttgtgttggtttaggtaaactggaaatga

SEQ ID NO: 148472 - DNA, 484 bp, Homo sapiens
  misc_feature (1)...(484): n = a,t,c or g
tttttttttttgagatggagtctctctatgtcacccaggctgaattgcagtggcactatcactatctcagttcactgcaacctctgcttcccgggctcaagcgattctcctgcctcagcctcccaaatagctgggattacaggcacacgccaccacgcccagctaattcttgtatttttagtagagatggggttttgcccatttctactaaacagatggaggtaatccacccgccttggcctcccaaagtgctgggattacaggtcgtgacacatgatgtcctgggncctacaattgtcacttttgtccccacgaagggagttgttgggaagaggtagcgagtagcgtgggccgcagatggggacagggctggcattggcagctcaggttccaagggcttcccttatgccggcctcaggctttaccttccctctctgtagccaaaagccaggtggaaaccccaccaagggcaactgggagagtt

SEQ ID NO: 148473 - DNA, 502 bp, Homo sapiens
attgctaattggatgagggaatggcctcttagattgtccttgttttgacttatctgctctttgccaggatttttatatcaagtacttagtttggccaaatttagagtatagtttaaaggggaaaaaaagtttgtatttgatgagtctaattactatattagaatgctttttaaatgaatatgctgtgattggaatctcttcttgggggccggggagagtgctgagagatgcagctgtgtctctgctctctgcagtcttgggcaggcagcaccgctgtctcctgatacagagggttgaatgcactgcttcacattgatgccacattttcaaatctaaacatgattaacatgttttttaagtatttatcaaataattcacatttttgcaggtttaagtgctggtttttaagatataaaacatgttccttgtttttttttctttttaccactggagactatgtgaaatcttgtgtatatggatttttctaaacatttccttttat

SEQ ID NO: 148474 - DNA, 1393 bp, Homo sapiens
  misc_feature (1)...(1393): n = a,t,c or g
caggttcaagtgatcctcccgcctcagctttccaagtagctgggagtataagcgtgtgccaccacactcagctaatttttgtatttttagtggaggtggagtttcaccatgttagccaggctagtctccaactcctgacctcagcctcccgagtagctgggactacaggcgcccaccaccacgcccagctaatttttttgtatttttagtagagatggggtttcaccatcttaacaaagctatcattaaatcatttgcttgtaatgaaattcagccgttgtcagctgtgagcgttgcgagagctgggtggggtgtgtttgagtatgtaagtgtctatttcctgtgctctaacagtgactatttcagttctaacccttcaattgctaattggatgagggaatggcctcttagattgtccttgttttgacttatctgctaaggcgagagaatgtctgggtttgcccaccaccaancccgcagggacccctgctctttgccagggatttttatatcaagtacttagtttggccaaatttagagtatagtttaaaggggaaaaaaagtttgtattttgatgagtctaattactattattagaatgctttttaaatgaatatgctgtgattggaatctcttcttgggggccggggagagtgctgagagatgcagctgtgtctctgctctctgcagtcttgggcaggcagcaccgctgtctcctgatacagagggttgaatgcactgcttcacattgatgccacattttcaaatctaaacatgattaacatgttttttaagtatttatcaaataattcacatttttgcaggtttaagtgctgttttttaagatattaaacatgttccttgtttcttttttctttttaaccactggagactatgtgaaaatcttgtgttatatggaatttttctaaaacaatttccttttacttttcatgttgcatattttccagtggggataaattggaggttcttattactaataatcctgaaactaaaatttgcttttcctgcatagacatcttttgttagtccatttgagttttgttgccatccagtttcatgatcatgttgtgttagtctaatagacaatgagttactgcttgaatgatatgaaattctctagtaaaaaatgctctgaagatgtgagaagctctgttgtattacttggcaccaggaatgttacaaaaatgttgttgctagcatattgctaacctagtccttaagtttcagggattcctgtaatatgttggagtttggagtattaatagcaggctaacagaattacagtaccaatatgccaagttaaataattgagaatatatacagtatagtttgctatgtattaaaaaacctctttttatttccagtccacctg

SEQ ID NO: 148475 - DNA, 368 bp, Homo sapiens
gcgccaccacacccagccaatctttgcatttcttgtagagatggagtttcatgatgttggccagggtgatctccaactcctggcctcaagtgacctgccagcctcggcttcccaaagtgctgggattacaggtgtgagccactgcaactggatataattaccttttagattgtaatctaggctgctcgtttttatgatggtttttgtgactgaaaaataacaattagagaagacagcactcctcactgctccctaaatattccctgagcttttaagactctgcttttacccacagtgatctctctttttgccattttatgctttgcttctcaaactcctacacaaccttcaaaaccttgcttatgtgc

SEQ ID NO: 148476 - DNA, 577 bp, Homo sapiens
ctggcggagtctggggaaggcttggtactgtcgggggggtccctgagactccccctgtatagcctctcgattcatcttcagttcctactacatgagtggcgtccgccaggctcccgggaagggactggaatgggtaagtttcataagagaccacgtctgtgagaggcagattcacgatgtcaagagatgaatccaaaaacatcacctatttgcaaatgaaaagcctgcgtcggggcatgttccgaggggacctgggcggactggccaggaggggatgggcactggggtgccctgaggatctgggagcctctgtggattttccgatgcctttggaaaatgggactcaggttgggtgcgtctgatggagtaactgagcctgggggcttggggagccacatttggacgagatgcctgaacaaaccaggggtcttagtgatggctgaggaatgtgtctcaggagcggtgtctgtaggactgcaagatcgctgcacagcagcgaatcgtgcaatattttctttagagttatgaggtgcgctgtgtgtcaacctgcatcttaaattctttattggctcgaaag

SEQ ID NO: 148477 - DNA, 652 bp, Homo sapiens
ggagcataagggtcgaggcactgttagaacaattacgaaacaagtacccaatgagtcctttttcaacttcttcaatccattgaaagcatccggggatggagaatcactggatgaagattctgaattcacattagcctctgattttgaaattggacactttttccgtgagcggatagtcccgcgggctgtgctgtacttcactggggaggccatagaagatgatgacaattttgaagaaggtgaagaaggagaagaggaggaattagaaggtgacgaggagggagaagacgaggatgatgcggaaattaaccccaagaaggaacccagccagccggcggaatgcaagcagcagtaggaagcggtaggcggtgcctggcagaccggctgtcgggacttcaggcctgtgggcggggcctcggtccttgccgcagcacaatcccgtggacagagcttactccatctaactcgttttcaagtgcatgattttcactttcacttttcctttttccttattattttgcttaacttgtacagtggcaactgaaatgcatttcagaaataggaggtttcgtccagcaccctctgcagccttggtgcctgtagctctggacttccctgggcctttccctgtgggagggccctgtagaccaca

SEQ ID NO: 148478 - DNA, 974 bp, Homo sapiens
ttgcaaagatgtctgtgaggagatgcaaggctttggggatttctgttaaacctcgaggtgagaaatgttacattttatctaccagcacagcttcctcctgtgtgggctttaaaattctgggagttgtcactgtaatttaaatatgttttgtcttttctttttctagcatccggggatggagaatcactggatgaagattctgaattcacattagctcgtgattttgaaattggacacttttttccgtgagcggatagtcccgcgggctgtgctgtacttcactggggaggccatagaagatgatgacaatgtatgaggctcggggaaggggggcttccacctgggtgcttatctctgttggtgcagagtggccctgaattgtggcttaggaaacccccatgcctaatctttttattacatcatcagccagatatgtagtccaagctgctgtccttgttgtggggggaatacgcttgaagaggagaagtctgaggaacagagcaggaaaagcaggtgtctgtgaagcagtttcagaggtgattgccagtttcctatgtgagccctgcctagtgactcaacaatattctctcaaaacctaagcttcagggaacttgtgaacacagggaatatctcttttatggaggtctggccacaacaaacatttattgacagtggacttatgctagcctgtggttcatcaacccaaaagaaatagaaattcctgaacttccatctaatcaggtaaaaaggaaaaaaaagaaccccgtgctcccgaagaaaacaacaagattgcatgtcactttcctttctgggcttgagggaagccagctcttccacagtcagaacttgcgggtgcacagcccaagtaccgcttagaaactcccatcctcaccaaggctcaagcagcttcaagtcttcttgatctgtggaaaataaagtcttgttttatagactgttaaaaaaaaaaaaaaaaa

SEQ ID NO: 148479 - DNA, 2551 bp, Homo sapiens
  misc_feature (1)...(2551): n = a,t,c or g
ggcacgagcttgctcgcggagagaggagctaggagcctcggccaatgggagccggcgttgttggaggccacggcggcgcagccccaaagcgagcgaagctagggtcgccgccactgccgcaggaggcgtgaggggataaaaacattcagatggcagatcacagtttttcagatggggttccttcagattccgtggaagctgctaaaaatgcaagtaacacagaaaagctcacagatcaggtgatgcagaatcctcgagttctggcagctttacaggagcgacttgacaatgtccctcacaccccttccagctacatcgaaactttacctaaagcagtaaaaagaagaattaatgcattgaaacaacttcaggtgagatgtgctcacatagaagccaagttctatgaagaggtacatgacttggaaagaaagtatgcagcgctataccagcctctctttgacaagagaagagaatttatcaccggcgatgttgaaccaacagatgcggaatcggaatggcacagtgaaaatgaagaggaagagaaattggctggagacatgaaaagtaaagtagtcgtcacagaaaaagcagcggcaacggctgaagagccagatcccaaaggaattccagagttctggtttaccatcttcagaaatgtggacatgctgagtgaattagtccaggaatatgatgaaccaatcttgaaacacctgcaggatattaaagtgaaattttctgaccctggacagcctatgtcttttgtgttagagttccactttgaacccaacgactactttaccaactcagtcctgacaaaaacctacaagatgaaatcagaaccagataaggctgatcccttttcctttgaaggtcctgagattgtggactgtgacgggtgtactattgactggaagaaaggaaagaatgttactgtcaaaaccatcaagaaaaagcagaagcataagggtcgaggcactgttagaacaattacgaaacaagtacccaatgagtcctttttcaacttcttcaatccattgaaaggcaagtctgttgcatccggggatggagaatcactggatgaagattctgaattcacattagcctctgattttgaaattggacactttttccgtgagcggatagtcccgcgggctgtgctgtacttcactggggaggccatagaagatgatgacaattttgaagaaggtgaagaaggagaagaggaggaattagaaggtgacgaggagggagaagacgaggatgatgcggaaatttaaccccaaggtgttaatttttgtcttgttaatcattcatacgttttctaggagggaccccagccagccggcggaatgcaagcagcagtatgaagcggaggcgggtgcctggcagaccggctgtcgggactccaggcctgtgggcggagcctcggtccttgccgcagcacaatcccgtggacagagcttactccatctaactcgttttcaagtgcatgattttcactttcacttttcctttttccttattattttgattaacttgtacagtggcaactgaaatgcatttcagaaataggaggtttcgtccagcaccctctgcagccttggtgcctgtagctctggacttccctgggcctttccctgtgggagggccctgtagacacatcagggtggggtgggggtcacttggcaaaaagggccgaggtctggtgatgtggttcccaggatcttggaacctctcccacccctcctgcagttggactgaattctaccctttcatccgaagaaacccacttgctgtttccagccgctgaatctgctgagtgtgcagcctgcatcacctgctgtatgccgatcatctcagaaagggctgtgtagagtagggccctgttctccttaggatgttgcttcttgatttttttttttttttaggggtgggtcagggttgtgacacaccagcccaggtgagagctgctgcgggtcacctcatatttatttatcccttcttgcctgtgaggactgcggcttttcgctgtggctcgtccttaacgtttctgaaccaccttggtgccctgagcaggaagatgtgccacttcctagcaggcgcaaggcctgtgcggaagaaacgccgctccctgccaccagggctgaagatgcgagcccgtcctcatgacgcaggcgccaccctgctgccggagccgggcttcggcatcttctccactgagggactgggctgggaagtcctgcgtttcagtggagcgtatgagcgtcaagtcctgctttctcagtagccccattgcggggccccaccattcatcctgtctgaaggtcctgggtttggtgtgaccgcttggcggctggtgggtggggttttcaagtgggtgacggcgctctccggcaaccggggatggccgtgtccgcactgaccaggcctgtggagagtgctcggcctaaccttagaacacaattgtaactgaaaacagtgttttcaatttgtacagaatagttagaatattctaataaagtggtgaaacattgaaaaaaaaanaaaaaaa

SEQ ID NO: 148480 - DNA, 324 bp, Homo sapiens
cgggtatggaagagagaaaatatagtattcgtaaaagatgtaagtgaaagaatttagcctggccttttaacataaactaggggtttccagtatcttggaatgggaggactccgtttgaatatctaatcttgatatgcactgtgctcatatctggttgtgcctcattatagttgagaagtctgtttctactgctccagtggttattagccattgttgtcaggcacatcctaacaggtccgcaaaagcaggacaattcacgtagcacagaatctaaaaggtccaaggttcggttccaggtatctctcccgagctctccaagccgcc

SEQ ID NO: 148481 - DNA, 383 bp, Homo sapiens
acaaaatgtgcgataactgctgtaaagacagtgcatttgaaagaaagaacataacagagtactgcagagatctaatcaagatcctgaagcaggcagaggaactgaatgaaaaactcactccattgaaactgattgattcttggatgggaaagggtgcagcaaaactgagagtagcaggtgttgtggctcccacacttcctcgtgaagatctggagaagattattgcacactttctaatacagcagtatcttaaagaagactacagttttacagcttatgctaccatttcgtatttgaaaataggacctaaagctaatcttctgaacaatgaggcacatgctattactatgcaagtgacaaagtccacgcagaactctttcagg

SEQ ID NO: 148482 - DNA, 758 bp, Homo sapiens
tttttttttttttatttctgcattaaaggctttatttgcattcttgcaaattttattatttcaagtcaatgtgttaagaattactgcgcatatagttatttcttttataaatttgctttccgtgactccttcaaaagctttcttattgttggcctttattttctgcagagaagactacagttttacagcttatgccaccatttcgtatttgaaaataggacctaaagctaatcttctgaacaatgcaggcatatgttatcacctatgcaagtgacaaagtccacgcagaactctttcagggtaaatggctattaattttcagttttatatattttaaaaagtatattaaagcctatgggatgcttttctgtcatattcccctaggtccagttgaacatgagaaaagtcagttttctgattagatttctgggtatggaagagagaaaatatagttttctgtaaagatgtaagtgacagaatttagactggccttttcacataaactaggggtttccagtttcttggaatgggaggactccgtttgaatatctaattttgttatgcactctgctcttatttggttgtgattactaatagttgagaagtctgtttctgctgttccagtggttagaaaccactgttttaaaccaaatactatcaagtctgcaaaagcatgtcaagtcaagtgccattgtgtctaaggacatttgaggtctttagaacttctctcacaacgtagccccttttattcaaaatag

SEQ ID NO: 148483 - DNA, 1186 bp, Homo sapiens
  misc_feature (1)...(1186): n = a,t,c or g
agacagagtctcgttcggtcccccagcttggagtgcagtggcgcgatctcggctcactgcaacctccgcctcctgggttcacgcgattctcctgcctcagcctcccgagtagctgggattacaggcacacaccaccacgcccggctaattttttgtgtctttttagtagagacggggtttcgccatgttggccagactggtcttgaactcctgacctcaggtgatccacccgcctcggcctctcaaagtgctgggattctgtgtgttttgtgcacctccactttaggtaatcatagggagcacatttacaggatggtctaataacatgaaaacaggctagtttcaagcaacagcaatgtcggttgggaaagcaggcgtcatttgccttggaaaaaagcctttttgacaacatacagggcattctttttaaaaccaggcttgaaacatttattttcccaggacttaacgttgtgtttncccgttttcttaaaacctaggcacctctgtgtaattttggaaaattaatgggggcatctttccattgggattttggggaaaattgttccccatggggattcttaacctcacttacccaaatggagtggaaagcttggattaaggagttctttccatatactagcctccttgggaagaagttgatcagaagggtgataaggaaggacagaaaggcctatttttaaagttggactgaagggagaaaaaagcaaaattctggtttcatccccaattctagttaggaacaaaggtaaacccccccgaatcctaaagagaaaatcctttgggaggttttaatttaaacatttttatacattttaaagtccttgtttaatgggtgctttaagtgtccaatgtagccatgtaaaaagggccttgtaccagacggggtaaaagttcccatttctggagtgatgaaattgtaacaccttccttcatctttaacttgaaaatcaaaacctatccagattttatttttgtataatttaaggaaggtaaagttaggggacctagaagactctaaattggcttctacagatccaataatttaaatgtaactagttgggggttttatagtttaaattattatttgtgtatataacataactaatctgtaaattgtaataaatatatttgcaattattaaaaaaaaaaaaaaagggcggccgct

SEQ ID NO: 148484 - DNA, 2736 bp, Homo sapiens
agtaagcactctcccttgtcgtggaggtgggcaaatctttatcagccactgccttctgctgccaggaagccagctagagtggtctttaaagaaaactgggcatctcctgctacttaaaatcaaaaactacctaaaataaagattatagagccagaggaagagatagccatggaggacagccccactatggttagagtggacagccccactatggttaggggtgaaaaccaggtttcgccatgtcaagggagaaggtgcttccccaaagctcttggctatgtcaccggtgacatgaaagaacttgccaaccagcttaaagacaaacccgtggtgctccagttcattgactggattctccggggcatatcccaagtggtgttcgtcaacaaccccgtcagtggaatcctgattctggtaggacttcttgttcagaacccctggtgggctctcactggctggctgggaacagtggtctccactctgatggccctcttgctcagccaggacaggtcattaatagcatctgggctctatggctacaatgccaccctggtgggagtactcatggctgtcttttcggacaagggagactatttctggtggctgttactccctgtatgtgctatgtccatgacttgcccaattttctcaagtgcattgaattccatgctcagcaaatgggacctccccgtcttcaccctccctttcaacatggcgttgtcaatgtacctttcagccacaggacattacaatccgttctttccagccaaactggtcatacctataactacagctccaaatatctcctggtctgacctcagtgccctggagttgttgaaatctataccagtgggagtgggagttggtcagatctatggctgtgataatccatggacagggggcattttcctgggagccatcctactctcctccccactcatgtgcctgcatgctgccataggatcattgctgggcatagcagcgggactcagtctttcagccccatttgaggacatctactttggactctggggtttcaacagctctctggcctgcattgcaatgggaggaatgttcatggcgctcacctggcaaacccacctcctggctcttggctgtgccctgttcacggcctatcttggagtcggcatggcaaactttatggctgaggttggattgccagcttgtacctggcccttctgtttggccacgctattgttcctcatcatgaccacaaaaaattccaacatctacaagatgcccctcagtaaagttacttatcctgaagaaaaccgcatcttctacctgcaagccaagaaaagaatggtggaaagccctttgtgagaacaagccccattttgcagccatggtcacgagtcatttctgcctgactgctccagttaactttccagggttttcaagcaaactgctgttttttcacgagtatcaactttcatactgacgcgtctgtaatctgttcttatgctcattttgtattttcctttcaactccaggaatatccttgagcatatgagagtcacatccaggtgatgtgctctggtatggaatttgaaaccccaatggggccttggcactaagactggaatgtatataaagtcaaagtgctccaacagaaggaggaagtgaaaacaaactattagtatttattgatattcttggtgtttagctggctcgatgatgttaacagtattaaaaattaaacccccataaacccaacctaagcctatggaatccacagtcacaaaatcgaagttaacccagaatctgtgataagcagcttggctttttttttaaatcaatgcaagtacaccattatagccagaatctgtatcacagaggtgcaagctgacagcagagctcagtccccacttcctgcaaacaatggcctgcaccctatcccttgtgtgtgtgacattctctcatgggacaatgttggggtttttcagactgacaggactgcaagagggagaaaggaattttgtcaatcaaaattattctgtattgcaacttttctcagagattgcaaaggattttttaggtagagattatttttccttatgaaaaatgatctgttttaaatgagataaaataggagaagttcctggcttaacctgttcttacatattaaagaaaagttacttactgtatttatgaaatactcagcttaggcatttttactttaacccctaaattgattttgtaaatgccacaaatgcatagaattgttaccaacctccaaagggctctttaaaatcatatttttttattcatttgaggatgtcttataaagactgaaggcaaaggtcagaatgcttacgggtgttatttttataagttgttgaattccttaatttagaaaagctcattattttttgcacactcacaatattctctctcagaaatcaatggcatttgaaccaccaaaaagaaataaagggctgagtgtggtgctcacgcctgtaatcccagcactttggggagcccaggcgggcagattgcttgaacccaggagttcaagaccagcctgggcagcatggtgaaaccctgtatctacaaaaaatacaaaaattagccaggcatggtggtgggtgcctgtagttccagctacttgggaggctgaggtgggaaaatgacttgagcccaggaggaggaggctgcagtgagctaagattgcaccactgcactccaacctgggtgacaagagtgaaactgaat

SEQ ID NO: 148485 - DNA, 513 bp, Homo sapiens
gggttcacaagctctctggcttgcatgcaaatgggagaaatgttcatggggttcacttgccaaaccccacctcctggctcttggctgtgccctgttcacggcctatcttggagtcggcatggcaaactttatggctgagggaacgtgtgaaagaagaattgtggggaaaaaaaaagcaagcataaccaaagatcatcagcagcgaagaatctaggctgtggctgagagacccagaggccctctaaaatggacccgagtcgatcttcagatcagggatctaccatgcaggagcttcttgtgctcacacaaatctgtaaatgggaacattgtacattgtcgaatttaaatgatattaattttctcaagctatttttgttactattttcctaaaattgaatatttgcagggagcacttatactttttcctaatgtctgtataacaaatttctatgcaagtacatgaataaattatgctcacagctcaaaaaaaaaaaaaaaaaaaaaagtcgacgc

SEQ ID NO: 148486 - DNA, 1035 bp, Homo sapiens
  misc_feature (1)...(1035): n = a,t,c or g
atgaggaccttcgccctcctcactgccatgcttctcctggtggccctgctcaggcggagccacttcaggcaagagctgatgaagctgcagcccaggagcagcctggagcagatgatcaggaaatggctcatgcctttacatggcatgaaagtgccgctcttccgctttcagcctgataaaatcattgtcctctccaccctgattcctacaggagactactcaccccataacctcaaaaacctcttcatgaggatggtaagtcacctgaatcctgaagtgaattactcgctattccattggaactcatataggacaccagaatctagacctccagagaacagcaggacccatcttcagaaaataagaagcatttgttccctgagcctgttgaatcaaagtgcaatttctattctttttggaatgttaaaaagtgaccccagccccatgaggaccctcgccactccttgctgccaattctcccctggtgggcctgaaggccccaggcttgagccactccccaggaaagagctgatgagcgttgctgcagcccccggagcagattgcagcgggacatccccagaagtgggttgtttccccttgcatgggaccaaaagctttggctcccaaagcatcccaggctcaagggaaaaccatggactgctattgcagaaataccagcgtgcattgcagggagaacgttcgctatgggaacctgcattttaccaggggaagactttggggcattcctgctgctgagcttgcagaaaaagaaaaatgagctccaaatttgactttgagagctacagggaattgcctattactcctgtaccttcttgttaaatttcctttcctaatctcaaataaatgccttgttacaagnnnnnnnnnnnnnnnnnnggtcaacccggccgcaatttccaaatttataaatggaaaatcctgaaaacccccggaggttaattaaaccgggccttgggccccattttaaattctttaatttaaaacatggtttggccttttttaatgaaaaaaacc

SEQ ID NO: 148487 - DNA, 221 bp, Homo sapiens
  misc_feature (1)...(221): n = a,t,c or g
cggccgcgtcgacctttttgtttcctaatctcaaaaattccttaaggggcatgcttaaggactttttcttcagttactaatgtaagaaagactgcactgacatggttaaactcccaagacattcnnnnnnnnnnnnnnnnnnnnnnnnnnnnnnnnnnnnnnnnnnnnnnnnnnnnnnnnnnnnnnnnnnnnnnnnnntccagaaggcttggctgtctctg

SEQ ID NO: 148488 - DNA, 2784 bp, Homo sapiens
gtcattggtggcggaggcaatggccggcaaccagctgtaagcgaggcacggaagacatatgcttgtgagacaaaggtgtctctgaaactatggatggtacaagaacttcacttgacattgaagagtactcggatactgaggtacagaaaaaccaagtactaactctggaagaatggcaagacaagtgggtgaacggcaagactgcttttcatcaggaacaaggacatcagctattaaagaagcatttagatactttccttaaaggcaagagtggactgagggtattttttcctctttgcggaaaagcggttgagatgaaatggtttgcagaccggggacacagtgtagttggtgtggaaatcagtgaacttgggatacaagaattttttacagagcagaatctttcttactcagaagaaccaatcaccgaaattcctggaaccaaagtatttaagagttcttcggggaacatttcattgtactgttgcagtatttttgatcttcccaggacaaatattggcaaatttgacatgatttgggatagaggagcattagttgccattaatccaggtgatcgcaaatgctatgcagatacaatgttttccctcctgggaaagaagtttcagtatctcctgtgtgttctttcttatgatccaactaaacatccaggtccaccattttatgttccacatgctgaaattgaaaggttgtttggtaaaatatgcaatatacgttgtcttgagaaggttgatgcttttgaagaacgacataaaagttggggaattgactgtctttttgaaaagttatatctacttacagaaaagtaaatgagacatagataaaataaaatcacactgacatgtttttgaggaattgaaaattatgctaaagcctgaaaatgtaatggatgaatttttaaaattgtttataaatcatatgatagatctttactaaaaatggctttttagtaaagccatttactttttctaaaaaagttttagaagaaaaagatgtaactaaacttttaaagtagctcctttggagaggagattatgatgtgaaagattatgcctatgtgtcttgcagattgcaagatattttaccaatcagcatgtgttacctgtacaattaaaaaaatatttcaaaatgcaatgcatattaaatataatacacacagaaaaactggcatttattttgttttatttttttgagatggagtttcgttcttgttgcccaacctggagtgcaatggtgcaatctcagctcactgcaacctctgcctcccaggttcaggtgattctcctgcctcagcctcctgagtagctgggattacaggtgtgcgccaccacgcccagctaattttttgtatttttagtagagacaggatttcaccatgttggtcaggctgatctcgagctcctgacctcaggtgatctacccacctcggcctcccaaagtgctgggattacaggcgtgagccactgcacctggcctgacattctttatgaaatttagaattgttgaagaactataacatttcagtagggttcaaggtggtcccaaaagttatataaaagattagtttttactataaacccttgtcttttactcagatcctagcatcccttttcacatggtttctccatgtatataacagaatcaagaaacaaattttaattaaacaatctgtaacagaatcaagaaacaaatacattttaattaaacaatctatatggaacaaacattcccaaattctaagaataaatttttctttaagttttctctgagtttggcaattgttgttttttataatttaatctgtttaaatcatcaggtcttataaaatataatgtacttagagctggattcatggctgtttattatgaaaggttagatttctcagttcttctttaaccacattttgttatatcagacagtcctctataactctgtactacccaacaactaaatggtttagattgtttagctcatgttaataggatggttgtgtattataaaaaacgagttacgtgtgtgtgtgcacgcatgcacgcacatgtgctggcttaaaggttgttaatgcaaggtttggggtcccctttaacactggtgaaagctacggtactctccccagagatatgtcttgtcagcctctctagttccccttggcctgcatgtacaaacttctaccctagaagctctctgccatcgatgtattctaatagatttgtaaggctattaatttgaagcaactccttgctcacagtgattcttgcttctctgagacctgctcccagtcgatactgtgggcttcagaagccatgactccccaactctgcctgtatcaccggttgaatggacaactaacccgagctggaccaacacaattctctccagagacttttgattttacttttatgtagagacagggtctcactttgttggccacgctgatgttgaacttgacgtgaggcctcaagcagtcctcctgtcttggccacccaaagtgctaggattacaggtatgagccattgcgctggccctcttcataggcttttggacttgggaatagaaaagcaaccccgtctctactaaaaatacaaaaaaattagccaggcgtggtggcacgtgcctgtaatcccagctacttgggaggctgaggcaggagaatcacttgaacctaggaggcggaggttgcagtgagctgagatcatgccactgcacgccagcctgggcaacagagcaagactctgtctcaaaagaaagaaaaagaaaagaaaaaaa

SEQ ID NO: 148489 - DNA, 466 bp, Homo sapiens
ttttttttttttgagatgaagtctcgcgctcttgtcccctaggctggagtgcaatgatgcgatcttggctaactgcagcttctgccccttgggttcaagtgattctcctgcctcagcctcccgagtagctgggattacaggcgcctgccaccacgcccggctaatttttatatttttagttgagacagggtttcaccatgttggccaggctgatctcgaactcctgacctcaggtgattcgcccgcctcagcctcccaaagtgctgggattacaggcatgagccaccgtgccggacctatttaaaaatcttttttgaagtacagtactaataaactaaggactacctagagatcacacttttagatattatctattttaacatagattaaaaatactgtttatatgaaaaattaagcttaaatacacgtataggtaataattattttgcccatatacaaggtaatg

SEQ ID NO: 148490 - DNA, 13092 bp, Homo sapiens
agtgggcgctgggcagtcacgcagggtttgaaccggaagcgggagtaggtagctgcgtggctaacggagaaaagaagccgtggccacgggaggaggcgagaggagtcgggatctgcgctgcagccaccgccgcggttgatactactttgaccttccgagtgcagtggcactgtaagcatgtatatgggtccttaaagggactcatagagaggcatacatcacaatttggaattatgcattggtttatcaatttacttgtttattgtcaccctgctgcccagatatgacttcatgaggacagtgatgtgtgttctgaaattgtgaaccatgagtctagtacttaatgatctgcttatctgctgccgtcaactagaacatgatagagctacagaacgaaagaaagaagttgagaaatttaagcgcctgattcgagatcctgaaacaattaaacatctagatcggcattcagattccaaacaaggaaaatatttgaattgggatgctgtttttagatttttacagaaatatattcagaaagaaacagaatgtctgagaatagcaaaaccaaatgtatcagcctcaacacaagcctccaggcagaaaaagatgcaggaaatcagtagtttggtcaaatacttcatcaaatgtgcaaacagaagagcacctaggctaaaatgtcaagaactcttaaattatatcatggatacagtgaaagattcatctaatggtgctatttacggagctgattgtagcaacatactactcaaagacattctttctgtgagaaaatactggtgtgaaatatctcagcaacagtggttagaattgttctctgtgtacttcaggctctatctgaaaccttcacaagatgttcatagagttttagtggctagaataattcatgctgttaccaaaggatgctgttctcagactgacggattaaattccaaatttttggactttttttccaaggctattcagtgtgcgagacaagaaaagagctcttcaggtctaaatcatatcttagcagctcttactatcttcctcaagactttggctgtcaactttcgaattcgagtgtgtgaattaggagatgaaattcttcccactttgctttatatttggactcaacataggcttaatgattctttaaaagaagtcattattgaattatttcaactgcaaatttatatccatcatccgaaaggagccaaaacccaagaaaaaggtgcttatgaatcaacaaaatggagaagtattttatacaacttatatgatctgctagtgaatgagataagtcatataggaagtagaggaaagtattcttcaggatttcgtaatattgccgtcaaagaaaatttgattgaattgatggcagatatctgtcaccaggtttttaatgaagataccagatccttggagatttctcaatcttacactactacacaaagagaatctagtgattacagtgtcccttgcaaaaggaagaaaatagaactaggctgggaagtaataaaagatcaccttcagaagtcacagaatgattttgatcttgtgccttggctacagattgcaacccaattaatatcaaagtatcctgcaagtttacctaactgtgagctgtctccattactgatgatactatctcagcttctaccccaacagcgacatggggaacgtacaccatatgtgttacgatgccttacggaagttgcattgtgtcaagacaagaggtcaaacctagaaagctcacaaaagtcagatttattaaaactctggaataaaatttggtgtattacctttcgtggtataagttctgagcaaatacaagctgaaaactttggcttacttggagccataattcagggtagtttagttgaggttgacagagaattctggaagttatttactgggtcagcctgcagaccttcatgtcctgcagtatgctgtttgactttggcactgaccaccagtatagttccaggaacggtaaaaatgggaatagagcaaaatatgtgtgaagtaaatagaagcttttctttaaaggaatcaataatgaaatggctcttattctatcagttagagggtgacttagaaaatagcacagaagtgcctccaattcttcacagtaattttcctcatcttgtactggagaaaattcttgtgagtctcactatgaaaaactgtaaagctgcaatgaattttttccaaagcgtgccagaatgtgaacaccaccaaaaagataaagaagaactttcattctcagaagtagaagaactatttcttcagacaacttttgacaagatggactttttaaccattgtgagagaatgtggtatagaaaagcaccagtccagtattggcttctctgtccaccagaatctcaaggaatcactggatcgctgtcttctgggattatcagaacagcttctgaataattactcatctgagattacaaattcagaaactcttgtccggtgttcacgtcttttggtgggtgtccttggctgctactgttacatgggtgtaatagctgaagaggaagcatataagtcagaattattccagaaagccaagtctctaatgcaatgtgcaggagaaagtatcactctgtttaaaaataagacaaatgaggaattcagaattggttccttgagaaatatgatgcagctatgtacacgttgcttgagcaactgtaccaagaagagtccaaataagattgcatctggctttttcctgcgattgttaacatcaaagctaatgaatgacattgcagatatttgtaaaagtttagcatccttcatcaaaaagccatttgaccgtggagaagtagaatcaatggaagatgatactaatggaaatctaatggaggtggaggatcagtcatccatgaatctatttaacgattaccctgatagtagtgttagtgatgcaaacgaacctggagagagccaaagtaccataggtgccattaatcctttagctgaagaatatctgtcaaagcaagatctacttttcttagacatgctcaagttcttgtgtttgtgtgtaactactgctcagaccaatactgtgtcctttagggcagctgatattcggaggaaattgttaatgttaattgattctagcacgctagaacctaccaaatccctccacctgcatatgtatctaatgcttttaaaggagcttcctggagaagagtaccccttgccaatggaagatgttcttgaacttctgaaaccactatccaatgtgtgttctttgtatcgtcgtgaccaagatgtttgtaaaactattttaaaccatgtccttcatgtagtgaaaaacctaggtcaaagcaatatggactctgagaacacaagggatgctcaaggacagtttcttacagtaattggagcattttggcatctaacaaaggagaggaaatatatattctctgtaagaatggccctagtaaattgccttaaaactttgcttgaggctgatccttattcaaaatgggccattcttaatgtaatgggaaaagactttcctgtaaatgaagtatttacacaatttcttgctgacaatcatcaccaagttcgcatgttggctgcagagtcaatcaatagattgttccaggacacgaagggagattcttccaggttactgaaagcacttcctttgaagcttcagcaaacagcttttgaaaatgcatacttgaaagctcaggaaggaatgagagaaatgtcccatagtgctgagaaccctgaaactttggatgaaatttataatagaaaatctgttttactgacgttgatagctgtggttttatcctgtagccctatctgcgaaaaacaggctttgtttgccctgtgtaaatctgtgaaagagaatggattagaacctcaccttgtgaaaaaggttttagagaaagtttctgaaacttttggatatagacgtttagaagactttatggcatctcatttagattatctggttttggaatggctaaatcttcaagatactgaatacaacttatcttcttttccttttattttattaaactacacaaatattgaggatttctatagatcttgttataaggttttgattccacatctggtgattagaagtcattttgatgaggtgaagtccattgctaatcagattcaagaggactggaaaagtcttctaacagactgctttccaaagattcttgtaaatattcttccttattttgcctatgagggtaccagagacagtgggatggcacagcaaagagagactgctaccaaggtctatgatatgcttaaaagtgaaaacttattgggaaaacagattgatcacttattcattagtaatttaccagagattgtggtggagttattgatgacgttacatgagccagcaaattctagtgccagtcagagcactgacctctgtgacttttcaggggatttggatcctgctcctaatccacctcattttccatcgcatgtgattaaagcaacatttgcctatatcagcaattgtcataaaaccaagttaaaaagcattttagaaattctttccaaaagccctgattcctatcagaaaattcttcttgccatatgtgagcaagcagctgaaacaaataatgtttataagaagcacagaattcttaaaatatatcacctgtttgttagtttattactgaaagatataaaaagtggcttaggaggagcttgggcctttgttcttcgagacgttatttatactttgattcactatatcaaccaaaggccttcttgtatcatggatgtgtcattacgtagcttctccctttgttgtgacttattaagtcaggtttgccagacagccgtgacttactgtaaggatgctctagaaaaccatcttcatgttattgttggtacacttataccccttgtgtatgagcaggtggaggttcagaaacaggtattggacttgttgaaatacttagtgatagataacaaggataatgaaaacctctatatcacgattaagcttttagatccttttcctgaccatgttgtttttaaggatttgcgtattactcagcaaaaaatcaaatacagtagaggacccttttcactcttggaggaaattaaccattttctctcagtaagtgtttatgatgcacttccattgacaagacttgaaggactaaaggatcttcgaagacaactggaactacataaagatcagatggtggacattatgagagcttctcaggataatccgcaagatgggattatggtgaaactagttgtcaatttgttgcagttatccaagatggcaataaaccacactggtgaaaaagaagttctagaggctgttggaagctgcttgggagaagtgggtcctatagatttctctaccatagctatacaacatagtaaagatgcatcttataccaaggcccttaagttatttgaagataaagaacttcagtggaccttcataatgctgacctacctgaataacacactggtagaagattgtgtcaaagttcgatcagcagctgttacctgtttgaaaaacattttagccacaaagactggacatagtttctgggagatttataagatgacaacagatccaatgctggcctatctacagccttttagaacatcaagaaaaaagtttttagaagtacccagatttgacaaagaaaacccttttgaaggcctggatgatataaatctgtggattcctctaagtgaaaatcatgacatttggataaagacactgacttgtgcttttttggacagtggaggcacaaaatgtgaaattcttcaattattaaagccaatgtgtgaagtgaaaactgacttttgtcagactgtacttccatacttgattcatgatattttactccaagatacaaatgaatcatggagaaatctgctttctacacatgttcagggatttttcaccagctgtcttcgacacttctcgcaaacgagccgatccacaacccctgcaaacttggattcagagtcagagcactttttccgatgctgtttggataaaaaatcacaaagaacaatgcttgctgttgtggactacatgagaagacaaaagagaccttcttcaggaacaatttttaatgatgctttctggctggatttaaattatctagaagttgccaaggtagctcagtcttgtgctgctcactttacagctttactctatgcagaaatctatgcagataagaaaagtatggatgatcaagagaaaagaagtcttgcatttgaagaaggaagccagagtacaactatttctagcttgagtgaaaaaagtaaagaagaaactggaataagtttacaggatcttctcttagaaatctacagaagtataggggagccagatagtttgtatggctgtggtggagggaagatgttacaacccattactagactacgaacatatgaacacgaagcaatgtggggcaaagccctagtaacatatgacctcgaaacagcaatcccctcatcaacacgccaggcaggaatcattcaggccttgcagaatttgggactctgccatattctttccgtctatttaaaaggattggattatgaaaataaagactggtgtcctgaactagaagaacttcattaccaagcagcatggaggaatatgcagtgggaccattgcacttccgtcagcaaagaagtagaaggaaccagttaccatgaatcattgtacaatgctctacaatctctaagagacagagaattctctacattttatgaaagtctcaaatatgccagagtaaaagaagtggaagagatgtgtaagcgcagccttgagtctgtgtattcgctctatcccacacttagcaggttgcaggccattggagagctggaaagcattggggagcttttctcaagatcagtcacacatagacaactctctgaagtatatattaagtggcagaaacactcccagcttctcaaggacagtgattttagttttcaggagcctatcatggctctacgcacagtcattttggagatcctgatggaaaaggaaatggacaactcacaaagagaatgtattaaggacattctcaccaaacaccttgtagaactctctatactggccagaactttcaagaacactcagctccctgaaagggcaatatttcaaattaaacagtacaattcagttagctgtggagtctctgagtggcagctggaagaagcacaagtattctgggcaaaaaaggagcagagtcttgccctgagtattctcaagcaaatgatcaagaagttggatgccagctgtgcagcgaacaatcccagcctaaaacttacatacacagaatgtctgagggtttgtggcaactggttagcagaaacgtgcttagaaaatcctgcggtcatcatgcagacctatctagaaaaggcagtagaagttgctggaaattatgatggagaaagtagtgatgagctaagaaatggaaaaatgaaggcatttctctcattagcccggttttcagatactcaataccaaagaattgaaaactacatgaaatcatcggaatttgaaaacaagcaagctctcctgaaaagagccaaagaggaagtaggtctccttagggaacataaaattcagacaaacagatacacagtaaaggttcagcgagagctggagttggatgaattagccctgcgtgcactgaaagaggatcgtaaacgcttcttatgtaaagcagttgaaaattatatcaactgcttattaagtggagaagaacatgatatgtgggtattccgactttgttccctctggcttgaaaattctggagtttctgaagtcaatggcatgatgaagagagacggaatgaagattccaacatataaatttttgcctcttatgtaccaattggctgctagaatggggaccaagatgatgggaggcctaggatttcatgaagtcctcaataatctaatctctagaatttcaatggatcacccccatcacactttgtttattatactggccttagcaaatgcaaacagagatgaatttctgactaaaccagaggtagccagaagaagcagaataactaaaaatgtgcctaaacaaagctctcagcttgatgaggatcgaacagaggctgcaaatagaataatatgtactatcagaagtaggagacctcagatggtcagaagtgttgaggcactttgtgatgcttatattatattagcaaacttagatgccactcagtggaagactcagagaaaaggcataaatattccagcagaccagccaattactaaacttaagaatttagaagatgttgttgtccctactatggaaattaaggtggaccacacaggagaatatggaaatctggtgactatacagtcatttaaagcagaatttcgcttagcaggaggtgtaaatttaccaaaaataatagattgtgtaggttccgatggcaaggagaggagacagcttgttaagggccgtgatgacctgagacaagatgctgtcatgcaacaggtcttccagatgtgtaatacattactgcagagaaacacggaaactaggaagaggaaattaactatctgtacttataaggtggttcccctctctcagcgaagtggtgttcttgaatggtgcacaggaactgtccccattggtgaatttcttgttaacaatgaagatggtgctcataaaagatacaggccaaatgatttcagtgcctttcagtgccaaaagaaaatgatggaggtgcaaaaaaagtcttttgaagagaaatatgaagtcttcatggatgtttgccaaaattttcaaccagttttccgttacttctgcatggaaaaattcttggatccagctatttggtttgagaagcgattggcttatacgcgcagtgtagctacttcttctattgttggttacatacttggacttggtgatagacatgtacagaatatcttgataaatgagcagtcagcagaacttgtacatatagatctaggtgttgcttttgaacagggcaaaatccttcctactcctgagacagttccttttagactcaccagagatattgtggatggcatgggcattacgggtgttgaaggtgtcttcagaagatgctgtgagaaaaccatggaagtgatgagaaactctcaggaaactctgttaaccattgtagaggtccttctatatgatccactctttgactggaccatgaatcctttgaaagctttgtatttacagcagaggccggaagatgaaactgagcttcaccctactctgaatgcagatgaccaagaatgcaaacgaaatctcagtgatattgaccagagtttcaacaaagtagctgaacgtgtcttaatgagactacaagagaaactgaaaggagtggaagaaggcactgtgctcagtgttggtggacaagtgaatttgctcatacagcaggccatagaccccaaaaatctcagccgacttttcccaggatggaaagcttgggtgtgatcttcagtatatgaattaccctttcattcagcctttagaaattatattttagcctttatttttaacctgccaacatactttaagtagggattaatatttaagtgaactattgtgggtttttttgaatgttggttttaatacttgatttaatcacccactcaaaaatgttttgatggtcttaaggaaaaatctctgctttcactctttagaaataatggtcattcgggctgggccgccaagggtcacgcctgtaatcccagcactttgggaggccgaggtgagcggatcacaaaggtcaggagttcgagaccagcctggccaagagaccagcctggccagtatggtgaaaccctgtctctactaaaaatacaaaaattagccgagcatggtggcgggcacctgtaatcccagctactcgagaggctgaggcaggagaatctcttgaacctgggaggtgaaggttgctgtgggccaaaatcatgccattgcactccagcctgggtgacaagagcgaaactccatctcaaaaaaaaaaaaaaaaaacagaaacttatttggatttttcctagtaagatcactcagtgttactaaataatgaagttgttatggagaacaaatttcaaagacacagttagtgtagttactatttttttaagtgtgtattaaaacttctcattctattctctttatcttttaagcccttctgtactgtccatgtatgttatctttctgtgataacttcatagattgccttctagttcatgaattctcttgtcagatgtatataatctcttttaccctatccattgggcttcttctttcagaaattgtttttcatttctaattatgcatcatttttcagatctctgtttcttgatgtcatttttaatgtttttttaatgttttttatgtcactaattattttaaatgtctgtacctgatagacactgtaatagttctattaaatttagttcctgctgtttatatctgttgatttttgtatttgataggctgttcatccagttttgtctttttgaaaagtgagtttattttcagcaaggctttatctatgggaatcttgagtgtctgtttatgtcatattcccagggctgttgctgcacacaagcccattcttattttaatttcttggctttagggtttccatacctgaagtgtagcataaatactgataggagatttcccaggccaaggcaaacacacttcctcctcatctccttgtgctagtgggcagaatatttgattgatgcctttttcactgagagtataagcttccatgtgtcccacctttatggcaggggtggaaggaggtacatttaattcccactgcctgcctttggcaagccctgggttctttgctccccatatagatgtctaagctaaaagccgtgggttaatgagactggcaaattgttccaggacagctacagcatcagctcacatattcacctctctggtttttcattcccctcatttttttctgagacagagtcttgctctgtcacccaggctggagtgcagtggcatgatctcagctcactgaaacctctgcctcctgggttcaagcaattctcctgcctcagcctcccgagtagctgggactacaggcgtgtgccaacacgcccggctaattttttgtatttttattagagacggagtttcaccgtgttagccaggatggtctcgatcgcttgacctcgtgatccaccctcctcggcctcccaaagtgctgggattacaggtgtgagccaccgcgcccggcctcattcccctcatttttgaccgtaaggatttcccctttcttgtaagttctgctatgtatttaaaagaatgttttctacattttatccagcatttctctgtgttctgttggaagggaagggcttaggtatctagtttgatacataggtagaagtggaacatttctctgtcccccagctgtcatcatataagataaacatcagataaaaagccacctgaaagtaaaactactgactcgtgtattagtgagtataatctcttctccatccttaggaaaatgttcatcccagctgcggagattaacaaatgggtgattgagctttctcctcgtatttggaccttgaaggttatataaatttttttcttatgaagagttggcatttctttttattgccaatggcaggcactcattcatatttgatctcctcaccttcccctcccctaaaaccaatctccagaactttttggactataaatttcttggtttgacttctggagaactgttcagaatattactttgcatttcaaattacaaacttaccttggtgtatctttttcttacaagctgcctaaatgaatatttggtatatattggtagttttattactatagtaaatcaaggaaatgcagtaaacttaaaatgtctttaagaaagccctgaaatcttcatgggtgaaattagaaattatcaactagataatagtatagataaatgaatttgtagctaattcttgctagttgttgcatccagagagctttgaataacatcattaatctactctttagccttgcatggtatgctatgaggctcctgttctgttcaagtattctaatcaatggctttgaaaagtttatcaaatttacatacagatcacaagcctaggagaaataactaattcacagatgacagaattaagattataaaagattttttttttgtaattttagtagagacagggttgccattgtattccagccttggcgacagagcaagactctgcctcaaaaaaaaaaaaaaaaaggttttggcaagctggaactctttctgcaaatgactaagatagaaaactgccaaggacaaatgaggagtagttagattttgaaaatattaatcatagaatagttgttgtatgctaagtcactgacccatattatgtacagcatttctgatctttactttgcaagattagtgatactatcccaatacactgctggagaaatcagaatttggagaaataagttgtccaaggcaagaagatagtaaattataagtacaagtgtaatatggacagtatctaacttgaaaagatttcaggcgaaaagaatctggggtttgccagtcagttgctcaaaaggtcaatgaaaaccaaatagtgaagctatcagagaagctaataaattatagactgcttgaacagttgtgtccagattaagggagataatagctttcccaccctactttgtgcaggtcatacctccccaaagtgtttacctaatcagtaggttcacaaactcttggtcattatagtatatgcctaaaatgtatgcacttaggaatgctaaaaatttaaatatggtctaaagcaaataaaagcaaagaggaaaaactttggacatcgtaaagactagaatagtcttttaaaaagaaagccagtatattggtttgaaatatagagatgtgtcccaatttcaagtattttaattgcaccttaatgaaattatctattttctatagattttagtactattgaatgtattactttactgttacctgaatttattataaagtgtttttgaataaataattctaaaagc

SEQ ID NO: 148491 - DNA, 845 bp, Homo sapiens
agcgattctcctgcctcagcctctcaagtagctgggattacagggcacctgccaccacgcctggctaatttttgtattttagtggagacggggtttcaccatgctggccagactggtctcgaactcctgacctcaggtgatccgcccgcctcagcctctgaaattgctgggattacaggcatgagccaccacacccagcccggacagcttctttgggagtgctgctaaccttgaaattatcagacacttaggaagttattaagtgctaaaaaggggaccgttgcaaaggcagcaagaagttacatgggttcttcaaaatcaatggtctggaaccctattccttgggaatccttcctcctaataaataaaggggaagttcctctttaccccacttggccacatacctctggttttaaaaagattaagtccacttaactggtgagtaaaaatgatatatataggcattaaccacacacttttaatggggtataatttcctggcttgccttccctttccttcagccccatttaggttaaacacccaaagaaagactggtgtgtactgaataggaaagggaagttttatttggaaccttctaagaggaaatcaaccaggaccaaagagccttaaaggacacacagcaatgcacagccacttcccttccccagcttggctgccctaggtgatttctcaagctccttgggggactgttgtttctcatctggaatcaatgtgtgtatgagttttgtctggtaggattgctgactctgtccaacagatatcactgtgaattgaataaatttgttgaaagagcacacaggcacacatacaaaaaaaaaaaaaaa

SEQ ID NO: 148492 - DNA, 1106 bp, Homo sapiens
gaaatggagttctgctcttgttgcctatgctggagtgacatggcaccatcttggctcactgcgatctccgcctcccgggttcaagcgattctgctgcctcagcctcccgagtagctgggattacaggcatgcgccaccacctccggctaattctttgtatttttagtaaagacagggtttctccacgttggtcaggctggtctcgaactaccgatctcaggtgatccgcccgccttggctcccaaacaaagtgcttggattagaggcgtgagccaccgcgcccagccccaaaactaagatttttaaagagtacttattaatttcatctttatcctgtacttgggtcatatatatgtatgtgtgtgtgtgtatatgtgtatatatatgtttaaataaaatttaactgatacgtgatatttaatctcaacaaagagctttacatttatacacaatatgtttcattctactagttttaaactttctagagtttggaagtccttttcttcctgtctctttttaaaaatccaaattcttttattcagagtatacaccctctgtcatgggcatctgctgctcttgcctccctggtgaagccgtcctggttttcttgtggaacatcatccttcacatagcaatccatgtgctgtggctgggctgaccatcctccacatcccgaggcaggcgtgtgaccccagccagggccaaagtagcaccagcctggcaactttcctcccaaggaggatacagggatgagcctggcggggggtgtgtccaacgcagaggacagcaggtcccgcaggggaagagatgaagtgctgatgacgctctgtgagccctgcgtccagcccaggcctgtgccacccaggtcttcctctcatataagcagttcaacaatggtttctgcccctttcagctgacagacttgtctaacagagcatctctccgaattctgtcactgcagcttcaaccatcattttcttacaggatgggctggtggtgacaaggggtccagggggtttgttccagggctgtgtttccctagcaaggatagtttttgtgtttcatgtgtgtttgggcggcttagtggggtgcaatggatttgtgtg

SEQ ID NO: 148493 - DNA, 319 bp, Homo sapiens
  misc_feature (1)...(319): n = a,t,c or g
cttgggggcttggtcttcccaagtgaggttgtctgcaagagaaactggatggcatgcagctcataaaggttcatttggacaaagcacagcagaacaatgttgaaaacaaggctgaaactttttctggtgtctgtaagaagcacagggatttgatggctccnnnnnnnnnnnnnnnnnnnnnnnnnnnnnnnnnnnnnnnnnnnnnnnnnnnnnnnnnnnnttgacatcaacctaggcnnnnnnnnnnnnnnnnnnnnnnnnnnnnnnnnnnnnnnnnnnnnnnnnnnnnnnnnnnnnnnnnnnnnnnnnnnnnnnnacc

SEQ ID NO: 148494 - DNA, 474 bp, Homo sapiens
  misc_feature (1)...(474): n = a,t,c or g
ccaggagaaagccatgttcagttcgagcgccaagatcgtgaagcccaatggcgagaagccggacgagttcgagtccggcatctcccaggaaattgaagttggtggtggtcggaaagctatcataatctttgttcccgttcctcaactgaaatctttccagaaaatccaagtccggctagtacgcgaattggagaaaaagttcagtgggaagcatgtcgtctttatcgctcagaggagaattctgcctaagccaactcgaaaaagccgtacaaaaaataagcaaaagcgtcccaggagccgtactctgacagctgtgcacgatgccatccttgaggacttggtcttcccaagcgaaattntgggcaagagaatccgcgtcaaactagatggcagccggctcataaaggttcatttggacaaagcacagcagaacaatgtggaacacaaggttgaaactttttctggtgtctataa

SEQ ID NO: 148495 - DNA, 670 bp, Homo sapiens
  misc_feature (1)...(670): n = a,t,c or g
gtcgaccggcaagttctcccaggagaaagccatgttcagttcgagcgccaagatcgtgaagcccaatggcgagaagccggacgagttcgagtccggcatctcccaggctcttctggagctggagatgaactcggacctcaaggctcagctcagggagctgaatattacggcagctaaggaaattgaagttggtggtggtcggaaagctatcataatctttgttcccgttcctcaactgaaatctttccagaaaatccaagtccggctagtacgcgaattggagaaaaagttccagtgggaaagcatgtccgtctttatcgctcaggaggagaattctgccttaagccaactcgaaaaagccgtacaaaaaataagcaaaagcgtcccaggagccgtactctgacagctgtgcacgatgccatccttgaggacttggtcttcccaagcgaaattgtgggcaagagaatccgcgtcaaactagatggcagccggctcataaaggttcatttggacaaagcacagcagaacaatgtggaacacaaggttgaaactttttctggtgtctataagaagcacagggatttgatggctnnnnnnnnnnnnnnnnnnnnnnnnnnnnnnnnnnnnnnnnnnnnnnnnnnnnnnnnnnnnnnttgacatcagcctaggc

SEQ ID NO: 148496 - DNA, 322 bp, Homo sapiens
ggttttaccatgttgcccagctggtcttgaactcctgggttcaaatgatctgcctgccttggcctcccaaaatgctgagcttacaggcatgagcactgcacccggcctatgaagatacttttatatctattcaataataaaaaaagatgattttaaaagacataaaatatatgacagatcaatgtacaggtctctatgggatgtaaaaacagaaagcacagctccttcttgttgaatatggttaaacaggaaaacacataaaaagctaggcaatcatggaataatgttttcccaaacattgataggagaggtatctcaaggc

SEQ ID NO: 148497 - DNA, 304 bp, Homo sapiens; identical to SEQ ID NO: 12586

SEQ ID NO: 148498 - DNA, 2013 bp, Homo sapiens
attccggttgttgcaccatggcgtccatggggaccctcgccttcgatgaatatgggcgccctttcctcatcatcaaggatcaggaccgcaagtcccgtcttatgggacttgaggccctcaagtctcatataatggcagcaaaggctgtagcaaatacaatgagaacatcacttggaccaaatgggcttgataagatgatggtggataaggatggagatgtgactgtaactaatgatggggccaccatcttaagcatgatggatgttgatcatcagattgccaagctgatggtggaactgtccaagtctcaggatgatgaaattggagatggaaccacaggagtggttgtcctggctggtgccttgttagaagaagcggagcaattgctagaccgaggcattcacccaatcagaatagccgatggctatgagcaggctgctcgtgttgctattgaacacctggacaagatcagcgatagcgtccttgttgacataaaggacaccgaacccctgattcagacagcaaaaaccacgctgggctccaaagtggtcaacagttgtcaccgacagatggctgagattgctgtgaatgccgtcctcactgtagcagatatggagcggagagacgttgactttgagcttatcaaagtagaaggcaaagtgggcggcaggctggaggacactaaactgattaagggcgtgattgtggacaaggatttcagtcacccacagatgccaaaaaaagtggaagatgcgaagattgcaattctcacatgtccatttgaaccacccaaaccaaaaacaaagcataagctggatgtgacctctgtcgaagattataaagcccttcagaaatacgaaaaggagaaatttgaagagatgattcaacaaattaaagagactggtgctaacctagcaatttgtcagtggggctttgatgatgaagcaaatcacttacttcttcagaacaacttgcctgcggttcgctgggtaggaggacctgaaattgagctgattgccatcgcaacaggagggcggatcgtccccaggttctcagagctcacagccgagaagctgggctttgctggtctggacaagaggatctcatttggggacacctaaggattaaaatgctggtcatcgagcagtgtaagaactccagagctggtaaccatttttattagaggaggaaataagatgatcattgaggaggcgaaacgatccctttcacgatgctttgtgtgtcatccggaacctcatccgcgataatcgtgtggtgtatggaggagggggctgctgagatatcctgtgccctggcagtttagcccaagacgcgcactaaggtgcccccaccttaagacagtatgcccatgaggagcgtttgcccgacgccactggaggtccatccccccatggcccctctctgaaacccagtggccatgaatccccatcccagacctatggacccgaagtcccgagcccagacaggtgaaggagatgaacccctgctcttgggcatcgacctgtttgccacaagggggacaaaatgatataaagcaccagccatgtcaaaggaacccttgattggccaaaaagccaacagattatctcttgcaacaccaaatggttaagaatgattttssakgattgatgacattcgtaagcctggagaatctgaagatatgaagacattgggaaaaactaatgtagcaagatcccacttctggtaattaagtaagatggatgtctcgtgatgcgtctacagttatttattgttacatccttttccagacactgtagatgctataataaaaaatagctgtttggtaaccatagtttcacttgttcaaagctgtgtaatcgtgggggtaccatcttcaactggtttttgtattcattgtattaaaagaatctgtttaaacaacctttatcttctcttcgggtttaagaaacgtttattgtaacagtaattaaatgctgcccttaattgaaaaaaaaaaaaaaaaaaaaagac

SEQ ID NO: 148499 - DNA, 357 bp, Homo sapiens
ctgccatcgtcaactcacaccattccagggtatccgagaccccttgcaccctaggccatttcctagctcccgccttcctccaggaattatcgggggtgaatatgaccaaagaccaacacttccctatgttggagacccaatcagttcactcattcctggtcctggggagacgcccagccagtttcctccactgagaccacgctttgatccagttggcccaatgacagatttccctttagacccagcaggggtcggccaactgatggccggctgtcattcatgtgattgatttgtaatttcatttctggagctccatttgtttttgtttctaaactacagatgtcaactccttggggt

SEQ ID NO: 148500 - DNA, 464 bp, Homo sapiens; identical to SEQ ID NO: 132661
  misc_feature (1)...(464): n = a,t,c or g

SEQ ID NO: 148501 - DNA, 2163 bp, Homo sapiens
gagaggggcgggcgctctattccagagaccgagtggcagggcggccactgtggcggggctctttccccgtttcgcctcagctacccctcagctccggtagtcgccagtccggggtcgtcgccgtttggggcgggagctgctcggccccgccgccgtccccgtcgccgcttccgggtccaggcccctcgggccgcctgccgccgtcatgaggctgcgggtgcggcttctgaagcggacctggccgctggaggtgcccgagacggagccgacgctggggcatttgcgctcgcacctgaggcagtccctgctgtgcacctgggggtacagttctaatacccgatttacaattacattgaactacaaggatcccctcactggagatgaagagaccttggcttcatatgggattgtttctggggacttgatatgtttgattcttcaagatgacattccagcgcctaatataccttcatccacagattcagagcattcttcactccagaataatgagcaaccctctttggccaccagctccaatcagactagcatgcaggatgaacaaccaagtgattcattccaaggacaggcagcccagtctggtgtttggaatgacgacagtatgttagggcctagtcaaaattttgaagctgagtcaattcaagataatgcgcatatggcagagggcacaggtttctatccctcagaacccatgctctgtagtgaatcggtggaagggcaagtgccacattcattagagaccttgtatcaatcagctgactgttctgatgccaatgatgccttgatagtgttgatacatcttctcatgttggagtcaggttacatacctcagggcaccgaagccaaagcactgtccatgccggagaagtggaagttgagcggggtgtataagctgcagtacatgcatcctctctgcgagggcagctccgctactctcacctgtgtgcctttgggaaacctgattgttgtaaatgctacactaaaaatcaacaatgagattagaagtgtgaaaagattgcagctgctaccagaatcttttatttgcaaagagaaactaggggaaaatgtagccaacatatacaaagatcttcagaaactctctcgcctctttaaagaccagctggtgtatcctcttctggcttttacccgacaagcactgaacctaccagatgtatttgggttggtcgtcctcccattggaactgaaactacggatcttccgacttctggatgttcgttccgtcttgtctttgtctgcggtttgtcgtgacctctttactgcttcaaatgacccactcctgtggaggtttttatatctgcgtgattttcgagacaatactgtcagagggtcaagacacagattggaaagaactgtacaggaagaggcacatacaaagaaaagaatccccgaaagggcgtgtttgtgatgctcctgccatcgtcaactcacaccattccattctatcccaaccccttgcaccctagggccatttcctaagctcccgcctttcctccaggaatttatcgggggtgaatatgacccaaagaccaacactttccctatgttgggagacccaatcagttcactcattccctgggtcctgggggagacgccccagccaagtttccctcccactgagacccacgctttgaatccaagttggcccccaatttccagggaccctaacccccaatcttgcccaggggccgagggcgggccccccaatggaccagatttccccctttaagaccccagccagggggtcgggccaacttgatggccggcctggtcatttcatgtggattggatttgttaattttcatttcctggagcctcccatttgttttttgtttcttaaactacagatgtcaacgtccttggggtgctgatctccgagtgttattttcctgattgtggtgttgagagttgcactccccagaaacccttttaagagatacgatttatagccctaggggtggtaatgaccccaaaggttccctctggtgacaaggttgggccttggggaatagttggctgccaatctcccctgctcttggttctcctctagattgaagtttgttttctgatgctgttcttaccgagattaaaaaaaaagtgtaaattaaaaaaaaaaaaaacaaaaaa

SEQ ID NO: 148502 - DNA, 442 bp, Homo sapiens
cctgtcccagctctgcggagacccacagcgctttgatgactttctccgagcctatgtggagaagtacaagttcaccagcgtggtggcccaggacctgctggactccttcctgagcttcttcccggagctgaaggagcagagcgtggactgccgggcaggcccgccgctggctgagccggacctgtctcagggatccagcctgacccggcccgtggaggcccttttccagctgtgaccgcagaacctctggaccaggcagctgcctcggccagcgccattgacatctccaagtggaggaccttccagacagcactcttcctggaccggctcctggatgggtccccgctgccgcaggaggtggtgatgagcctgtccaagtgctactcctccctgctggactcgatgaacgctgagatccgcatccgctggctgcagattgtgg

SEQ ID NO: 148503 - DNA, 2048 bp, Homo sapiens
  misc_feature (1)...(2048): n = a,t,c or g
ggtgagttcctggtcatcgatgtcatccacgaggtggcccacagttggttcggcaacgctgtcaccaacgccacgtgggaagagatgtggctgagcgagggcctggccacctatgcccagcgccgtatcaccaccgagacctacggtgctgccttcacctgcctggagactgccttccgcctggacgccctgcaccggcagatgaagcttctgggagaggacagcccggtcagcaaactgcaggtcaagctggagccaggagtgaatcccagccacctgaggaacctgttcacctacgagaagggctactgcttcgtgtactacctgtcccagctctgcggagacccacagcgctttgatgactttctccgagcctatgtgggagaagtacaagttcaccagcgtggtggcccaggacctgctggactccttcctgagcttcttcccggagctgaaggagcagagcgtggactgccgggcagggctggaattcgagcgctggctcaatgccacaggcccgccgctggctgagccggacctgtctcagggatccagcctgacccggcccgtggaggcccttttccagctgtggaccgcagaacctctggaccaggcagctgcctcggccagcgccattgacatctccaagtggaggaccttccagacagcactcttcctgggaccggctcctggatgggtccccgctgccgcaggaggtggtgatgagcctgtccaagtgctactcctccctgctggactcgatgaacgctgagatccgcatccgctggctgcagattgtggtccgcaacgactactattccttgacctccacagggtgcggcgttttcctgggagagccagatgtcacgcatgttacaccatcccgctgtacgaggacctctgcaccggtgccctcaagtccttcgcgctggaggtcttctaccagacgcagggccggctgcaccccaacctgcgcagagccatccagcagatcctgtcccagggcctggggttccagcacagagcccggccttaggagcccagcacgggagctgggcaaggctgaagcagacacagactcggacgcacaggccctgctgcttggggacgaggcccccagcagtgccatctctctcagggacgtcaatgtgtctgcctagccctgttggcgggctgaccctcgacctcccagacaccacaattgtgccttctgtgggccaggcctgccatgactgcgtctcggctctggccatgagctctgcccaggcccacaagcccctcccctgggctctcccaggcagggagaatggggagagggacctccttgtgtctggcagagacctgtggacctggcctccccactcccagctctcttgcactgcaggccctggggccagcccgcacacaccatgcctcctgtctcaacactgacagctgtgcctagccccggatgccagcacctgccaggtgccgccccggggcaagggccccagcagccctatggtgaccgccacactgtgccttaatgtctgccgggggcccaggctgtgctgtccctgcagcacgcctccttggnagggattagaacccaccctccccgcacagccctgcaccccgcccctaagggttggcagcctcagttggcccctggcagaggaacaaggacacagacattccctcagtgtggggggcaggggacacaagggagaggatggtttgcccctggggagggccctctggccccaggcaaccttagcccctcaagaacagggagtcccaggacccagggagagtgtggggacaggacagcctgtctcttgtagcttcctggggtgggaggcacaggggcaaagcaaataccccagggaaagtgggaggtggtgctggtgctctctccaggcccaccatgctgggagaggcggccagagcctgggggcctccagcctgggactgctgtgatggggtatcacggtgatggtcccattaaacttaccactctgcaaaaaaaaaaaaaaaaaaaaaaaaaaaaaaaaaaaagggcggccgct

SEQ ID NO: 148504 - DNA, 915 bp, Homo sapiens
atgttctcggtcctctcgtacgggcggctggtggcccgcgccgtgctcggcggcctctcgcagaccgaccccagggccggcggcggcggcggcggcgactacggactggtgacggccggctgcggcttcgggaaggacttccgtaagggcctcctcaagaagggcgcgtgctacggggacgacgcgtgcttcgtggcccggcaccgttccgcggacgtgctcggggttgcagatggtgtaggaggctggagagactatggagttgatccatctcaattctcagggactttaatgcggacgtgtgaacgtttagtaaaagaaggacggttcgtacctagtaatcccattggaattctcaccacaagctactgtgagttgctgcaaaataaagtccctttgctcggtagcagcaccgcctgcattgtggtgctggacagaaccagccaccgcttacacacagcaaacctgggcgattcaggcttcctggttgtcaggggtggtgaagtcgtgcaccgatcagatgagcagcagcattacttcaacactccattccagctctcaatcgctccccctgaagccgagggagtcgtcttgagcgacagtccggatgctgctgatagcacgtctttcgatgtccagctaggagacattatcctgacggcaacagatggactctttgacaacatgcctgattatatgattcttcaggagctaaaaaagttaaagaattcaaattatgagagtatacaacagactgccagaagcattgctgagcaagctcatgagctggcctatgacccaaattatatgtcaccttttgcacagtttgcatgtgacaatggattgaatgtgagaggtggaaagccagatgacatcaccgtccttctttcaatagtggctgagtatacagactag

SEQ ID NO: 148505 - DNA, 332 bp, Homo sapiens
atatatgtctaaaaaattctcagctctgttacaaagtcaggaacggaattgtttaattataataaattggtgctctagtctgtgtcttagggtcagattgtatcttaggcaagtaacagtgatacccagaatatgcaaagtgtccgactactccctgtgctcctgaagctgatgctatgttcgcctttaatgctgatggagtgggagatgccaaaggctgaatcattgggtttatcctctgttaagaaccttaagtgctgcagcctagtgagagtgcaatgctccgcggggttctcagcaggcctcttcatgctgtgactgccaggataaag

SEQ ID NO: 148506 - DNA, 4243 bp, Homo sapiens
tctgcaaatgctacaacaaagaccagcgaaacaaatcacacctcaaggccccggctgaaaaacgtggacaggagcactgcacagcagttggcagtaactgtgggcaacgtcaccgtcattatcacagactttaagggaaaagactcgctcctcatcggacatcctcatccacagtgacctcccagtgcagggtcaggaacagcagaacccagagcagctcgggggtccagagagcaccggacaaagggcttcctccccgttccctcccaaccccaaagggcgacatgtcaagcagtcaatgatgaaatctttcctgaaattgccacatggaattgtgaaaaactatgaatcagggtatgaaattcaaaacctcccacctgcccatgctgcttgcatccctggagaatcttctgtggacatcgacctcttagtgatgctgcccaggataatttctgcttgccatgggcatctggccaccaaggaatttcgcaccctgacgattactcttgacacttttaatgtattccattgttttatatgattttcctaacaatcatttataattggatgtgctcctgaatctactttttataaaaaaaaaaaaaaaatctgctgtgcacaattttccatgtaccattacaactggttttttgtttttgttttgttgccggtggggagggctgggagggggagggaacttttatttattgtgttcacaaactccatcctttcagcatatccttttaagtttagttctttcttccagttatactatgtactatcagttttgatataactatatatatataaatataaaattatatataaagggttatttgaaaccaatccatggcaaacgctggtgcttgatacactgtgaagtgaatacaacattgaacagttacagatctgggacagtcccttctatgaaagtgctgaaatttaattaaaatcagtcttacatgaagtatgttccaatccatgtgggaacttgactctctcatctgtccaaaagagtactggacgattataaaaatatatatttttttaaacaatgtgatctcaaatttaaagactgctccagataggcctgcatttgcaattggaataactgacaaatcacaagtggtttagttggggcaggggctttgatcattcaaaagtaactaaagtagctccagaatgccaagtattcgtggtaaattacggttacatgttatcatttgctgttctaacataggcactcatggaaaatatgggtattctgtaacttggaattccatccattttccagacggtctactcatgtctgagggtaaatctaggaaattgtcttaggttttagggattggaaacagtctataaaactgtatttttgggtccatcccaggaaagctagtcccctgtttcctccctttcctaacatgacattggcagtgggtgggtttcctgtaattaaaatttggtttgccctcatgtcccctttgtcctgataaaccttccactctacccgattcaagttgtgaagcattcctttttttccctcctcaaaaccctacctatgatttgttttaactgaacaaaggttatcaacccacacatccaggtcctggacatgggagcttttcagtgtttggagacatttctcaatcccctgctgtggtaggaactccagtggtgaacggcttgcgcgcctgcagccagagttgcagggaaagctcgtacttactgcgagcagcatgtaatcttttttcttcctggacataaagatagcttgagtaaactgttctatttcattctcttcactctttttactgtcttgcaaaaaaaaaaataataataataataatcaaagaccactaataagattccacctctccttattaaaataattttttaaaattttgttttgcttttgtttggatgtggggtctctcttctatttgacttttacatttagatacagagtttgtagtacttcagagacatttcaagcatgagaatttgaggttacctctctttatttgacctttagggactcacgggagggcagcctgatttgtaatgaagcaccacattttggtgttaaaaacctggtttgcttaataatagcagtaatttctgtctgtggaggcaacaaataaaaaaattaacagcttgaattgagtagccaacaggaaaggttcctttcacatttacattaaaactattctgtagtcactaatgtaccataatttaaattcttttctcaaaggtatagattataaagcagtgccatttgttgctgtggtcctattctcaaatgcatggacaatgttcccccctttttaaaataatgcttgtgtctgggatgcaagctttgcttatctttttaaatacatttttaaagtatttattaatgaaccaaaggaaatcagatgctttctataagcatcagaatatataatacatagtgatttgactatgaattttaaatccacattttaatattggtgggatattgcaaagacattccttctaaagttttaatattccttttattaagggtctcagggagggtaaattagtcagccatatttattttccagaggtttaaggaaattgctgtttttaactttttggaaaaaacttaaatgccacccaaactcatgtaggggtggcactgcttattggaacccattaactgttggggatggcactttgttcagacacactgtgtactttttcaaaaactagtttcatgtaaagtgattggaccccatagattagtgggaaaaagctgattaaccagctactcatagggctgctaattcattcatgccaatgttttggtttttcagttttgcctccgtgataaattaaagaatggggaggggtgaaggaaggggaagaagattgctttagaacaagtgggcatgaaattacccatctttgtaggaaaccgcagctaacagtggggagttatctaaggcaatcagatgttacagggccagccctttagctgctgtgggtgtattctgttgggtagtgaggtagtaggtactttatagacttttaattttgggaaattgatgacatccctcagggcatgtattctggaaatggaattcctgtaacttcctgtgttctggcagtatgcccctaccattagtagggcagcgtgtaaaaaccactagtgtaggattataaaggatatacattaaaagaggaccacaaatacttggtatttactggcacagaaagcagggtaaacgaacaaaaagcacagtgttaccgcttgcaagtttccatttgtttttaataccacggcaatctttcacacttcgtgcgtgtgcgcggcacacaggagctttaccctgacttgctctgcttgagtcatgcagttacaaaaaaaaaaggacatcttggacacccacacaatatttctaatccaaaacctttcagtttcaatctggatatttaaaaacattggcagaagcctctgtgagtttagttccactaagatgtttcacctgccttatcaagaccattgctcggtctacttttttaagctaccgtatcttaaattattgaaaatttattaattgctgaatatataataaccttttgcttggatgtaacccgaaaatggtttaagagccaacatttagagtatggacaatgggagctgaacagtttttaatgcgcaagcagttctgttcttgtgtatgacttgtaacccttaatttactgtgtaaagatggttacattatttccttagctttgtttgttggagacagaatagagaatgcttgttaagtatgtcagaacataatcttcccttgtgaatttttggtaaatggtattataccgagctataatttttccatttgccccagaaaagacaggcttgttataacggcttttgggaagtttctggctctgtaaatgtctttaggagctgacagtctgttaggtttgtttttttccttcatgctaaagtgtcagttggtagttttgagaactggtcaaaaattcacagatcttaaaagttttgagggaaatattatattagacactgctcttagatctagcaaataaaagatgttaatatattcctgttactggcatgtgcacgactatgttattagaagccactttatcattttcctgctttaaatagaaatgtctatttatgaattctgcttgtagttttttcacaaataaaatagtaaaatttacattggaaaaaaaaaaaaaaaaa

SEQ ID NO: 148507 - DNA, 368 bp, Homo sapiens
actttgtggagtggagagcatttgtgtttgtcactgtgcagtagggcaggctgtcattgaactaattacctataattgcagccttttatgtcaccgcgatacgcaggcggccccaggcccccgatcagaatgggaaaccagcctccgggaggagttcctgggacacagccattgctgcccaattctatggatcccacacgacaacaaggccaccccaacatgggaggatcaatgcagagaatgaaccctccccgaggcatggggcccatgggtcccggcccacagaattacggcagcggcatgagaccaccacccaactccctcggccccgccatgcccgggattaacatgggcccgggagctggcag

SEQ ID NO: 148508 - DNA, 1994 bp, Homo sapiens
  misc_feature (1)...(1994): n = a,t,c or g
atgtttgccaaaggcagaggctcggcggtgccctcggatgggcaggcttgggaaaagttagcttcatacgtctacgaatatttactgcacgtaagagtacagaaatctgcagagaccttcttgtcggagattcgatgggaaaaaaacatcacgttgggagaaccgcctgggtttttgcactcgtggtggtgtgtatttggggacctttactgtgcagctcctcaaaggagagacacttgtgaacattcaagtgaagcaaaagcctttcatgattatagtgcagcagctgccccgagccccgtgcttggcaacattccccccaacgatgggatgccgggaggccccatcccgccaggtttctttcagggtcctccggggtcacagccctcgccgcacgcacagcctccacctcacaatcctagcagcatgatgggaccccacagtcagccttttatgtcaccgcgatacgcaggcggccccaggccccccgatcagaatgggaaaccagcctccgggaggagttcctggggacacagccattgctgcccaaattctatggatcccacacgacaacaaggccaccccaaacatgggaggatcaatgcagagaatgaacccttccccgaggccattggggcccatggggtcncggccccacagaattacgggcagcggcatgagaccaccacccaactccctcggccccgccaatgccccgggattaacatgggcccgggagctggcagaccctggcccaatcctaacagtgctaactcaattccatactcctcctcatcacctggtacctatgtgggaccccctggtggtggcggtcctccaggaacacccattatgcccagtcccgcagattcaacaaattccagtgacaacatcttacacaatgattaaatccagttgccgcctggaggcagccggtccaatttccagatgggtcctggctcgacaggtccgatggacagcatgggtggcatggagccacaccacatgattggtttcattagggtcaggcgacatagacggacttccaaaaatttttcctaacaacataagtggcattagcaatcctccaggcacccctcgagatgacggcgagctaggagggaacttcctccactcctttcagaacgacaattattctccaagcatgacgatgagtgtgtgatccccccttctccggagacgctgagagagcaggcattgcaggcgggaagatgccagaaattatgcaagaagtgaggtgtcattatccaggagcttgttgggggagggcatctcccatgatccccatcaaccccctcccaccccatccacggccccctaaccttttcccaattttagttttcatgcaaataaaaaagggccaaacttttttaattccataaaacaagaagggacaaaacttctcaaaaaatgtatttcaaagtcagtgaccagaaaaatcccaccccttgcccttttccccaaaggacctttttctgtacatgacacttttttgttgttttttgtttgggggttttaccattgttggggatttttttatttgttttgcaggggggttttttggggggaaaatttttttaaatggggagctttttagcaaggccccccaccccaatcaacctttatgctttttttttaaaaaaaaaaaaaaaaggaaaaaggaaaaaaaaaaaaggaaaaccagaagccctgctgtctgtctgtgcccaagcccttccaccagaaaagctagtctaggtgtgagagcccacattgtctgtagccatcaaaaataataataataaactgaacagtttacaatcgttggtttctttcaaaaggccttttttggaaagaagaaaaggcagtcaccgttttccacttggggttttggtttgtgcaacaggcaggggaggagtggggacgcgtttgttctagcttgatttccatggcaacagcagcggcacgcttggaccccagaacccagcaccctc

SEQ ID NO: 148509 - DNA, 983 bp, Homo sapiens
catccctacatttggtctccctggctccatacaatcagacaatggcccctagcttcatctcccaaatcactcaacaggtttctcagtcccttggcatccagtggcgtctccatatcccatgctggccccagacatccggaaaagtcgaaagggcaaatgggatccttaaggctcagttaaccaaactcactcttgaagtccaaaaaccatgggacctcccttttgccccataggcactgggagagcattaggaggccagtccaaaaggcaccctcctttccttcagttccatttggagtttaatatacgggacgccctttcctcttacaaaacaggcccccttctaactctcagctagggggaataccttcccaacagtcttccctcatggaggttatcttcctctggccaacaaggccgaccagggccttcccaaaaccccacggagggggtcttccaattcccaaataggactttgcttttccaatttccaaaaggactcttttaaggcaggcagtggacactttcaaaaccattcgagggtttaggatctccttcactgccgaggaaagggcgggcctgtgttatcttttttaggaagggggagtgctgttttttattacttaaccagttcagggattaggttacaaggtggctgctgggacggattaattgaaaaaaggttttgggccgggtgcagtgggcttcacgcctgttattcccaggatctttggggaggcttgagggcggggcggattcacggaggttcagggagatccgaggacccttctttgggttaacacgggtgaaaccccgttctctactaaaaataggaaaaaattagccgggcgtgggtggccggcggcttgttacttcccagctacttcagggagggctgagggcagggagaatgggcgtgtgggggtgaacccggggaggcggagcttgcagtgagcagagatgatgccactgcactccagcct

SEQ ID NO: 148510 - DNA, 654 bp, Homo sapiens
  misc_feature (1)...(654): n = a,t,c or g
ttttttctttaaaagcaatttatttctgattacaaaatacaggtgaggagcatgggcgatgcctgtaaccccttggttgtgcatcttcccagtctatttctgcttctagaaataccctgtgtacaacagcaagctcatgctgtccccaagtgcttgcacattctaacagctgcagagtatatgaccaggtggaaagtccaacagatgccccactcacaagatagggccctccaatcagtcttttgtgctccttttcactcatagtaactggttgctcttcctactggtcatagataaatgacacctgcacaattctccgagtgctttcaagcaacttcgggaggcagtgactaagaccctttccttgctcccagcttcctatgtcccagggctgcctgtggcacctggactgctgctgcccctgggtcccgtacattccagggcaacaatggaggaagggcaggcaacgcatgaggaattaacagtctttattgggctcagaccaggagtccgtgggtcttgaggcaatttttctcctcacgttcttctcggcctgttccgtagcctcatgagctgtttcttcttccggtagtgatcctggctttctctttcctcttctccttcagnggtgcnntgcactgcctgtacttncca

SEQ ID NO: 148511 - DNA, 1671 bp, Homo sapiens
ggcgggagggccgcagctccggcgccgcgccgtcccgccagaacgatcgccgcggccggaagagttggcgctcggggcggactccttggaactggcttagcgcacccatcccaccttcccgcaccctgggaccggtccaacgagcgctcctccaagcggagccttggagggcacggccggcaccattacctccaacgagtggagctctcccacctcccctgaggggagcaccgcctctgggggcagtcaggcactggacaagcccatcgacaatgacggagagggcgtgtggagcccggatattgagcagagtttccaggaggccctcgccatctacccgccctgtggcaggcgcaaaatcatcctgtcggacgagggcaagatgtatggtcgaaacgagctgattgcccgctacatcaagctccggacagggaagacccgcaccaggaagcaggtctccagccacatccaggtgctggctcgtcgcaaagctcgcgagatccaggccaagctaaaggaccaggcagctaaggacaaggccctgcagagcatggctgccatgtcgtctgcacagatcatctccgccacggccttccacagtagcatgcgcctcgcccggggccccggccgcccagcagtctcagggttttggcaaggagctttgccaggccaagccgaaacgtcccatgatgtgaagcctttctctcagcaaacctatgctgtccagcctccgctgcctctgccagggtttgagtctcctgcagggcccgccccatcgccctctgcgcccccggcacccccatggcagggccgcaggcgtggccagctccaagctctggatgttggagttctctgccttcctggagcagcagcaggacccggacacgtacaacaagcacctgttcgtgcacattggccagtccagcccaagctacctgcgcccctacctcgaagccgtggacatccgccaaatctatgacaaattcccggagaaaaagggtggactcaaggatctcttcgaacggggaccctccaatgccttttttcttgtgaagttctgggcagacctcaacaccaacatcgaggatgaaggcagctccttctatggggtctccagccagtatgagagccccgagaacatgatcatcacctgctccacgaaggtctgctctttcggcaagcaggtggtggagaaagttgagacagagtatgctcgctatgagaatggacactactcttaccgcatccaccggtccccgctctgtgagtacatgatcaacttcatccacaagctcaagcacctccctgagaagtacatgatgaacagcgtgctggagaacttcaccatcctgcaggtggtcaccaacagagacacacaggagaccttgctgtgcattgcctatgtctttgaggtgtcagccagtgagcacggggctcagcaccacatctacaggctggtgaaagaatgagagactcggggagcagggaggggggaagagacgtgtgtgcaggaaacggggacgtggggaggggacctgcaggggccagccccctgaagtgccaagagagctgagaggagcagttgtgactctacccaggaacaaactgtgcctgaacctgaggtgcccaaccccaaataaacccaagatgctgtgtattttcagaggaaaa

SEQ ID NO: 148512 - DNA, 2529 bp, Homo sapiens
atgcccgctgctgcctgcagacaggacaagaagtctggacgcttctactcgtttacagaggcggagggcacggtggcagtcacacagggcaaggccgagggccgggcagctccctggagcctcccaagtgtgaagaaggcccaggagaaagtgtggggagaggagaggaggccgccagcgctgggtcggaacgagctgattgcccgctacatcaagctccggacagggaagacccgcaccaggaagcaggtgggcctcaagagacgggtaggggtcccgggggtggtaccccagcaccagtctgctcccaaggtctccagccacatccaggtgctggctcgtcgcaaagctcgcgagatccaggccaagctaaaggaccaggcagctaaggacaaggccctgcagagcatggctgccatgtcgtctgcacagatcatctccgccacggccttccacagtagcatggccctcgcccggggccccggccgcccagcagtctcagggttttggcaaggagctttgccaggccaagccggaacgtcccatgatgtgaagcctttctctcagcaaacctatgctgtccagcctccgctgcctctgccagggtttgagtctcctgcagggcccgccccatcgccctctgcgcccccggcacccccatggcagggccgcagcgtggccagctccaagctctggatgttggagttctctgccttcctggagcagcagcaggacccggacacgtacaacaagcacctgttcgtgcacattggccagtccagcccaagctacagcgacccctacctcgaagccgtggacatccgccaaatctatgacaaattcccggagaaaaagggtggactcaaggatctcttcgaacggggaccctccaatgccttttttcttgtgaagttctgggtcagaggccgggaaggcactagtcagaggcagaaggcaggcccaggactggaagccaaaacccaggcataccaactcatcccacctcagaaaccacctccagcagagccagaaagaaccttggcagtgggtcacccaacctgccgctttgtaggtgaggaaaatggcctgaagaagccaatcgacttgcccaagttcccacagcagttacagtccaggaaagcttcctggaggaggaaatacctgagtcaccccagggaaaaggacagctgcaggtcagaagggcacgcgcacataatgagagactgggtctctgaactaagagttaccaggcgaccggggaagacggcggaggtgcaggtcctgttgctttaatgttcgaggcccatctcctgggcccgcctggcgggccatcgtggctaaacaggtactgctgggccggaaaggtgggtgttcgtacgctgcgagggcatcaacatttctggcaatttcttacagaaacatgttgcatgttaaagcacctggccttcctccacaagcggatgaacaccaacccttcccgaggccccttaccacttccgggcccccagccgcattcttctggcggaccgtgcgaggtatgctgccccacaaaaccaagcgaggccaggccgctctggacccgtctcaaggtgtttgacggcttcccacccccctttcaacaagaaaaagcgggatggtggtttcctgctgccctcaaggtcgtgcgttttgaagcctacaagaaagtttggcctttctggggccccctgcctcacgaggttgggctggaagtaccaggcaagtgacagccccccctgaaggagaagaggaaaagagaaagccaaagatccactaccgggaagaaagaaccagctcattgaggctacgggaccaggcccgagaaagaacgtggaggaagaaaattgaccaattaccaccagaggtccttcaagaccccacgggactccctggtctgagccccaataaaagactgttaaattccctcatgcttggcctggcctgcccttcctcctattgttgcctctggaatgtcagcgggaccccaggtggcagacagacagttccgaggtttccacaaggcaagcctctgggactataaggaaagctgggaaccaaaggaagagggtccttaggtcacttgcctcccgaaagtttctgtgaaagcactccgaggaattgtgcaggtgtcatttcatctatgacccaataggaagaaagcaaccagttactatgagtgaaaaggagccaaaaaacctgattggagggccctatcttgtgagtggggcatctgtttggactttccacctggtcatatactctgcagctgttagaatgtgcaagcacttggggacagcatgagcttgctgttgtacacagggtatttctagaagcagaaatagactgggaaagatgcacaaccaaggggttacaggcatcgcccatgctcctcacctgtattttgtaatcagaaataaattgcttttaaagaaaaaaaaaaaaaaaaaaaaagggcggccgctctagagtatccctcgaggggcccaagcttacgcgtacccagctttcttg

SEQ ID NO: 148513 - DNA, 1666 bp, Homo sapiens
gatttctttagcggacctaaaggaaggaccccacacacacctaaaacctccagattatagtgtggcagtgcagaggtcaaagatgatgcataacagcctctctagactgccaccagcttctctcagtagcaacctcgtggcctgtgttccatcgaagattgtaactcagcctcagaggcataatttgcagccattccatcctaaactaggagatgtgactgatgcagatagcgaagaggatggaaaatgaacaagtttcagcagtctagcctttggatgacctatttgaaaaccactgaaagtcgtgggagggaatggggcaagaaccaccttcatggattctggcagggccatttgcttaacggaacaggttcattggcttacaaccagttccagaggttttattccctctacttccgaggcaatggaaatagacctgagttatgcttcctttcatttaatttctggcaggtaaatagtttcctgagcaatggatgctatgcctggataccagtctccactttgcacgccggaactgccttgggaccacagttacagaaaaaatgtaaactcagagtgatccttgtgtatattgctatagatttttctttaacaagctattttaaagataatggcattattatttccaagccatagcttgggctgaaggacaaattgaaattgtctgccaataccaaggatattcttgtatatttgaaaaataacttattatttgaattgttgtggttttgtttgtatttgagagctcttgttagctgatattcatgtttgaggtcataaaattgtctctggtctgaccaaacagaagtcatctttacagaggtgatatggcttgatctacacagaggatgtggacttggatcctgtaggcaccaatgccaatgtaggtctcagtttgagagaaataggaagccctttgcagttgaggtgttaggaacctgctggtcatggtgtggaaggccaaatgaagctgccacagggtttcttgtcagtcctttgggaaatgggagggagtagtttggagcaggagggtgggaaccctaatttccacagaatgaaattttgatgttaaatgacatgtatactaaattcttccttaagtgaaagctatgctgcatcgaatagtaactgaaagtatagatccaacaaatacagactgggttctagagagttctggtctatagaaacccataactaaaatctcatcataactcaagtatggaataactttttttaaagaaattcttatcatgggtgttgtaataatgaagacggaatttgactttatgcagtgttctgcagcatgcctcccccacatctcatagcaccaggttgtgtctgacctgacataccctgcagctctcagctggctgcagtaacattttgtgggagaaagaggagctggagttacagaaatgattgtctcttggttctcagtttttagcccttgagaggacatacttttccagcctcatgggtatggcactcttaattaaaatttcagtgactgtttactggatgaggcagatttttcacatttttgcaaattaaatatattttatatatattaagtttaattttttcagtttttttaatgtaaaagcaagtgaaattttaataaacttctgtaattaccaaaaaaaaa

SEQ ID NO: 148514 - DNA, 407 bp, Homo sapiens
gagatggggtcttgctctgtcactcagactggagcgcagtggttccatcatggctcactgcagcctcaacctcccatgcttaagtcatcctcccgcctcagcctcccgagtagccggaaccacaggcacacgcaaccatgtccagctaatttttttatttttgtagagatggggtttcaccatgttgcccaggctggtcttgaactcctgagttcaactgactgtgtgggcctcccaaagtgctggaattacaggtgtaagccaccgtacccatccattactttcttaacacatcatcctattttaactctgtatacagcctttattactccctgaaattttgttggtcaattttttatttttatttttttgacacagaatctggctctgtcacccaggctggagtg

SEQ ID NO: 148515 - DNA, 365 bp, Homo sapiens
tttttttttttgagacggagtctcgctctgttacccaggctggagtgcagtggcacgatctcggctcactgcaagctccacctcccgggctcatgccattctcccgcctcagcctcccgagtagctgggaccacaggcgcccactgccacacccagcgaatttttagtagagatggggtttcaccgtgttagccaggatggtctcgatctcaagaatctataatttcagtgagacaataaaactgtgtaaaattagaatagagtttgaggtttaggaaacatgacactctggatgcattaaaaaaatcaaataatggtagcaacaacaatctggaattctttaaccttaacagggtctagataag

SEQ ID NO: 148516 - DNA, 681 bp, Homo sapiens
  misc_feature (1)...(681): n = a,t,c or g
aaggaactagtcccaaagattgtgaagttcgggatttttgcccttcagaagggctgtattccacgtgatgggggggttccatccttccctccctggacaccttaagaagatgtgggtctccaaaaagaaatatgaggaagacggtgcccgatccatccacagaaaaaccttctaatgtcgggacatcatcttcccctctctctgaagttaactccactttaaaactcgctttcttgagtcggagtgtttgcgaggaactgcctgtgtgtgagtgcgtgtgtggatatgagtgtgtgtgcacatgcgagttccgtgtggccctgggaccctgggcccaaaaaggacgattaactacctgcagtggtgatggcctgaggcctggggttgacccctaactggctcctgacagggaaaagcgctggcaaaggctgtgctccctcctcaggtggcctctggctggctgtgggggactccgtttactaccagcaggtatgtgtgaaaacaacgtagcgccccccggactgcagtgcgcttagccaactcccctccctttttttagcccaagcctgtccctcgcacagcctcgcccaaaccccattgcctggtggggcccagtgtactgaaataaagtcgttccgatagacccgtccnnnnnnnnnnnnnnnnnnnnnnnnnnnnnnn

SEQ ID NO: 148517 - DNA, 602 bp, Homo sapiens
  misc_feature (1)...(602): n = a,t,c or g
acgagctgcagagttcttcttcgagacattcaatgtgccggctcttttcatctccatgcgagctgtantcagcctttacgctacaggcaggaccacaggggtggtgctggattctgaggatggagtcacccatgctgtgcccatctatgagggctttgccatgccacactccatcatgtgcatcgacatcgcggaccgggacgtctctcgctttcctgcgccctatacctgcgtaagggagggctacgacttccactcatccctctgagtttgagattgtcaaggccataaaagaaagagcctgttacctatccataaaccccccaaaaggatgagacgctagagacagagaaagctcagtactacctgcctgatggcagcaccattgagatatctgcacctcaggagagactgtattccacgtggattgggggctccatccttgcctccctggacacctttaagaagatgtgggtctccaaaaaggaatatgaggaagacggtgcccgatccatccacagaaaaaccttctaatgtcgggacatcatcttcacctctctctgaagttaactccactttaaaactcgctttcttgagtcgga

SEQ ID NO: 148518 - DNA, 2959 bp, Homo sapiens
gaattcggggcgctacggcggacccggctgggcagttccttccccagaaggagagattcctctgccatggagtcctacgatgtgatcgccaaccagcctgtcgtgatcgacaacggatccggtgtgattaaagctggttttgctggtgatcagatccccaaatactgctttccaaactatgtgggccgacccaagcacgttcgtgtcatggcaggagcccttgaaggcgacatcttcattggccccaaagctgaggagcaccgagggctgctttcaatccgctatcccatggagcatggcatcgtcaaggattggaacgacatggaacgcatttggcaatatgtctattctaaggacccagctgcagacttttctcagaggagcatcctgtgctcctgactgaggcgcctttaaacccacgaaaaaaccgggaacgagctgccgaagttttcttcgagaccttcaatgtgcccgctcttttcatctccatgcaagctgtactcagcctttacgctacaggcaggaaccacaggggtggtgcatggattctggggatggagtcacccatgctgtgcccatctatgagggctttgccatgccccactccatcatgcgcatcgacatcgcgggccgggacgtctctcgcttcctgcgcctctacctgcgtaaggagggctacgacttccactcatcctctgaggtttgagattgtcaaggccataaaagaaagagcctgttacctattccataaaacccccaaaagggatgtagacgctagagacagagaaagcttcagttactacctggcttgatggcagcaccattgagattggtcctttccggattccgggccccctgagttgctcttcgggcccagaatttgattggaaaaggaaagtgaaggcatcccacgaggtccctggtgttcgcccattcagaaagtcagacatgggacctgcgggcgcacggcttttctctaacattgtcctcttcagggaggctctacccctgttcaaaagttctcctctttgcccatttcaggttttggtgacaggctcctttgttatagtgaagaaacttagctccaaaagatgtgaagatcaggatatctgcacctcaggagagacatgtatatccacgtggattggggggctccatccttgcctccctggacaccatttaagaagatgtgggtgctccaaaaaggagatatgaggtaagacgggtgcccgactccatcccctagaaaaactcttctaatgtcggagacatcatcttcacctctctttgaaggttaactcccctttaaaactcgctttcttgagtcggagtgtttgcgaggaactgcctgtgtgtgagtgcgtgtgtggatatgagtgtgtgcgcacatgcgagttgccgtgtggccctgggaaccctggggcccagaaaaggacgattgaactacccgcagtgggtgatgatggcctgaggcttggggggtttgaccacttaactgggctccttgacaggggaaggagccgcttggcagaggctgtgctccctcctcaggtggccttctggctgggctgtgggggactggctgtgggggactccgttttactaccacagggagacagagggaggtaagccatcccccgggagacctttgctgctgaaccatcctaagggttgggcttgggcccaaccctcacccccacccccagggtgcccctgaggccccaggcagcttgctgccttccactatcgattgcctcctgactgcacactgaggactgggactggggttgagttctgtctggttttgttgccattttggtttgggaggctggaaaagcaccccaagaagctattacagagactggagtcaggagagagcaggaggccctcatgttcaccagggaacaggaccacaccggccactgaaggagggcaggagcagtcctccctctgaatggctgcagagttaatgttcccagcccagtcccctttcgggggccttgggagagtttaaggcacctgctggttccaggacctcgctttccatctgttcttgttgcaatgccatcttcaaaccgttttatttattgaagtgtttgttcagttaggggctggagagagggagcttgctgcctcctgccttgctacactaatgtttacagcacctaagcttagcctccagggccccacctctcccagctgatggtgagctgacagtgtccacaggttccaggaccatttgagattggaagctacactcaaagacactcccaccaggctctttctcccttttcctcttctcactgccctggaatcaacaggctggttgctggttagattttctgaaacaggaggtaaaatttttctttggcagaggcccctaagcaagggaggggtgttggagagccagtgcccttaagactggagaaagctgcaatttaccaagttgccttttgccactgtagctgaccaggggactaggttgtagaggtgggaaggcccctctgggctgatcttgtgccattcttgaccttggacctgcttggttaaggagggagtgggccagaccagagtgccaggagctaatggagccaggcctgacacctaggagtggtccaaagccttcagcctagatggtgcaaagctggggccagcctgtcttcaccggcaccctcacctgtgacaccaagacccaccccaatccagacttcacacagtattctcccccacgccgtctatgaccaaaggcccctgccaggtgtgggtccacagcagcaggtatgtgtgaaagcaacgtagcgccccgcggactgcagtgcgcttaaccaactcacctcccttctcttagcccaagcctgtccctcgcacagcctcgcacaaaccacattgcctggtggggcccagtgtactgaaataaagtcgttccgatagacacgtcaaaaaaaaaaaacccgaattc

SEQ ID NO: 148519 - DNA, 1269 bp, Homo sapiens
tttagagaaaaggtctcactctgtcaccaacactggggtacagtggtgtgatcatagctcactgcagcctcaacttcttgagttcaagccaacctcctacctcagcctcccaaacagctgggactacaggcatatgtcatagcacccagctaatttttaaaatttttttggtagagatgggtctcactatgttgctcaggctggtcttgacctcctaggctcaagcaatgttgagcctcccaaagtgttattaggattataagtgtgagccaccatgcctgaacagtattatattatttctccaaattagttatgtgagaaattccctaggatttaatactaaacttgttttaaattctggactaattgtaaatctttcataaaaaaagacttagtaactgttacataatttttagatgttacaataattgagaaagaaacagctataacttatgtaacaaatgcacaataaaggatttccacttgcagctataaatgaaacagcttgtggcaaatcacccctactactaaaaacaactagaaaccccatataaaaaaaccagtgctgcagagacagtcgggctttgtggccaccaggccgctctggctgtgctgctctagcacaaaagcagccgcgaactacaggtgaatgagtgagtctggctgtgttccaacaaacactgttcataaaaaaggtgcctcaaaaaaaggtgcaggcccccaatctgcagactcctgcccactggccacttctcttccctggctaaaaactggaaagtgatgagacctcagaacagggatctcaaacggttcagtagcagaactcttgaactctgtaaaattatttaaatcctatgttatggtttggatgtgtcccccaaagttcctttgttggaaacttcatccccaatgcaacaatagtgagccgcaggttctttattaatgccactatcttgggagtgggctcctgacactgatgggtcctctctctctctctcctctgtttccctcttcccgtttttctagttctcgctctcactcactctggggcactctcttgactcctccaccttctaccacaggacgatgcagcaagaaggacctcacagccccatgagccccttggctttggacttctccaaataaatgtattttcaacaatggccagtagaaactggcaaggtatgcaaatcctgaagagatgaggatggataaattgtataaaaatgttgaatcacctgaccaatgaagattccatttccgaaaagg

SEQ ID NO: 148520 - DNA, 2178 bp, Homo sapiens; identical to SEQ ID NO: 146528

SEQ ID NO: 148521 - DNA, 511 bp, Homo sapiens; identical to SEQ ID NO: 146530

SEQ ID NO: 148522 - DNA, 2822 bp, Homo sapiens
aaaaccaaaatttactcaaatcaaagttaagtacagagtttatttttaacaaatgtcatagctatgtcaccttactacagaatccagcagtcagaaaataacacaaaaaatgccgaggtttggcgtagctggtagctggggacagtgtcttcgtttgattactgccagttatttccagcatgctaaatccctacccacgtcccagcctctaggtgagtcagtgcgtcactctgtctcccgtccaattaattatttctcatcactccctcaatccaagtaacaaaccttgaaacacgaacatagacaccaggcttattggggcgtgcacagccaagaccccaagaagtgactccttgtaaaatgtatttgtccttctcgaagcaaaccagaggacctccactgtcaccctggcaactgtcagtgcctccggccaaatgcccagcacagagttcggtggattggactcttccattcagaaactcatagcgattgcacactttattctcaatcacagggagctgggcttccttgagaaggccagctccaaaagtaccttgggtttctccccagccagtgacgaaacattcggtccggtcagcgaccacataatttggggatggcagacaagctgggattactttgtcagtgatgacggcaggactgcttagctttagcaaggcaatatcttttcgtgtgggctccaagaacagcctagacacttctatttcctgaacatgcggttcgagattcacttcttggtgtgcacccaggatgaccttgtaggatgaaggccttggggacttctccaagcagtgggcagcagtcaacacccactctggggatatcaaggtgcctccacagaagtgcattccaaaccttgttctaagactgacttgccagggccaggaatgtgggtgggccacacacccccctacaacccttccaggacatttcttcggctccacttgaggcttcccacaatcaaatgaaggggccgcacactgagggacatcacagtagtcgtaaagttttcttggatttgtcgtgtagcaccagggaccacctacatcaccatcagggttacggcagtaatttttttccagacccgcccgtggatttgtctctggagtgaaaatgctgtgtctatggggctcctgggcagcccagtcctggcatggcgtcccagtaacagtggtcgccctcttgcctcggtatcctttcccattcccaaacatacagtcttcttcggaaggagtctctacatctggaagcaggacaacaggcggaggtgctacaacactcgcttctgttcctgagcattttttcaggttgcagtactcccacctgacgctggggtctgtggtaaaacaccaggggcctttatcggcatctggattcctgcagtagttcattgtcaggccagcatttgggtagttttctggggtcttctggtgccggtgtggtgtcatagatgaccaagactgacacttctttcctgtggtggtggtggaggatgtgcctcggtagctctgtccatcaccatggtagcagtcctggaccacaggggttagctcaggtggtgctgtgggagccaattgttccgtggatactggggaggagtcacaggacggtatcttacagtactcccaccgcacttggctgttggttgtatggcaccatggggccctttttccgtcaggattgcggcagtagttttcatccaaatttttgcaggggaagttttctggtgtcctgttatgtgtgtgaggggtctgtgcactccagtgctgacaggtgtgcccggacacggtaacagccacattcccgcgatagttttcacctgttcccttcagacactggtaggtgggaccagaagatggtggaggtgttgtgcagcgggggatgtcacaaagttcccagcgcttgttggggtcggtggtgaaacaccaaggccgcagctccctatcggggttacgacagtaattcttcttcaggttcttgtttggaaatttggaaggaatgtatccatgagcgtgtgggctctgagagtcccaggcctggcattcccagtcccaagacatggtccttgggaaaattttgcccgtcaatagttttcctcccactgcaaatgccatacattccctccttcaacactcaaagaatgtcgcaagtagtcatatctctgttctggaatcagtagtatagcacccagggcccctgcggatcgttgtctggattcctgcagtagttctcctccagtccctctgaggggtgtgtaaccaggtgaaaaacctaggtctgtggggaaaaagtggaactcccatttttgaacaggtgatgccattttttgttttggacatcgtccctctgtaattctttccattcccagtcttgcactctgagagatacactttcttttcaaataaaactacatctctcatcctaatgattatggaggacttcctgttttcagccattatcacacattgttgctctttactgtgatattggaatgccctgcaggtgaattcttcgtcctcctcacattttgctgcacattcttctatacttcctgctcccagctgcttcttagtgacactgaacagtgaagccccctgggtattcacatagtcatccagaggctctccttgacctgatttcagaaataaaagaagtagaagaaccacttccttatgttccattttgggactggccagcagtgcccagaaagtgggtcccaatcccaggatgttgttgacttacatgagagtaaacgcatccacaaaccagatagtcaaattaagttaatgattctctcagag

SEQ ID NO: 148523 - DNA, 4917 bp, Homo sapiens
  misc_feature (1)...(4917): n = a,t,c or g
cgagatgctgccgtaaaccaaaacaaaccaaaacttgccctaagccataaatagcctatgaagaagcagatcaagaattcaaagttgatctgtctgattccaaagtccctggttttctctgaaatgcagcttgaattattggggatggaggagggatttaaacttattttcaagtttctagagatgagttgcctgtaatagagacaacccatttagatgacaatcacaaagacttacagtcctagaaaggcaggttttatttctggttcttctgtgaaacctatttgggtaacccccgccccccaagacctcagttccctcatgaagatgagcctagactacctcataaaaatggcccagagctgtctccatggcccccgatagtctcctgacttcgccatttggttgaatcagttttcattaactcacggggaatatttgatctgctcatctcataagggatatagcaaaggcaatttgttgagtgttgggggaatggataaaggtgagtaacactaagttcctatttgataagtgtcattactgagaacttaaggccacctaacaccaaactggggaaaaggcacaaaaaaatggcactaaaataaataatagggcaagttgtgacatttgaatttcacgtatcttcattttcatttttatattttatttactattttgctccacaatttgagtcaaacatgtgatgagagttctaacttgatatgtttacttcagtcccaaacatagtcatctttggtcttttctcagatttggcctaaaactcgtagtttcattgattttttttttttaactagggcattcttctatgttctagggtcttcaacaaacctccatacccaagaaaaaatagaaagcaaccatgttctactatgggtgccaaaaataggttgaacatcgacatcaaaaagattctttctggtctggcttattcacatattctgggtttggaattaaaaggtgatggaaattatcctaaatacagttgggccctctgtatccatgggttccacatccacaaattcaaccaactgtgggatgggaaaagacttgaaaaaggatgaggaggaaaataacaatatggacaataaaacataatacaaataaaaacaatacagtataacaacgattacatagcatttacattatattagggattgcacaagagaaggtatgtaggttatatgcaaatactggcaccattttacataagggacttgagaagcatggaattttggttagcccacaggggtcctggaacccaatccctcacagacacagagggacaactttacagtagatgaacacaaagatgaaagggaaagtctgacctaggtctgcgggggagaagtggaactcccatttttgacaaggtgatgccattttttgttttggacatcgtccctctgtagttctttccattcccaagtcttgcactctgaaagatacatttacttttcaaataaaactgcatctctcatcctaatgatttatggaggacttcctgttttcagccattatcacacattgttgctctttactgtgatattgggaatgcccctgcagggnggaattctttgtcctcttcacattttgctgcacattcttctctgcttcctgcccccagctgcttcttagtgacactgaacagtgaaggcccctgggtattcacatagtcatccagaggctctccttgacccagaggtgggagatccaaatggaacaaatgctcagttaatcaaatgttttcttcttcctctctgtccttccttcccactctgtccagaggaatgtatgcattgcagtggagaaaactatgacggcaaaatttccaagaccatgtctggactggaatgccaggcctgggactctcagagcccacacgctcatggatacattccttccaaatttccaaacaagaacctgaagaagaattactgtcgtaaccccgatagggagctgcggccttggtgtttcaccaccgaccccaacaagcgctgggaactttgtgacatcccccgctgcacaacacctccaccatcttctggtcccacctaccagtgtctgaagggaacaggtgaaaactatcgcgggaatgtggctgttaccgtgtccgggcacacctgtcagcactggagtgcacagacccctcacacacataacaggacaccagaaaacttcccctgcaaaaatttggatgaaaactactgccgcaatcctgacggaaaaagggccccatggtgccatacaaccaacagccaagtgcggtgggagtactgtaagataccgtcctgtgactcctccccagtatccacggaacaattggctcccacagcaccacctgagctaacccctgtggtccaggactgctaccatggtgatggacagagctaccgaggcacatcctccaccaccaccacaggaaagaagtgtcagtcttggtcatctatgacaccacaccggcaccagaagaccccagaaaactacccaaatgctggcctgacaatgaactactgcaggaatccagatgccgataaaggcccctggtgttttaccacagaccccagcgtcaggtgggagtactgcaacctgaaaaaatgctcaggaacagaagcgagtgttgtagcacctccgcctgttgtcctgcttccagatgtagagactccttccgaagaagactgtatgtttgggaatgggaaaggataccgaggcaagagggcgaccactgttactgggacgccatgccaggactgggctgcccaggagccccatagacacagcattttcactccagagacaaatccacgggcgggtctggaaaaaaatgctacagagtgcggtggcgccagcacagagctctgctcaacgtccctctgtgctttcacgatgctgatggattatgaaggtcaaggagagcctctggatgactatgtgaatacccagggggcttcactgttcagtgtcactaagaagcagctgggagcaggaagtatagaagaatgtgcagcaaaatgtgaggaggacgaagaattcacctgcagggcattccaatatcacagtaaagagcaacaatgtgtgataatggctgaaaacaggaagtcctccataatcattaggatgagagatgtagttttatttgaaaagaaagtgtatctctcagagtgcaagactgggaatggaaagaactacagagggacgatgtccaaaacaaaaaatggcatcacctgtcaaaaatggagttccacttctccccacagacctagattctcacctgctacacacccctcagagggactggaggagaactactgcaggaatccagacaacgatccgcaggggccctggtgctatactactgatccagaaaagagatatgactactgcgacattcttgagtgtgaaggacatggcatcatggaaattctgaacttggtcatgactacaatagttgagggagtattgactaaaatatgtgaatgtggggatcctctagagtccacctcatcacgaattccatccttaatattctgttcctcaagaaccacttctgagagttccgcagaggttcatagcttccccagagtcacaccgcttgtgtgtcagatggagcagggttggatgccagagccaggccctccagccccacgcctcgttgctgccggagcctgccggtctgcagttactgccacaggcatcaatggcaataaccagaataagcatttatcgagcacctactgtattcacagaactctgatcagtgaagcaaacaaagccaaggaaggtccaagcgccttcagccagcagatggttcatgtccttcgaggcggcaaaatatggggtggaaggagtgggggaccaaaagtagataaaaccacaaagatggggaaaaaacagagcagaaaaactggaaactctaaaaagcagagcgcctctcctcctccaaaggaatgcagttcctcaccagcaacagaacaaagctggacggagaatgactttgacgagctgagagaagaaggcttcagacaatcaaattactctgagctacgggaggacattcaaaccaaaggcaaagaagttgaaaactttgaaaaaaatttagaagaatgtctaactagaataaccaatacagagaagtgcttaaaggagctgatggagctgaaaaccaaggctcgagaactacgtgaagaatgcagaagcctcaggagccgatgcgatcaactggaagaaagggtttcagtgatggaagatgaaatgaatgaaatgaagcgagaagggaagtttagagaaaaaagaataaaaagaaacgagcaaagcctccaagaaatatgggactatgtgaaaagaccaaatctacgtctgattggtgtacctgaaagtgacggggagaatggaaccaagttggaaaacactctgcaggatatcatccaggagaacttccccaatctagcaaggcaggccaacattcagattcaggaaatacagagaacgccacaaacatactcctcgagaagagcaactccaagacacataattgtcagattcaccaaagttgaaatgaaggaaaaaaggttaagggcagccagagacaaaggtcgggttaccttcaaagggaagcccatcagactaacagtggatctctcggcagaaactctacaagccagaaaagagtgggggccaatattcaacattcttaaagaaaagaattttcaacccagaatttcatatccagccaaactaagcttcataagtgaaggagaaataaaatactttacagacaagcaattgttgagagattttgtcaccaccaggcctgccctaaaagagctcctgaaggaagcgctaaacatggaaaggaacaaccggtaccagctgctgcaaaatcatgacaaaatgtaa

SEQ ID NO: 148524 - DNA, 2178 bp, Homo sapiens; identical to SEQ ID NO: 146528

SEQ ID NO: 148525 - DNA, 511 bp, Homo sapiens; identical to SEQ ID NO: 146530

SEQ ID NO: 148526 - DNA, 2822 bp, Homo sapiens; identical to SEQ ID NO: 148522

SEQ ID NO: 148527 - DNA, 4917 bp, Homo sapiens; identical to SEQ ID NO: 148523
  misc_feature (1)...(4917): n = a,t,c or g

SEQ ID NO: 148528 - DNA, 368 bp, Homo sapiens
tttttggagacagagtttcattctgtagcccaggctggagtgcagtggtgccatcttggctcactgcaacctccgcctcccgggttcaagcaattatcctagcctcagcctcccaagtagctgggattacaggggcacaccaccatacctagctaatttttgtatttttagtagagacggggtttcactatgttggccaggctggtctcaaactcctgacctcaagcaatcctcagggaacctatgaccttccagcaacaatcttgttggcctgtctccacaaagtcctctaaagatgatcaatatatgcttcaaatcaactttctgcactatgcagagaagccactactagtattttttctcgtgcc

SEQ ID NO: 148529 - DNA, 840 bp, Homo sapiens
tttttttgagacagagtcttgctgtctgtcgcccaggctggactgcagtggcgcgatcttggctcactgcaacctccacctccaggttcaagcgattctcctgcctcagcctcccaaatagctgggattacaggtgtgtgccaccatgcctagctaatttttttgtatttctagtagagacagggtttcaccatgttggtcaggctggtctcgaactcctgacctcaggtgatccacccctccctcagcctcccaaagtgctgggagctgggattacaggcatgagccaccacacctggcttatatccctgattttctatcagaccaaatggaggcagacagctattgcctcggttgggatacctgggtcccctctgtgccacccacttcccctcattaggaagggtgtagctggcaaagcagtactatgtcccagaaaggatggtcacactcataaaacccaattaagaccctgagaacaatggtattcactttcttaggaatgttaaataatatttgctcttttgggaataagattttattaaaaaataattccagatcctatcatattaggctatgccatctgaagtttgttacttgggcatatttggcctacaaaacgtcaattttgtgtggttcgatgtatctgcttacagatagatacagatctctatatacagatatttacctggctatagatatccatcaggtagtagaatatggaatagaaaaaaattagcagcagcagcaacaataatttcaacagcaatgattccttaaagatcaagtacaagctaatgtagtgggtgcaagagcccactaatttgcttttctcgtgcc

SEQ ID NO: 148530 - DNA, 829 bp, Homo sapiens
ggcacgagctcgtgccgattcggcacgagcggcacgagccgaatttgaagatatcatgaagcgaaacagagcaatttccagcagtcccatttccaaagcagtatctggagccagtgcaggggattacagtgacgcaattgagacgctgctcacagccattgcggttatcaaacagtcccgggttgccaaatgatgagcgttgccgtgtcctcatctcctctcttaaggactgtcttcatgggcattgaaggccaagtccctacagtgtggggtgcccagttgggagctctttccaggaaaagacatccgttccccggggaaaggtcacctaggccggtcccgggagaccagcaggaggcaccgggatctgcttcataatgaagatcggccatgatgattatttccaagaaaggaaccgggagcatgagagacaccgggatagagaacgggaccggcaccactgagaaaggtggggagaagccccgttcctggctgctgggggattttttattaaaaaaaagatttatagtgaagaattctctctctttaaagcaaaaagtaaatgccagcaagggtagggggaacttctgatttacataactggaatttcagggcagattttctgcacatttatggggagtcttaccctgagattcagctgtttctgcttgtttcttgactgccttaacctggtatctgagtgagagtatggtgtctgcattcaggtaccaatttgaatcccagtttctccactaataattggccatattactttctgttccacagtttcatttgtaaatgaagataataaaagcaactgtcccagtga

SEQ ID NO: 148531 - DNA, 332 bp, Homo sapiens
ctctaccaccccccctctccaatattcactctactctctctacaccattccttccacctcctgctcccctctacctttccttctcgcgcctcacccccttcgacatatagtcccctcccaacacctcctcctctaccaacatcccaaccctccactccaaccttacctcttcctacaccgccctgttccaccccatctggccaagccttatttttttaacacttttacaagtctaatttttagtgaaatgtatttggttaaaagatactataatcagtactggagtctgaattacacaaatgtctcatgacagtttagtaaaagctcgtgcc

SEQ ID NO: 148532 - DNA, 2178 bp, Homo sapiens; identical to SEQ ID NO: 146528

SEQ ID NO: 148533 - DNA, 511 bp, Homo sapiens; identical to SEQ ID NO: 146530

SEQ ID NO: 148534 - DNA, 2822 bp, Homo sapiens; identical to SEQ ID NO: 148522

SEQ ID NO: 148535 - DNA, 4917 bp, Homo sapiens; identical to SEQ ID NO: 148523
  misc_feature (1)...(4917): n = a,t,c or g

SEQ ID NO: 148536 - DNA, 1545 bp, Homo sapiens
tggttgatatcacagcaaatcccgcagttcgaagatgttaaatttgaagcagcaagtctgttgtctgaattgtactgtcaagagaattccgttgatgcagcaaagccgctgctgcggaaggcgatccagatctcacagcagaccccatattggcactgccgcctgctcttccagctcgctcaactgcacacgcttgagaaggacctggtgtcggcctgtgacctcctgggtgtaggggccgagtacgcccgggtggtgggatctgaatacacacgggcgctgttcctcctcagcaaggggatgctgctgctgatggagcgaaagctgcaggaggtgcacccgctgctgaccctctgcgggcagatcgtggagaactggcaggggaaccccatccagaaggagtcgctgcgtgtcttcttcctggtgctccaggtcacccactatctggatgccgggcaggtgaagagcgtgaagccgtgtctgaagcagctgcagcagtgcatccagaccatctccacactgcacgatgatgagatcctgcccagcaaccccgctgacctcttccactggctgcccaaggagcacatgtgtgtgcttgtctacctggtgactgtgatgcactccatgcaggccggctacctggagaaggcgcagaagtacacggacaaggccctcatgcagctggagaagctcaagatgctggactgcagccccatcctgtcatccttccaagtgatcctgctggagcacatcatcatgtgccgccttgtcacgggtcacaaggccacggcgctgcaggagggcctgtactgtgtctctgtcaactgcatggacaacgcggaagcccagttcaccacggccctgcggctctacagtctgctggagaggatcaacccggaccacagcttccctgtcagctcgcactgcctccgagcagccgccttctatgtgcgtgggctcttctccttcttccagggacgctacaacgaggccaagcgatttctgcgggaaactctgaagatgtccaatgctgaggacctgaaccggctcacagcctgctccctcgtgcttctgggccacatcttctatgtgctgggaaaccacagggagagtaacaacatggtggtgcctgccatgcagctcgccagcaagatcccggacatgtcggtacagctgtggtcgtcagcactgctgagagacctgaataaagcctgtgggaacgccatggatgcccatgaagccgcccagatgcaccagaacttctcgcagcagctgctccaggaccacattgaggcctgcagcctccccgaacacaacctcatcacggtacgggtgggacactgggagggtatcgcggctaccaggctgcctgtcgcatttatggagggccagtccaccaccaccttgtactcagctgacatctggaagcacatccaggaggacactgaaggctcagaaagtgcctgggcccctgtgttcaggtgtgaaatcaaatctctgaggccccagaccagagccatcatccttctgcccccactggactga

SEQ ID NO: 148537 - DNA, 1772 bp, Homo sapiens
tggataaagccatcgttcgatcagcagatgtttcccgagcacctactggatgtcagcttgctgcaggcattgcagccacaactttaaagtcaaacatcatggggcttttttttaattccgttgatgcagcaaagccgctgctgcggaaggcgatccagatctcacagcagaccccatattggcactgccgcctgctcttccagctcgctcaactgcacacgcttgagaaggacctggtgtcggcctgtgacctcctgggtgtaggggccgagtacgcccgggtggtgggatctgaatacacacgggcgctgttcctcctcagcaaggggatgctgctgctgatggagcgaaagctgcaggaggtgcacccgctgctgaccctctgcgggcagatcgtggagaactggcaggggaaccccatccagaaggagtcgctgcgtgtcttcttcctggtgctccaggtcacccactatctggatgccgggcaggtgaagagcgtgaagccgtgtctgaagcagctgcagcagtgcatccagaccatctccacactgcacgatgatgagatcctgcccagcaaccccgctgacctcttccactggctgcccaaggagcacatgtgtgtgcttgtctacctggtgactgtgatgcactccatgcaggccggctacctggagaaggcgcagaagtacacggacaaggccctcatgcagctggagaagctcaagatgctggactgcagccccatcctgtcatccttccaagtgatcctgctggagcacatcatcatgtgccgccttgtcacgggtcacaaggccacggcgctgcaggagatctcccaggtctgccagctgtgccagcagtccccccggctcttctccaaccatgcagcacagctgcacacattgctgaacattcccagtgaaggaccccctgacagcaccctaatcagaatccggaatgttcccataggtaatcatataaccttcccaggcacgatccggaatgctcccagtgagcatcttgtcccaccccacattggcttgggtctgaaaggggccggccctgatgacaacaccaccttcttccagggcctgtactgtgtctctgtcaactgcatggacaacgcggaagcccagttcaccacggccctgcggctcaccaaccaccaggagctgtgggccttcatcgtcaccaacctggcgagtgtgtatatacgggaaggaaatagacaccaagagctctacagtctgctggagaggatcaacccggaccacagcttccctgtcagctcgcactgcctccgagcagccgccttctatgtgcgtgggctcttctccttcttccagggacgctacaacgaggccaagcgatttctgcgggaaactctgaagatgtccaatgctgaggacctgaaccggctcacagcctgctccctcgtgcttctgggccacatcttctatgtgctgggaaaccacagggagagtaacaacatggtggtgcctgccatgcagctcgccagcaagatcccggacatgtcggtacagctgtggtcgtcagcactgctgagagacctgaataaagcctgtgggaacgccatggatgcccatgaagccgcccagatgcaccagaacttctcgcagcagctgctccaggaccacattgaggcctgcagcctccccgaacacaacctcatcacgtggacagacggtccaccccccgtgcagttccaagctcagaatggacccaacaccagcctggccagcctcctgtga

SEQ ID NO: 148538 - DNA, 4929 bp, Homo sapiens
gcggcttgttgttgtggaggccaaaatggcggctcaggcggcggcagcggcccaggcggcggcggcccaggctgcgcaggccgaggcggccgactcgtggtacctggcgcttctgggcttcgctgagcacttccgcacttccagcccgcccaaaatccgcctgtgcgtgcactgcctgcaggccgtgttccccttcaagccgccgcagcgcatcgaggcccgtacacacctgcagctgggctccgttctctatcaccacaccaagaacagcgagcaggcgcgcagccacctggagaaggcgtggttgatatcacagcaaatcccacagttcgaagatgttaaatttgaagcagcaagtctgttgtctgaattgtactgtcaagagaattccgttgatgcagcaaagccgctgctgcggaaggcgatccagatctcacagcagaccccatattggcactgccgcctgctcttccagctcgctcaactgcacacgcttgagaaggacctggtgtctgcctgtgacctcctgggtgtaggggccgagtacgcccgggtggtgggatctgaatacacacgggcgctgttcctcctcagcaaggggatgctgctgctgatggagcgaaagctgcaggaggtgcacccgctgctgaccctctgcgggcagatcgtggagaactggcaggggaaccccatccagaaggagtcgctgcgtgtcttcttcctggtgctccaggtcacccactatctggatgccgggcaggtgaagagcgtgaagccgtgtctgaagcagctgcagcagtgcatccagaccatctccacactgcacgatgatgagatcctgcccagcaaccccgctgacctcttccactggctgcccaaggagcacatgtgtgtgcttgtctacctggtgactgtgatgcactccatgcaggccggctacctggagaaggcgcagaagtacacggacaaggccctcatgcagctggagaagctcaagatgctggactgcagccccatcctgtcatccttccaagtgatcctgctggagcacatcatcatgtgccgccttgtcacgggtcacaaggccacggcgctgcaggagatctcccaggtctgccagctgtgccagcagtccccccggctcttctccaaccatgcagcacagctgcacacattgctgggcctgtactgtgtctctgtcaactgcatggacaacgcggaagcccagttcaccacggccctgcggctcaccaaccaccaggagctgtgggccttcatcgtcaccaacctggcgagtgtgtatatacgggaaggaaatagacaccaagaggtagtagctctacagtctgctggagaggatcaacccggaccacagcttccctgtcagctcgcactgcctccgagcagccgccttctatgtgcgtgggctcttctccttcttccagggacgctacaacgaggccaagcgatttctgcgggaaactctgaagatgtccaatgctgaggacctgaaccggctcacagcctgctccctcgtgcttctgggccacatcttctatgtgctgggaaaccacagggagagtaacaacatggggggggcctgccatgcagctcgccagcaagatcccggacatgtcggtacagctgtggtcgtcagcactgctgagagacctgaataaagcctgtgggaacgccatggatgcccatgaagccgcccagatgcaccagaacttctcgcagcagctgctccaggaccacattgaggcctgcagcctccccgaacacaacctcatcacgtggacagacggtccaccccccgtgcagttccaagctcagaatggacccaacaccagcctggccagcctcctgtgaggccttgatggggccatccagctccgcagggcctgcgcgtctccggcttccacccagacggcactcaagcctgcccccgaggcgtgcttccttcctgattgtctctagagcttccaagtcctgggaatgtgcggggccagtccctgccctcccaggaggggtggtagccgttcccacctcgcagcaggacccccagtgcagaggctcacaggtggcacacaggcgctgtctctccagagccatccttcagagtggacctcagtgccagtcctgcctcagcatctgggtcacgtcggccaggagtagggtgcaggcctccagcaggtcctaatcctgtgtgccagggcaggcagtgccccaggggcaccacgcctgactctccatcacccaggccttgatgccgagcgggagtagagtgtttcctctgctcaaggcaatttccagagcccggatgccagtttctggcctgaatttggagggaagaagtaatggccctagtgtgggacgaagcacagatcccagcacttttcccagctttctctccagcatcagtccctgcagcagctggggcctctggtcaggaaccctcagggacccaggaactcagcttccaaacatctgcaccttgaccggactcgccatcccgccgtgggggtgcaggtgattgtaaacacgggtgtgcatgtggatgcacacgggtgtgcgggtgaagatctgtggagattggagcttgggagctgaggctcctgttgcaccacccaccttcccccatcttgtgggctgctgaggggcaggaagcgggggagtgggctcgtctcctaaatttaagatcacctcctcagctagcttagagtgcgtggcacgggccccccgcccccgagatctggagcccagggactttcttcctggcagatctgtggccttccctgctcagcctcttggtccccccactccctccaccgcctcaccttccctgctgggtctctggggcacagtgtgaaacgccgcaccctagccaggcctccagggagcctccgctgggcccagacagcagcgtttggttttatccacttttcttggataatcaggaggtgccccagtggtcacagtgtggcattccgagttggggcgggtggtcgggtcaagatagcagcagcaggtgtcagggctcaagacaccaccccctccagcttctggggcccaggagccctctccctgctacaagggggtgggggtccctgctcagcagggtaggtggtggttttaggtcttgtcaccctcactcagtggaactgcctcatgggagctttggcgtcatgtgactaaagggacgctggattgctcaggtcagctgcttcggggctccccaggctgggtgtgccttagaccacaggcagggctgtcaataacccctttcctcactggccamccacctgacatcagcaccagtgacaggctggtcagagggcggggctggtgagggtttgtcctaagaggaccaccgccatctctgggtctccagggctgagagcctggccctgtccctttgctacccagggctgcccccaggcccatgaagccaataggagagcgttgtggcagtgggcccacaaactgtccctgttcctgtcttcctcacgagccatggcctctgctagctccaccttgaaggagccccccacatcctctcctacattcccagagatgccaaccaacttgtgtctcccacaaatgtgttcctgccccacccgggtttccgcactgtccgaccccttgcacaccacttcatgtcaccacggcgtgcattcatgttcatcccccatctatttatttaagcctttctttgcttgtagggcattttgtatgtagagcagttgaaaacagaacctcagaacttaacatctgtcctgatgttaaagtgcttttcatgaccaccctgttaccccaggtatatgcaaagttaaggatgagaatcttaagtttacaattaaaaaactcagtactcaatatttaatattcctactcgagctttatggaagcccaaatcatgtgcagtgagtgtgtgcgcgtgtgtggcaagctttggaacctccttccacagccggcatcttctcatgacacaaagcttttgataagtactttcctgtgggtcgctcagcgcctcatagcatctcattcaattgcaagaatagaggccagacacggtggcgcatgcctggttagtcccagctaactggggaggctgaggcaggaggatcacttggagcccaggagattgaggctgcagtgagcatgatcgcgacactgcactccagcctgggtgaccggtgagactaagtctcaaaaaaaaaaaaaaaaacaatggaaggcagacagcaagtccctgaggacacatcacacagtgtcctgtagctaagtgtctaggaaaaaacaaaaactccaaacccttcagtggatgaggacaaggtcgcagaaaggcattctgttgacagatgaacagccgaaagctggccagaccctcctgtatgcctctgcccttgtcctgtgggttgagggggtctgaccacggaggccacctacagcaggaagtgaggctgcccatgtttcccttgagacacaggtggcctctcccccagctctgtccctgtaagttccctgccggtggggcgaggatccttctccctgggataagcaactcccagccccgtttatcagaaacacaggcaaggaaatttggaactgccacccagcccagcatggtgggctcaatttggttgggttgcgttgtcagttgtctcttccgttttgttaaggtttttaataaagtacgtttggcataatgtcttttaatgggtttgtaatatttgtaacggttttagcgagcctataacttttcagctgggtgcttttacttaggggaaaaaaacaatttgtaaatacaggaacattgttttaaaaggacataaccatagaacaaagcttcctgttttgtggattttgtttcctatatattcaaagtaaaatggcttccaggaaaaaaaaaaaaaaaaaaaaaaa

SEQ ID NO: 148539 - DNA, 616 bp, Homo sapiens
ggtggctctgcacgaaaggagtagctctgtttccactattgacactgcccggctgattcaagcttttggccatgaaagagtatgcttgtcacccagacgaattaaattatatagcagcatcaccaaccaacagaggagataccttgagaagcggagcaaacacagcaagaaagtgctgaatacaggtcatcccctagtgacttctgagcacaccagaaggagacacatccaggtagcaaaccatgtgatttcttctgactctatttcctcttctgccagtagtttcctgagctcaaactctactttttgcaacaagcagaatgtacacatgttaaacaagggcatacaagcaggtaacttggagattgtgaacggtgccaaaaaaacacactccgagatgttggggataacttttcccaactccaagttccagcggagggctaaattggaaagaagaacagtgatgtggacttcttgggtcagaaggaaaaacgtgaaggaggaaaatgctctttaccgggttatcctgaggacaggaaagttaaaaaagaacaagaaggattcccatggaagggagtttccgggtttgtttcctgtgggaaaatgtggagtctag

SEQ ID NO: 148540 - DNA, 6422 bp, Homo sapiens
  misc_feature (1)...(6422): n = a,t,c or g
gttagctcaaataatgtgcttttaaattctcaggctgatgacagagttgtaataaataaaccagaatctgcaggttttagagatgttggctctgaagaaatccaggatgcagaaaatagtgctaaaactcttaaggaaattcggacacttttgatggaggcagaaaatatggcactgaaacgatgcaattttcctgctccccttgcccgtttcagagatattagtgatatttcatttatacaatctaagaaggtggtttgcttcaaagaaccctcttccacgggtgtatctaatggtgatttgcttcacagacagccattcacagaggaaagcccaagcagcaggtgcatacagaaggatattggcacacagacgaatttgaaatgccggagaggcattgaaaattgggagtttattagttcaactacagttagaagtcctctacaggaagcagagagcaaagtcagtatggcattagaagaaactcttaggcaatatcaagcagccaaatctgtaatgaggtctgaacctgaagggtgtagtggaaccattgggaataaaattattatccctatgatgactgtcataaaaagtgattcaagtagtgatgccagtgatggaaatggttcctgctcgtgggacagtaatttaccagagtctttggaatcagtttctgatgttcttctaaacttctttccatatgtttcacccaagacaagtataacagatagcagggaggaagagggtgtgtcagagagtgaggatggtggtggtagcagtgtagattcactggctgcacatgtgaaaaaccttctgcaatgtgaatcctcactgaatcatgctaaagaaatactcagaaatgcagaggaagaggaaagccgggtacgagcacatgcctggaatatgaagttcaatttagcacatgattgtggatactccatttcagaattaaatgaagatgacaggaggaaagtagaagagatcaaggcagagttatttggtcatggaagaacaactgacttgtccaagggtttacagagtccacggggaatgggatgcaagccagaagctgtatgtagtcacattattattgagagccatgaaaagggatgtttccggactctaacttctgaacatccacaactagatagacacccttgtgctttcagatctgctggaccctcagaaatgaccagaggacggcagaacccatcatcatgcagagccaagcatgtcaacctttctgcatccttagaccagaacaactcccatttcaaagtttggaattccttgcagttaaaaagtcattccccatttcagaactttatacctgatgaattcaaaatcagcaaaggtcttcgaatgccattcgatgaaaagatggacccttggctgtcagaattagtagaacctgcttttgtgccacctaaagaagtggattttcattcttcatcacaaatgccgtccccagaacccatgaaaaagtttactacctccatcactttttcatctcaccgacattctaaatgcatttccaattcctctgttgttaaggttggtgttactgaaggtagccagtgtactggagcatctgtgggggtatttaattctcatttcactgaagaacaaaatcctcccagagatcttaaacagaaaacctcttccccttcatcatttaaaatgcatagtaattcacaagataaagaagtgactattttagcagaaggtagaaggcaaagccaaaaattacctgttgattttgagcgttcttttcaagaagaaaaacccttagaaagatcagattttacaggcagtcattctgagcccagtaccagggcaaattgtagcaatttcaaggaaattcagatttctgataaccatacccttattagcatgggcagaccaagttccaccctaggagtaaacagatcgagttccagactaggagtaaaagagaagaatgtaactataactccagatcttccttcttgcatttttcttgaacaacgagagctctttgaacaaagcaaagccccacgtgcagatgaccatgtgaggaaacaccattctccctctcctcaacatcaggattatgtagctccagaccttccttcttgcatttttcttgaacaacgagaactctttgaacagtgcaaagccccatatgtagatcatcaaatgagagaaaaccattctccccttcctcaaggtcaggattctatagcttcagaccttccgtctcccatttctcttgaacaatgccaaagcaaagcgccaggtgtagatgaccaaatgaataaacaccattttccccttcctcaaggtcaggattgtgtagtggaaaagaataatcaacataagcctaaatcacacatttctaatataaatgttgaagccaagttcaatactgtggtctcccagtcagccccaaatcactgtacattagcagcatctgcatctactcctccttcaaatagaaaagcactttcttgtgttcatataactctttgtcccaagacttcttccaagttggatagtggaactttagatgaaagattccattcattggatgctgcttctaaagcgaggatgaatagtgagtttaactttgacttacatactgtatcttcgagatcactggaaccaacctccaaaattattgaccagtaaacctgtagcacaggatcaagaatctttaggttttctaggacctaaatcttcactggatttccaagtcgtacagccttctcttccagacagtaacactattactcaggacttgaaaaccataccttctcagaatagccagatagtaacctccaggcaaatacaagtgaacatttcagatttcgaaggacattccaatccagaggggaccccagtatttgcagatcgattaccagagaagatgaagaccccactttctgctttctctgaaaaattgtcatctgatgcagtcactcagataacaacagaaagtccagaaaagaccctattttcatctgagatttttattaatgctgaagatcgtggacatgaaattatagagcctggtaaccagaagctacgcaaagctcctgtcaagtttgcctcatcatcttcagtccaacaggttactttttctcgcggcacagatggccagcctttattattgccatataagccttctggtagtaccaagatgtattatgttccacaattaagacaaattcctccatctccggattccaaatcagataccaccgttgaaagctcccattcaggatccaatgatgccattgctccagacttcccagctcaggtgctaggcacaagagatgatgacctctcagccactgttaacattaaacataaagaaggaatctacagtaagagggtagtgactaaggcatccttgccagtgggagaaaaacccttgcagaatgaaaatgcagatgcctcagttcaagtgctaatcactggggatgagaacctctcagacaaaaaacagcaagagattcacagtacaagggcagtgactgaggctgcccaggctaaagaaaaagaatctttgcagaaagatactgcagattccagtgctgctgctgctgcagagcactcagctcaagtaggagacccagaaatgaagaacttgccagacactaaagccattacacagaaagaggagatccataggaagaagacagttcccgaggaagcctggccaaacaataaagaatccctacagatcaatattgaagagtccgaatgtcattcagaatttgaaaatactacccgttctgtcttcaggtcagcaaagttttacattcatcatcccgtacacctaccaagtgatcaagatatttgccatgaatctttgggaaagagtgttttcatgagacattcttggaaagatttctttcagcatcatccagacaaacatagagaacacatgtgtcttcctcttccttatcaaaacatggacaagactaagacagattataccagaataaagagcctcagcatcaatgtgaatttgggaaacaaagaagtgatggatactactaaaagtcaagttagagattatccaaaacataatggacaaattagtgatccacaaagggatcagaaggtcaccccagagcaaacaactcagcacactgtgagtttgaatgaactgtggaacaagtatcgggagcgacagaggcaacagagacagcctgagttgggtgacaggaaagaactgtccttggtggaccgacttgatcggttggctaaaattcttcagaatccaatcacacattctctccaggtctcagaaagtacacatgatgatagcagaggggaacgaagtgtgaaggaatggagtggtagacaacagcagagaaataagcttcagaaaaagaagcggtttaaaagcctagagaaaagccataaaaatacaggcgagcttaaaaaaagcaaggtgctttctcatcatcgagctgggaggtctaatcaaattaaaattgaacagattaaatttgataaatatattctgagtaaacagccaggttttaattatataagcaacacttcttcggattgtcggccctcagaggagagtgagctgctcacagatactaccaccaacatcctttccggcaccacttctactgtcgaatcagatatattgacccaaacagatagagaggtggctctgcacgaaaggagtagctctgtttccactattgacactgcccggctgattcaagcttttggccatgaaagagtatgcttgtcacccagacgaattaaattatataggcagcatcaccaaccaacagagggagataccttgagaagcggagcaaacacaggcaaggaaagtgctgganttacaggtcatcccctagtgacttctgagcacaccagaaggagacacatccagcctcccacctctgccacagcctgcaggcaaccactaatgactttctgtttctatggatttgcctattctggacctttcatataaatggaatcacagtctttcgtgactgacttcattcacttaacatagtattttcaaggtagcaaaccatgtgatttcttctgactctatttcctcttctgccagtagtttcctgagctcaaactctactttttgcaacaagcagaatgtacacatgttaaacaagggcatacaagcaggtaacttggagattgtgaacggtgccaaaaaacacactcgagatgttgggataactttcccaactccaagttccagcgaggctaaattggaagagaacagtgatgtgacttcttggtcagaagaaaaacgtgaagagaaaatgctctttaccggttatcctgaggacagaaagttaaaaaagaacaagaagaattcccatgaaggagtttcctggtttgttcctgtggaaaatgtggagtctagataaaaagaaggaaaacatgctcaagactcatgaccctggcatctcccggttggaaccagtaaccaagaccaagccgtggagggagccactgtgggagcggaactggcaggggcagcacctggacagtcggggctacctggcacgcccaggcagagaggatggcacaaacccactgaagctgtttgtgagagcaaccctgcaggaatcgcttcagtttcacagaacctgacttcatctcccgctctggggagcggataaagcgcttgaagttaatagtccaggagaggaagctgcagagcatgttacagaccgagcgggatgcactattcaacattgacagggaacggcagggccaccagaatcgcatgtgcccgctgcccaagagagtcttcctggctatcgcagaagaacaagcctatcagcgagagggaaatgattcagaggtccaaacggtaagaccaagaaaacaagagtacgtatacaagtgtaaaccaggccaccaagtggtcgggagctctggcttgcacccagaataaatgtattatactcaagtttaaacattatgagaaagttgtgagagtcatttctcacttatggcactgaaaaaaaaaaaagcacatcatggtatgaatgactcatatgcaaaagatgaaaaacttctcactaatttgcatgtcttaggctcctctttattagaaacctaaatgtaaataaagaatattttaggccaggtacggtggctcatgcctgtaatcccagcacttagggaggccgaggtgtgcagatcacatgaggttaggagttcgagaccagcctggccaacatggtgaaactccatctctactcaaaatacaaaaattagctgggtgtggaggcacacgcctgtaatccccagctactcagtaggctgagccgggaggatctcttgaacctgggaggcagaggttgcagtgagcttagatggtgccactgtactccagtctgggcgacagaacgagactccatctc

SEQ ID NO: 148541 - DNA, 455 bp, Homo sapiens
ggaccaccaccgcgcttgggctgttgaccatccccatcattatccaccccattgacaggtcggtggatttcctcctggactccagcctgcgcaagctctacccaacagtggggaagcccagctcctcctgatcatactctggtacctggcctgtgcatcggcctcctgcttcatgtcaacctcctactcctgccagggaatgtggacacctggctccctggtgtccaaagaccctggcacctgggtgggtttgagctggacagaagcttagagacaaaggcttcaagaagcagtggctgcagggagtcacagaagggcaggacctgaacgctgtctgcttccctggaatccaagatgctgagtggaagtggaccctgggtgggcccggccctgtctttttcaggacagattctctggccaggcccttccctgacccaataaatcctgaaaaggtt

SEQ ID NO: 148542 - DNA, 209 bp, Homo sapiens
  misc_feature (1)...(209): n = a,t,c or g
gagaagacgacagaagggcaggacctgaacgctgtctgcttccctggaatccaagatgctgagtggaagtggaccctgggtgggcccggccctgtcttacatcctcccatggaggatgagagactgaggctcagggagggcaaggaataggcccaagatcacttggcaagctgggcacccaggacccncaggtgcttgacagagtcacc

SEQ ID NO: 148543 - DNA, 1815 bp, Homo sapiens
ggcacgaggcgattagcgccaacagctcagagaaaacgtgacgaaaaccagtctgtaaaacccgagcctgggagaggggcttcggtgcgcggggggaatttgcagacgctccctgctggcggagatttcctgacctgtccttcggcgcgggactttcggcgggtcccggccgggcagacccaagtgccggcggcggagactgcagtggagccagtaccggctgtagtggccggggcccgtggcgggagagtcatgtcagagccgcagccgcggggcgcagagcgcgatctctaccgggacacgtgggtgcgatacctgggctatgccaatgaaggtgggcgaggctttccgctctcttgtgccagcggcggtggtgtggctgagctatggcgtggccagctcctacgtgctggcggatgccattgacaaaggcaaagaaggcttgagaggtgcccagcccttgaagcaagccgcagcgccagggtgaccgtggctgtggtggacacctttgtatggcaggctctagcctctgtggccattccgggcttcaccatcaaccgcgtgtgtgctgcctctctctatgtcctgggcactgccacccgctggcccctggctgtccgcaagtggaccaccaccgcgcttgggctgttgaccatccccatcattatccaccccattgacagggatcatccactctccagtgatgagagtggatcatccagtctccaggtcggtggatttcctcctggactccagcctgcgcaagctctacccaacagtggggaagcccagctcctcctgatcatactctggtacctggcctgtgcatcggcctcctgcttcatgtcaacctcctactcctgccagggaatgtggacacctggctccctggtgtccaaagaccctggcacctggctcagagaggtagagaggtgggagcacagggctgaagcagacctgggcccctctcagccctgccccaagcaccaaatcagctcccaccaagaccctggccccatcccttgcagcccagtccctgccatacctggctatgaggtcttcactgccccattcaaagcttatggcttcatccaactggtgagggggctgttggaggctcacgaggacaaggctgccaagagccagggagtacccgggagattcgggggagaagagctggggtgtctgggctggaaagaagggtgcctggtgaacggcaagaacttccactcccacttcgtgccccaagaggtccccaagagactggagctctccttccaggccttcagctttactggtactcctgctgatgtcccatctgatgctaccaagaaggcctgttccttccacaggggcactcatggctggtatacctgcaccctctcccatgtgaacaacatggttctgggtaatgggggctgtcatccagtctcctccctgcccctgctggtgcacttcctgcctctgctggtgcactttctgcccctactggtatatttgctgcctctgctggggcgcttcctgcctcggctggtgtatctcctgcccctgctggtgcactttctgcccccgctgatgcacttcctgcctctgctggtgcacttcctggctctgctggcgcacttcctgcctctgctggtgcacttcctggctctgctggcgcacttcctgcccctgctggtgtatttcctgcccctgctggtgtacttccttcccctgctggtgcacttcctgcctctgctggcgcacttcttgcctctccaggccctacctagcctctccctcttatatatggaagtcttcccagttcactga

SEQ ID NO: 148544 - DNA, 935 bp, Homo sapiens
cggtggtgtggctgagctatggcgtggccagctcctacgtgctggcggatgccattgacaaaggcaagaaggctggagaggctctagcctctgtggccattccgggcttcaccatcaaccgccgtgtgggctgcctctctctatgtcctgggcactgccacccgctggcccctggctgtccgcaagtggaccaccaccgcgcttgggctgttgaccatccccatcatttatccaccccattgacaggtcggtggatttcctcctggactccagcttgcgcaagctctaccccaacagtgggaaagcccagttcctcctgaatcatactctggtacctggcctgtgcatcggcctcctgcttcatgtcaacctcctactcctgccagggaatgtggacacctggctccctggtgtccaaagaccctggcaacctgggtgggtttgacgctggacaagaaaccttagaagacaaaggcttccaaagaaagcagtggcctgccagggaagtccacagaagggacaggaccctgaaacgctgttctgcttcccctggaatcccaagatgcctgagtggaagtggaccctgggtgggcccggccctgtctttttcagggaaaattaccatcctccccatgaaggatgagagactgaggctcagggagggcaaggaataggcccaagatcacttggcaagctgggcacccaggacccccaggtgcttgacagagtcaccccatggtggtatggctgaacaaggagcggcagacaactcagggagaaactcaggagtgcagtaccagggacaccttcaggacagattctctggccaggcccttcccttgacccaataaatcctgaagagcaaaaaaaagaaaaaaaaaaaaaaaaaaaaaaaaagtcgtatcgatgtcgagcgatcatgatgatgatgatgt

SEQ ID NO: 148545 - DNA, 2230 bp, Homo sapiens
  misc_feature (1)...(2230): n = a,t,c or g
caatcgaattcttgttattacatccaaagcaggtgaggtgataaagcacggggacctgagatgcgtgcgcgatgaaggaatgcccatctacaaagcacccctggaaaaagggattctgatcatacagtttttagtaatctttcctgaaaaaccactggctttgtctgggaaaagcttccttcagctggaagctttactccctcctccgacagaaagtgaggattacagatgacatggatcaggtggagctgaaggagttttgtcccaatgagcagaactggcgtcagcacagggaggcctacgaggaggacgaagacgggccccaggctggagtgcagttccagacggcatgacgtggtgcggggcagcgtggccccaccggactagcacatgattgaatgtaaagttggcacaatgaaaatgacatcgctttaatggccttgtgtttgggatgtcctgtgtatgtgttcagcattcttaattgctgagtgtctttttggcttttcttttggttgtaacttaagttataggcttaatttatatttaaatgttttaagtataagactacctgtattctgcatatggaatctggtcattgctatgttcaggatatacttgtgagatgtcagtgattgcaccaacactttgtgcttctagtggctttgccataattcagtgtcaccaataaggcacagcccagttagcagcttagcccccctagcaaaccccaagggcacaaagtggggcatcctgacttcatctctaggtctgtggtttctccccttcttcccttggtccgagttattgagggcatgacctcagggctgctaagataacatttctgaggattctagatgatcctcttaaagaataaaaggcacatccgtggaatcgggaccatggctgcatgtgcctgctttaacagggcccaacttagttccctactgtttctgtgccctttcagtggatgggaacgtgaattttcttgatcatctctcttggaagttttctgaaccttgcaagcgctgtggtgaggacaaaccagtgtttgaatcatatggctggataactgtttgcctgtgaaccctcacaccttggtttcttcagggtttttaatgattttctgttgacaacttttggcaatgctttcccacccaaganagtgcttactttgtaaagaaaaactaaaatccttctgtgttccccgggcagccttcagtggcaggcaacaggaaggccaaggggaggaatgctggctgggtttgggcccatgggcacagccaggctttctctggaccagtaaatccgggggtgaacttgaagggtcttgcaaaaggcataagaactcccccagtggtttttccacctcaattctcccagattgaagctcccttccaaaggaatcgttcctctcattgcacaggccatattacaaagggtttcctgctcaagtgatgttttggtaagaacttcgctggagttccactgtggattacagtttgtaatggactactactgtaaattatagcttgtttggagggatattagtcattattttattcatgacaggtagacttacaattccgaactttaggggttacctcagtctttaggccattactggcttatttcttttccccaagtcacaaaaaaccttgtaagctgccggggttaaaaagcaagaggcccacctgtcaagatcctacccctaccccttatttgggttaacatggcaccctgaagagtttccacctcagaccccagggatccttcccttagggaggggtcaaaagtgccagatcagacccatggcagggtnaaggtgaacccaggctggcacgggacccgggttccccgcaaaaacattggcccagcctagtgagggcataatttgcctcaaaagtatagaaacagccccacctggtggccacntttgacccattggtgaggatagatataaaatcacttccttcccaacgaagccctaggtgaaaatcttatttataaatggaccacccaattctggggtgtcgtttttgtgctgtgacttccctaattattgctaaagaactactgtttagttggtaatggtgtaaaattacattcagctccttcttgtcatataaagggaatttggagggtgtcgcttaaaattttattccacctgtacatttgtcactttaaaattaaaattgagtctggtatgagagacaaaaaaaaaaaaaaaaat

SEQ ID NO: 148546 - DNA, 374 bp, Homo sapiens
gttggatgacacttgtgatctctttgcccccctagtccaggagactaataagcagcccccccagtcggtgaacccaattagccatcactcccacgcggctgtttttatggattcatggagtgggctcatgttgggaccagctgactctgggaggaagactgcctctccatcgctgtcagagagcctgaaaggaccaacaatgagatcatggattcctgatacctctcactcaaggggaccaaaagggacccccccgtgttcatcccttgtaagcttgttatcactggaatcaaagggaaaaagtgatctcttcttgcattggttgtatttgtatgtcacaaataaaagaccctttggtcaaaaaaaaaaaaaaa

SEQ ID NO: 148547 - DNA, 1100 bp, Homo sapiens
tttttttgagaatggagtctcactttctgtcgccctaggctggagtgcaatggcgtgatctcagctcaccacaacctccacctcctgggttcaagcgagtctcctgcctcagcctcccgagtagctgggattacaggccacaaccacgcctggctaatttttgtattttttagtagagatgggcttttgccatgttgaccagggctggtcttgaactcctgacctcaggtgacccgcctgcctcagcctcccaaagtgctgggattacaggtgtaagccaccgcactcagccatgcctgctgtttctcaaaaccaagacctgggggaagtgggagaaagatgggatgttttgggaaatgaatggggctcaagaccaacaagagtgattgcaggtctcagatagtgcctctccccaccctagtcccgacctcctgaggaacccttcaggacatggcctgcagagactagggtgagcagggtatggcaccaagcacccattgaccagttggtgccacgcatccagtgactggaaagagacaacgtagactgaactcaccttacaagggatgaacacgggggggtcccttttggtccccttgagtgagaggtatcaggaatccatgatctaagacaataaatatttagcatctgtgtcctttcagagacagggaccagagacaaatctcttcctaaacatgctcctgtggtttcatgattcttaggagtccaccaaacccctccagcaatgtcaactctgcctgggatgaaacccaccaggagccagcagggtgaggcagaggcagaggctgacttattccagtgtaaagctgcaaggccctctctaaggagttcccagtcccactgctgcccatcaagagcagcgcaaagtgctcagcagaggggccagtctgggtgaggtaggccctgtgtacacaggctcctgcacaagcaggaatccaggtgagaagcaaggaccactctggggagatctgccaggagagactgccagagttgggcacagggtgggatgtgagcagatcctgaggtcagagggaccaacagacctccacgagaacaacttcacgaaggctagaaccttt

SEQ ID NO: 148548 - DNA, 624 bp, Homo sapiens
tttgagacagggtcttattctgtcacctaggctggtgttcagtgtgcagatctcggctcactgcaacctctgcctcccaggcccaagcgatcctcccacctcggcctcagaagtagttggaacaagtgtgtgccacagacacccagctaattgtcatctacccacttcagcttcccaaactgttcagattacaggtatgagccactgtgcccagcagaaattacatttataaattaatatgaagacatggtgataactaacatatttataacatgaaatctgctcatccaggaacatagaatgcaaatctttcattccactcagcaaaattttgtcctgtccttgataaaagtcctgcacatctaagtttattcctaggtatttaatttttgctgaaatacctgaaaaaatacttcatcactatatcttctacgtgattatagctaacactggggaaggctattgatttttatataaaagaacttttaaccactaatcttaaaaattgtttttctcagttggttcctttggatatttttaggtaaacaatcatgtcaactgaaaataatgataaattttctataaagactatgacatcacaggaaaatacagtaaatacttttt

SEQ ID NO: 148549 - DNA, 1268 bp, Homo sapiens
tctcttttatggtgtttattttctatttccattgaacagttgtattttatttgtgtctttcactgtaaatcacctccaaatctttttttttgggggggggatgaagtcttggtctgtccgcaggctggagtgcagtggcgtgatcttagctcactgcaacctccgcctcccaggttcaagtgattctcctgcctcagcctcccgagtagctgggactacaggcacgtgtcaccgacgcccggctaatttttgtatttttagtagagatgggggtttcaccatgttgggccagggatgggctgggatctcctgacctcgtgatccacccacctcgggactcctaagggtgttgggggattacagggcgtgagccactgcggcccgggcccatcacctcaggggttttacttaaaaattaaagagttggggtcctctcagggtggggagcagttcccctgatgataggggggcacaggtgggttgtctgcaaagaacttcaagtcccagtgctgggctcaccctggcttctgcaggagatggggccattaggaaagtgtgagctagaggatacccattttcgcagaagcaggaattcccagggagggaaaatggtaaggatgtgggggctgggagggaaagcgggtgccacagcaggttagaggagggtttagaagtatcgcagcacactgggaagagcgcagtctctgcagtcccactccagctgtgggtcttgggcaagtccctttatcccatgagcctcagtttcctcatttgtcacgcatagataataacacatcctttgcaaatatggtatgaggattaaagtgaaattaacaggtgaagcacctggcatatagaggaccataaaataaaaaaggagctgtttctataattgcatcttggagctgcagaatagcttgaatatttgaaggtcaactaaagggtcttaggaatgtttcagaaatgcaatgcaatgaaaaccccttcctccatactctaatagcgggtgagtagctgactcttccacaggtgagtataaaagctgtgtcaacagatgaagtaggggaaggtggttctaaggacattcaaggcgaaagttgttgagatgtacaggcttcccggggcctagtgcatgagcacagggaggtagagggtgaggaggagcggtctgtgggactctgcttcctgtctgggatggggcgggcttgccgggtgggggtttctcttgcagtggcttggtgcagcagtgatgtgaataggatttccga

SEQ ID NO: 148550 - DNA, 2502 bp, Homo sapiens
atggacctcatctgtgtgtccccaccatccaacacagggattaacgaagggtggggggcatggggcatagggggagacagcatcgcctgcttcctgggaactcttgtagggcagaacctgactattactgatgttctccaggacctcacacacagtaggggctcacccagggcccctcatcagggtacaggatgcagctgccggcacagcagcaaaaagaatgggaaggggctgggagaagtagatcccaggaaagttgagaggcttcagctggtggtccctttcagaagagctgctgacaaagaccccaggcagcaggctctgccagcatggcactgggcactgggtgcagaactcaggcttcagaggcagagagatccagattcaagccccagtgggacccagccccagccggggcagggcccctttaacgccccacctctccgccacgactttcgccccggcgtgacgtcaccccagcgggcgaccaatgggagtgcggcttactggcaggcggcgcaggcggccgctgccaaaggggaagtgatctggggctggagcgatggcccggggctggagctcgcggccgccgccgccgcagccgccgccaccaacgccaacaacaacgtgtcgggagcagccgcggccgaagccggagcaggggccggagtcgcggctggagtggggcctgcgcgtgaagggactgacgcgttcccactttcttactctgcacctccccactctcttcccattcaagaacgagtttctcttccctctccattggaaatcttgctccggaggtccgaaacacgattcccaaccctggaaggcagctccaaggcaggaagagaattgggcatcgggtacgaacctggcagctcaggagtcggggctccactcaccccacacaaaaagatgaaaaagcgcaaagagctcaatgcattgattggtttggctggggacagccggagaaagaagcccaagaaaggcccaagcagtcaccgcctgcttcgcactgagcctcccgactcagactctgagtccagctccgaagaggaagaggaattcggtgtggttggaaatcgctctcgctttgccaagggagactatttacgatgctgcaagatctgttatccgctctgtggttttgtcatccttgctgcctgtgttgtggcctgtgttggcttggtgtggatgcaggttgctctcaaggaggatctggatgccctcaaggaaaaatttcgaacaagtaagagatgtcaagaattataccctggactgcggaccctgctttctaccattgagccacattcccctgggaccctaactacatttgtcagccagctgaatgaagcagatttggaattctcattccaagaaatccccaaacttaatgaagaactactcagcaagcaaaaacaacttgagaagattgaatctggagagatgggtttgaacaaagtctggataaacatcacagaaatgaataagcagatttctctgttgacttctgcagtgaaccacctcaaagccaatgttaagtcagctgcagacttgattagcctgcctaccactgtagagggacttcagaagagtgtagcttccattggcaatactttaaacagcgtccatcttgctgtggaagcactacagaaaactgtggatgaacacaagaaaacgatggaattactgcagagtgatatgaatcagcacttcttgaaggagactcctggaagcaaccagatcattccgtcaccttcagccacatcagaacttgacaataaaacccacagtgagaatttgaaacaggatatcctgtaccttcacaactctttagaggaggtaaacagtgccctagtggggtaccagagacagaatgatcttaaactcgagggaatgaacgagacagtcagtaatcttacccagagagtcaacctgatagaaagcgatgtggttgctatgagcaaggtagaaaagaaagcaaacctgtccttcagcatgatgggtgatagatctgccactctgaaaagacagtctttggatcaagtcaccaacagaacagatacagtaaaaatccaaagcataaagaaagaagatagttcaaattctcaggtatccaagctaagagagaaactccagctgatcagtgctcttacaaacaaacctgagagcaacaggcctccagagaccgccgatgaagagcaagtagagagtttcacatcaaagccatcagcattgccaaaattttcacagtttcttggagacccagttgagaaagctgcccaactaagacctatctccctaccaggagtttctagcactgaagatcttcaggatttattccgcaagactggccaggacgtggatgggaagctgacctaccaggaaatctggacctccctaggttctgctatgccagaaccagagagcttgagagcatttgattccgatggagatggaagatactcattcctggagctaagggtagctttaggtatctag

SEQ ID NO: 148551 - DNA, 5787 bp, Homo sapiens
cgccgccgcagccgccgccaccaacgccaacaacaacgtgtcgggagcagccgcggccgaagccggagcaggggccggagtcgcggctggagtggggcctgcgcgtgtgagtggccgagagttgcccgtgccggagacctcaaactccgggcgggagcgctttcggtgggccgagccgccgtcgcccgcggcaccgtgtccccaaggcccagacagcggggcgggggtctatcaggcgcgggactggcttctctcaggccgacccttctagccgggctccggatcttcctcggcctcgggcccccttcacgttcaggacggaggccggagaacggtgatcatcacacaccccagccggcttcctggccagggcattttctctgcggccaagcagtgttgggattgtagctgctgggagccccctcctgccgccacctctcctgcaaggaagggactgacgcgttcccactttcttactctgcacctccccactctcttcccattcaagaacgagtttctcttccctctccattggaaatcctgctccggaggtccaaaacacgtattttaagcgtgcccttcctcacctcctggagcacccttagaagtattgcctacttatccgggctgagaatccttcatttttgacctggcttttttttcgccctttgggagataaaggtccctctccaccctctactaacactctgcacccaaggccttatcctttggggtcaccagctccttggccatttctatgtgatttcccccacccatctgagttccagtttcctctgggctccaatctccagtccctggcggatctggtcagtcccacccctaggtgggagtgaccagggggctctggcccaggattcccaaccctggaaggcagctccaaggcaggaagagaattgggcatcgggtacgaacctggcagctcaggagtcggggctccactcaccccacacaaaaagatgaaaaagcgcaaagagctcaatgcattgattggtttggctggggacagccggagaaagaagcccaagaaaggcccaagcagtcaccgcctgcttcgcactgagcctcccgactcagactctgagtccagctccgaagaggaagaggaattcggtgtggttggaaatcgctctcgctttgccaagggagactatttacgatgctgcaagatctgttatccgctctgtggttttgtcatccttgctgcctgtgttgtggcctgtgttggcttggtgtggatgcaggttgctctcaaggaggatctggatgccctcaaggaaaaatttcgaacaatggaatctaatcagaaaagctcattccaagaaatccccaaacttaatgaagaactactcagcaagcaaaaacaacttgagaagattgaatctggagagatgggtttgaacaaagtctggataaacatcacagaaatgaataagcagatttctctgttgacttctgcagtgaaccacctcaaagccaatgttaagtcagctgcagacttgattagcctgcctaccactgtagagggacttcagaagagtgtagcttccattggcaatactttaaacagcgtccatcttgctgtggaagcactacagaaaactgtggatgaacacaagaaaacgatggaattactgcagagtgatatgaatcagcacttcttgaaggagactcctggaagcaaccagatcattccgtcaccttcagccacatcagaacttgacaataaaacccacagtgagaatttgaaacaggatatcctgtaccttcacaactctttagaggaggtaaacagtgccctagtggggtaccagagacagaatgatcttaaactcgagggaatgaacgagacagtcagtaatcttacccagagagtcaacctgatagaaagcgatgtggttgctatgagcaaggtagaaaagaaagcaaacctgtccttcagcatgatgggtgatagatctgccactctgaaaagacagtctttggatcaagtcaccaacagaacagatacagtaaaaatccaaagcatacagaaagaagatagttcaaattctcaggtatccaagttaagagagtaactccagctgatcagtgctcttacaaacaaaacctgagagcaacaggcctccagagaccgccgatgaagagcaagtagagagttgcacatcaaagccatcagcattgccaaaattttcacagtttcttggagacccagttgagaaaggctgccccaaactaaggacctattctccctaacagggagtttcgaagcactgaaagatcttccaggatttattccgccaagactggccaggacgtgggatgggaagctgacctaccaggaaatctggacctccctaggttctgctatgccagaacccagagagcttgagagcattcgatatccgatggagatggaagatactcattcctggagctaagggtagctttaggtatctagcttcatcaggcatattttagaaatggacatgcctaatatctatttacctaacaacaaaacaacccttacttacccatcagtcctctagtcctccaaactactgtagcagatactttgccaccttttaacttgtttgaagaagctatataaaagttattttaattaaagaagaagaccattttacttatgatgttcaggaaatctatgatttcctacaaccagtaaggttcttacatttttaaaattggccagaaaaaaaattaaagccctctttttttctctttcctttttttgagggggaggagaccttatcttttaaagctgggaaatgtatatagagagagaataagccacttttatatttcacttaaatttgccttaaattagctgcactttatagagactcagaaaatgtcttttctttaaaagataggccttttctgtttgtaaatatttaaatgaaagaaagcattgtgcatattgtgtggaaagtaggaagaatggttttgaacaggatatgaacaaatgacttattaaaaattgctgatctggtgtaggtggcagctgaaactacatccatgtctccataaggcatccctcaaaggcccaggcgctgccagggggtttgtcctggtagctggaggaaccgatttcagggaatagacactggagacaatactgactccaggcatggctcatggaagtaggattctggttctttgttcctattccctcagctaatcccaacctgggaatcagagaagtcttggggatttttctcatttttagtactatttcagggtttatgagcataaaaagttatccattggggagctccattttccctgctgagtgagctagattgccttccccacccacccacttaagtctgtcttaaagccgtagctggctcccaccaccagtaccatctccatttgaatggcagggctaaattcccccagccattatctcacactgaccacccagagctttagaagagagctgtgcttctaattttgacccagaaaaccataccccttgagattttacctagaggctaaccaagagcctaatatgtttctctgggggatgactaaagccaaaaaggctgtgagatgaaacatgtgaaataatattcagtttccttaccattaccagctcagaagtagctagaggctttctacccaaaggatgccaaagtatagcagggcaggcctggagctagggccttcacatggtggtagcaagtttttcaaatctaatacaatcaagtacaatacttcctttaaatgcttctgtggacctggcatgaaagatccctagattgaaaggaataatacctccatgtctcctgtatgttgagtctagaattgctgtgttgttcttagaagcagtctttgggcaacaacttgaaaggggaaaaaaaaactacaaaaacttaactttggtataggccaagtcagggagaaagtagagaaagctgtcatgccacagacttctttagtggagatcatttcctttttaactttgttcaggttgcccttcaccatggatacagtccggtacccttaaacatttaagggctgtttttttttttctttatatgatgttcagcttggtattaaccaaacttaaattttttttccagaagtattaaaatttagttaaagcaagatgaagtcttttcccatgaatgtgtccccttatctcattatagcttatgctcagtttcactttcttggaaaggttaaaacaaattagcctggcactttaggtaacttgaaaataactctcacccttctgactgccttccatccactctcaccccacacctttttttaatatatatacacccttacagattttctaacaaccaaataaaattctagcaataaattgaattatactgctatatttgtatatactgtaccataaatagtatgtctgtacctggaaggtatttttttgagaactgatttatatgaaatatacttgagggtaatgtagcttgtcctttttagtttcaaattcttattcataggcagatactttgaagacaccttaactctttgttgtgtgtattttcccttgcatcagataactatacatggagaaatccattttgttttttggtttatcttctgttcttcctaccttgtgcttgtctgactagtatcacccctgagccagtatacagtaccatcctctccccctaccaagtttggcagaggtgtttatactgcattctcagatctatgaatatttttgtcatcctgcctgagaaagtacatcttccaggcaaaagtagggtatcttgaactcctttcttctgagttgagcagactcactggcttaagcatcccataagcctattatttagtgtgaatttgggacttttatttgtatgttgtcttaacttactgagcctgtgacttgtatttagctgtagtcaagcctcaccagccatatctcatctctgagaggaagactggatagtgagtttggttttggttttggttttaaacccttttaccttttcagtctggcagctcctactgctgctttcctaagttactcaaagcactgcttcttggtccttgttttcttttgccttgtactatcttgtataatgtttactaaaagagcctccccataaatcagagaggcaaaaaggtagcatataaaaagaagaaccaaaagaagagaaaacctgacttctagatgactgtggtgtcatctaaaaggcagaggtgcctgaccctcaggaatgtgtatgatgcaacagagctgaagaatgggttcccttcacctactgctggccattgtcccttctgttggagattcctttctttatggttgctgttcataaccccttcaacacccccccttgctggtcctgccggtcacagttgaggattttggctgtgatgggctcatactcataatggcctgttgagttgtttttagtgacaggttttgtttgctgcacacctcattggcttgcttaccaacaccagctagaagtggtccctctttcatatccaaaccagaacacatttgggtattcctgagactttatagagcgtgtattgtttgttatacgaacctaacctaccttgttgttttctcatattaagaaatttaaatctactttgttttagtgaagctattttggtaatgtataagcaattttggttctgtttagggagaattcagggtttccatgacttgatttgagctttgcatatttcaaataagtaacacagccattttaatttagctaaataaaaaaatttcttttttctctc

SEQ ID NO: 148552 - DNA, 549 bp, Homo sapiens
  misc_feature (1)...(549): n = a,t,c or g
gtgaaccactgtgtctggcctcagtgtctaaatcttgagaagccacatcctccatcgaaggccccctgaactcagatttgcaccatcaaggccctggtgtccttggatccagaacagacatgaacttgcatttggaggtcttcgggcctgggtggtgtccttcgtacatagtccctggaggctgagcttgtcctctatgggcctttggatctcttccatgctcccatctggtcctcccctcttcctgtgtcttcaggccctcttcctctccgtcttgccttttgatcatttttctcatttcttgcagaggcctctccctcctggagatgggctgagctgccctcccctgtgaacctgctttctctcctctccaggaggtgcagaggggactccaagaccgtggccagaaccagacccagaggcccttcttcctgnaacgtggtccaggcttgtgtcccaggaggggggcctgtgttgtacgccgtctcggaactgaggaaagagtggggaaggccgcagtanctaaagacaatgctctggcccagagtt

SEQ ID NO: 148553 - DNA, 2422 bp, Homo sapiens
ggggtgagggcagcagctcgccacagctgccagccatctgtccattcacccatctgtccatctggcagcccgctgttcagacctgtctgtctgtccgcccatctctgtaagcccatctctgtcccattgtctatctgaccatctttctcttactgtcctctttgtctagctatctggcctatctgtcgatccatcttcgtgtctgtcttcagcccccacctgtttttgtccatctgtccaattacctgtgactctgtgcatcttcttgtccattcatctgcccacccatccgtccctccgtctgcccaccagccgcccctctcctcctgggctgcagagccatggcccggggctacggggccacggtcagcctagtcctgctgggtctggggctggcgctggctgtcattgtgctggctgtggtcctctctcgacaccaggccccatgtggcccccaggcctttgcccacgctgctgttgccgccgactccaaggtctgctcggatattggacgagccatcctccagcagcagggctcacccgtggatgccaccatcgcggctctggtctgcaccagcgtcgtcaaccctcagagcatgggcctgggcggaggggtcatcttcaccatctacaatgtgacaacagggaaggtggaggtcatcaatgcccgggagacggtgccggccagccacgccccgagcctgctggaccagtgtgcacaggctctgccactgggcacaggggcccagtggatcggggtgcccggggagctccgtggctatgccgaggcccaccgccgccatggccgcctgccctgggcgcagctgttccagcccaccatcgcgctgctccgaggggggcatgtggtggcccctgtcctcagccgtttcctgcacaacagcatcctgcggccttccttgcaggcgtcaaccctgcgccagctcttcttcaacgggacagaacccctgaggcctcaggacccactcccatggcctgcactggccaccaccctggagaccgtggccacagagggcgtggaggtcttctacacggggaggctgggccagatgctggtggaggacattgccaaggaagggagccagctgacgctgcaggacctggccaagttccagcccgaggtggtggatgccctggaggtgcccctgggggactataccctgtactcaccaccgccgcctgcagggggtgccattctcagctttatcctcaacgtgctaagagggttcaacttctcaacagagtctatggccaggcctgaagggagggtgaacgtgtaccaccaccttgtagagacgctcaagtttgccagggggcagaggtggaggctgggggaccctcgaagccacccgaagctccagaatgcctcccgggacctgctgggggagaccctggcccagctcatccgccaacagatcgatggccggggggaccaccagctcagccactacagcttggccgaggcctggggccacgggacaggcacgtcccatgtgtctgtgctgggggaggatggcagcgccgtggctgccaccagcaccatcaacacaccctttggagcgatggtgtattcaccacggacaggcatcatcctcaacaacgagctcctggacttatgcgagcgatgcccctggggttccggcaccaccccctcacctgtgagtggagacagggtgggtggagctcccggaaggtgctggcccccagttccaggcgagcgttccccatcctccatggtgccctccatcttgatcaacaaagcccaggggtcgaagctagtgattggcggggctggcggggagctcatcatctctgctgtggcccaggccatcatgagcaagctgtggcttggctttgacctgagagcggccattgcagcccccatcctgcatgtcaacagcaagggctgtgtggagtacgagcccaacttcagccaggaggtgcagaggggactccaagaccgtggccagaaccagacccagaggcccttcttcctgaacgtggtccaaggctgtgtcccaggaagggggcctgtgtgtacgcccgtctcggacctgaaggaagagtggggaggccgcacgtagctaaagacactgctctgcccagaacttgaagtctggccccaccatgagtcctgttgtccaggccggacattgcttgggggaccaactactctggcaggatctggacccctggcaggggagtccagctgagagtggaagaggtggcggggaccagctgggcagatgagaggctgagcctcatccctaaccccctttcccagagcccctggtggtcctgaaccggcccctctatccctccgcaggcctcttacctggggccactctcccaccctctcgatctgtatatcctccagtccaagattaaagaagaggcggactgt

SEQ ID NO: 148554 - DNA, 673 bp, Homo sapiens
  misc_feature (1)...(673): n = a,t,c or g
ggggctgggacggtggctcacgctgtaatcccaacactttgggaggccaagaagggtagatcacctgaggtcaggagttcgagaccagtcaagtcttaagattttgaaagtcacatatgtaaaatatgaagcagtgtaaaaacaagatcataaacaaccatatattgtcctattatcttcctgtgagttgacttgaaattgggttgtctctacgctttatcataagagctcataactgttttcatttaaatttntcataatatttaataaataatatttcttgggggtaaggcaagggtcattgggctgggaaccaaagggtttatcagttaactatggattttatttttaactaacttcatgtgccaaagctccactgtgcccaacacaaaggtgtatttgttaaggcgttggagcaggcaagggccctaccctgttgttttgatctgcctggaatccaggcttccctttaatggtaacatatactgttaccaagatttcctattagacctacccttcccactccctcagtaggcatctgacacaaggcagcccagtgaaaattaactctggaaatacttagggctgactgggaaaaagtacctccctttttccaagcttaatatgattctggtggccatttctgtcaccttataaagaaagacctcgtgcc

SEQ ID NO: 148555 - DNA, 512 bp, Homo sapiens
  misc_feature (1)...(512): n = a,t,c or g
cgcctgaggattcggacgagaagtcgcttagctcttcggtggttgtacacgtccggaggcctagccgtcgcgtacctaggatgccgcgtggaagccgaagccgcacctcccgcatggcccctccggccagccgggcccctcagatgagagctgcacccaggccagcaccagtcgctcagccaccagcagccttgcctctatgagatcaaacagtttctggagtgtgcccagaaccagggtgacatcaagctctgtgagggtttcaatgaggtgctgaaacagtgccgacttgcaaacggattggcctaatgaagaagttcaacctggagagatggaaaatcagctctcataactaagttaatttagtataaaaatagaattgatagtgagggtataaagtgtaaccatcagttaaacctctcctactgggcaaatgtttgtgtggcctccttaaactagctgttatgttatgattttattctttgtgagttaattagaataaagtcattttn

SEQ ID NO: 148556 - DNA, 154 bp, Homo sapiens
  misc_feature (1)...(154): n = a,t,c or g
gcacccaggccagcaccagtcgctcagccttgcctctatganatcaaacagtttctggagtgtgcccagaaccagggtgacatcaagctctgtgagggtttcaatgaggtgctgttatgattttattctttgtgagttaattagaataaagtca

SEQ ID NO: 148557 - DNA, 366 bp, Homo sapiens
ggaagtaatgctgagcctgcaggcctgacctcacttaccggagcctcaggaacccagccagcacagcagcagcagccttgcctctatgagatcaaacagtttctggagtgtgcccagaaccagggtgacatcaagctctgtgtgggtttcaatgaggtgctgaaacagtgccgacttgcaaacggattggcctaatgaagaagttcaacctggagagatggaaaatcagctctcataatgggggtgtccctactctgtagaatctgggactgggcaaatgtttgtgtggcctccttaaactagctgttatgttatgattttattctttgtgagttaattagaataaagtcattttcttccaaggta

SEQ ID NO: 148558 - DNA, 537 bp, Homo sapiens
  misc_feature (1)...(537): n = a,t,c or g
ttgatggccagaatgcaaacactcaaacttgcggtgctgtgggcttntgctgtngggcacacatgggtccacgcatttactggggctttcagtggaggaagtaatgctgagcctgcgaggcctgcatcacttacagaagcctctatgagatcaaacagtttctggagtgtgcccagaaccagggtgacatcaagctctgtgagggtttcaatgaggtgctgaaacagtgccgacttgcaaacggattggcctaatgaagaagtttcaacctggagagatggaaaatcagctctcataactaagttaatttagtataaaaatagaattgatagtgagggtataaagtgtaaccatcagttaaacctctcctgtcattcctagcttccttgcttcagaattgaaatggaagtgggggtgtccctactctgtagaatctgggactgggcaaatgtttgtgtggcctccttaaactagctgttatgttataaatttcttccttgtgagttaattagaataaagtaattatcttccaaaaaa

SEQ ID NO: 148559 - DNA, 1364 bp, Homo sapiens
  misc_feature (1)...(1364): n = a,t,c or g
acccagccagcacagcagcagcagccttgcctctatgagatcaaacagtttctggagtgtgcccagaaccagggtgacatcaagctctgtgagggtttcaatgaggtgctgaaacagtgccgacttgcaaacggattggcctaatgaagaagttcaacctggagagatggaaaatcagctctcataactaagttaatttagtataaaaatagaattgatagtgagggtatgcagccttgcctctatgagatcaaacagtttctggagtgtgcccagaaccagggtgacatcaagctctgtgagggtttcaatgaggtgctgaaacagtgccgacttgcaaacggattggcctaatgaagaagttcaacctggagagatggaaaatcagctctcataactaagttaatttagtataaaaattagaattgatagtgaggggtataaagttttaaccatcagttaaacctctccctgtcattccctagcttcccttgcttcagaatttaaaatgaaagtgggggtgtccctactctgtagaatctgggactgggcaaatgtttgtgtggcctccttaaactagctgttatgttatgattttattctttgtaagttaattagaataaagtcattttcttccaaactcagggaaacccagcccagcaccagccagcagccagccttgccctctatgagatccaaaccagtttcctgggagtgtgcccccagaaccaggggtgacatccaagcccctgtgagggtttccaatgaggtgcctgaaacagtgcccgactttgcaaaccggatttgcctaatgaagaagtttcaaccctggagagatggaaaatcagctctcataactaagttaatttagtataaaaattagaattgatagtgaggggtataaagttttaaccatcaggttaaacctctccctgtcattccctagcttcccttgcttcgagaattgaaattggaagtggggggtgtccctactctgtagaatctgggacttgggcaaatgttttgtgtggcctccttaaactagctgttatgttatgatttttattctttgtgagttaattagacacaaagtcattttcttccaaaaaaaaanagctctcataactaagttaatttagtataaaaatagaattgatagtgagggtataaagtgtaaccatcagttaaacctctcctgtcattcctagcttccttgcttcagaattgaaattggaagtggggggtgtccctactctgtagaatctgggactgggcaaatgtttgtgtgggctccttaaactagctgttaagttatgattttaatctttgtgagttaattagataaagtcctttcttcaaaaaaa

SEQ ID NO: 148560 - DNA, 435 bp, Homo sapiens
tttttttttgagatggaatcttgctctgtcgcccatgctggagtgcggtgggccatctcagctcactgcaatctccgtttcctgggttcaagcgattctcctgcctcggcctcttgagtagctgggattacaggcgcctaccacctcacccagctaattttttattttttagtagacacagggtttcaccatgttggtcaggctggtcttgaactcctgacctcgtgatccacccgcctcagcctcccaaagtgctgggattacaggcacaagccaccgcgcccggccgacagtaaatacttttaatagaccaccagcatcttgaaaatatggaccacgtattccttattcaactctatatcccagaatcagcattgtgtacataagaggtactccatgtttgctgaatggatgattaaataagcaaatgaattc

SEQ ID NO: 148561 - DNA, 327 bp, Homo sapiens
ggcacgagggaagagaaaaacgtagggtgttgggagcagaggcgggaggcgggagatcctgcgaaatcggagtccctttggagtggtggaggccgctgatgcgcgtgagggtccggatgtgttgccgtgatgcttatgctgagatggggcgctagtttcgcgtggtactgctgcttccttagcttctgtaactggttgtacctcggaggacacgactggcttgatgattaccttcatgctgcgcatctctgccctgctgatgcgctctctgcagaatcctgaggcgatgacgctcccatggtgataccagcctacaagggtcacatg

SEQ ID NO: 148562 - DNA, 1855 bp, Homo sapiens
gcctactactactaaattcgcggccgcgtcgacgtgaccggcttgtcacattggagtcctgggctaatgatcctgattatctgaaacgtcaagttggtttctgtgcccagtggagcttagacaatctctttttaaaagaaggtagacagctgacctatgagaaagtgaacttgagtagcattagggccatgctgaatagcaatgatgtcagcgagtacctgaagatctcacctcatggcttagaggctcgctgtgatgcctcctcttttgaaagcgtgtgttgcttccttttgtgtggatgccggggtatgggactatgaagtaacagtggtcacttctggcgtcatgcagattggctgggccactcgagacagcacattcctcaatcatgaaggctacggcattggggatgatgaatactcctgtgcgtatgatggctgccggcagctgatttggtacaatgccagaagtaagcctcacatacacccatgctggaaagaaggagatacagtaggatttctgttagacttgaatgaaaagcaaatgatcttctttttaaatggcaaccagctgccctcctgaagagcaagtcttttcatctactgtatctggattttttgctgcagctagtttcatgtcatatcaacaatgtgagttcaattttggagcaaagcccattcaaatacccaccatctatgaaatttagcacttttaatgactacgccttcctaacagctgaagaaaaaatcattttggccaaggcacaggcgtcttgctctgttgaagcaagtcagtatccgagaaactgctggttccctttgttgtgatgaggtagcagacacacaattgaagccatgtggacacagtgacctgtgcatggattgtgccttgcagctggagacctgcccattgtgtcgtaaagaaatagtatctagaatcagacagatttctcatatttcatgacacatgtgaagaggcatcgtggacttttttctactcaattccagccaatgttgaaaagaaaaagaaaaaaaaaactctctaatcagttgtacacacattgaaacttatagccatggccagattttatgctaaaaatggtagtttgtcaaagacaagagttctcttagaatctaatccaacttgccagccctgagaaaatccccttttaaggccaaggaaagctgaatgctagcagccaggcctgtggtacttccatgagaaaccatagcagacaatgccctcccaagtactgaaatcacactggaatcccccttgttgggttcatttgattgtttaacacaggatgtgttgtgtcattctgaagtttttatttggggcagaagtctttatggagatgtaaatgacagcgtttctggggttatgcataacttctcactggtcagagacaccggtgtgtcaagcatggatattgcattgcaagacttgaatctataaaaattagaatcacacagtcagtactacaagcaaaacagagaacctgaaagaaggtgcacagactgtaagaaaaaacccaagtttgtgatatttcagtgattccaaagaacattctaggttttttgtttgtttttttgttttttgggttttttttttttactgcagaaaattggtggtattttcacattcatagtgtttctatccaatttcagtacccacatttaatgaggaaaaaatgttttaccaatgaaggaggaattcttaaattagctgtaatgttaggttggagaaaatttggtatttagggtattttcaaggtaccatcaaatcagatttctgttttttttttaaaaaaaatttttttaatcagtattgtttttacaagtaatatactttg

SEQ ID NO: 148563 - DNA, 397 bp, Homo sapiens
tagagacagagtcttgctatgttgtccaggctggcccctgaactcttggccccaagtgatcctcctgccttggcctcccaaagtgctgggattacaggcctgagccactacacccagccctccctctttatagcaaggcttgctgggcaccttctctagggctacttggctatagatgatgaatgcctatgtgcatgaagcccttctgatctgggtctagggaacagggagacctcctattacatcatgagaccacagtatacctatatgatgcaccaggctccagtaaacaggctccagtaaacaggttcatgcctggtgatttctgttgcatttctaagcaactggatcagagaggaagaagatggcaagagctggccacccagagttcaggagc

SEQ ID NO: 148564 - DNA, 354 bp, Homo sapiens
  misc_feature (1)...(354): n = a,t,c or g
tccaatccaatcaaatttgacaccctgtattagccatcacattaagtattttcatttttgtagcttttgcatatgcagaagaagaattggatgaaattcagccttgattatgatgaaaactctcaacaagttaggaatagaaggtatgtgccttaactcaataaaggccatttatgaaaaagcaatgctaactttatactgaataaggaaaagctgaaagctttctttctgagatccggaacaagacaaatccgtccaaactttcagccctcttattcaacatagtactggaagtcctagccaaggaaattaggcaagaggaagaaataaaagtcnctactaatttgaaaggat

SEQ ID NO: 148565 - DNA, 360 bp, Homo sapiens
ggcacgaggcacttttatttctacacctgttcttaaagattattttatttggcattattctgattttctcatactcttttcttggctaggccttaatctgcttggtagacatcgaatcaggagaaaatagtacgacccgaccccgttttgcctcacatgatcaagtatgcattgctctcttaaggactgcttggaatcctctgccttgagacctttatcgactctccctcacatggctcccgtcacttcctctttgtcctatcctcgcctcctctgacgctcttccctctccttcatatttatttactcgccgttgtcgttcctatcgtatcccctcttctctctctctctgacccgccc

SEQ ID NO: 148566 - DNA, 1406 bp, Homo sapiens
tgcggccgccgcttcagcacccgctcggacctcaccaagcaccggcgcaccgacacgggcgcagaagcctaacccgctgcgaactgtgcggcaagcggttcacgtgcgtgtccaatctcaacgtgcatcggcgcaaccatgccggccacaagccacacaaatgccccgagtgcagcaaggccttcagcgtcgcctccaagcttgcactgcaccgcaagacgcacctgggcgaacggccagcggagtgcgcaagagtgggccaagtgcttcagccacagcccgctccgctgtcacagcatcagcggggcccacacgcgccgcccgcaccgctgccgccgttgccatccagtccggcagtggggcactgccctcagtcttttgaagggggccggcttgaacaggaaaaagccaagggttctctgtagtccctagttgagggaggcttgctgaggcttctctaaaggtggttgggcaaagcacctaatatagtatccacggggacagttgaggcaactccgtagatggagatttgggaaaaagaacgatgtggcctccctacctttcccagtttctgttggcagcccttcacgtagcctcctgcctcgcctctacacctactaacctgtcggcccttttgccatgctgtcctcgtataactcgggattctctcctcaggtgtaggtgcagggagtcagggaacccttaggactcccctgtgtgcaagagcccagggtgttgggtgtgtccctttaaatggttactgtgctctctgggtgtttctgattttcctgcctttattctggcttctcttggcctatctcaattccagcccacatcttctcctttcctgattacttttgttgtcctggcctcttcaggtaatgggtcacagatttgggctgtaggcacgttaccagccctgtggctttcttgaactccttggttcccctgttaaactctgtttcctaaaaaaatgtgggtaatgaagttgggtggaaaaaagctcacttcccatgaagaatgtctcccatgctagggagctgcctgcaccctgggcagaggtggcccagtcaccgtgaaaggtggggcagggcccttaggcatggcccacacatgtcccccaggggcagattcaaggggccttttcagaaccatgttcccccagcccaggtgagggaccatttttcactgggaccccagggccaaaaccatgtgggtgcacaaagcacaggcactgccaagtggaacatgaggttatttccaaatcatgggagccaccagcagggagagggcagtatggaaaatcccctggagccggtcaactttttgctcatggctagtgaaataaagttgtttgagtactagcaaaaaaaaaaaaaaaaaaaaaaaaaaaaaagtcgtatcga

SEQ ID NO: 148567 - DNA, 420 bp, Homo sapiens
  misc_feature (1)...(420): n = a,t,c or g
gagatataaatgcatatgagattacttagtactataattatattttaaataatctttgacaggatttgaagacattatttgtaattttagagagatttactctcaaactgattttaaatccagggcagtcactaaaataagaattcatgtaaagcatagcctcttattttacccttgtctgtcatctccttagaaaatgccatcccaggctgggcacggtggctcacacctataatcccagcactttgggagggcgaggcaggtggatcatgagatcaggagttcgagaccagtctgacccaacatggtgaaaccctgtcgctactaaaaatacnaaatgtagccgggcatggtggcatgcacttgtaatccccagcaactcaggangttanggcaggagatcgttgaacctgggaagta

SEQ ID NO: 148568 - DNA, 939 bp, Homo sapiens; identical to SEQ ID NO: 126917

SEQ ID NO: 148569 - DNA, 1026 bp, Homo sapiens; identical to SEQ ID NO: 126918

SEQ ID NO: 148570 - DNA, 1738 bp, Homo sapiens
  misc_feature (1)...(1738): n = a,t,c or g
gatttgtatggtaaagaataaataacactatttcttggttaatatatgtttgtaaattctgcctttcctctttttctatttatctgattattattattattattattattttctttgagacagagtctcactctgttgcccaggctggagtgcaatggcgcaatctcggctcactgcaacctccgcctcccaggttcaagcgattctcctgcctcagcttcccgagtagctgggattacaggtgcccaccaccacgcccagctaatttttgtatttttaggcagagacggggtttcgccatgttggccagggtggtttcgaactcctgacctcaggtgatccgcctgccttcagcctcccaaactgctggggattatagggcatgagccacctcgccagccctatttatctggattattttaagtaaaactttaataaaccatgacctacattttctatgcaattttaagatactcagagttaatattttaatattgaggttcttggatttttttaatgatcagctttcaaattatatttcagtatatactctgagtctacgtgtatgctacaaaaggtgaaatgaagttagcttatttttcagtgagtttagggctatattaagggttagggtaagttagggtaaggggtgaaactgctttgggggcccagactgcgctgggaatgtactgtttaaattcaaaggtaattgatggccagtgttcagttgctctatttgtaacgtttgcatgttggtctggctgaagtatcaggaaaacacaaaattccatgaaaatagcaccttttataattttatacttttataaagcacttgttaaagaagtatagccaaatttcctatgtattttaaccataccaagtcgctgccatttttaatgttccatttttgggtattagctatgggtaacttataatagtccatttttatattccataacttgttttctgaaagatatagtcattattaaaataaacattcatgtaaatggagtaaatcataggggaatcaatcgtaataaataccttataaattataaacttgtttaggatactaggatttctattaaccataaattttatactgtaaagtctgtttaaaataggggtttaatgaagttattttaatttttaggagactcccctctaaataatttactcctacattgtaaatacattgatgccaacaaaattccaactgctactaacaaagggtttgggttggtgataagctaataacagctactttgtgtaggaggtaaatatgtgtactggagggggtaaaaatccatttaggttatggccaaagatggggaatcaaactggtaaaaccccatagccccataaaatttaatattccttggttaagtgccagagggtttaaggaggaacttcttggcttaggagttttatttgattattaattatggcttccagaatatcccattttaaatgttaccnggtgtaaaatatggtaaaatattttactttcccagggcaagtttgtgggctgtatttccacttagtgggctcttttgtgactggccagttctgtatatctgaaacaaataagctgtaagcacttttgttaaaactttgtcaaataatccttttatgtacttgttctcagacctgttctctggttatgaaatgtgttaaagacaaggtgcaaatttaaaacaatgcctgtattgaaataaatgacttaaacagaaaaaaa

SEQ ID NO: 148571 - DNA, 1564 bp, Homo sapiens
  misc_feature (1)...(1564): n = a,t,c or g
cccacgcgtccgctttgactccagtcgtgtgtatgctgtctgcaattgccttttcaaatgtttttgagcactatttgggggatgacatgaaaagggaaaatccacctgtggaggacagcagtgatgaggatgacaaaagaaaccaaggaaatttgtatgataaggcaggtaaagtgaggaaacatgcaactgaacaggaaaaaactgaagagggattaggccctaatataaaaagcattgtcaccatgttgatgctgatgctattgatgatgtttgctgtccactgtacctgggtcacaagcaatgcctactctagtccaagtgtagtcctggcctcatacaatcatgatggcaccaggaatatcttagatgattttagagaagcttacttttggctaaggcaaaatacagatgaacatgcacgagtaatgtcttggtgggattatggctatcacatagctggaatggctaatagaactacgttggtggataataacacctgggaataacagccacatagcactggtgggaaaagctatgtcttctaatgaaacagcagcctataaaatcatgaggactctagatgtagattatgttttggttatttttggaggggttattggctattctggtgatgatatcaacaaatttctctggatggttaggatagctgaaggagaacatcccaaagacattcgggaaagtgactattttaccccacagggagaattccgtgtagacaaagcaggattccctactttgttgaattgccttatgtataaaatgtcatactacagatttggagaaatgcagctggattttcgtacacccccaggttttgaccgaacacgtaatgctgagattggaaataaggacattaaattcaaacatttggaagaagcctttacatcagaacactggcttgttaggatatataaagtaaaagcacctgataacagggagacattagatcacaaacctcgagtcaccaacattttcccaaaacagaagtatttgtcaaagaagactaccaaaaggaagcgtggctacattaaaaataagctggtttttaagaaaggcaagaaaatatctaagaagactgtttaaatgcactgttctggttcctaacttgaagcagttgtccttgtgagaaccggtctttgcctttagctcatgtcgtgtttcacagcaaagagggtacagaaccatcactggtccaggttaatgtacaaaattttctgggcaatgcctggattaaaaaaataaaattgggcttgttgaggaacagctgttttcgatttcttaatgtggaggcaagacaggggcactgctgttaaatgttctaggcagcagatttttttttttattggtacatattatccttcaaatctgaggatttgggacttaactgcaccaaggaaccctctaatttggggnccctgggcacatggcatacttgttcatgtttttattcttttacaagacctgcattttatttgaattacccgaatagcaatatgtaaaatacaagtgacaaaatgtgatgagagcttcttgaaccggt

SEQ ID NO: 148572 - DNA, 378 bp, Homo sapiens
gccaacgttgtcttcacgcagctgctcatctggtacggggtggacgtgaggagccgggacgcccggggcctgactgcactggcatatgctcgccgggccggcagccaggagtgtgcagacatcttgatccagcatggcttgctctgctgagggttgtggcttatcatctacctgttactgatatccttaatatatgcataagtttctttgtttagctagcagcgttgttatattactattataataattcgtatagtggtcctagatgtcatctatattctgagactctatttgattagttttactgtcattattgttctagtattatcatctttttgtatggtacgtagttgtcatgttgtctcctattgtattttt

SEQ ID NO: 148573 - DNA, 3426 bp, Homo sapiens
  misc_feature (1)...(3426): n = a,t,c or g
cgaaaatttaaagaatcaagtagaaaaggagattataaaggaaggagataaaacgagagatgtagaacataaagcgatgaaaaattaataataggatgagaggatgagaagtacaggaagagggattacgaagatatgaaacacacaaaagaaaaagtcctcagaaaaaagtgacaaaaggggtaaaaaaaagagcctaataaagaaaaagaatattattgggaaaacaggggaaagattgggcccccaaaagagactttaaaaagggggacccttttttttatttaaattgtttttttttgagctaacataaaggttttattagaataaatacatgcactgtcacgtgaaatttagttgaacagaaaggaggttctctactttttaacccccatcccccaccagttgttctctatttgcaagtggggggtccagctgggaggtggaataaatgtggcaaccacagaataaaacacacagctacacacagggcctgcatttggcttacatgccgtgaaaaagaagggcccgaccctcttgataaagaatgtcgtgtaaaagggaattcttaccgtgcagattatattatcatgggtaaatacagttacaaggctgcttctattttatttatttttttgagacggagtctcagcttcttgttgcccggggctgggagtgcagtgggtgcgattcttgggctcactggcaaccttccgcctcctggggtttcaagcaattctcctgcctcagcctcccgagtagctgggactacaggcgtgcgctcccaccaccacgcccggctaattttttgtatttttagtaaagatggggtttctccatgttggcccaggctggtcttgaactcctgacctcaggtcatcctgccgcctcggcctcccaaagtgctgggattacaggcgtgagccaccgcacccggccagctgcttctattttaatctgaacttggaaacaccttcctactttaaggcacaggatcagggtaagaacccacatgtacgagctaacagagctgcacttcaaatttacttaagttaattaattttcccttcaattggcttggctcaaggtagaaaagttaaaattcccttttcttagataaactgattatttaaaactgaaaattaacgttttgacaactcaagagtgtctgacatcgctgggatcctggagtgctgagtgtggcctcgatggtggcttcactcctccacatctgggaggcacttcagtgcctcagaatcaccccctttttttaaaagagaatggaggnnnnnnnnnnnnnnnnnnnnnnnnnnnnnnnnnnnnnnnnnnnnnnnnnnnnnnctggagtgctgagtgtggcctcgatggtggcttcactcctccacatctgggaggcacttcagtgcctcagaatcaccccctttttttaaaagagaatggaggnnnnnnnnnnnnnnnnnnnnnnnnnnnnnnnnnnnnnnnnnnnnnnnnnnnnnnctggagtgctgagtgtggcctcgatggtggcttcactcctccacatctgggaggcacttcagtctcacgcaatcaccccctttttttaaaagagaatggaggcagcctactggaggcccaggcaccttccaggcactcaaggcccctggggaccagcgcctactgaactcccaactgcctcagggcaggcacggtgctgctctaccaactcccacggggccttgtaccctttaaatggtgtccaactctgcccaagtgcctaaaataaagcattcccattaaagcaaaaatacacatggagcggattacacactggactgcagaactcagatgtatgggatgttggtaaaaattactggcatgcctacaatttcccatgagtgctgctgctttatagattatgacagaagactttcaacagacctgatttttaaaaaaccctcaacaaatctaatactaagggaaagcaactagatttaatgttgttacctgtcttccataaataccatagttaaaatgtcttgtgtgcatacattgttcatatgtgtctataaaggtattgatacgcttcccaaataatcctatatactaacattggaaatggtttataaagaggctgtacagtcgcatgtcattcagcaggagggaatatactggtctttatgattacatgaaatatgctgtgaagctacagactccattataagtaaacccatggttcaaagtgtaagttataaattgaaacaaaatcaaaatctgctagaagggagggtgggtagacagccaccacccttgtttataaattcaaacaaaattaagaatctgctagaagggagggtgggtagacgccacccgccccgtcacaggcactttggtttgtttggtcatgtgagttacccacaagttgtatagttccatgaaacaagctaaaagctccaatttaaattacaaagctatactttccttaatatatttacacatagttttaagatgttctcatggctatggaagccattttcagcatatagcttataatatacacttaatcgtctacatatgtgcattctttctttacagacacacacagcctacgacactgcaacagagcctcacctcacaggaggtctgggggactcttaagtacagaaacctgcttttaacagtctaaacaggataaaaattgcataacaaatatcccaatattaaggtcagtcatggcataaaagtgaggcagcctgggaagtggctgctgagaaccagcagggggccggggctcgcagctgtggcgccccccaaccctggtggtggcccagtgcacatcggcttcaaaggtcccacatcctatgtgtgaggtcacactgggggttcctgacaataatgagatcggagctttcaatttttaatgcaatatccgtgtctactcactccaatctacctcacaacctttaaaaggacaacgtgtaccttcctttttttataggctgggaaaacattgaaaattaacaaagctcatgactgattgtttgacaacagcttaattgctaacattgaaagtctgctcttacagttgaggaaaagtacaaggtgtctgtatactgtttcatgagtaagttacaacagcaattaaaataaacataagacacttcatttttatgtaagaaatttcagattagcacaatgtgatttatgaaccatgacaattctcttaatatattactcagttataaaacatttttccttataagcccttcaacttacttctcaataatacatccttatatttatgaaaatgttaatattttgaatactttatttcatctttcataatgggcagaaacatactaacatttaataatatttcagcttttcttttcaaaaagaaacaccacaaaataggtcactgagaactttttgctggaattccagcac

SEQ ID NO: 148574 - DNA, 432 bp, Homo sapiens
agttggcctttacggaaggattgaggccagctctcccatgggtgagggaaatagatggtgatcaggaacaccagcaaaccagggctgacaagagcaaggaatcgccaggcccaaaccgcggggtgagccagggctcagaaacgagggtggcccgggagccattctgcccgggcgatgggcaggtgtctaaggccccacggggcaggaggggaggtgaaggggctcgcaggagagctgcccctgccccgcacaaagcagctgctctcacagggttgcagggttggacgtgggtgggagccatggtcactctgcagccttcccagcaaccccataagcaccaaactccctgtgttaaaccccttcctgtttgagatgcctgtgggggtcctgtttcccctttgtggaccccgtgggcatgtctgttaccagact

SEQ ID NO: 148575 - DNA, 1459 bp, Homo sapiens
gcacgagctaggcttcgccaccttcgagatcttcgtgcacctgctggccctgttgggggtctctgtgctgctggcactgcgtgtggatggcctggtcccgggcctctcctgggggaacgtgttcgtgcctttcttcgccgctgacgggctcagcacctacttcaccaccatcgtgtccgtgcgcctcttccaggatggagagaagcggctggcggtgctccgccttttctgggtacttacggtcctgagtctcaagttcgtcttcgagatgctgttgtgccagaagctggcggacaagactccgggagctctggttcggcctcattacgtccccgctcttcattctcctgcagctgctcatgatccgcgcctgtcgggtcaactagcctcaccgaggtgccggagagggagcgctggacaactagaatgttgacctcgagccgaggccctacttgcaagcgcaccggaggagaggctctctagtctgaaggcaccgccggcttgcgccgagctgagtgccgggtttccctattccaatcctgtttgaaatggtttcttcagcagggcttaaaagagcagccttcatcctgaaaatgtatttccttttgtttaatgctttgagtagataatcctgaattgaggtcatgaggaggccccccaggccagacagtcctgaacccctctgacacttggaaactgaatataagtaaaatggtccaggtggactctgagtatttcctgtggatcctgggaaagtactgttgcacaaaggctgcaaacgtgggactcaggaatgtcctccaaccagcagcgctgacctaagagctccctgtgccgtctatccagaccagacttcggtagatgccctttgttaagacctatccacatgtaaaacgagcttgtatctcccttcccctgtgcccacgagaaaagattggcctttttattcccagtctaggccagagaccggaagaatgtttgaataagagccacgattagagtccctgtctggttatcctgttgccccaagaaaagaactctggctgttccagggcactgccttggcttacttatcccaggcaaagacttgcagttttgtgggactttttgacccaccttggggctgggcactcttaggcacaactgaggacaggattttaagcctccctaagagactgaagagaggaacaggtgttcagatacttcatagggcactgagatcttacaaattgggaagcttgtgtagtggccaatcttacatggcctacgagactatagtatagatgccagtcagatacacacatagagaacctttgctgagattgcaaatgggaagcttgtgagtggcccatctttgttggcctacgaactttggtttgatgccagtcaggtgccacatgagaacctttgctgagatgcaaataaagtaagagaatgttttcctgaaaaaaaaaaaaaa

SEQ ID NO: 148576 - DNA, 373 bp, Homo sapiens
  misc_feature (1)...(373): n = a,t,c or g
ttcccactaaatgtctgtttttaaatcaaaggatataggggccctctttttcctttgaacatttattgtcaaaacctactttttaataaaaggaaaaatttgccttaatcccacccaaaatccnnnnnnnnnnngagatgaagtctcgctatgccgaccgccgttcnnnnnnnnnnnnnnnnnnnnnnnnnnnnnnnnnnnnnnnnnnnnnnnnnnnnnnnnnnnnnnnnnnnnnnnnnnnnnnnnnnnnnnnnnnnnnnnnnnnnngtccttccattcttagttcttgaggttatgcagtgtctttgccctgtgcttctcttgtattatgatccaaactccaaaaccagatatgtattttttaaaaccagaa

SEQ ID NO: 148577 - DNA, 764 bp, Homo sapiens
ttccccccggataaaagccccaaacttaaaaaccaattttttgttttgaatcccatccccccccgatgggtttttttcaaacttggggacaagaaaacccttttttccttgcaacttttcttgtcaaaacatccttctacttacaaggaagattttgcttaagtccttcctttatccttttttttttttgagatggagtctcgctctgccgcccgccgttctctcagctcactgcaacctctgccccccaggctcaagcgattctctcgcctcagcctcctgagtagctgggattacaggtgtgcaccaccaggcctggccagtccttccattcttagttcttgaggttatgcagtgtctgtgccctgtgcttctcttgtattatgatccaaactccacacccagatatgtattttttaaaaccagaacatttattgcatgactaatcgttgacattcttaagatgaactggatgctgcaacagctgccctcttgggtttaggtgttgttccttcacggaatccatgcctgaatctgcggtatacaatttttaggtgcctcattcgaccagttccggtggtatttcgtcttttagccttggcactccagttatactttctcttgcgcttggcagggtagccacatttgccacaggtcgacttctgaaggtggtaggccttagagccacagcggcggcacaacgtgtgcgtcttattgcgacgctttccaaacgatgacgttcccttcgtcatctcgcttctgcg

SEQ ID NO: 148578 - DNA, 1191 bp, Homo sapiens
tttttttgagatggagtctcgctctgccgcccgccgttctctcagctcactgcaacctctgccccccaggctcaagcgattctctcgcctcagcctcctgagtagctgggattacaggtgtgcaccaccaggcctggccagtccttccattcttagttcttgaggttatgcagtgtctttgccctgtgcttctcttgtattatgatccaaactcctttgtttaaaaaaaaaataaaacacctaaatataatccaaatgtgctaataaatgtgaaacagcctctttctctgaaacaagttcttcagtaaaataattctgtaatgtattgctttgcttttcttacatgaagttatgctattacaaaattaagtttcaattacaggcaaggttaaactctgcaagcaacccaaaactcaaaaagggctgaatgataagtcattcaggtaaagacaaaagaatggctccttatcattcaacttaaccaaccttctaaaggttcctcccatccccactgtctattacgctcgtggtatccttgtcttacacacttatcactatctgcaattgtctattatgtcaccttccacaaacatacatacagtatatacatgattgaaatctgtcagggcagggtctttgtcttgttttccacttaaaagtttctgggcctagatagcttttgacacatagtagtcactaaatagatacttgcttcatgaatgaagggcaccatttagtcaataaaagggaaccacagaataggtaaacttccaaaagtatctagtgttgtcttttaaactaaactccccattcctcactgcccaatctcgtgacctcttggcaaactggtttttctttgctgctctaacatgagagaggtttatgaaaagtaaagactagcctaaattttgccaaatccagaattttaaaatatatcttcattctctttggcctcagccacatgtgactgagtgcccccctcaaacaatccccttccttggtttgtgtgactccatccaattctagttcctgggctacctctgcacccactggagtcagagggcagaaaacacatctggttttgctcccactgtatctctaacatggcttggcacacagtaggtgcaccatacataaatatgtcaacaaatgaacttctccctctctccacttctggtccacgcggccgcg

SEQ ID NO: 148579 - DNA, 493 bp, Homo sapiens
cccatccaattcaaacaaaggttgccatttggttttttgtttgtttttgttttttgagaaggggtcttgctctgtcacccagggtgtactgcagtgacagaagacagatcatggctcactgcaacctccacctcctgggctcaagtcatcctccagtcctcttgcctcagccttccgggcagctgagactacaggcagtgcctgccaggtgtctagacctaaatgtaatactttggagaaactactatgtaacaagtactgttacaattgcaagaaataaaagatggatgtgatatggtccttaaccctgaatagctcacagcctgctggggggcaactccattcctcaaacccatgccaccctacagaggtcccatcttctgccttgtttaaccctgagaaagatgcttctgctttatttttttatgaaacgctttcttatacaataactttagtcctcatgaaaatgtttattttaaaattaactctcttc

SEQ ID NO: 148580 - DNA, 428 bp, Homo sapiens
  misc_feature (1)...(428): n = a,t,c or g
cgctgttcttttttaagtatgaatcccggtcccctttgcaaaccccgtagggggatcccatttcgtaaagcagggggctgtggaactgtgtttttaacagccccccggttatgccccctggcagcatgttccccattccttccctttttttaaaaaaatttttttcgggggcaattttggtttgttgcctaggctggggttcaatggggccatttcaggtcattgcagcctcaaccttccggggttaaacaattcttcccccttggccttccaaaacccctggattgccggtgtgagtcccatcgggtcccttttctttttttgggtttggaaaccctggnnnnnnnnnnnnnnnnnnnnnnnnnnnnnnnnnnnnnnnnnnnnnnnnnnnnnnnnnnnnnnnnnnnnnnnnnnnnnnnnnnnnnnnn

SEQ ID NO: 148581 - DNA, 1529 bp, Homo sapiens
  misc_feature (1)...(1529): n = a,t,c or g
gttttgctcttgttgcccaggctggagtgcaatggtgcagttttgactcactgcaacctccgcctcctgggttcaagtgattctcctgcctcagcctcccgagtagctggaattacaggcacctgccaccacgcctggctaattttgtatttttagtagagatggggtttcactatgttggtcaggctagtctcgaactcctgacctcaggtgatccgcctgcctcggcctcccaaagtgctgggattagaggcttgagccactgcacctggcctcatgtctctggatttataatgcagtatgaatatactttgtgctttatggtttttataatgtctttttggagaaattgccgaaaagttgccaaatacttgaagtaggagattaaaatgttatcaaatgttaaattggttatattaggaatagtctgtttttctttcctgaagatccagtttttttattcaaacacatttcaaagaaccaaannnnnnnnnnctttaaggaaaaaggagctttttttcaagggaaaaggattcatttgtaatactttggtttaaggcatactttaatttttacgagtttcagaaacagaatttttgtactagggaattcattggtgagagtgttcttttaacctcagaatggcaaattttggtcttgaaccacagacatccaattacagaaagaatataagcaatctcacaggcctgcaatcggacactgtctctgtgtggttcataggagatgatttttgaggtttgcactcatgcaatttgataacactctgtttacaagaaggctgagtttacataaaatgatctagattgaaactcagctacctttcttcctcatgtgggtgtaattacagccctatctgggagacagcgaatacagcaaacagattttattacctagttcgctcaaacactacatggaagttattttagttaaagccctcccccaaaaagtttataaaaccatttttatcaggggcccaacatgtgggcatgcaatgaagagaaaatgtaaagctacagaggttaatgaattgtattataaaatattttaagtgtactcaaaatatcataattgtacagtttatgccaccataatttgaggcctatagatttagcttaagagaacactgtttctgtttgaaatgctttctgtcactgaaattggcttaattagtaaccaatggataagatgcctttaggatcagacctaggttttaatcattaacttcccacaaagaagtcatactttgcgttaggtgtgctggttggatgtgcaggaacttcagcaagcagtaggttttactaagcagatggtcgggcactgcagggcaccaggcaggatcctagggcgcctcttattctgcgttagcatctggtttgctgtatgaccttgcacaagtcacttccttctgagcctcaattttctcatctgtacaatgagattcaaaagttgacctgaaagtcaagtgtgaaaaaaaaaaaaagagattaaacaagataattatgaaattc

SEQ ID NO: 148582 - DNA, 296 bp, Homo sapiens
gctcaaacaagccccctgcctctgcctaccaagtagctgagactacaggcacctaccaccgtgcctgtctaatttttaaaattttttataaagatgaggtctctctttgttgcccaggctggtctcaaactcctaacctcaagcaatctgcccacgtcggcctcccaaagtgctgagattataggcgtgagccaccgtgcccaattgtgatcgtttttcccaaagaatgtatcacatgctaacaaaccatatatttatgtatttcattgttcatagtaactacaatttaaaaaact

SEQ ID NO: 148583 - DNA, 2753 bp, Homo sapiens
catatttttaacattttacttaagatagcaaaccagttcggtttaagtaagctaacttggtcattagtatctgtggcttaaaatggcaaaaaagaaaatatccttgagtttgtaatctagttacagaagtaaggcatacacacacacaaagataacagtacctatagagagagtgtgtgtgagtgtgcgtgtctctgtgtgtgcacgtgcacgctcatggccaaatgtgcgcactctacataaaggaggcaggagttcctataggctatttaatgtaagagaaactatttttctcctgttccagctgtatcagatactcggttcccgcaacacagaaatgactcagaatctcagacaaaatgtattatttgttcaattttaattttgctacgtacattcataactccttaaattgttaggctgtttccatttacatccaaagttatctcacaaaagagaaggcaggaaaccgttttgtgagtgcctattctatgtcaaacactgtgttggcaccatattttacaagtttttttcctcttctcacagtggatcttgtgagttagttacttatatttttattagaactccattattctgggtaccctccaatgaggaattagagaggttaaataccttttcctaggattcccacagcagggaaggtgggcatagctgttttgtctgacaccaggacccatctcaccacactggctttacagtcttcctgaagggacattttgaggtgggggggccttgcaaagcttcaggagactgggtttggaatgggtttaatttttgcaagggatccatgtccatgccaggtgtttacaattctttaacttcctcccaaattcgtgtgtccattagggacatttggctacatctggctggaggtcaggagaaaattctgaggtaaatagatggattttatctggcagtgtcgaaaatagtaggagcctaaaactttgttcaatgagtaagatgtagatttggagtcatcagcaggggaaacttgttagatgtcctttgtatctttttctatccatttgtattttttctttcccaaagagctgaaatcattttataccctgaatttaaaaggtaattgcttttttcctccttgcgaaatcataccttaattttttttttttttttttttaccatttatgatttattctcctatgtgtcatatgaaaggccaaggggcctttatcttttactagtaggcaagcctgggcatttcctgccatttgtgcccagcctaacacctacaaaatagaccttaattagagaaatttagaccccagaattgccagccttcaacaacacaaaacaggaaagcctagaagaggttgctgtgtcgaacctacaagatagtgattccttggaagttggtatggaccagaaagcattccccaggacatttaggctatggctgagttcctctaagactcagggtgggaattataatccctggtctaagctgatatgaaagtttctatgtgtgaaaatatggagttatatgctttgagattttctgccagttaaactaaaacaagatcatactgtaaatgtttgtaacttgcttccccccactgtatactgtaaacatctttgcatgtcaataaatatgcctctacaacatatttttgaatcacttaatatttttcccatgttaacagttggtatatagtgttgtaaacctttattgcatattctcataacatacaatatacacattcttttgcaaaaatgggaacacagtattgagacttgccttttcctcttaacacttatcttttcaatttagtattatatagatctgtcacatgctttttatctaataactttatagaaatataattgccatacattaagctgcatgttgaaagtatacagtgtgatcagttttggaatgtatatacacacaaaaccataaccacaatcaaaattgtaaatacattcatcacccaccaaagctactttttttttgagacagagtcttgctctgtcacccaggctggagtacagtggcgcaatctcggcccactgcaacctctgcttcccaggttcaagtgattctcgtgccttagcctcctgagcagctgggactacaggtgcatgccaccacatccgactaattttttttttattttttgtatttttagtagagacagggtttcaccatgttggccaggctggtcttgaactcctggtctcaagtgatctacccatcttggtctccctgagtgccaggattacaggcgtgagccaccatgcccagcctcccccaaagcttcttaatgcccttttgtaatccctccctcccctctctccctgtgcccctaacccaggcaaccatgggacattttctgacaaaatagaattgttttcatttcctgtaattgtgtataaatggactcatatagcatgtactctttggtcgggaggggatctggcttatttcacttagtgtaattatttgagattcatccatatcatgtgtctcactatttcattgctttttattgccaagtagtattccaccatatggctttaccacagtttatttatccattcactttattgatggacatttgggctgttcagagtttggccattataagtaaagcagctatgagcatttgtgtacaagtgtttttatggacatatgttttcatatctttggaatgacatctaacaatattgaatcttcgacccatgaataaaatctctctccacttaaaaaaaaa

SEQ ID NO: 148584 - DNA, 449 bp, Homo sapiens
ctctctgtgtatatgtatgtgtgtgtgtgcgtgcatacgcacgcatgcatgaatgcaacatccccctcttgggtattctgattcacacactttaactttttgggctccttgaactctaatctttttgtcttcaatacagtgagactgcttggctgcctgagttcctctccctgtgctgcagcctgaaaactacctctaggaaggaagattggacaattttcatgccttcaacttgtttgcttcacttttctcaggaatcagccctgagctgcctcagggctgctgtcccacatttcaaagccactgcttcctatattttgtctgtttgttgcttaaggctggggaagggacagattaagtctgacccctgttactacattatggtcagaattgcgagcctctcatgcatccttctgctgtgttcttacgaccatcgagctcacccctgc

SEQ ID NO: 148585 - DNA, 452 bp, Homo sapiens
  misc_feature (1)...(452): n = a,t,c or g
gccaatatttggatcagtcccttctcctgttttatggatcttgaatttcagtgttcctcggctctctttgagctatatggaggnnnnnnnnnnctttttctttttcnnnnnnnnnnnnnnnaaaaacggggtctaattttgccccccagcttgaagcccaggggggaaatctgggttaattgaacccttggcctccggggtaaaagcaattttccggtttaaccctcctgattacctggattaacggggccccgcccccaccccgggcaaattttggaatttttaataaaaagggggttaccccttgtgggcaaggcgggcctaaaactcgggacctcggaattggcccttctaagcctcccaagggcctggaattccgggcccagccccccgaaccggcccttatggggaaattttaccccatggtaaaccttagcaatgtgcctcccttt

SEQ ID NO: 148586 - DNA, 845 bp, Homo sapiens
gagcaatcgcagctcactgaaacctccacctcctgggttcaagcaattcttctgcctcagtctccagagtagctgggattacaggcgcccggcaccacacccagctaatttttgtatttttagtagagacagggtttcaccatgtttgtcaggctggtatcgaattcctgacctcaggtgatacatccacctcagcctcccaaagtgccaggattacaggcatgagccaccacacctggcccaaacagtaattaatgatcaactttttagtgccaaagtcacttctgggacaatgcagatatggagacaaatcagactgttccagacactaccaagttcatggtgcaataaggaagacatatcaaaaacagaccattataatacagaagttaaattattgccttacagttccaaaccaattcttcattggcttgctctggtgatacgagactaacctaggctgactacatttctcctttcccagtggagcgagtggctattaggttctgccgatagagggtgctggaaggagaatacaaagccagttgcaatgctcaagtttttcacaaagtagcaagtagatcagtgtgcaggggaatcttggtacatttcaaagcagcgactctccaggttctgaggtgagtgccctccagccaggtttcttcttcaccacaggcaacaagcagcatactgccacagcagccatactctcctctgaggtctgaatctcaggccttgtggagctctaagttccttcctttttcacttttccctcagccttaggtacagcaatctttttctgcagttactatctctattataccttagaattctcttttatctct

SEQ ID NO: 148587 - DNA, 490 bp, Homo sapiens
ccccagatccagcccaacctgtccagcctgcctgtgtgtccaggtgaaccccccagcccaagacccagaagaccctgccccccagctgagcccacagccccaggatccagcaaaaccccctcctcagccttataacccttataaaccttaccccaatttagggtgtgggttgtgaccccagaattattgtattattgtatgcatggtgagtattgtatattaccacatgggaatcatagaaacagtgaaaagccagtaatttctgagtatatattaaagttagggcaaattgtgtgaggtggagaagccacatactccaaatttctggcctgagacattggaagaatgaatatggatgaatggaggtggatattgaatctgaaatgaatttttcattttgtgaaatttttggaagtttcaattttgtgttgaatatcttgtgactcaccggaaatgaaaatcataaaataaaatttgtccttaatgcata

SEQ ID NO: 148588 - DNA, 554 bp, Homo sapiens
  misc_feature (1)...(554): n = a,t,c or g
tttggtagaaatgggttttcaccatgtttcccaggctggtctcaaactcttggactcaggcaatctgtcagcctcctgaaggagtgctgggattacaggcataagccaccgtgcccaccccccaaattctactaatatatatgcataattaaatagttaccagccatcattttctgatactttggcaattggttgaaagagtttatctaaagacctggaatccatagaaggcagtctctgtgttaaggggttgttcttattannnnnnnnnnnnnnnnnnnnnnnnnnnnnnnnnnnnnnnnnnnnnnnnnnnnnnnnnnnnnnnnnnnnaaaggtgcctagattagggaaaagacctggaaagggattccctgtagcatgtagactttccccacaagagacaactttgtagggacatttcaaaatatgataacaaatatattttagggtaaaatatttgtatttctttcagggcctgctatctgtcatgtaatgctacactagagtcaggctggaatttggtgtcttattgctacaaaaagtcttaagatctc

SEQ ID NO: 148589 - DNA, 446 bp, Homo sapiens
gacaagtggtgcggggcttcggccgcgtgtccaagcagatgggcatccccacagctaattttcctgagcaagtggtagataatcttccagctgatatatccactggtatttactatggtggggccagtgttggaagtggagatgtccataagatggtggtgagcatatgatggaacccatattacaagaatacgaagaagtctatggaaacgcatatcatgcataccttcaaagaggacttctatggggaaatcctgaatgtggccattggtgactagctgagaccagataagaacttcgattgtttagagtcacttatttcaccagttcagggtgatactgactaagctaagatacgactagagttaccagaacatttgagaatctgagaagacacttttttccaggtttctctaaacagaacaatgattgtcactgatgacaaa

SEQ ID NO: 148590 - DNA, 825 bp, Homo sapiens
tttttttttagagtcaaggcctcaatctgttgtccaggctggagtacagtggcacaatgatagctcactgcagcctcagactcctgggctcaaaaatcctcctgcttcagcctctggagtagctgggacaacaggcgtgggctaccacacctggctaacaaatgagtttatgtcggctattctgttttctgacatggatcagacacaaggccatcttggttaagagggcagggcttgggatgagacatcccatcacttatcaagtgtgtgacttcatgtgagttatttctctttggtccttggtttcgtcaactatgaaatgggagttatgacagtacctacaatcctggtgtgaggactgactgactgactggatactttgggaaagtcccttagacctgtgtccaggcacacgatttcctacaattacaatgtcattgggcagcagcaccctcccctggtcttagtctggccaccaccaactctaagaagaaggaaggaatggatacaggcaatggagctggggagaagaaatcagacataatgaacagtctgaccccatcatttgagacagacactgaaggaaaaatctaaaggcaagggagtgggggcagttcttaaatgctatttggatggatgttggaattcttttgtttgttgaatgtccctctcattacctcatttatacaccgtagctaaatgctaaaccgctgatatggaggtaaaaacagtcatcttgtcccatcagaggcaacatgcaggacttgtgactggaacaaagacttgcctttggtgaacactacaggattgtcctgtgagtgtggc

SEQ ID NO: 148591 - DNA, 442 bp, Homo sapiens
  misc_feature (1)...(442): n = a,t,c or g
ccccaatggttaactccttctgcctgctgtgaattccatcttctagtttagtcatactcttgtttcttaagttggaagcttatgtcatttatttatcttccctttttatctgatacagttatttaaaactatgaatatccctctaagcatgtctttagttgtatcaaattctatgcaagatgttttctggannnnnnnnnnnnnnnnnnnnnnnnnnnnnnnnnnnnnnnnnnnnnnnnnnnnnnnnnnnnnnnnnnnnnnnnnnnnnnnnnnnnnnnnnnnnnnnnnnnnnnnnnnnnnnnnnnnnnnnnnnnnnnnnnnnnnnnnnnnnnnnnnnnnnnnnnnnnnnnnnnnnnnnnnnnnnnnnnnnnnnnnnnnnnnnnnnnnnnnnnnnnnnnnnnnnnnnnnnnnnnnnnnnnnnnnnnnnnnnnnnnnnnnnnnc

SEQ ID NO: 148592 - DNA, 559 bp, Homo sapiens
aaggtggaagcttatgtcatttatttatcttccctttttttctgatacagttatttaaaactataaatatccctctaagcatgtctttagttgtatcaaattctatgcaagatgttttctggattccttttattttttagacagggtctcactttgtcgcccaggctggtatgcagtggtgcaatctttggtcaatgcagcttctacctgctgggctcaggtgattcccctacctcagcctcccgagtagctgggactacaggcatgcaccaccatgctcaactcattttttgtatttttttgtagagatggggttttgccatgttgcccaggttggtcttgaactcctggcctcaagtgatgtgcccacctacgcctcccaaagtgctggaattacaggtgtaagcaaccacccccggcctttctagtttaatatatatatttttgaccaatgggctctgtaaagtgtgttaatttccaaatatcttgtgacctccaaatttatttctgtgttgatttctaattcctctatggtcacacaacatactctacgtcgacc

SEQ ID NO: 148593 - DNA, 2250 bp, Homo sapiens
tcacctgggtttggggacctccaggggactgctacccatcctgaaaaagttatcagaatggtttgaggaagaggagctggaagacctggcttccgccagcccctgctgggaaggcaagcggtcctctgagggttgtggccggttccagaggacactctgtggagaggatgagtggctcttcctccaagctgcctgagttggcgctcctgctgggaccagctccacggcctcataggtgaagctcccagtggctcctggggaactctccatgaccagggagaagtcgctgccaaggctggtggtgctgccacggtcctttcgtcctcttgttctatatatagcatacactctcttctcctcctctctctcatctccttttctctttttcttttctactttcttctccctgttctctctctggtttttctctctcctctctgtccctgtttcttctgttgtctttgtctttgtcttctcttctctttcttctttcttgtttcttttgtcgctcgtttgtcccggctctcctcccgggtcgcctgctcgtcgctgtgttggtgtggccgctcggtttctctccgtgtgtctgtcgtgggccggcggagtagcgtgtactacagtcgcgctgacaccacagccagcctgatttcttgtagtctttgtggtaaaggagccagcccgggcgtagtggtttatcatctgatccttggagaggaagcgacagtcgagcacatcccgccgagtggtccagatgaagtaggggatctcattctggaccatgcgggacatcagagcatgtgttccatctaggtcatcaaatttcagtaaatcatcgaagtcgaacagctgtgatggctggaactcctcgtcctcatcttcatcctcatcctcagtggtgtcactgtcacccatcgctgagctatccagatccttctggggtggcagcagggtggggcctgagcgatggaccatcttcttctccacccagcccctccggcgcaagagacaccggatcaccgggtagcagccttggattgtaaagatcttcttctgcttgacagctctctccacgtagattttggcgtttctgagccggttcatgtgagacgccttggaggatcctcgccagaggaccgggaaaccttgcccttgaacagggattactgggcagacaaaccgtcctctgcaccgggccatcttgctgcggtggatgaggtcttgcaacttgctcacctgtacggtactctcaaacgtgtctttctccttctcagaactctcatactccaggaacacgatgtgccggggatagtggccacagatatccccattcgtgtttggaatcacgctgaaacagtagtctcggccaaacagctccagacatctcttctcaatgcgctcaacctgtttcacagcaatgctgacccggacagagttgatggagccctcaatcagaaccttttccttctcattcctgctgatggtcacaggttgtaacaggagctctttgctactcttgtccaggttcttcagttggagaatggctgcttggaaaagcggatatagcttgtcgcggtagaaccacacggtaagtgggttccagtcagttaccaggaaccactgtctgaggtcaaacttggtgccaaagatgaggagggtccgctcaatatacttctgcaccacccacttgccgtccttcatcaccacggggttgccgttcaccagcttcagcatctcctccaggtggtccatgcacatgatgcctcgtccgcgggacttggctcctggcttcacgatccagatgttgcgatccccttccatgtctatctggggtaccacggcctgcagctgctgcaggatgtcctcacagcgctggacctgagtgtcgaggtgcctgagttcttgcccttcgcagagattaggggcttggagactggaactggagatgtagtactcataggatttgctttctctgtcttccctcctctctccttgtcttgatttttcttcacacgttggcctctttttctctccagagtgaacttcacaaaacgtgtttctttctttgttgtttgttttctcgtttttttttttgtttgttgtttgtttttgtgttctttttctgtcgttggttgtttttgtttctttttccctttgttgttctgctgctatcgttgttttgtctggtttgttctgcgtggtagttctcgccctgtttctgctgtcatcctctatctgccaacgggcagtcat

SEQ ID NO: 148594 - DNA, 774 bp, Homo sapiens
gagatgtagtcttgccgtgtcacccaggctggagtacaatggtgcaatctcagctcactgcaacttccatctcctgggttcaagcaattctcctgcctcagcgtcccaagtggctggggatacaggtgcatgccaccacacccagctaatttttgtatttttagcagagacagggcttcaccacgttggccaggctggtctcaaactcctgacctcagatgatctgcccaccttggcctccccacgcctggcccttcactcactttttgattagtactttgaaatgtgctcatcgggactgggggctgcagaaggatgtatatgtatacgcatccaaaaaatctggaagaattgtactaaaaatgtgaacactggttgtctctggttggtgggggcccggctgagagtgttgtgttattcttgcctccctcgcacccctaattcctttggacaagatacctcttccattccttatggctgcccattacagtacacttgctcaatatagcaccctaattctcctggcaacagttttggaggccaaggggtgaacatgtcactctatcactcaagcagagccagagtccttccctgagaatgagataggaaattgggaggatgctttccttccactgtgtttaattggaaagctggggctgcctcactccatgtttcctgccaactagaagttcactctggagagaaaaagaggccaacgtgtgaagaaaaatcaagacaaggagagaggagggaagacagagaaagcaaatcctg

SEQ ID NO: 148595 - DNA, 686 bp, Homo sapiens
ttttttttaaacagggtcttgctttgtttcacaggctggaacgcagcagcaagatcatagctcactgcagccttgaactcctgggctcaagccttcctcccacctctgcctccttagtagctgggacaacaggcatctaatttttaaatttttcgtagagatggggtctcgccatgttgcccaggctggtctccaactcttaggctcaaacaatcctcccaccttggcctcctaaagtgctaggattattagctggagtcaccgtgcccagcccacatgcactctttgtagttggctttgtgattctggggctggcactgcagaatctttcctttggcagcccgccctctctagggttgccaatagggggtgctgcaggagacctggaaaactgaaggagaaacaagggacttaggaccttgcacttactgtcagcagtagcagttggttccaattttcagctttgtctcgtacccccagagctagcaaccgtgcacaacccccgagagagacaccagcacctactggccaagggccttccacagaggactgggtcctagctccgtccaagccctcatcagggcagctgggttctgagatccccaggctcttcccttgggtccccagactgagggatagaagatggctacttcctgcacctactatttgttatcccagtgcttttt

SEQ ID NO: 148596 - DNA, 1307 bp, Homo sapiens
ttttttttgtagagacagggttttgtcatgttggccaggctggcctcgaacttctgggctcaggcaatctgcctgccgcagcctcccaaagtgctgggattacaggcatgagccaccgtgtccggcaacactcttaatatgagtgacttcaaagcttttgaagcctctatccccgctggcagtggtgtgcccctgggctctccctagactaggctaaagcccctgccaaccactctcccagcaccctgcacttaccttttcatgacacccatcacttttaggactttacagggttgaattgctgccttccttgctagggctgtaaggttccccgatgggacataactgcatctgccctggtgtgctgttgtttccctggtgtctgaacagagtcaggctcctgacagggcccccgctatttggagctgagtcaataggatgtgcaaactgagggagaggaaagggtggaggaaaactcgcagacctcagaggcctggggagaggaaaagtgtccttgcctcaaagtccacatacctaggccaggaaagaagatccatggttccctgcctcagaacctttgactcctcaagtcagggcctttccccactcactatactgtgcctagaaagacgcctacgaaacccacagaaaagtgttctatagttaaataagcttgaaaaactctggattaaacaaaatgaaaggagtttctttgccactggtcttttcagggcctttaacatgctcctgtgcccgtgcttctggaagaaggtcacacacagttctccatggctttctgaccctggaactctgcctgtgaggcggtctgaaacctccagcaccaccccccagctatgtgtcacaattatttattaaatgtgacacagcagagagatttgttgccattttttttagtggctagaaaaatccttctgtacaaataaaaataattcaaaacccctatatatgaatgggataaaaatgcagctgctctggttatagggggtactgaggatccatctgtagctgtcctttcactgctgctttgcaaagaacccttgcttcctgtagagcgcagttcgataatcactgattcagaattggcacatgaggttgaagctaggaggcttctagtgctggctctgccatggactgttttaccctgggcaagtcatttagtctcactgggcttcagtttcccgtgtatacgataagtctgtcactctgtatgtttcttagagtcgtgaactatcagctttgatatggtgaagagtacatttctatgactataaaagtctacctctaag

SEQ ID NO: 148597 - DNA, 766 bp, Homo sapiens
tttttttttttttttttgagacagaatctcactttgtcacccaggctgtaatgcagtggcacaatcctggctcactgcaacctccaacacccaggttcgagtgattctcctgcctcagcctcccaagtagctgggattacaggcgtccgccaccacatctggctaatttttgtatttctagtagagatgaggtttcaccatgttggccaggccagtcttgaactcctgaactcaggttacctgcccacctcagcttcccaaagtgctgagattacaggtgtgagccactgtgcccagctgcaaccaggaatcttaatgcatgggctgaggaggctgactgacctagacgacaatgtgcatcatcccagaagtaggctaaaggtaaccagctcctcagctcaccctggggctgcttcctcgtccttcctccacctctagttttcatctgagaaactagggtaaacctctttgctaccaggtgtgctcaaatcccttaaacaggcagatctgacataaagtactgtttaatcatttttgcttctaaacaaaatgattgggaagtgagtctcccaaagtcccccaaatacaataatttttatcttaaaagtgcctttacattgtctagatcaaacactcaaaaacaagtgggaagaagtgactgggcttcaggatatacataacaaagagctttaagggaaccactaagaaggtaatctcttcaaacagcccacgtaaattatactaatctatggaaaggaatattacc

SEQ ID NO: 148598 - DNA, 1291 bp, Homo sapiens
tggaacggtgtctggcacacagcaagcatgcaataaatatttgaatatttattttaaaaagctattggttgtgagctaagatcagggattcttaaccttggctgcacaccagaatcacctggcaaattaaaaatacgtggacctgccaccagagcttgtgatttaatcagagtcggcatcagagttttcaattttttatttatttattattattattattattattattattattgagacaagatcttgctctgtcgcccagactggagtgcagtggtgtgatcacggcttgctgcagcctcgacctccctggttcaggccatcctgccacctcagcctcctgagtagtagggactacaggtaggcaccaccacacccagctaatacttttaatttttttttgttggagatagggtctcattatgttgcctggggtagtctcgaactcctaggctcaagcgatcctcctgcctcggcctcccaaagtgttgagattataggcgtgagccaccgtggcccagattcacagaagagtttcatacacctttcacccaggttcccctaatgttaacagcttacatataaccttgggtacatttatcaaaactaaaggtgcaatcatactaatagctaggagtttatttgggattttaccattttttcccaatgtcccttttcctgctgcagcagcccaatccaggatgccatactgcacttagagctgttgctttctttttttcctaactttatattttgaaataatttcagatgataggaagttgtaaaggtaagggccccacgcacccttcatctagtttccctccatggttacatcttatatggttgtaaagccagtatcccaacaaagactctgaacactggtgcgatgtgggtggacagtcccaaatcatttgtcacatgtacatcctgtgtaacctacccactgcaatcaggataaagaagtccccatcccccacaaggatctccctcccccaccttcccctaactccctggtaaaccactaatcgttcatctcttcttattttgtcatttcaagaatgttgtataaatggggagcatagtgtgtaagcatttcggggattgtctttttttcactcgggcgtcattcttcgggagatcatccaggcattgcatgtgtcaacagtttgctcctttttattgctgagtggtattccgtggtgtatgcattggccccctgaaggacacctgggatgtttccagtcctggggctattccaaataaagctgctaagactattcatgtacaaaaa

SEQ ID NO: 148599 - DNA, 529 bp, Homo sapiens
acttcctgcagcacgagtgggcccgcttcgaggtggagagagcccaatgggaggtggagcgggcggagctgcaggcccagattgccttcctgcagggagaaaggaagggccaagaaaatttgaagaaggatcttgtgaggaggatcaaaatgttggagtatgctcttaaacaggaaagagccaaataccacaagttgaaatacgggacagaattgaatcagggagatatgaagcctccaagctatgattctgatgaaggtaatgaaacagaagtgcagccacaacaaaacagccagttaatgtggaaacaaggtcgacaactactcagacagtatctacaggaggtgggttatacagatactattctagatgtgaaatctaaacgagtgcgagctttgttgggcttttcaagtgatgtcacggacagggaaaatgaccaaaaattggactggtagtgagaatatcagctctgtttggatggtggaaggtctcattttattgagatttttaagatacatgcaaaggtttg

SEQ ID NO: 148600 - DNA, 241 bp, Homo sapiens
  misc_feature (1)...(241): n = a,t,c or g
ccccccagtgtgggtgggctgaggggntaaagaccagtgtgcctaaaaatactgacttttttcactactatacataaagggaaagttttattcttttatggaacacttcagctgtactcatgtattaaaataggaatgtgaatgctatatactctttttatatcaaaagtctcaagcacttatttttattctatgcattgtttgtcttttacataaataaaatgtttattagatctcgtgc

SEQ ID NO: 148601 - DNA, 251 bp, Homo sapiens
  misc_feature (1)...(251): n = a,t,c or g
ttttggcctgagtattttgctttattcaatctaataaacattttatttatgtaaagagacaaacaatgcatnagaatannaaaataagtggctgaatggaccagtattctagaaactcaccactagaggtcaatgggcaacagctattgggatggtatcagcatgccctacggtgcaagtggaatttctaggcgcctctatgctactgcagccacactgtctttaactctcagcccacccacactgaggag

SEQ ID NO: 148602 - DNA, 916 bp, Homo sapiens
  misc_feature (1)...(916): n = a,t,c or g
cattacacttgacttgattttctagttttctatacaaacaccaatgggttccatctttctgggctcctgattgctcaagcacagtttggcctgatgaagaggatttcaactacacaatactatcattgtcaggactatgacctcaggcactctaaacatatgttttgtttggtcagcacagcgtttcaaaaagtgaagccactttataaatatttggagattttgcaggaaaatctggatccccagggtaaggatagcagatggttttcagttatctccagtccacgttcacaaaatgtgaaggtgtggagacacttacaaagctgcctcacttctcactgtaaacattagctctttccactgcctaccggggccccagtctagggntttaatcttgcacctaacccagggtcccttgtaaggnatgttccnttcaagcagtcattctctggggattttatatggattttgactacctattctgggggttttgagaacttttgatataaaagagagtatatnagcattcacattcnctattttaatacatgagtacagctgaagtgttccataaaagaataaaactttccctttatgtatagtagtgaaaaaagtcagtatttttaggaactacagaatgttattccttggtcttttttcttgaataagaaaaaaaaaacataaacaaaacaagccacagtatcctctgacactacattccagtttatgctgatacccaagaagtgagaatactcttgaatcttgaatatctcatgaatggaccagtattctagaaactcaccactagaggtcaatgggcaacagctattgggatggtatcagcatgccctacggtgcaagtggaatttctaggcgcctctatgctactgcagccacactgtctttaactctcagc

SEQ ID NO: 148603 - DNA, 594 bp, Homo sapiens
atggccgtggccagtaccaagagtcggtgggagacgggtgaggtacaggctcagtctgcagccaagactctgtcctgcaaggatattgtggctggagacatgagcaacaaaagcttctgggagcagaagggaggctccaagacctcatcaacaattacggcccagattgccttcctacagggagaaaggaagggccaagaaaatttgaagaaggatctcgtgaggatgatcagaatgttggagtatgctcttaaacagaaaagagccaaataccacaagttgaaatatgggacagaattgaatcagggagctatgaagcctccaagctatgattctgatgaagcgcaacaacaagcaatgcggtccgtccacggacctttgcacatactctcagcgcctcccgcctctcagcagaaacgcccaacagaacggttaggaccagcgagcacgtgcaccttagccggccccgcccaacaggccctaggcggagaaaccgccctagcagctctctcgcggcgcccagtgcaggccgcggttgctgctcagctagcagctctctcgcggcgcccagtgcaggccgcggttgctgctcag

SEQ ID NO: 148604 - DNA, 1430 bp, Homo sapiens
ttaaagggtttatactaactcatgtctatccatgcttagacaggaactaaagggccaaggtgagcactagcagtcatgttagcctctgagtctagacatattggtgggtatggaaagtacctaaagtctcaaggccaaaagacaagaccaagaccctccacccatcccagtgaggcttttctctgctccatctcataagtctaaatctagtaaacaatggggcaaggtggaggtggacatttgattattttaaagatgcatatacctgtttacaagaacagtccaaaccttcagtatagacaaggggctccccaaatatagcagccatttaaaaatactgttatgtataaagactgtaatcagtattcacaaaccctggtgaaaccaaaagataataccatatcttcctaagcatcagttttctaacctagcattaggttgtataaatggaaaaacacaataaattacatgacatggaagaaagaactagaagaaatgtttgggaaatttaacagaaatcataaaatatgtagttttctgctgaaaatgttacttaaaatattcaaataatgttaaagtagaatattctcactttttggctggggctgttttctgtaaattccacatttttaatgtgtgatcctctgatgctgttatcaaaacaggctcaatgggatggaaagcaagggctcggatgccatcaaagtgacttctcaatgtaaacttagggttccatgtcttcctcaatgcatctttattgtttgctatctattaaagaaacaaaacaaagatatctacacacttagttaaggataggggaaaaaacttgcatttcaacattaattcttgctgatgtgtcaataaatgatcactttgcaatttttaaaacaatataatttttatatgtaaataaccaaaccacgaagcaaaattagcaataacccaacactagttttctttgaagaaatatgaaaggtgtattacaaaaacaattaacataattcaatataaaaagtgaatcaaattatataaaatagatcttactaggatgataaataataccaagtaattcaacacaaattatagtatacaagtataattttgggttaagagttgaaaaactaagttatctttaaacctgctaacattttaaaatgtcatacttttgagattttaaatactttctaatagctaaattttcttcatcaaactggaggcaaagtttataaactggaaacataaaatgttaaaaatcgaagagataacacaaagaatgcgttccactggtaaaacacatgttctttccctccatggtaactcaatctcaaaaatgaaaaaaaaaaaaaagcactattttttcattccaattacataacagaaaagctaaagaggtagattatatttgattttacactagcaccacagggtat

SEQ ID NO: 148605 - DNA, 4792 bp, Homo sapiens
  misc_feature (1)...(4792): n = a,t,c or g
gctgggcaaagccggtggcaagggcctcccctgccgctgtgccaggcaggcagtgccaaatccggggagcctggagctggggggagggccggggacagcccggccctgccccctcccccgctgggagcccagcaacttctgaggaaagtttggcacccatggcgtggcggtgccccaggatgggcagggtcccgctggcctggtgcttggcgctgtgcggctgggcgtgcatggcccccaggggcacgcaggctgaagaaagtcccttcgtgggcaacccagggaatatcacaggtgcccggggactcacgggcacccttcggtgtcagctccaggttcagggagagccccccgaggtacattggcttcgggatggacagatcctggagctcgcggacagcacccagacccaggtgcccctgggtgaggatgaacaggatgactggatagtggtcagccagctcagaatcacctccctgcagctttccgacacgggacagtaccagtgtttggtgtttctgggacatcagaccttcgtgtcccagcctggctatgttgggctggagggcttgccttacttcctggaggagcccgaagacaggactgtggccgccaacacccccttcaacctgagctgccaagctcagggacccccagagcccgtggacctactctggctccaggatgctgtccccctggccacggctccaggtcacggcccccagcgcagcctgcatgttccagggctgaacaagacatcctctttctcctgcgaagcccataacgccaagggggtcaccacatcccgcacagccaccatcacagtgctcccccagcagccccgtaacctccacctggtctcccgccaacccacggagctggaggtggcttggactccaggcctgagcggcatctaccccctgacccactgcaccctgcaggctgtgctgtcagacgatgggatgggcatccaggcgggagaaccagaccccccagaggagcccctcacctcgcaagcatccgtgcccccccatcagcttcggctaggcagcctccatcctcacaccccttatcacatccgcgtggcatgcaccagcagccagggcccctcatcctggacccactggcttcctgtggagacgccggagggagtgcccctgggcccccctaagaacattagtgctacgcggaatgggagccaggccttcgtgcattggcaagagccccgggcgcccctgcagggtaccctgttagggtaccggctggcgtatcaaggccaggacaccccagaggtgctaatggacatagggctaaggcaagaggtgaccctggagctgcagggggacgggtctgtgtccaatctgacagtgtgtgtggcagcctacactgctgctggggatggaccctggagcctcccagtacccctggaggcctggcgcccaggggaagcacagccagtccaccagctggtgaaggaaccttcaactcctgccttctcgtggccctggtggtatgtactgctaggagcagtcgtggccgctgcctgtgtcctcatcttggctctcttccttgtccaccggcgaaagaaggagacccgttatggagaagtgtttgaaccaacagtggaaagaggtgaactggtagtcaggtaccgcgtgcgcaagtcctacagtcgtcggaccactgaagctaccttgaacagcctgggcatcagtgaagagctgaaggagaagctgcgggatgtgatggtggaccggcacaaggtggccctggggaagactctgggagagggagagtttggagctgtgatggaaggccagctcaaccaggacgactccatcctcaaggtggctgtgaagacgatgaagattgccatctgcacgaggtcagagctggaggatttcctgagtgaagcggtctgcatgaaggaatttgaccatcccaacgtcatgaggctcatcggtgtctgtttccagggttctgaacgagagagcttcccagcacctgtggtcatcttacctttcatgaaacatggagacctacacagcttcctcctctattcccggctcgggggccagccagtgtacctgcccactcagatgctagtgaagttcatggcagacatcgccagtggcatggagtatctgagtaccaagagattcatacaccgggacctggcggccaggaactgcatgctgaatgagaacatgtccgtgtgtgtggcggacttcgggctctccaagaagatctacaatggggactactaccgccagggacgtatcgccaagatgccagtcaagtggattgccattgagagtctagctgaccgtgtctacaccagcaagagcgatgtgtggtccttcggggtgacaatgtgggagattgccacaagaggccaaaccccatatccgggcgtggagaacagcgagatttatgactatctgcgccagggaaatcgcctgaagcagcctgcggactgtctggatggactgtatgccttgatgtcgcggtgctgggagctaaatccccaggaccggccaagttttacagagctgcgggaagatttggagaacacactgaaggccttgcctcctgcccaggagcctgacgaaatcctctatgtcaacatggatgagggtggaggttatcctgaaccccctggagctgcaggaggagctgaccccccaacccagccagaccctaaggattcctgtagctgcctcactgcggctgaggtccatcctgctggacgctatgtcctctgcccttccacaacccctagccccgctcagcctgctgataggggctccccagcagccccagggcaggaggatggtgcctgagacaaccctccacctggtactccctctcaggatccaagctaagcactgccactgggggaaactccaccttcccactttcccaccccacgccttatccccacttgcagccctgtcttcctacctatcccacctccatcccagacaggtccctggccttctctgtgcagtagcatcaccttgaaagcagtagcatcaccatctgtaaaaggaaggggttggattgcaatatctgaagccctcccaggtgttaacattccaagactctagagtccaaggtttaaagagtctagattcaaaggttctaggtttcaaagatgctgtgagtctttggttctaaggacctgaaattccaaagtctctaattctattaaagtgctaaggttctaaggcctacttttttttttttttttttttttttttttttttttgcgatagagtctcactgtgtcacccaggctggagtgcagtggtgcaatctcgcctcactgcaaccttcacctaccgagttcaagtgattttcctgccttggcctcccaagtagctgggattacaggtgtgtgccaccacacccggctaatttttatatttttagtagagacagggtttcaccatgttggccaggctggtctaaaactcctgacctcaagtgatctgcccacctcagcctcccaaagtgctgagattacaggcatgagccacttgcactcaaccttaagacctactgttctaaagctctgacattatgtggttttagattttctggttctaacatttttgataaagcctcaaggttttaggttctaaagttctaaggattctgattttagggagctaaggctctatgagtctaggatgtttattcttctaggagttcaggagtccttaaaaatgtaaggattataggattctaaaggttctataggttctaggacatgggaggttctaaggcctagggattcttaaaatgtggatgttctaagggctctgagagtctagattctctgggctgtaaggctctagatccataagggcttcaaaatggttatcttctcaagttctaagattctaatgatgatccaattatagtttctgaggctttatggataatagattctcttgtattaagaccccagatcccaagggtccgaaagctctaggaatctgcatttcaaaagttccaagagtctaaagatggagtttctaaggtccaggtgttctaagatgtgatattctaagacttactctaagatcttagattctctgtgtctaagattctagatcagaatggctccaagattctagatgattaaataaggattctaaccggtctgttctgtttcaaggcactcctagattcccattgggtcccaagattccggatcctaagcatcctaagttataagacttctccacactccagttgtgacttaactagacaccaaatgttcctaataatttctaaatgttggacaccttttaggttctttgctgcattctgcctctcttaggaccatggttaagagtcccaagaatcccacattttctaaaaatcttatagttcttaggcactgtaagttctaagactcaaaatgttctaaagtttcttaagattctaaaggtccacagggtctagactattaggtgcaattttcaaggttctaaccctatactgtaggtattctttgggggtgcccctcttccttcttaggctatccattggcttcctcctccccaaactgtggggggtgtgcccccttcaaggcctgtggcaatggcattagggatgcctcctttcccgcaggggatgggacgatctcccacctttcggggccatgttgccccccgtgaagccaatccctcaaccttctgagtacagagtgtgggactctgggtgcctccagagggggntcaggtcacgataaaactttgtatatcaacgagaaaaaaaa

SEQ ID NO: 148606 - DNA, 1302 bp, Homo sapiens
atgaataacggaagaaattatagatgtcagaatttggtagacaagggcgtaggagagaaccggggaccggcggacaaccggatgttagtggcccaccagtgcagccgggaggaaaaactaaaggaacccgatgaacaagtgacacccgcagtttgtcagcaggactcgctagcgatggagcgtctgggaagaagccccacggcggaggaaaaggtacccgagacaacgacacgtttctgggctccgggggttgaagcaccaggcgacgacgcagagaggcgtcgacgagaagccagtggacctgcgacacggcactcccccctcccaacagctggtattacagcccccaaagcaggttcagccaaggtgcaactcagtatactcaagcccagcaaactcgacaagtgcagccataaaaccagccacaccaagtccagctaccactactttctccattatcctgtatcctccaccgtacagccagtagcagctgcggctactccgtcctacgccctcatagggagttccctgtggccagttaatgaaagaggcagacaggaggaatcaaggacctgcatcattgaccaatctgcatggcatgttggacgagctgaaattagaaaactgctgccttactgctccactcaagggggcctgaaatatagtgatgtaacctcgggtatggtgaaagacccaccggacgtcttggaaggcaaaaatgccttgacgctctggctgctctacgccacgctaagtggtccagtgaaatacgtttctgaatttttctctttccatcttggaacacccaacaccctcctcatcccccctcaaagtgaatgcaagtacctgaaatgccagcagccagcttcgggtgtagctattctcatccaactacagttgctagctacactgtccatcaggctccatagctgctcacacagttactgctgcctatgcaccagcagccgccacagtgcagttgccaggcctgctccagtagctgttgcagctgctgcaacagctgtgcttatggaggctaccccactgcacacacagcaactgactatggttatctcagaggcaacaagaagcaccaccaccaccacccccagctactacacaaactaccagcttatgatagtaagcaatactacaacaaccaacagcaactgctgctgctgtagctgccgctgcccaacctcgccttctgttgctgaaacttactatcagacagtttgcattgagctccttgcattccgccagatacacaaagttctaggcatggatccattacgcaaatga

SEQ ID NO: 148607 - DNA, 1652 bp, Homo sapiens
atggaaatgagacgttatgaagaggacatgtactggaggagaatggaggaagaacaacatcattgggatgatcgccgccgaatgccagatggaggttatcctcatggtcctccaggcccattaggccttctgggagtccgaccaggcatgcctcctcagcctcaggggcctgcacccttacgtcgtcctgactcatctgatgaccgttatgtaatgacaaaacatgccaccatttatccaactgaagaggagttacaggcagttcagaaaattgtttctattactgaacgtgctttaaaactcgtttcagacagtttgtctgaacatgagaagaacaagaacaaagagggagatgataagaaagagggaggtaaagacagagctttgaaaggagttttgcgagtgggagtatttgcaaaaggattacttctccgaggagatagaaatgtcaaccttgttttgctgtgctcagagaaaccttcaaagacattattaagccgtattgcagaaaacctacccaaacagcttgcttttataagccctgagaagtatgacataaaatgtgctgtatctgaagcggcaataattttgaattcatgtgtggaacccaaaatgcaagtcactatcacactgacatctccaattattcgagaagagaacatgagggaaggagatgtaacctcgggtatggtgaaagacccaccggacgtcttggacaggcaaaaatgccttgacgctctggctgctctacgccacgctaagtggttccaggctagagctaatggtctgcagtcctgtgtgattatcatacgcattcttcgagacctctgtcagcgagttcccagcttggtcctgattttccaagctgggctatggagttactagtagagaaagcaatcagcagtgcttcctagccctcagagccctggggatgcacttgagaagagttttttgaatgcatttcttcaggggttattcttaaaaggtagtcctgggacttctggatccttgtgaaaaggatccctttgataccttgggccaacaatgacctgacccagccagccgtgaagaccatccacatcccagtgccacagtttgccattggagacctcccttgcattcccgcccagataccacaaagttcctaggcatggatcccattacccgcaaatgagcccaacgttttaacatcccacaacaacaggaaacgaagaagagattagtgatggagttgatggatttgaagctgaggggaaaaaagacaaaaaagattatgataacttttaaaaagtgtctgtaaatcttcagtgttaaaaaaacagatgcccaatttgttggctgtttttcattcataataatgtctacattgaaaaatttatcaagaatttaaaggatttcatggaagaaccaagtttttctatgatattaaaaaatgtacagtgttaggtattattttgaatggaaagacacccaaaaaaaaaaatgtgctccgactagggggaaaacagtagttccgatttttttcccattatttttattttattttctggttgccctagcttccccccctatttttgtgtcttttattaactagtgcattgtcttattaaatcttcactgtatttaatgcaggatgtgtgcttcagttgctc

SEQ ID NO: 148608 - DNA, 379 bp, Homo sapiens
ggatctgcctgcctcagccacccaaaatgctgggattacaggtgtgagccaccacatctggccaagaataatttttttattgtggtagaaaacatttaccatcttaacatttttaagtgtacagtacagtagtagtaactacatccaccctgtgtgcaacagagctttagaactttttaaatcttacaaaactgaaacaaaactgaacttcccctctcctcctccccccatccctgtcaacctgcactgtattttctttttctgagggttgacttttcttttaggttttttttctttaccaaaatacagaggtttcacgaattttgtgtcaccttgcacagtggccatgctaacccggggggggggggggggggaattc

SEQ ID NO: 148609 - DNA, 472 bp, Homo sapiens
  misc_feature (1)...(472): n = a,t,c or g
ttttaaataggatcattgtaaagattaatgagataatgttttaacatagtgcctggtccatgataagtgttaaatttttcaattaccctcagtaactgataatgtagcagaaaatactctatattcagacagacctgaatttgaatcccagctctatgacttatctgttgtgacnnnnnnnnnnnnnnnnnnnnngaaaaagggttttcttttggggcccagggttgaaggccggggccaaattttggtttattggaaaccctaacttgggggctaaagggaaccctctggcttaaccccccgaaaaattgggaattaggggcccacccccccacccccggtaatttttggattttttgaaagggagggttttggaatgtttcccaaggtgggtctaaaactcggggcttaagggaattgccccccttttcctggaaaaagggttgaaaaaacggtttgaccccccttccct

SEQ ID NO: 148610 - DNA, 529 bp, Homo sapiens
  misc_feature (1)...(529): n = a,t,c or g
gnnnnnnnnnnnnnnnnnnnnnnnnnnnnnnnnnnnnnnnnnnnnnnnnnnnnnnnnnnnnnnnnnnnnnnnnnnnnnnnnnnnnnnnnnnnnnnnnnnnnnnnnnnnnnnnnnnnnnnnnnnnnnnnnnnnnnnnnnnnnnnnnnnnnnnnnnnnnnnnnnnnnnnnnnnnnnnnnnnnnnnatggttaacatgaggtcttgaacttcctgacctcatgtgttctgaccaccttagtctttctgattgctgacattatatggttgagctgccgcacccggtccttaccatttgtcgctactactttggaggtacttcctttgagcttgattggactttgtcatcataccatacttgtctttatatctaacgcattttttatatgaaaagcttattttgtaacttcttcctttataatgttcccttaatccttctttttatttaatatttctgtattgtcttatatgtacttaactttttcacatcttacttcttttgtcattgcctatttttcctattcccacatcct

SEQ ID NO: 148611 - DNA, 754 bp, Homo sapiens
gtttgaatggccctgagtgggactcggcccagaagccgagggactctctaggctgccgggcgctggtcgtcagcgccgaggctgggctgaggcgccgcggtaccatgaggcgccggtacttaagagattatggcatcagaaacccacaatgttaaaaaacggaacttttgtaataagattgaggatcatttcattgatcttcctagaaaaaagatctctaatttcactaataagaacatgaaggaggttaagaaatctccaaaacagttggctgcttacataaatagaacagttggacaaactgtgacaagcccagataaacttcgtaaagtgatctatcgcagaaagaaagttcatcatccctttccaaattccttgttacagaaaaaaacagttcccttggaagtgggggctgtgacatggcaaataaagaaaatgaactggcttgtgcaggccacctgcctgaaaaattacaccatgatagtcgaacatatttggttaactccagtgattctggttcttcacagacagaaagcccatcatcaaaatatagtgggtttttttctggagggtttctcagggaccatgaaacaatgggcccaagttttgttcagcagggatatgagattgaatgtagctttaactttctggagaaagagaagtataagtgaacttgtagcttatttgttgaggatagaagatcttggcgttgtggtagattgccttcctgtgctcaccaattgtttacaggaaa

SEQ ID NO: 148612 - DNA, 2297 bp, Homo sapiens
  misc_feature (1)...(2297): n = a,t,c or g
gcggccgcgtttgaatggccctgagtgggactcggcccagaagccgagggactctctaggctgccgggcgctggtcgtcagcgccgaggctgggctgaggcgccgcggtaccatgaggcgccggtacttaagagattatggcatcagaaacccacaatgttaaaaaacggaacttttgtaataagattgaggatcatttcattgatcttcctagaaaaaagatctctaatttcactaataagaacatgaaggaggttaagaaatctccaaaacagttggctgcttacataaataggtttctcaggaccatgaaacaatggcccaagttttgttcagcaggaatatgagattgaatgtagctttaactttctggagaaagagaagtataagtgaacttgtagcttatttgttgaggatagaagatcttggcgttgtggtagattgccttcctgtgctcaccaattgtttacaggaagaaaaacaatatatctcacttggctgctgtgttgacttgttgcctctagtaaagtcactacttaaaagcaaatttgaagaataatgttattagtgggttttaactgggcttcaagcagtcattaaaaggtggtggtcagaactatcatccaaaacagaaattataaatgatggaaatattcaaattttaaaacaacaattaagtggattatgggaacaggaaaaccatcttactttggttccaggatatactggtaatatagctaaggatgtagatgcttatttatttccagttaccattgagggatttcatctactaaagagcatttggtttttcaaaacatccctggaactgtataatttacaaaaaaaaaaagtctcggtctgaggaactgtggaactgttggggaggaaatcaaaacctattttttccttttaaaaagcccacgtaatgaaacccacctaatgaaatccccccagaaatcctgcctcacattgaagtgggaaaaatatccccaaaaggagcagccttcaatttccattgagggtgaaagtgcncctatgaagattgttcacctttggctgcatttggggagttatatggttatttggtaacattaagaactactggatttttaatgcaatcctgcataaaaatataatttatactatgtgaaaaaataagacaggacttaccactagggaaccaccaaggaccaatcatccattaaacttttttaaggttgtgttttatttaaaaaaaaaaaacacttaaatgtgtgcagctattttcttatgttgaaaagactgaaagtttaaaacatgaaaaaaatcaatattaaacattttttgttcacactgagatactgtgtatgtaaaatgccttaattattaataagccaatgtgttatgataccaatatctgttttaaaaaacctaaaacccaacccatgccttctggcatgataaaatcatggaattaaatcaggggtttacattcttgtagagtgttcttgaaacactctctgcaccatttttaaaacttgagaatagttttagtatctctgatattttttgccagaatcatcatgtcatgtatgaatgtgttatccctatctaaggaaaaaggtgaatatgtttttgtatgaatgtttaactggaaatgtccatggacttggctaatttatatttactttttattgtacatagatttctaatatttttcattcctgtatcatttaaacttccttcatttgagtaaattcactaaatatttctattttttgcttttttaaattctgattttatatgaattctaattctttttcactacatatgttttaaagagttacatacagtgatttagaatggtttacagttaatgctgatcttgtattttaaattccaacactttgtgtcactacctcctctaatgggttagtatggatatgctaggcaggactgtatgagggtctttttttaaaataccacttttagtgtcagtggaacccaaattctgggaatggtcttaacagctctaaatcttacttgtcttggaaaatgatggggggttaataccactgctggtggttcacacatcatcccatccttaatatgcctgacaggcatcctgaggcaaaggtttttaggtaattgaatttctctggcagtagtccttcaagcacttggaatgtaaacctttaggcatttatttcgtttaatgactactgatacgaatctcaagcagatttcttgctcttaaaagttatggtttcactgagttctggttttgtgtagctatattttatatagctagatattcc

SEQ ID NO: 148613 - DNA, 579 bp, Homo sapiens
aaataacttcttttctttttcagagacagagtctcactctgtcacccaggctgaagcacagtggtatgataatagctcactgcagccttgaattcttgggctcaagcaatctttctgcctcagcctcccaagtaactgggaccacaggtgtgcaccaccacacccacaattttcctttttgatacctgggttgtatgtttctcagtttatcttgggaaacaaaccatccagtctaccatgtcagatgtttaagtctgcggtataataaaaacatatattaggtctttgttcccagttcctgtcactgacctcccaatttcctgagtgacagggttgtcttttgttattcataacaagattcttttgactataatgagtttatgctaatgaggtgactgatgacaaggctcctatctagcttcagaatgggggctggtctccagaggaaccaaccaagtgataagaggattggaaatttcagtcccacttcctgacctcctaggaggggaagggagacagacattacactcaatcaccagaagtcaatgatttaatcaattatgcctaagtgatggaact

SEQ ID NO: 148614 - DNA, 443 bp, Homo sapiens
cgcacttcaacctgagccacaggtctgcccaagctaagggcaaccgctataaggaggccgaggccctgaccaacgccgcggtgcacgtggacgacatgcccaacgcgctgaacgccctgatcgacctgcgcgcgcacaatcttgggcaggacccggtcaactttaaacgcctaagccactgcctgctggtgaccctggccgcccacctcctcgccgagttaacccctgcggtgcacgcctgactggacaagttcctggcttctgtgagcaccgtgctgacctccaaatacacgtaagctggagcctaagcggccatgcttattgccccttgagccttgccccagcccctcctaccctttctggacccgtacccccgtggtctttgaataaagtctgattgggcggcggatgatgcaaaaaaaggacaagaagtttgtgttctt

SEQ ID NO: 148615 - DNA, 1080 bp, Homo sapiens; identical to SEQ ID NO: 148021

SEQ ID NO: 148616 - DNA, 685 bp, Homo sapiens
  misc_feature (1)...(685): n = a,t,c or g
ttgagacagagtctcgcttagccacccaggctggagtgcagtgctgcgatcttggctcactgcaaccactgtctccagggttcaagtgattctcctgtttcagcctcccaagtagctgggattacaggtacccaccatcgtgccaggctaatttttgtattttagtagagatggggtttcaccatgttggccaggctagtcttgaactcctgacctcaggtgatccgcctgcctcagcctcccaaagtgctaggattacaggtgtgagccaccgcgcccagtgactgtaaatgttttctaaacattcttttacatttgtttctattataactatttttccccttcaggagagcaccagaattgcagaattcacagaacaaaataataagaaataaagatttcttatactggatatgacttttaacctgggattctctaaaaaccaacttatactctgctctatatcttaatatgtaaaattaagaaatatcaggctgggcatgctggctcatgcctataattccagcattttcgaaggccgaggtgggaggatcatttgagctccgaagttcaagaccagactgggcaacatagggagactgtctctaccaataaaggaaagacngagagagagatcgagagagagagaatccagagggagncagtctaccattagccataaggg

SEQ ID NO: 148617 - DNA, 371 bp, Homo sapiens
gtcatagccacctaccacggaggtctctgtacacagaaatctcagcccccacctccacaggcactatggtcagcttctacttcaaccatcaatctaatggtgagcacagaaccattggctctcactgaaacccatatatgcaagttgccgaaagactaaggaacttgcagggatttcatattgccatgggactatgattctaacaccaaaagctgtgcccgattctggtatggacgttgtagtgcaaacgaaaacgactttggatcacagagcgaatgtgaaaaggtttgcgctcctgtgctctgcaaacccggagtcatcagtgagatggcaacctaagcgtggctggccaacgtcgtatacctcttgaa

SEQ ID NO: 148618 - DNA, 718 bp, Homo sapiens
ccataactttatcttgaatgaatataatctttcttcgctataatgcctatatcacaaaactgttatagctgtactttttctttctcgagatggagtctcgctctgtcacccaggctagagtgcaatggcctgatcttggctcactgcagcctcctcctcccgggttcaagcgattctcctgtctcagcctcctgaatagctgggattacaagtgtgcgccaccatgcagggctgatttttgtatctttagtagagacggagttttgtcatgttggccaggctggtctcaaactccttacctcaagtgatccaccacacccaacccagagtgggttcccctaccagaatacccacacttagcttaaaccttcccctccctttagccctaacaagccttaggtgggacaggcatcaattacgggggcaggggcactggggggctcaggagttaagggccatcacgggcttcaaggaccatcaggtgtggcagacgctcaactgctctctgtgtgtgcctaagccgtgatcttggcaggatttttcttaatcttttaatttataccttctgtgaaaataaacatttagaaattgtaaaatattaaaatgagtatctgaataataatgaggtactcagggtgaagcatgtatgtcataattttctaagtatacgaatagcatatttttttttctttttgagacagagttgctctgtctcaaa

SEQ ID NO: 148619 - DNA, 419 bp, Homo sapiens
ttatctgagtgacagcgacacagaggccaagctgacggagactaacgcatagcccaggggagtggttggcagccctctcaccccagggcctgtggctgcctgggcacctctcccaggaagtggtggggcaccggtctcccccacccgactgctgatctgcatgggaaacaccctgaccttcttctgtcaggggcactttccaggctatgggtgtctgatgtctccacgtggaagaggtgggggaaagaggagtttctgaagagaactttttgctcctctgtctcaaaatgccagactcttggcttctaccctgctcccatctgccgccccccttctctcctgcaattggtttgtactcactgggctgtgctctcccctgtttacccgatgtatggaaataaaggccctaatcctcctga

SEQ ID NO: 148620 - DNA, 6479 bp, Homo sapiens
agtctccttgctctgggctgctccaggccaggccatgcggaaagtgtgttgttatgaggattcaatgaggagacctgtatgaagtgccttcccctgtgcctggctcatagcgaaaacagaagaacagattgcagcagaagaggcctggaatgagacggagaaggtgtggctggtccatagggacggcttctcactggccagtcaactcaaatctgaggagctcaacttgcctgaggggaaggtgcgtgtgaagctggaccacgatggggccatcctggatgtggatgaggatgacgttgagaaggctaatgctccctcctgcgaccgtctggaggatctggcctcactggtgtacctcaatgagtccagcgtcctgcacaccttgcgccagcgctatggcgctagcctgctgcacacgtatgctggccccagcctgctggttcttggcccccgtggggcccctgctgtgtactctgagaaggtgatgcacatgttcaagggttgtcggcgggaggacatggcaccccacatctatgcagtggcccagaccgcatacagggcgatgctgatgagccgtcaggatcagtcaatcatcctcctgggcagtagtggcagtggcaagaccaccagctgccagcatctggtgcagtacctggccaccatcgcgggcatcagcgggaacaaggtgttttctgtggagaagtggcaggctctgtacaccctcctggaagcctttgggaacagccccaccatcattaatggcaatgccacccgcttctcccagatcctctccctggactttgaccaagctggccaggtggcctcagcctccattcagacaatgcttctggagaagctgcgtgtggctcggcgcccagccagtgaagccacattcaacgtcttctactacctgctggcctgtggggatggcaccctcaggacagagctccacctcaaccacttggcagagaacaatgtgtttgggattgtgccactggccaagcctgaggaaaagcagaaggcagctcagcagtttagtaagctgcaggcggccatgaaggtgctgggcatctcccccgatgaacagaaggcctgctggttcattctggctgccatctaccacctgggggctgcgggagccaccaaagaagctgctgaagctgggcgcaagcagtttgcccgccatgagtgggcccagaaggctgcgtacctactgggctgcagcctggaggagctgtcctcagccatcttcaagcaccagcacaagggtggcaccctgcagcgctccacctccttccgccagggccccgaggagagtggcctgggagatgggacaggcccgaaactgagtgcactggagtgccttgagggcatggcggccggcctctacagcgagctcttcacccttctcgtctccctggtgaatagggctctcaagtccagccagcactcactctgctccatgatgattgtcgacaccccgggcttccagaaccctgagcagggtgggtcagcccgcggagcctcctttgaggagctgtgccacaactacacccaagaccggctgcagaggctcttccacgagcgcaccttcgtgcaggagttggaaagatacaaggaggagaacatcgagctggcgtttgacgacttggaaccccccacggatgactctgtggctgctgtggaccaggcctcccatcagtccctggtccgctcgctggcccgcacagacgaggcgaggggcctgctctggctattggaagaggaggctctggtgccaggggccagtgaggacaccctcctggagcgccttttctcctattatggcccccaggaaggtgacaaaaaaggccaaagcccccttctgcacagcagcaaaccacaccactttctcctgggccacagccatggcaccaactgggtagagtacaatgtgactggctggctgaactacaccaagcagaacccagccacccagaatgtcccccggctcctgcaggactcccagaaaaaaatcatcagcaacctgtttctgggccgcgcaggcagtgccacggtgctctctggctccatcgcgggcctggagggcggctcgcagctggcactgcgccgggccaccagcatgcggaaaacctttaccacaggcatggtggctgtcaaaaagaagtcactgtgcatccagatgaagctacaggtggacgccctcatcgacaccatcaagaagtcaaagctgcattttgtgcactgcttcctgcctgtagctgagggctgggctggggagccccgttccgcctcctcccgccgagtcagcagcagcagtgagctggacctgccctcgggagaccactgcgaggctgggctcctgcagctcgacgtgcccctgctccgcacccagctccgcggctcccgcctgctcgatgccatgcgcatgtaccgccaaggttaccctgaccacatggtgttttccgagttccgccgccgctttgatgtcctggccccgcacctgaccaagaaacacgggcgtaactacatcgtggtggatgaaaggcgggcagtggaggagctgctggagtgcttggatctggagaagagcagctgctgcatgggcctgagccgggtgttcttccgggcgggcaccttggcacggctggaggagcagcgggatgaacaaaccagcaggaacctaaccctgttccaagcagcctgcaggggctacctggcccgccagcacttcaagaagagaaagatccaggacctggccattcgctgtgtacagaagaacatcaagaagaacaaaggggtgaaggactggccctggtggaagctttttaccacagtgaggcccctcatcgaagtacagctgtcagaggagcagatccggaacaaagacgaggagatccagcagctgcggagcaagctcgagaaggcggagaaggagaggaacgagctgcggctcaacagtgaccggctggagagccggatctcagagctgacatcggagctgacagatgagcgtaacacaggagagtccgcctcccagctgctggacgcggagacagcagagaggctccgggctgagaaggagatgaaggaactgcagacccagtacgatgcactgaagaagcagatggaggttatggaaatggaggtgatggaggcccgtctcatccgggcagcggagatcaacggggaagtggatgatgatgatgcaggtggcgagtggcggctgaagtatgagcgggctgtgcgggaggtggacttcaccaagaaacggctccagcaggagtttgaggacaagctggaggtggagcagcagaacaagaggcagctggaacggcggctcggggacctgcaggcagatagtgaggagagtcagcgggctctgcagcagctcaagaagaagtgccagcgactgacggctgagctgcaagacaccaagctgcacctggagggccagcaggtccgcaaccacgaactggagaagaagcagaggaggtttgacagtgagctctcgcaggcacatgaggaggcccagcgggagaagctgcagcgggagaagctgcagcgggagaaggacatgctcctcgctgaggctttcagcctgaagcagcaactagaggaaaaagacatggacattgcagggttcacccagaaggttgtgtctctagaggcagagctccaggacatttcttcccaagagtccaaggatgaggcttctctggccaaggtcaagaaacagctccgggacctggaggccaaagtcaaggatcaggaagaagagctggatgagcaggcagggaccatccagatgctggaacaggccaagctgcgtctggagatggagatggagcggatgagacagacccattctaaggagatggagagtcgggatgaggaggtggaggaggcccggcagtcgtgtcagaagaagttaaaacagatggaggtgcagctagaggaagagtatgaggacaagcagaaggttctgcgagagaagcgggagctggagggcaagctcgccaccctcagcgaccaggtgaaccggcgggactttgagtcagagaagcggctgcggaaggacctgaagcgcaccaaggccctgctggcagatgcccagctcatgctggaccacctgaagaacagtgctcccagcaagcgagagattgcccagctcaagaaccagctggaggagtcagagttcacctgtgcggcagccgtgaaagcacggaaagcaatggaggtggagatcgaagacctgcacctgcagattgatgacatcgccaaagccaagacagcgctggaggagcagctgagccgccttcagcgtgagaagaatgagatccagaaccggctggaggaagatcaggaagacatgaacgaattgatgaagaagcacaaggctgccgtggctcaggcttcccgggacctggctcagataaatgatctccaagctcagctagaagaagccaacaaagagaagcaggagctgcaggagaagctacaagccctccagagccaggtggagttcctggagcagtccatggtggacaagtccctggtgagcaggcaggaagctaagatacgggagctggagacacgcctggagtttgaaaggacgcaagtgaaacggctggagagcctggctagccgtctcaaggaaaacatggagaagctgactgaggagcgggatcagcgcattgcagccgagaaccgggagaaggaacagaacaagcggctacagaggcagctccgggacaccaaggaggagatgggcgagcttgccaggaaggaggccgaggcgagccgcaagaagcacgaactggagatggatctagaaagcctggaggctgctaaccagagcctgcaggctgacctaaagttggcattcaagcgcatcggggacctgcaggctgccattgaggatgagatggagagtgatgagaatgaggacctcatcaacagtgagggagactctgatgtggactcggagctggaggaccgtgttgacggggtcaagtcctggttgtcaaaaaacaagggaccttccaaggcagcttctgatgatggcagcttaaagagttccagccccaccagctactggaagtcccttgcccctgatcggtcagatgatgagcacgaccctctcgacaacacctccagaccgcgatactcccacagttatctgagtgacagcgacacagaggccaagctgacggagactaacgcatagcccaggggagtggttggcagccctctcaccccagggcctgtggctgcctgggcacctctcccaggaagtggtggggcaccggtctcccccacccgactgctgatctgcatgggaaacaccctgaccttcttctgtcaggggcactttccaggctatgggtgtctgatgtctccacgtggaagaggtgggggaaagaggagtttctgaagagaactttttgctcctctgtctcaaaatgccagactcttggcttctaccctgtgtcaccgtgggcagtggcaggtggcctggcactgcatggagccagcacgttgacctccctctcagctccctgctcagggacggtggacaggttgcctactgggacactctaggttgctgggtccatggggaggattgggggaggagaagcagtgccttccctctcgtgtggggtgggggctctctcttcttggtgcctgctgtctttctactttttaatttaaatacccaacctctccatcacagctgcatccctgagagtgggagggggctgtagtggtagctggggctcccaagaacgactcgggaatgtcatctccatcttcacccttcagagagcagtcctttctctgtgcagctggagacgctggtgaggagagccgggtccaggttcttaagaatgaggtgcggaggggctctccggtgctgctgggctgggttgagcaagcctacgcagacaagtgtgtgtgtggaccatccgcacctccagcccccaccccaccctctttgtctcagcgtgttatgtgcaatgacctatttaaggtaaacccattccaactacagcagttcagggctgatccaagcactgcctccctcctgctctgtccaggtggtctggaccataaactcaacttgagagggaaggcttggggttgaggacttgtgatcagaaaaactgaagatggaagttttggccggtgctcattagacatgagtcctcactctgtgtcctgagcccgtgtcattcttccaacctccctgcccccacacacttatcccagacacaacaccatgtggtctggaggtcccagcccccaccctaaaaaggttatccctgagaactccaccagacttgggagcccaagtgcagtgcctggtgctgctcccatctgccgccccccttctctcctgcaattggtttgtactcactgggctgtgctctcccctgtttacccgatgtatggaaataaaggcccttttcctcctg

SEQ ID NO: 148621 - DNA, 423 bp, Homo sapiens
ctgaggtagtccatgcactgaggtgcagatggtggagctggggcttgaagctggatctgctgactcctgaacctgagcccatctgtggtcctgcacttctttccaggagcagcctgaggggctcccatccgacagccttccttctccctccccaggtctcacagtgaagaggtgagctaggcccaagcaccttcagagccttcagagcagagttccccacctcccgggggtccaaggacaacaaagaaaaaaatcagcaagaacaggatatggcaaagccggctacaggcactggtcagggataggggggggagcagccattaattaatgccctattccaggaaagcctgccaaggccctgggtttagggccaatcactgggggaaacacttttggagtttctctttacagagtgatatccac

SEQ ID NO: 148622 - DNA, 426 bp, Homo sapiens
ccttgctgtggaaagtcgagagctcctggagggaccagaaggacatcatgtcctgggagtgggacaagaggcgccgtcgacatcacttgacagacagaagtcaactgtgtagtaaggtcaagttccaggtggactgcgacctgatcgaatggggcacctggatcatcaacctcaagcagtacaacgcctatcactgtgagggtgagtgtcataatcctgttgggtagaagtttcatcagtccaaccatgcatacatccaggtgggatgccaggtgttagggggagaggaggcagtaatctggcattggggtacagggctctagctttgctattaaatgactatgttccagaattcacagttattcaagcacgtacaatgtaacaggaccctgagctaggtacaaggcatgtagagatgatcgagtg

SEQ ID NO: 148623 - DNA, 455 bp, Homo sapiens
tttttttttttttgaggcgaagtctcactctgtcaccaggatgctggagtgcaatggcgcgatctcagctccctgcaacctccacctcccgggttcaagtgattctcctgcctcagcctcacaagtagttgggattacaggcgtgtaccaccacacccagctaatttttatattttcagtagagacagggttttgccatgttggccaggatggtcttaatcttcctgaccttatgatccacccgccttggcctcccaaagtgctgggatgacaggcgtgagccctgctttctagagttgcagggcgttaagtgtggtgaattccagccgtggcagtggagtttctggccccttctcgactatgagcgtcccaccaacccaggtgctgtgtcctttcgcctgtttcagatcattgaccaagcagccaggccacattcggagcagggtattgaagct

SEQ ID NO: 148624 - DNA, 942 bp, Homo sapiens
  misc_feature (1)...(942): n = a,t,c or g
atgacggtggccgagatccccgtgttcctgtacacgacgtttgggcagggaggtgtaaccggcagcgtctcctcttccctgcagtctgcattctcccagctacggttgacgccaggcctgcggaaagtcctctttgccacggccctggggactgtggccctggcncctggctgcccaccagctgaagaggcgacggaggaggaagaagcagtgcctcgcctaagactgagatccctggggaatctggggctgactagtgcttcctggggccaagatgactgtgccatccattgcgcaacttctcatgtgggcatcaccctgctagttcctacccagtgccaggatttcctacacaggcaagatccacttcctggcagggactcttttctcaggactgaatggctgcagatagcctccgcgttgtattttccaccggccctggtgctgggctatttctacaagccaacctggaaggagcaccttctaactgatctttgggccattgagaaactagtcgctcttctcaacacgctggacaggtggattgatgagactcctccagtggaccagccctctcggtttgggaataaggcatacaggacctggtatgccaaacttgatgagattggggtgctccgggtggatgaccaaatagctattgtcttcaaggtgttcaantcggtagtcgtggggcctggttctgaacgctggggcccattccttttcccagaccacccatacctggagcccagacactttgtggatgagaaggccgtgaatgagaaccacaaggactacatgttcctggagtgtatcctgtttattaccgagatgaagactggcccatttgcagagcactccaaccagctgtggaacatcagcgccgtcccttcctggtccaaagtgaaccagggtctcatccgcatgtataaggccgagtga

SEQ ID NO: 148625 - DNA, 408 bp, Homo sapiens
gaaggagctgacaggaaggcgctgtgcagagcctccccacccccgcccatccccccagttactgacagaggagccatttacaaaaggccgattctctggggagtggagaggcaggaacgcagcgtctatgaagactggcccatttgcagagcactccaaccagctgtggaacatcagcgccgtcccttcctggtccaaagtgaaccagggtctcatccgcatgtataaggccgagccctaggaaggtcctgcagacactcggtacatatctgtgaaatggctgtgacagtggcaggggccctcgtgcagagcatgatacagacacaggagggggcaggtcagccctggagaatccgtggagaaaggaagctggtgccccgcctggggcagaaagatgcggataatctg

SEQ ID NO: 148626 - DNA, 1718 bp, Homo sapiens
ccggcaccgacatggcggccgtcttcgctgtggtgactttaactctcggttttcggttctagccggccggcgctcacttgtcttcaggaagctcggagcctttggtggagccggggagaggaagggtgggtgcaagagtgaaaggcgagaggggactgcaagcatccgggtcgctgctggccggagcagatggctgagggcgagcggcagccgccgccagattcttcagaggaggcccctccagccactcagaacttcatcattccaaaaaaggagatccacacagttccagacatgggcaaatggaagcgttctcaggcatacgctgactacatcggattcatccttaccctcaacgaaggtgtgaaggggaagaagctgaccttcgagtacagagtctccgaggccattgagaaactactcgctcttctcaacacgctggacaggtggattgatgagactcctccagtggaccagccctctcggtttgggaataaggcatacaggacctggtatgccaaacttgatgaggaagcagaaaacttggtggccacagtggtccctacccatctggcagctgctgtgcctgaggtggctgtttacctaaaggagtcagtggggaactccacgcgcattgactacggcacagggcatgaggcagccttcgctgctttcctctgctgtctctgcaagattggggtgctccgggtggatgaccaaatagctattgtcttcaaggtgttcaatcggtaccttgaggttatgcggaaactccagaaaacatacaggatggagccagccggcagccagggagtgtggggtctggatgacttccagtttctgcccttcatctggggcagttcgcagctgatagaccacccatacctggagcccagacactttgtggatgagaaggccgtgaatgagaaccacaaggactacatgttcctggagtgtatcctgtttattaccgagatgaagactggcccatttgcagagcactccaaccagctgtggaacatcagcgccgtgcccttcctgggtccaaagtgaaccagggtctcatccgcatgtataaggccgagtgcctgggagaagttccctgtgatccagcactttcaaagttcgggagcctgctgcccatccatcctgttcacgtcgggctaggaggggccaagccgaaggagccacccaggggcacagtttcctgttgcctgcctttccccaccccagcagtggcccctcccccatcccctccctctgtttcgtcccgtttgatgagaggctgtttactggggttgggtggcgagatgggcttgagggggctcagagcataaggctttcagggcccaagttgggagaagtgaccaaagtgtagccagttttctgagttcccgtggcgctaaactggccagaagagagggtctggggcctgggtcattcggccaatctctcctggtttctggcctcttctcccttcactcccggtccagtctggtttttgagagcaggggctgtttctggcagcacctcagggaagggaggagagattacctggttgctttccatttgcttttgccctttcctggagtcgatgcctttctaagggttggagctgctccttgcaggggcgggtcagtttcccaggccatgccggggtggccatctatgctagggctggaagctgaggctggccgccagctgtgggctggggtggg

SEQ ID NO: 148627 - DNA, 387 bp, Homo sapiens
  misc_feature (1)...(387): n = a,t,c or g
tgtaattgtacatattgaagagattcatagccaaattgatgaaaactaatgataacaataaaaatcttataaatagtaacagaaaggaataataataaaactgagagttgacttattagaaacaatggaggccaaatgcagtagaacaccatctttaaagtgcttagggaaggagagctttggggaaagctgggaatcaagaattctacatccggcagaaatatcccacaggaatgaatgccacatgaagattattttagattttaaaagtgagaaaggannnnnnnnnnnnnnnnnnnnnnnnnnnnnnnnnnnnnnnnnnnnnnnnnnnnnnnnnnnnnnnnnnnnnnnnnnnnnnnnnnnnnnnnnnnnnnctgaaaccctgtc

SEQ ID NO: 148628 - DNA, 749 bp, Homo sapiens
gaaaactttaaaaataaattcaaaagagcagtgccccagtgactcattgaacaatattaagacctaatatgtgtcattggagtcccagaagaagagaaggaaactggggccaaaaatatatttaaagagataatgggagagaattccccacatttagtgaaagatgtaattgtacatattgaagagattcatagccaaattgatgaaaactaatgataacaataaaaatcttataaatagtaacagaaaggaataataataaaactgagagttgacttattagaaacaatggaggccaaatgcagtagaacaccatctttaaagtgcttagggaaggagagctttggggaaagctgggaatcaagaattctacatccggcagaaatatcccacaggaatgaatgccacatgaagattattttagattttaaaagtgagaaaggaccagatgcggtagctcacacctgtaatcccagcattttgggaggccacacggcaggtggatcacttgaagccaggagttttgagaccaacctgcctgaaaccctgtctctattaaaaaaattaaatttaaaagagaaagaatttgttgccagctaccctccactagtagaaatgctgaagtaaattctttgggatgaagggaaatgatataccaagtcaaactcctgttttcaaaaaggaatgaagggaaaacttgtcttattttatcctctttatttgtttcaaatgtatatgatgttgaaagc

SEQ ID NO: 148629 - DNA, 708 bp, Homo sapiens
cagaagggaaaggttaaacgagctttaaaaatccccctccccccccacctggggggttgaaaaaaattccctccccccccccccccaaaaaaaaaaagtttaaggatgtatcttaacccacatattattttctttacttgaatgcatcctctgtaacttagtatatgtaatactacagatagactttctcaacatttgctgcctatgctaaggatctgcagccaggttttcagaagcagtaccttccaattctcaacagcagatgccaaatgttgtccaagtttaccgacagaacttgctttttatgccacaggagaggaagacaacaaggagtcaaaagggggaaaaaaaaagtttgggttcatagatgcaggaacattaacagaatagcctgagattttaacagcataactcattccctcttccacctttgtactttatccaggtcaacacatcagggttctctaacgattccagtattctgtttcttttactgtaagatacatgtaatttctttgccactgtgattaaacaagccctgtaatagtcagtcagcagggttaaaaagagattacggaaaggataaactcctacctactttcttgggagatgtgggaaagatttcaagtcacagcatttttcataactgtttataaacaatggtcatttatatccacactttctcttatttacattagttctcgtgcc

SEQ ID NO: 148630 - DNA, 332 bp, Homo sapiens
  misc_feature (1)...(332): n = a,t,c or g
cttccccctacagggccttggcttcctaaaaccgaaggcaggcagggccctttcccgccaaattgggaaggccctcccctaagggaggtttccccaatttttttaaacnnnnnnnnnnnaaaagttcgttttaaaaaaatccaaagggtcagggttgggggtttccccccttaatccccggttttcaggggccccaggtgggagggtcccttggggccccaggtttaaaacccccctggggaaccccccaaaaccccttttcnnnnnnnnnnnnnnnnnnnngaagcaactgcactgatactggaactacaatagcccacaggagacagatg

SEQ ID NO: 148631 - DNA, 380 bp, Homo sapiens
  misc_feature (1)...(380): n = a,t,c or g
ctttaaaattcaaaaccatttatacttgggcctttannnnnnnnnnnnnnnnnnnnnnnnnnnnnnnnnnnnnnnnnnnnnnnnnnnnnnnnnnnnnnnnnnnnnnnnnnnnnnnnnnnnnnnnntgatggaagggacaaggatatttggcaagtgggttaagctcattcagagtattcctaacaggaattcatgtacaactatagatctattcctaaaaataaatatacatatacatacacaaaaagctatcctaataaaatcttttccagactgatattatatattccacttggaactgtttcccaaatatccacactgaattgtgtgccaaggttcgttctgcttacatggaaggccctttaggagggagtctattg

SEQ ID NO: 148632 - DNA, 258 bp, Homo sapiens
tgacaatagactccctcctaaagggccttccatgtaagcagaacgaaccttggcacacaattcagtgtggatatttgggaaacagttccaagtggaatatataatatcagtcgggaaaagatttcattaggatagctttttgtgtatgtatatgtatatttatttttaggaatagatctatagttgtacatgaattcctgttaggaatactctgaatgagcttaacccacttgccaaatgtccttgtcccttccatca

SEQ ID NO: 148633 - DNA, 340 bp, Homo sapiens
  misc_feature (1)...(340): n = a,t,c or g
acagctttatttttataaaaatgatgggcaagaagattttaaaaatcaaaagcaattatactttggcctttannnnnnnnnnnnnnnnnnnnnnnnnnnnnnnnnnnnnnnnnnnnnnnnnnnnnnnnnnnnnnnnnnnnnnnnnnnnnnnnnnnnnnnnntgatggaaggcacaaggatatttggcaagtgggttaagctcattcagagtattcctaacaggaattcatgtacaactatagatctattcctaaaaataaatatacatatacatacacaaaaagctatcctaatgaaatcttttcccgactgatattatatattccaccgcacgcgtggg

SEQ ID NO: 148634 - DNA, 650 bp, Homo sapiens
ttgggtgagacagagtctcactctgccgcccaacactggaagtgcagtggcgtgacctaggctcactgcaacccccatctccccaggttcaaagcaattctcctgccctcagtctcccaagtagctgggattacaggcgtgtgccaccatgccccagctaattttttgtatttttaagtagaagatggaggtttcaccgtgttggacaaacagctttatttttaataaaaatgatgggcaagaagattttaaaaatcaaaagcaattatactttgggcctttatgtaggtcccagctactcagaaaggatgattaagccccaggagtttgagtccagcctggggcaacactgcaagaccccatctcaaaaataaaatgatgggaaggggacaagggatatttgggcaagtgggttaagctcatttcaggagtatttcctaacagggaattccatgtacaactatagatctattcctaaaaataaatatacatatacatacacaaaaagctatcctaatgaaatcttttcccgactgatattatatattccacttggaactgtttcccaaatatccacactgaattgtgtgccaaggttcgttctgcttacatggaaggccctttaggagggagtctattgtcctcgtgcc

SEQ ID NO: 148635 - DNA, 570 bp, Homo sapiens
gaccggatcttgctccatcgcccatgctggagtacattggcgcgatcatagctcactataccctcaaaccacctaggctcagtcttcccaccctcagcccttttggaaagctgagactgcaggcatacacccactacgcctgactgatttttaaaaatctttttgtagagacggggtctcactgtgtttcccagactggtcttgaatgcctggactcaagcgatcatccaacctctgcctctcaaagcactgggattacaagatacattttttaagaatattaattgtgacagattgaaagtgtctgagtattattcagacacagagattgaaatataaattattgatctatttaatgaaaaataatttttaggagtcaaaaacagcatataatatatttgacagtgaggtttccctaacggagcgcttacttaagaaacggggtgttggctcattcaccaagtcagttgttctcaaggtaagcatgtgggcagggggatgcacatgtcatcctactaattattcccaaggatgttgttgacattatttatgttcttaaatccataataa

SEQ ID NO: 148636 - DNA, 1111 bp, Homo sapiens
ctgtcagtgggacccaacctccctctctcctccctcaggcaggcaggtggtgtgcacgcctcctttccttagcggtacccaaaacaccgaggatgggagagtgatgaacacattgattggccggccctggactggagtacatgttcagttagggtcttatggtggtatctgtcatagaaaacccccacaaccagcagcttacacaaggtagaagttgagattggttctccccttctctctcccatttaaataagtttgtgctgatatctggctctgccatcatcagggaaccaggctccggtcatccgtaaaggccggcactcgtctgtacccgtggcagtatggctgccagggctccagccatcacacccacattccaggaaataggaagggggaaagaaagggtgtatttgtcttttaagaatccttctagaagtgtcatgtaacatttccacatacatttcactggccagaccttaactataagggcagctgggaagtgttgtattttaactcccaaagtgctaggatcacaggcatgagccaccacaccaggccaaattttttaatttttttgtagagatggggtcttgccatgttccccagtctggtctccaactcctgggctcaagtgatctgccggcctctgccttctacagtgctgggattgcaggcatgagccaccacacctggcctccttatctttttaagtcccggcacaaaagtcgcttctgtccttcatgaagcctgcacactctggtgtggctccatgtcgcaatcaggccctctctccagttctagagtgttgtctgcttttgtgttaattcctccgtcagcagtgggaggagaaccatgtcactcgtatcttgtctctctggtgcctagcagagtctgggcacaccgtggcactcaaacataccccctgaatgagtaagggccaaccttgaaatacctgggagctgtcatcgaataccacggtgtcatttgtcccatcccgtcacagatgtgaaactgcaggcctggcatagataagtcgactcccgttggttacctagctgaggccactctaggagctgaggccgaaaatcaggagaaaaagaaatccgagtaa

SEQ ID NO: 148637 - DNA, 384 bp, Homo sapiens
  misc_feature (1)...(384): n = a,t,c or g
caagcacaagggaagcacccagggtccttcgggcctccctttgcggggttaaaagggtttcccgggttagggttcccaagaactgggaattccgggggttttccacaaggcgggaaatacaaagggtttttaataaaaaacggggttcccccaagtttccaggggggtttttaaatcccgggcccgggttcccatcaaaggttgggattcaggggttaagttggaagggctctttaaaccccgggttttagggccaccctttttnnnnnnnnnnnnnngaaagnnnnnnnnnnccgtggaggcccaaagagaaatgcatgagcttttcctaggcttctttcctaaatggaaagccagacagcacgggcagcacagggctgaaat

SEQ ID NO: 148638 - DNA, 759 bp, Homo sapiens
taatagagacaagatctagctctgtcacccagactggagtgtagtgacacaatcatagctcactgcagcatcaaactcctgggctcaaatggtgctccctctgcagcttcctgagtagctgggactacaggcacgcgccaccatgctcagctaatttttttaaaaatttttgtagagacaaggtctctttatgttgcccaggctagttgtgtattcccagcctctagcaatcctcccacttcagcctcccaaagcactgggataacaggtatgagctgctgcgctcgacccacatcttatgtgcctggcagtgatctgagtgttttatgcatattaactcatttaattctcaaaatacccttgtaccgtagatactattattttgtctccctaacatatagtaaagctgaggtacaatgagactaagtaatctggccaaatttatataactagtaaataagtttgaatgcaactagtcagaattcaagtgtccaaggttctttcattgtctgacacaatgacaaaaggcactgattggcttaagctcagctaaaagtctgttaagataaagagtctgtttagatttccagagcagccgctgaaaaaataaaaattcagtatataacgtccaaactagtaaagggaaaaaaccaagtgaggaaaaaaatctacaagaagatcaaaaagagaaaagaaatatacaaaaagtgggtcacagtgcccattataatcagtggcagaaataaatccagatccacg

SEQ ID NO: 148639 - DNA, 377 bp, Homo sapiens
  misc_feature (1)...(377): n = a,t,c or g
gccaatatttggatcagtcccttctcctgttttatggatctggaatttcagtgggcctcggctctctttgagctatatggaggnnnnnnnnnnctttttctttttcnnnnnnnnnnnnnnnaaaaacggggtctaattttgtcccccaggctgaagcccaagggggaaattcgggttaattgaaccctttgcctcctggttaaaagcaattttccggtttaaccctcctgattacctggattaacagggccccgccaccaccccgggcaaattttggaatttttaaaaaaaagggggtttccccatgttgctaaggcgggcttaaaacccctaactctggattctccccttttaagcctcccaaagggctggaatag

SEQ ID NO: 148640 - DNA, 740 bp, Homo sapiens
  misc_feature (1)...(740): n = a,t,c or g
tgcagtggcacaaacatggcttactgcagcctcaacctcctgggctcaagtgatcctcccatctcagcctcccaagaagctgggaccacaggcatgtgtcaccatgcctgactaattttttttaattttctgtaagcatggggtcttgctatgttgcccaggctggtctcaaacacctggcctcaagtgatcctcctgcttcagcctctgttgggactataggcatgagcactacctagtcaaaaacaactttgtatacagaaaagctggcaaacatcatcttgaccaagtgatcaatgttaccaccaccaccaccaatgggacagatggaccctatgtgccacatgaatcaggacgcatcatcactttgggagtttctcacctagggcagtgagcccagggtctgatcctggggaagcactgcacaatcccatatcatagcnnnnnnnnnnnnnnnnnnnnnnnnnnnnnnnnnnnnnnnnnnnnnnnnnnnnnnnnnnnnnnngaggaagaatgttcccagattgcagagaccagagagacataatgcctgggtacagcatttgctcctagattggaccttctgtagtaaacaacactgagacaaccagttaaaggcagacgggcatctcaggtaaaggccagcaggacctttctgtgctgtttgtgtagcttttctataagcttgaaatggtttcaaaataaaattttaaaaacgtctgagacactgcttgggcatt

SEQ ID NO: 148641 - DNA, 499 bp, Homo sapiens
tttttttttttagacggattcttgctctgtcgcccaggctggactgcagtggcgcgattacaggcctgagccaccatgtccagccaactttattactattaagcaggttcaaaataagtcagtaactttccctgcaagaaaccttaataaaatgagaggagcttcgatcatgttgtatcctatagggctcagtcttaatgatttgatgcaattactgtcagagggtttctgattattttggaagataaaaataaattttaaacctaaattgccaaattaaaggcatcatcttgtgaaaaattccataaaattgaatatgaacaggaatgatatcacacaaaagggaaataacactaactcaggggttctcacttggtgggtggtacttaaaaagaataccagtatctgggttccagctacagaacaattacatcacattctagggtgcttgagctggggaatcagtgttttttaaaatgttccccaggtgattatcatg

SEQ ID NO: 148642 - DNA, 1438 bp, Homo sapiens
gtagctgggattacaggcgcctaccacatgcccggctaatttttgtatttttggtggggacggggtttcaccatgttgttcaggctggtcttgaactactgacctcatgatttacccgccttggcctcccaaggtgctgggattacaggcgtgagcacatcgcacccggccacatttggacttattaacacatatgaagtgcttggtattttagagtgcttccacacacacaatcctcattagagatagacaggatggggagaattaataagccattgcccagtgttacagtgaggaagcagaaagatggagaagtttgaactttggtcagcctggctttctcataacccattttgctgactaaattgcgagtatccctcctttggtatatttattggtgagaagtcacagcccttgtgccacaggttttgcagccaatcagggaggaaaggaaattagggcacctgttaaagtattactggaatccataggatagtttcaccagtggtttggggcagttgggccaaattaatttaggggacatctgttctgaaacagcattgaaataggactgactgctttgctttctggttgtggcagccagagccaaaggcagatgaatgaggggctatgaggaggctactgtggctggaacagtatgaaagcaacctcagctcccacgcctggctgtaaaggggataataactgggtgctgcttcccagcctctttcatctgagaagttcaaagcacctcacccctattaacaccccacagagtaggtaggaagtaccaatagagcaagccagggaaaactgaggccaggaggcacagcctggggctagctgtgaatcacctgtgggggcctagagcccaggaatcctgacgcccaggctactggacaaatcctttatcagggcattagggtgggtgctatgcttttgaaagcagtaccaacggctgtggtcgtgggttttgatgcttgccactcacagaggcccccagttttcacccataaccaacccaattgggggcttggaaggccatccttttacaacttttatggtctcggtatgcaagcaccctcagcattctcttgcaccccatggagtggagatgggtgggagtaatccaaggcctttattttcaggccatggtttgacagcaagggtattttcttccccaataaacgtagcttctgtctaccttccacttggcagcaaaatgattttctgttctctgcatatactgaggggatcttgcacagtgcagaaaaggaagaatgtccgagaatccaagtgagggctggttcagtgttaaatgtctagggtagaagaaaaaccatcctccattatggctggcatgtggcagtcatccttaagattatttttaaatttcctaataaatataggaaagtaaaaaacttagaaaatgaaagag

SEQ ID NO: 148643 - DNA, 1908 bp, Homo sapiens
cccaggttcaagcaatcctcccacctcagcctcccaactagctgggactgcaggcacacaccaccatgcctgactaatttttgtatgtttagtagagacggggttttgccatgttgcctaggctggggtttaagttaaatttttttaaaaactaaagtgcttggcactaagtgaacttgagattatcctcagcttcaagttcttaagataaaaggctttcttaagctttcaggtgtatgtatcctctagatgtagacaataatgtcccatttctaagtcttttccttttgcttctccttaaattgattgtacttccaaatttgctgttatgtttttttcctaatactgtgatctatctgatctgcagacaagaaccttgtctctgttgaagagcatcaaggggagattatgtacacattgaaactgaagtgtggtgttactgacggaatgtgcagtaactcctcagatatctgttaaggcatttcccagatgtgatgccagccttcttacctgtactgaaagatgcttagcttaggaaaaaaacaaaacagatgcaaaatcagataaattttattttgtttccatggggttttcttatttactttttaaacaagggaagggaatattaggaaaatccacacaaggcctcacatacatgttatttaaagaatgaattgggacggatgtcttagacttcactttcctaggctttttagcaaaacctaaagggtgggtatccatattttgcgtgaattatggggtgtaaggaccttgcccacttagggttttctatctctgtccttgatcttctttgccaaaatgtgaggtatacaggaaattttctgtatatttccaacttaagacatttttaggcatctgtatagtttgtattcaatttgagaccttttctatgggtaaggctcagttaatttttattaaaagattgccattgctattcatgtaaaacatgggaaaaaaaattgtgtagtgaagccaacagtgggacttagggatggggattgaatgttcagtatagtgatctcacttagggagaatttgcagggagaaagtgatagtttattgttttttcctcgcccatatttcagttttgttctacttcctccccttccttccaggatggataacatccacatctctacagtaaagtgccctctgcccggccccaacccggggagcgcaagttgtctttggccatctgggtctataggtacagtgcgcggcgtttagggccacaacttcaaaagccttatcttttttaggggttagtaggaaattgttttatgttgatggggaggtttgtttgattgtcaaaatgtacagccacagccttttaatttggggagcccctgttgtcattcaaatgtgtacctctacagttgtaaaaagtattagattcctaccttctgtggggttgtggcttgcccagacagggtcttaaattgtatattttttggaaaagtttaataaaacccctcctagggaatccattgtgaaaaaggatccaagcaaatccaggatgggccccatttaatttaaatatccccattccatttccatgttaagtgggacctattaacttgtcacccagagcaggactctatttccaaacaaaatttaaaactgtttgtggccctatatgtgtttaaaccctggttaaagataaagcttccataatgcctgtttttattcaacacattaaccagctgtaaaacacagacctttatcaagagtaggcaaagattttcaggattcatatacagatagactataaagtcatgtaatttgaaaagcagtgtttcattatgaaagagctctcaacgttgcttgtaaagctaatctaattaaaaagatgctataaatgttgttgaaacattaaaaaaaaaaaaa

SEQ ID NO: 148644 - DNA, 970 bp, Homo sapiens
ttcagaaaagtcagatcctgaaatgtatttttaaatgtaaatgatattctacttagaaacatgtttgagtatttttaacatataaaacatagaatattcaaaaacatattaggtacattaacattacaatatccaattttttagttttaagttagggtaaaatttttctatcacaagccataaaggttgaaaaaaattcagtcacctaaataaaaacgtatatccaagggatgacagtgagggttggatgtttcattgaaatttaaaataaacaaaattatttaagatgctcaaaaaagaagctaaggaagttgttgttttcgtcacatgtggccagttaaggttaggctgaggaacaggacaagaaggggagacagtaggagagagggaaagagtgggaaagagaaacagagactaagatttattcaagaataaaaggaaacagggaaggtcaagcaaaaaaaaaatgggggcacggggagttgatacataaaactaaggacgaaaagaggaaaaaaagcgaagaggataaaaaacttagatggaggaaaagatgaaccaactcccagaaagactgaattagaaaaagacttcacaaagaaacagcaaactcggagagataggaagagaaacataaagagaggaagcaatggagaaggggaccaaaggccagacgtgctatctcacgaggctgatcctgtcccacgttctgctttgggcaaaggaacccaatccacctgccctcgcatggaaattaccaagtctctaaatgtccccaatctttccatgctgaaagactgagaagttactttaatttttaaaatttatttttcaaaaaaagagaagtaattttaaaatgacattccgaatgtttcaaatgtgaatgaagggcatgcattttttaaatttagagatgtcagtaaatttatagttacaccaaaagatactctaaaacttctacactaactgg

SEQ ID NO: 148645 - DNA, 781 bp, Homo sapiens
caaaaccaattttttatttttatttattttaaaacagagtctggctctgtcaccaggctggagtacagtggtgtgatttcggctcactgcaacctctgccacccgggttcaagccagtctcctgcctcagcctcctgagcagccgggactacaggtgcacaccaccacattcagctactttttgtatttttagtagagacagggtttcaccacgttggccaggctggtctggaactcctgacctcaagcgatctgcctgcctcggcctcccaaagtgcctggggactacaggtgtaagccactacatccagccccaaaactaattttttaaaaagcagagagagtgtgtgtgtttgggattcaagggaaagtcttatctacaagcaaagggtagaaaggaagggacttcacagaatctatcccaaaagggcccaacatctgactgacaggagttcccagaaatgagctaggaaacgaagaagaaatgttatcaaagaaatgcccaggtctcaaggcagaacgtgctcaccaagcgcccagcgtggtgaggaaacaccccgcagttggtgtgaccccccagaggtgcagggatcagaggggacccctgcaggcttccggggagaaggccggcggcctggctagctctcaccaccaaggaccacgactggccttccagtcctgttggaaaatgccctcttccccgattctctccccagcctgatgtccagcaggtgcgaggtcagggtaagacgcttctagtcccgtgaggcctttttttttt

SEQ ID NO: 148646 - DNA, 577 bp, Homo sapiens
ggtagagtcagggtctcgctttgttgcccaggctgatctcgaacccctgggttcaagcaatcctcctgccttggcctcccaaggtgctgggattataggcatgagcttctagtaaaagaagctgagatagcccaaaataaaatgcaaaagtaaatctgcttatcttgcacatcctcataaacttcaatatctcctttgctcagggaccattctacctaagccagtccacatctgtgatcccctaaccccaaataaaaacgtccatttctttatgtagccaatatcacagtcgtcattaaaccaattcatactaaagtgtgaatgacagcccccacagagttctccataggttttccaaggaacttagggaatttacatgaatctttaattagtatagaagtacaagagtttatttctggatgaggaatctttgcactaatgttcttcaatcatatataaggctgcccatgggaagaagggagagaatgagactttattgtcctcaacctaatcaaaggaaaagagatcaaatgctctacttcctcttgcttttgctcaaccctaataccttgattcc

SEQ ID NO: 148647 - DNA, 989 bp, Homo sapiens
attcaagtcaaatttctgtttcctaattacttggcttggtgatggcattaatattggttgggagctagatggtctctgctctatttgatgattggcatagagcaatcatacacttggtacttcctagcattttttttttgagacagtatcatgctgtatcatgttgcacagggtggagtgcagtggtgcagtcatagctcactgtaaccttgaactcctgggctcaagtgattcccctgcctcaacttcatgagtagcagggactacagctgtgtaccaccacaccggcctctcctggcttcttaaccacttacattaaaattgagaggagaaaggcattttcagtttctttaagttaataaaaagaagccatttctggaggagttttatgcctgtaccagcagaggttcagctttccaggaatctcatcatgatccatactgctgacacaggcctttgtcacctgaagcattcttaaaataaggagactgacattaaacaggacaattgtgaactccactttgtaagcatcatacatatcttacaactcattctgaagactcctttattcttgctcttcccagagagctactgtgtttagtcatggctcactgcactcacaagagaaaaaggagtaaagtgggccatatttgccagggtgttggatgggttaacaagagcatttttacctttttccctcccatgtttggttcctgcagcatttcccattgatgcatgctattgtagacttccttaggttgaccttggccttgacctccacccactagctcatgaccccaaaactgaagatgtgcatcagaaagggacagatttggtctttctgctgtaaaagatattctgccttagtgcctgctaatttgttgtgcatagtcctgtgctgccaatcttccccaccaattgttaaggttaatgtgtgttttatatgtgtattcacaaacattaaaatgtaatcagtggattccaaaaaa

SEQ ID NO: 148648 - DNA, 322 bp, Homo sapiens
cactctcctcttctctcggacctgctcctctccaggtcccactctgggaattgctaactgcttgttagcaattctctctccttagccacagagattcatcccagcatagacacctatcacaaacctaaacaatcagattttcttttctgtgatttttctaaccagagcttataattttggtttctaagatggtgaggatagaaatctgaagctggccgggcacggtggctcacatctgtaatcccagcgctttgggtggccaaggtgggtggattgcttgaggtcaggcattcaggcaagcctgaccacatgatgaacccag

SEQ ID NO: 148649 - DNA, 329 bp, Homo sapiens
  misc_feature (1)...(329): n = a,t,c or g
agacttttcagtgaaaactttataggccaggagagagtggcgggacatatttacagtgatgaaggaaaaaaacttttatcctagaaaagtatatgcattgaaaatacccttcaaaaatgaagcagaaacaaagaaagttgaagtgtagcattttattagttttctctttgattgttagtttgtttatacaatcagtgttaagttgtcatcagtttaaaataaagagttgtaagatattatttgcaagcctcatggtaatctcaaaatcaaaaacctacaacgnnnnnnnnnnnnnnnnnnnnnnnnnnnnnnnnnnnnnnnnnnnnngg

SEQ ID NO: 148650 - DNA, 693 bp, Homo sapiens
ccagctaagtcccctaggccctgcaacgggtaacagcagtactgactctatgttagagaaaagcttgcttgcttgagtataattattgttttgcctgagtttgtaaactattcactaaaaacagccacagaaaaaaacaggaccttcttcaacagataaaacacacagacccgcagctttgggaacaggctgatggcccctgcacagtctagtcacaaggcattgaccaagaaagtaatgactaactgcccatctgagactgtgcatgattcacaagaatgtttctttgttttgttttttgagacagtcttggtctgtctcccaggctggagtgcagtgatgttggttcgctgtagcctctgcctcctgagtagctgggactacaggcgtgtgccaccgcacctgggctaatttttgtatttttagtagagatgatgtttgactatgttggccaggatggtctcgaactcctgacctcaagtgatccacctgcctcggcctcccaaattgctggggttacaagcatgagccaccgctcctggcccacaagaatgttttgatcattatttctcctaattttccttaaaatccctggatctagaggcacaactgagaaaggtggtctttgaatgctagtgcactgccttttgcaggttgctggtttctcgaataaagctaactttgctttcacca

SEQ ID NO: 148651 - DNA, 435 bp, Homo sapiens
ccaagactcaggtgcatttccaaggttggcagcactctgtgcatatcatcacacatccctgctgggagaagttagctctgtctataacccctctgcgataggacaaccggaagctccaggcatggaattctcctagactcggtcccacgtgcctgttccctcggttagcgttaatgtgtgtccttatgctataataaaacatacatgaatataacagctttcagagagttctgtgggtccttctagtgaactgttaaatctggaggtggtcttgcgggccgctgaactttgcactggtgaatgtgttttctaatcctcgtttcacagtttctcattattaactgcaatgtgggagtagctctgttttctggggtgattgtggcggctaaatgaagtgaagtataaaaagcatctagaacgagatcgtctcgccgt

SEQ ID NO: 148652 - DNA, 400 bp, Homo sapiens
gttatattcttttggatgcgagccctcaaagaaacatttaatattctcttttgccaattcagttgcatgctctgtggctttacttttaaggatctgctgctcctgttccaaatagattttccagaatttcagctgcagaaaactaactggagataggcatcgggtgacagatgtaaaaatcagaagaatgatgataacaactgctatcaagatccagcccaacacgggaaacattattcaaggacaaatttctggttcctcttccataagctaaatcagcaaagtccagctcaagttctggtacttttatgatgggcggcaccctttccgtctccctaccggacagagccaccagcctagttcacccagactcttctctcctatgcaaaatctccttcaa

SEQ ID NO: 148653 - DNA, 722 bp, Homo sapiens
gaataagctggcggccgccgcgctcgcgctcctcacctgggtggccgtggcgctgctcgggggcgcctgtgacgagtgcgcggccaccgggagcgcggccttcgcgcagcgcctgtgcctcggccgcaaccgcagctgcgccgcggagctgccgctggtgccgtgcaaccaggccaaggcgtcggacgtgcaggacctcctgaaggatctgaaggctcagtcgcaggtgttgggctggatcttgatagcagttgttatcatcattcttctgatttttacatctgtcacccgatgcctatctccagttagttttctgcagctgaaattctggaaaatctatttggaaccagggagcagcagatccttaaaaagtaaagccacagagcattgcaactgaatttggcaaaagagaatattaaatgtttctttgagggctcgcatccaaaagaatataacacttccaagcatgaaaagagtggcagcaaatttcatcaactgtatactttcaatccgaagggccagtactacagcatgttgcacaaatatgtcaacagaaaagagaagactcacagtatcaggtctactgaaggagatacggtgattcctgttcttggctttgtagattcatctggtataaacagcactcctgagttatgaccttttgaatgagtagaaaaaaaaattgttttgaattattgctttattaaaaaataaacattggt

SEQ ID NO: 148654 - DNA, 785 bp, Homo sapiens
ttttttttttgaggccaatttttattttattttattttttaatccagaaaagcatcaccaggattttttttttttttttttttttttttaagagacagggtctcattctgtcaacctggctggactgcaatggtgtgatcacaactcactgcagccttgaactcctggactgaagcaatcttcctacctcagcctcctgagcagttaggactacagatgggtgccaccatgcccagctaatttctaaattttttttgtagagataaggtcttgccatatttcccaggctggtcttgatcttccgcgcccaagcgatcctcctgtctggggctcccaaagtgctgggactataggcatgagccaccatgcccagcctagagaaatttgttaaaataacaaaactggaagacttactaccaaattttcaagacttcctctaaagctataattaagacaatgtggaactactgagaaagacaaatagattgatgaaccagatcatttcaggaggtatactcatgataaataattgatttttgcaaaaggtgccaataacaacgtaagggcgaaaatgaaagacatctcccaaaactggtgtcactatgggtcaataatatgggggaaaatataattcaacctttacctcctccattatccataataaaaacatgaaatagatctaacagtaaaaggtaaaaatacactatagctatagaaaacatggaagaaattctatgtaagctcagcatagaataaataatacttcttagaacataaaaagcaga

SEQ ID NO: 148655 - DNA, 697 bp, Homo sapiens
tctctccctttttttttgagacagagtttcactctgtcacccaggctgaagtgcagtgacatgatctcagctcaccgcaacctccacctcccgggttcaagagattctcctgcctcagcctcccaagtggctgcgactacaggcacccgccaccacacctggctaattttttgtattttttagtagagacaggattttgccatgttggccaggctggtctcgaactcctgacctcaagtgatctgcctgccttggcctcccaaagtgctgggattacaggtgtgagatactgcgcctggccgacattccttattatgaagacctgcatcccttctttcccactcccttcaacaagtcctattcccctgccataaaactaaacgtaaaggtaaaaacaaagcatggatagctaaactctatgagcaatcttactttgccaaacgtttttacctactctctaacaaaaacttagaagcaaattattaataaggagcaaaaccagtggtttcatttctctctgttagcttgggataattttctggtactcataaaagtagtaagaggaaaaattagcacaaaaaaaaagccagggagatgatgaagcacagaccctgagctggttatatgcattttaaaaaattcattcctaaattaaaatcaaaggtaattaaattcaggttacattaactattctgag

SEQ ID NO: 148656 - DNA, 722 bp, Homo sapiens
tttttttttgagacatagtctcacctgttgcctagactagaatgcagtggcacaatcttggctcactacaacctccacctcccaggttcaaacaatccttgtgcttcagcctcccgagtagttgggattacaggtgtgtgccaccgtgcccagctatattttttgtatttttagcagagatgggattttgccacattggccaggctggtcttgaactcctggcctcaagcaatcctaccaccttagcctcccaaagtgctgagccaccacacctggccgcaactgatttttaatcatgaaatgacacatacatttaaaaaaacccaatacctataatattcctggctagtactcttcacatctatatcatcaaaaacaaagaaagtatgtgaaactgacacagccaaggggagactaaggagacataacaattaactgtaatgtggtattctggaggggatcctggaacagaaaaagacattaggcaaaaaactaaagaaatctgaataaaatgtggatgtcagttaataataatgtatcatattagtccagtaattgtaacaaatataccacaataatgaaagccattaattatagggaaaatggaggggttatcttaatatccacattcctgggcctggaccacttgcttccagcattttcttctgcaacacaggcccttgctttgcttcaccttgaacctggggctgtagccttcaatg

SEQ ID NO: 148657 - DNA, 379 bp, Homo sapiens
atctcttcagtgattcatcctggttattctctgaactgatcttccagttcactgatactctcttcatctgtgatttatctgctattaaatctatccattgacttccttgttcttttattgtattttctagttttcaggttttcagtatgttctttttgtttccaattctttgttaaaaattttaatctcatcttttatttttttaaacatattaaaaatatttgttttaaagtctgtgtctgaagactaggttttctggatcctctatgtgcctatttcggttgtctcttatttctttaggtttttagccatgttttgtctcttcatatacctgatgacctttgatggagtgccagatattgtatatgaaaatacttga

SEQ ID NO: 148658 - DNA, 363 bp, Homo sapiens
  misc_feature (1)...(363): n = a,t,c or g
annnnnnnnnnnnnnnnnnnnnnnnnnnnnnnnnnnnnnnnnnnnnnnnnnnnnnnnnnnnnnnnnnnnnnnnnnnnnnnnnnnnnnnnnnnnnncaaagtgacgtttcatcaacgagctaaagaaggtgatgtagtgagtcatgtggtatctaggggaaagagtattccagatagaggaaatagccagtgcatgcataggagcataccctgtgtgttcgaggaacaaaaaggaggccagtgttactgtagcatagagagtaaggaagaaactagtaggatatgaactcaagagaataggggcaggcaactgtgtaggtagggtcttaaagatcactgtaaatcactacctttttattctcgg

SEQ ID NO: 148659 - DNA, 646 bp, Homo sapiens
aattttttgagacagggtctcgctttgtgactcatgctggagtaaagtggcacaatcatgactcattgcaccctcagcctcccaggctcaagtgattctcctactttagcctcctcctgagcagctgggaccaccgccatgtaccaccacgcccagctaatttagtttaccttttgtagaggggaggtcctccatccatgttgcccagggctagtcttgaattccctggactccaagtgaattcctccctgccttcagccctccccaaagtgttggggattacagggtgaggccaccggccaaggcccaaagtgacgtttcatcaacgaggctaaaggaagggtgatgtaggtgaggtcatgtgggtattctaggggggaaagagtatttccagatagaggaaatagccagtgcatgcataggagcataccctgtgtgttcgaggaacaaaaaggaggccagtgttactgtagcatagagagtaaggaagaaactagtaggatatgaactcaagagaataggggcaggcaactgtgtaggtagggtcttaaagatcactgtaaatcactacctttttattctcggtaaaaggggaagtcactggaaggtttttagcagagaagtgaaatgaccagacttacattta

SEQ ID NO: 148660 - DNA, 1507 bp, Homo sapiens
tttgttgttttggagacggggtttcactgtgtcgcccaggctggagtatagagtgcagtggcaatcatagctcactgcaagctgtcgaacctcccaggctcagatgatcctcccgactcagcctcctgggtagctgggaccccagccatgtgccactgcatctggctaatttttaaaccttttgtacacatggggttttggccatgttgcccctggctggtctcaaaactccctgggctcaaacaatccctccccacctcagcctccccaaagtgctgggattacaggggtgagccacccacacccggccccagctattttcattagaccatgaactcccatgaggatggaaatgccctgggtctgctcactagtataaatacaataccctgtatgggtgccaatacaatagtataggttttcaataaatgtgtttattaaataaataaataacatgttgggtagcctgataaaatttaatttcaagctaaatcgctttaaatgggttatgaagatagaaagtaaaaacaaaaaacccccatcaaagttcaaattcattcttctgcccaaacctaccattttcagtccttaaaactaaacaggctaaagtctgaagtggtatggggaaaatggagtcatggcaaatattcacttcaaaattaaaacctattcaagtgtatacatatacatacacagaaaaaatcacttccagctcaaataagccgcaatattgatacataaccaaaacagccttgatatgtaacaaccaataatgaacatatagaacaaacttccccccaggtctcagatttatccagatcattttccttttccagataccccattctcctcaccatatattcagagggcagaaggccctctaaatccttacatcaggagctgtctgtgaattagtatagagattaagtatctctgatacatgtaattactttgctcagtcctgatccatatacaaaagcacactgtagacagtgaagaacagaagaaaactaaagcattttctttaaaaaatttccagtttctaaaatgtataaggcaaaacaggtaatagagtcaaaatattgtttgtaatactttccttctaaaattttctcattaaacttctccaagtagatggtagcacaaatattaatactggagtgtgcatttttgtctaaaatgtatatacattttaaagtgtataggcataggatactatggatcagatcactatttggtctccattatacattttgtgccttggggaaaaaaatccaaatattgtagtttatgaacctgtatcataagaaactagaaaaatttagttatgttgcctactcaaagtagtctttaggagtgttaagtagtgtgtctagaaacaaatagtaaaataattcagatttgattgcactttccctcttattttgataaattattattggtaaaaagaacaagacacattatgttaagactaatacaaaatataactattctaaaaataaaacat

SEQ ID NO: 148661 - DNA, 527 bp, Homo sapiens
  misc_feature (1)...(527): n = a,t,c or g
ctaaagaccccctaaatgccccagcctaattaaagtaaccccccggtaaactgcaggnaattgccanggggccctccttcccaagtccccccanggatccacctgtcccccaagtattccccctngccagaagccccngcccctgacctccagaagaaagggaacctccaggccccaagaaggcctggtgaagtcctggaaaccccaaggaagccagagagctcctgcatgaagcccttcccctagagagaaatcaagcctctgcctcctcctagactgaccccctcagtccacagcatggtgctgtgattttgcccaagaggcaggggtgggtctgggggaagatggacggtgcttcccaaaaggctaaattttagtctcaaaggtttctgattgcggacacataggtgatatctaacttgcttttgtttagccttgaatattttcaaatataatcttcaatatttctgttacaatattgtagcttgcttctgtttataaaaataatgcagcatttgaaaaaaaaa

SEQ ID NO: 148662 - DNA, 471 bp, Homo sapiens
tttttttttttttttttatgcttaagaaatatttttactttgaaacactttaagcaaacagttaaaaagtacccaccacactaccctgtaaaaatcttaacattgtgatgcctctgcatcaatttttagaaaaaaacaaagaaaacagataaataagcacccaaccctggcttccagagtgcttggtctggctatggagatgcaagatgagacctggtgctcagggcaatcagaaactgtcaactgaagccaaacagctcagaaccacccacagccgggttcctaaccagcaggtgtgtgtttgtgggtggcttccagtcaacatttcaccccacagccccttaaaaaaaaacccaaccctgactcagccaaactaaattcagcttcagattccttaacagaggtaattttgtgcaagatattttctgcatggcaaacagataaataagcacccaaccctggcttccagag

SEQ ID NO: 148663 - DNA, 2052 bp, Homo sapiens
cctgcctcagcctcctcagtagctgggactacaagtgcctgccaccacgcctgggttattttttatatttttagtagagacggggtttcactgtgttagccaggatggtctcgatctccaggatggtctcgatctccaggatggtctcgatctcctgacgtcgtgatccacccgcctcggcctcccaaaatgctgggattacaggtgtgagccactgtgcccggccaaaagaacagaaattattttatcctgaagtaagctgtttatatttgggattatactgaacctatttgtccaataacctgagttttcaaataattttagttctataagtactataattatataaatattaatgaattcagattagctgaaaggaaaaaaagtagaagcctgactacttggtgctaactactaaagattttggcagaatcaatgttggatttggctttcctgtcccttccccatgccagccccccagagtgttctgccttgtgctgcctcccttcaccgggagtgccacacccctctctctgccagttcagctcttcattcttcaaggcctgaccttgtctggacccttgtgcctcttaaacccgtgggccccacctctcttggttcctatgttcagggtggatgtttgtgtttttgggttatgcccatctccatagccagaccaagcactctggaagccagggttgggtgcttatttatctgtttgccatgcagaaaatatcttgcacaaaattacctctgttaagggaatctgaagctgaatttagtttggctgagtcagggttgggttttttttaaaggggctgtgggggtgaaatttgactggaagccacccacaaacacacacctgctggtttaggaacccggctgtgggtggttctgacctgtttggcttcagttgacagtttctgattgccctgagcaccaggtctcatcttgcatctcatcctggcctggagaacattcagtttccttccaacccttcccacctttaccccactcccttggaggaactgaagttggggttgaggagagccacatggctggagtgggtatttgaaagcctttatgtgacctgttcagtgtggacttacccacccctgctgaccaagactgactgaaatgtaaaataatacagaccatctcacactcagaaagctggcacatttttgaaagcccaagtgtgggtaagtgcgtggaacaacgataattcacactgctttatgagtagaaattgtgagaaatattgtgccaggcaatttgcaaaatcttggaaggttgtgtgcacttaaccacccagcaactactcctggatgcatcctaaagaagtgccatgtgaacagagaatgattttaagacttcactgaagtattgtttaggtagcaagattgggaaaagcctgcatttcatcagcagaagaatgggataaataaatgggttgttcttggtccttagaaagagaatatgaaagagttacgtctcaacacagattgatgaaaaattatgctgagaaagttggtgaagctacatacaaggtacccttagtgtaaagttaaacatactgtgtacctgtgggcacgttacttcaacttgtttttcactttttctgtaaaatgggatagtagtggcaatctcacagggtgattgtgggtgggggggtggtcaatgaagtaatgcatgtaaaatgcttagaatagtgtctagcatgtaagccttgtggacatatagaaagtgtcattgttttgccacagtaatcctattttcctgtggattcaaataatatgaaatgagtataaaatcatgtattggaacgatgtgtgcaagtcaccattcctgccttcctaaggcaggagacctgatggatttggggagggcacatggggccttcagttgtgttttctttgtttttttctaaaaattgatgcagaggcatcacaatgttaagattttaacagggtagtgtggtgggtactttttaactgtttgcttaaagtgtttcaaagtaaaaacatttcttaagcataaaaaaaaaaaaaa

SEQ ID NO: 148664 - DNA, 668 bp, Homo sapiens
ttttttttttaaattttttcagaaaattttattagtgaattttagaacgtttaaatgcttaagaaaaattggattttctaaatttgttttcaatgcgtgaattgaatgaagtgaaaattaaacaaaatacatatagttttgagtattctatgtccaaaagtcccctctgacaattaaacaatcagttttacaaattcacacttcagaagagaaagtccataattactggaatcctaataacccttattagaatccaaaggaataagtgattttaaaagcacatagaaagacaaagcttgaggttatctattctgaccaaaaacagtacataatttccttggtttttaaagacaagtgaatcacaacttagtaggaatcacatttccatattaaccagctgggtagatgagacatgatgtctgattgagactaccacatagtctctcttcttcatttattttagtttttagagacaggatctcactctgtcacccaggctggaatacagtggtgtgaccacagctcactgtaaccccgaactcctgggcttaagcaatcatcctgcctcagcctccccgagtagctaggactacaggagtgagtcactgtgcctggctcatactctctcttcttctaatcacagtattttacttggttgaaggtaggcc

SEQ ID NO: 148665 - DNA, 1300 bp, Homo sapiens
tttttttggtcgagatggggtgtccctgtgttgcccagactggtcttgaactcctggactcaagggatcctcctgtcttgggctcccaaagtgttgggattacaggcgtgagtgaccatgcctagctcacttccaggtttaacagacaaaataaacttactctagtttccatctctatcattttataataaccgtagcccacattgtagtagtttttcagctctttactaagtcccaccaattcatgttttcacccttaaaatctttctcactgatactctctctgggacaggaaaaaaggggaaataaggcctactataaggaatatatgacatgctaaattttatttttaaaccggttcttcaagtcaggattaaagtaataataggcaaattatgtgattatccatgtcccagcctctctccaaaaaaaatagtaaacaagatgtcttcttcttttcccaaaggatacacatacacacatgtacaaatttttttatcaggtaataataggcttaatattttaatgaggtacttaccttaggtttgtccccttttacaacagcttttacatctgtgtggattggatacagttccatattcccattttataactgaggaaaactgggtgcacagagggggataaggcaacttgcccaaagggtcacacagtttaataagtggaaatgctggggtatgaaccaggtagtctgcccccatagctctgccccccagagctgtactgtctccccatgagggtacttctcccatgggagcaagcctgaggcgatcccctttattctgggcttctctcagaaatggattccccacacagtattcaaagccaaatttccccccggggaaacccctattgggaagaactttaaaaactccagaaacctttttcctttgtcccagagagttgaggaagccttaaggcctaaatgatacatgtttttaaaaaaaaaatccagattataaatttagtttttggcgattcattaaattctttactattatagttattttcctagctgttcatcttttagcctaaatttgttccaaagaagcaaaagtttggtttctacttaagttctggattctggatgggagattgcactgtgtgtgacatgcaagtttcatggtgtgggagattgcagagcatttgggttactgcttttactctttggaagctgttatcatctgtatctgctttaaataaagttaaagatttggaacaaaaaaaaaaaaaaaaaaaaaaagaaaaaaaagttttgcctatagtagtcgtattcaatttc

SEQ ID NO: 148666 - DNA, 410 bp, Homo sapiens
aagaagggtgttgtgttacccactctatcgccatttcaagctggtgatgagggcctacagggacactatagatatattgcaactgggtaaaagtgcagctttaaagtgtctcctggatattcacaaaatttttcaggacaatgacccagcgtacatactgaatgatctctacatctcatactactgtgtgtggattcataaagtcaaatccaaaaagttgtcagatcttgcagaagccttaaaggaagtctcccttacaaaggcccagttggggttagaactgtaagaactagaagcagcagcactgcttgtccaggaggaagaaactgcattaaaagcagcccattcagtttctgggcagcagacactttgctccagctctgaggcaagtgattcagaggactcatacg

SEQ ID NO: 148667 - DNA, 359 bp, Homo sapiens
gaaaaccacaccaatttattatcttacagttctagaggtcaggagtccaaaatggttttcaccaggctgaagtcttgtcagtgcggctttgtttctccacggaggctctggggcagaatccaatgccttttccagctcctccaggggccacctcatcgcctggccccaggccttcttgccatcttcacagccagaagcttccttgcttcatgcgcagaccctcgtgactccccttcccttataagggctaggtttgagtgcctggaggacactggcaggaggcgcccctgggctccatccatttaccacgcacgcactcagcacccctgagaccatccctggggcctacaggagaaccc

SEQ ID NO: 148668 - DNA, 414 bp, Homo sapiens
  misc_feature (1)...(414): n = a,t,c or g
cagggttctcctgtaggccccagggatggtctcaggggtgctgagtgcgtgcgtggtaaatggatggagcccaggggcgcctcctgccagtgtcctccaggcactcaaacctagcccttctgaagccgacctcacgtgacctcacagcccctcctgaaggcgcctcactgatgacnnnnnnnnnnnnnnnnnnnnnnnnnnnnnnnnnnnnnnnnnnnnnnnnnnnnnnnnnnnnnnnnnnnnnnnnnnnnnnnnnnnnnnnnnnnnnnnnnnnnnnnnnnnnnnnnnnnnnnnnnnnnnnngaccgaggatggttgaggtggtccctgagtaatcatgggggcccttatatgggaaggggagatccgagggtctgccccttaaacaaggaagcttccggcgtctgaagacagg

SEQ ID NO: 148669 - DNA, 1088 bp, Homo sapiens
ttttttttttttttttgaaaaccacaccaatttattatcttacagttctagaggctcaggcgtccaaaatggttttcaccagcctgaagtcttgtcagtgcggctttgtttctccacggaggctctggggcagaatccaatgccttttccagctcctccaggggccacctcatcgcctggccccaggccttcttgccatcttcacagccagaagcttcctttgcttcatgcgcagaccctcgtgactccccttcccttataatggcccccatggattactcagggcccacctcaaccatccacgggtcatctccccaccacggaaatcctgaaactgaagcacaggcgccgggtccctttttgccacgcaaggtaacactttcccacgtcctggggttccaaacctggacatctctggggggctgttattccacccaccgtcatcagtgaggcgccttcaggaggggctgtgaggtcacgtgaggtcggcttcagaagggctaggtttgagtgcctggagaacgactgacaggaggcgcccctgggctccatccatttaccacgcacgcactcagcacccctgaggccatccctggggcctacaggagaaccctgtacctcagcagccctgaaacctgctttccacttccggacctttctgaaatcaaagacgcatctttagatcaatggcatcttactgtgtcaccggcaggcctcttctttcttagtgacgtttaaaggaaggtatcttacccctgatggcttcttggagtgaatgaaattccggtgtgagcaggcactagaaggggcctcacaagagtgtcaggtgaccccactccgccctggcccccaagtctttcctagttgctccatctggccctttctgacctgggatcccaagtgtcctgcagctccagtgcccagacccccataactaacagaccccactaaagccacacacatgctcagctctccaaccacgagtggggtccaggagccacccctcccgctagggtgttgcctaaaccatggggatctgactcaggggctctatatcgccctgcgaattaaaaagaatcagtaatgtt

SEQ ID NO: 148670 - DNA, 1068 bp, Homo sapiens
atgaccagagaagtcgggggttcagagcatctccatcccccttttggggactcagagcgtctcatcccacttttggggattcagagcatcttggtgaaacctcgggggctcgagctcccacctgaagaagccctctttattcaggtgcagttccctttccaaacattctccggggttgtgcattccgcagacacatttgggaaccgcaggccagatgttgatgctgtcccgggttcggggaagggaagacgtctccatgcagaagctgtgtgtctacctgagcagcagcgaggtgcacgggagtgtgagcacgacctcctgcaggccgccctgcagtggctgacgcgcagcccgagcgcgaggcccacgcccgccaggtgctggagaacatccactcccgctcatccccaagaacgacctgctgcaccgcgtcaagccggccgttgctcgctgctgcccaaggaggccaactgcgagggcttcatcgaggaggcgtgcgctaccacaacaacctggcggcccagcccgtcatgcagaccaaggcacggcgctgcgcaccaaccaggagcgcctgctgtttgtgggcggcgagtctccgagcggtgtctggagctcagtgacgacacctgctacctggacgcaagagcgagcagtgggtcaaagagacgccgctgcccgcccggcggagcaccactgtgtcgcggtgctggggggcttcatcttcatcgccggcggcagttctcacgggacaacggaggggatgcggcctccaatcttctttataggttgacccccgctgtaaacagtggatcaagaatcacggagacaccaggaggtctaaacctcatctgcagctgcccctccaggttgggaccagtggacggggttccaaccacgggctctgacagccacaaggcccatgagatgctgctgcaccatggaggaccagggtgaaggatgaagctcacaattatagtttctatgatttgaatcatcagaagagcaaacttgataatcctggaaatttaggagacatgaggtcatggaaggtcgtggaaggtcctgaag

SEQ ID NO: 148671 - DNA, 1209 bp, Homo sapiens
ttttgagacagtcttactcggtcacccaggctggagtgcagtggcgcaacctcggctcactgcaacctctgcctcctgggttcaagcgattctcctgcctcagcctccggaagagctgagattacaggcgaccacgactgcctaatttttgtattttagtaaagacgggggttcacccttgttggtcagggtggtctcaaactcttgacctcaggtgatccgtcccccttggcctcccagagtgctgggagtacaggcgtgagccactgagcccggccccaaaggacaatttcttgagacccccacacaccttcagaaccacacattctgttcatgttaaaaacaagaaattaacaacctctaaagctaaggacaatgattctgtaaagtgcaagaatggttccattgtttccgcttttgtggatttcatgttaagaatactttaaaagaaagggtgggcgggagtaaaccaggaccccagtcatatatttgatcaagaaatgacccgtatggcaaaggtgagacgtggaccagccctcaggtgtctccaactctgtgcacaccactgaggtaggagctctagaagaaacgcagaccctctcaggggggttaaggtttcctcttggcaaatgagctgggggcctgagacagtcatacccacgggctgcatgcaactttgcatgcaacttcacgaaattctagagctgtatcacatcagcgatggagaagggcaagatccaagacaaagccacatgaggcgaggtcctggtactgccatttgttgtccagcacaaatcaaggggccggaggaaagggatgaggtggaaaaccccggcaggcattctacaaagcagttattagcaaattgtatcaaaaagtatcaaaacatttcaaaaaactctaaaaactgccaggcttggcagatgcgcaggacagggtctccaagtgcccgtggcgctgccctatactccaggcatttatcctagaggccaggatgccaccccctcccctcccctcctgggcactcagaatccacggagacaccaggaggtctaaacctcatctgcagctgcccctccaggtttgggaccagtggacggggttccaaccacgggctctgacagccacaaggcccatgagatgctgctgcaccatggaggaccagggtgaaggatgaaggtcagtgactctacagggggtggtgggggt

SEQ ID NO: 148672 - DNA, 398 bp, Homo sapiens
aaccccaaggccaccccaccccagattgtcaacggggaccagtactgtggggactatgagctcttcgtggaggctgtggaacaaaacacgctgcaggagttcctgaagctggcttgagttaagcctgtccagagttcccctgctggactccatcaccacactcctctctaaatgtagtcccctctcctccatctaaaggcaacattccttacccattagtctcagaaattgtcttaagcaacagccccaaatgctggctgcccccagccaagcattggggccgccatcctgcctggcactggctgatgggcacctctgttggttccatcagccagagctctccaaaggccccgcagtccctctcccaggaggaccctagaggcaattaaatgatgtcc

SEQ ID NO: 148673 - DNA, 1051 bp, Homo sapiens
  misc_feature (1)...(1051): n = a,t,c or g
ggaaaccgctcccgagcacggcgactagcgtcgtctcccggcagtgcagctgccgctgaccgccgccctctgcccgccggcccgtctgtctacccccagcatgagcggccctgcgcgttctacagcacgtcgggcaacgggtttccgggaaatcaaagtccccagcaagagcgaggtgacccgaatcctggatgggaaagcgcatccaataccagctagtggacatctcccaggacaacgccctgagggatgagatgcgagccttggcagagcaaccccaaggccaccccaccccagatttgtcaacgggggaccagtactgtggggactatgagcttctttcgtggaggctgtggaacaaaacacggttgcaggagtttcctggaagcttgggcttgaagttcaagccttgttccagagtttccccttgctgggactcccatcaccaacactcccccccagcctttcaacctggccaatgaaaggaccttttgaccaacttcccttgtcatttcctaaacctaaactttaggagtcccttcccccaaatgcaagggccacttctcctccctccgtctctaaaatggtaagtcccctcttccttccatctaaaggcaacattccttaacccatttagtctcagaaaattgtttttaaggcaacaggccccaaatggtgggttgcccccagccaagcattggggccgccatcctgcctggcactggctggatgggcacctctgttggttccattcagccagagctctgccaaaggccccgcagtccctctcccaaggaggaccctagaggcaattaaatgatgtcctgttccattggcnnnnnnnnnnnnnnnnnnnnnnnnnnggggggggccctttaaaaagaacccttggggggcccaattttaccgggggaaggaaaggaaaaagttttccccttaaggggggcgtaataaaacccaaccggggaatttttggaaaaaaaccttattttgggggggggacaaaatgggcccaacccccccccaaaatttaaacccttaggggaaaaaa

SEQ ID NO: 148674 - DNA, 1892 bp, Homo sapiens
  misc_feature (1)...(1892): n = a,t,c or g
cctcagcctcctgagtagctggaattacaggtatgcgccaccacgcctggctaatttttgtacttttagtagagacagggtttcaccatgttggtcaggctggtcttgaacacctgatctcaggtggtccacccacctcggcctcccaaagtgctgggatcacaggcgtgagccaccatgcctggcctatttatcttttcatactgctgtcaggtccttcaaggctatgcttctgattgcccacacactttacttctgagtatttcatattttacgggtaggtagggtaccaacttagtaatgttagataaccattgtatagtaaaaaccagaaatgaaaatataataacccttataactccttacatataagaaagacagaaatacatcaaagaaaaaacattttaaataatctcaggaaacaataacaagatcctctccccgaaaataaatataacaaacatattagtaaccatagctaaacaaacactgtaatataagaactccattagacataagaaatagacattgaagccaggttttgacacttattctccacatccagccagttgtcaccagtctagtaagtgctacagggttaactggcctctgaactgactgaaatatggttgtacttaacacaaaagaacactggttcagatccagcaatgacttatgaacttgcccataggtagaaaaaaatagcttactggatttatatctgcttcataagagacttttatctgccagcctgacccctcttaaaactttttttttttcttttttggtttgatatactcaacaggcactggcttttttttgtgatgtggcttttttttgtgatgtggctttccacactattgtagaagtccagaatcccatttaataagatgcatgagctattagtcaatgaactttagggctggatggatcaacgaagtgtttttcactgccccagcttccttatgaaccagattactgaccagcggtgaactacaataaattcgaaggacacaactaacaaaaacttagggaaggccggggaggagaggtgccaaactggcactggcaaatacaaaataaaatatttttcatgttcttggantaaatatttattaaaaaaattttacctataatggaattgggcctttttttaatgctagttaaaactttgaagagctgttaaatctgtaggtccatcaatatcctggcttcaaatcaatatgtagaaatatttttaattaaatttcaataaatacaccagagggatttaaatatgataaaaacagtaatttcaatctctgtttttaccaacaatatgtttaattaggtcccgtgatggggccttgaacctaatccaataaacctacagtcccacaaaaaggtttttgtaaaaatgccattccatttcctgataataaataaatgccagattgattcctgtacagtcagaaaaacccggatggtggcaaatagcaaaatagagagatgataaatcttggatcccaaaatcaaatgatcaaagaagacagttaaagatattttcagactgcccacattagagtcatgtaatctgcatcattctttctcaaggtctctcaattgggcaccagaataacatcagatctaaaaccttgttcaatatttcctctggttcaccttttgattatgtaacaaatactttttgcaaaagatgaaaaaataaaactgtaaaatcatttggatggagttagcccagctaggtcttttggtgtcctagcaattcaaactgaaattaaaggcttcttatagcctataagcttctgaaaatgcagctaagtggcattcaaaaagacagaacattttttcaatttcttttatatttacggaagtagaaaaaaaattgaaaaatc

SEQ ID NO: 148675 - DNA, 1066 bp, Homo sapiens
  misc_feature (1)...(1066): n = a,t,c or g
gctataggaactgataagggtacgcgatggccttctgaagatgaccctgggaacctacctgagatttttttatttatcttggggccgacagctgattacgtctaaagggaacgccagcgatccattgagctggagagcttttaccgccgggtgtggggctctccaggcggagagggcacaggggacctggacgaatttgacttctgagaccaacactacacttgacccttcactagaatccagactcttcctggactggcttgcctcctccccacactccccaccctggaacccctgagggcccaaacagcagagtggagctgagctgtggacctctcgggcaaactctgtgggtgtgggggccctgggtgaatgctgctgcccctgctggcaagccaccttgagacctcaccgggggcctgtgaatatttgctctccctgaaactctcactcaatcctcttcctctccctctgtggcaatttcctgtttattgtccccttaatgatagggatattccctgcttgcctacctgggagatttcagtagggatctttttgaagtgggaggtggggtaggagagagcaagggaggggcaggacaatttaggcagggcactgagcaagcagggcccccacctgccctttagtgatgtttgggagttcgtttttaccctcttctattgaattgccttgggatttccttctcctttttccctgcccaccctgtcccctacaatttgtgcttctgagttgaagaagccttcacctctggttgctgaggaaatgggtagaatgcacgcctatcacctccagcacaatcccagcgaaaaagggtgtgaagcacccaccgatgttcttgaacaatcaggtttctaaataaacaactggaccatcnnnnnnnnnnnnggggggccccttttaaaaaaacaaattttttacccccgggggtggaaaaataaatttttttttatggggccccaaaaaaaaattccgggggccggtttttaaaacggggggaggggaaaaacccgggggttcccaaatttaaatcctttgggaaaaaaat

SEQ ID NO: 148676 - DNA, 370 bp, Homo sapiens
ggcagggctggccaccaccaaagccagacaggcagagcacacaggcctgtggtgcctgcactcagacactacaaaggccttggtcactttacatgttagtaaagccatggccttggagaggggaccctgggaggctgggccccaggctcttgccaccacctcggaaagactgcccaaggtggttctcacagaaggcaggagctcctggtccaccttggtctcctggaggcatcatccctgcaatccctgctcagaccccataaagatcttaggagactgccctcccagaggccagcagactgtgttacagggcacctgggagcactggtcagggtccgataacgccttgaatgtgtaagcctcagtaggc

SEQ ID NO: 148677 - DNA, 704 bp, Homo sapiens
cctgagtagctgggattacaggcatgtgccaccacgcctggctaatttttgtatttttagtagagatgggggtttcaccatgttggctaggctggtcttgaactcctgacctcaggtcatccacccgcctcagcctccctaagtgctgtgattacaagcgtgttcctggtctctttgtatctgcgatataactgggaactctgccttagtcctgagcaaggctttctatcaggtccccaggccactcagttacggtgttggagattttacctccaaattatgctcaatgcaacacttcccatccatgcttctcattttccagtgtcctttgctgctctcgcccccctcacctctttacgaagaaaacttaatatttccctccatcttacaatgccctgtggattcttacagcttcccgagaagccacttggcatccccatctctagggcgcctgtgggactatcttcttgcagccaggtgacgtttcatttctgaaggtttctattgttttgccccctgggtgggccacgtggctagaatcatttcaccagccaggaccactgcccatggctcccatgcaactccggagagctgctgtttccaccccaaggtgtgcgatcccctacagtacacggttcccagttaccccctccacatgcacagaagcgggacaccccgatctcatctctccctctttctcgtgc

SEQ ID NO: 148678 - DNA, 431 bp, Homo sapiens
tagatgcccaaattgctcttggagggatggggcatccaacaatcatggctgggctgggaaaggctgtgaactaatccctgggcaccccaccaatctgccccagaggtcgaagaagatgctccctgcatttggcccccaggattaagttttgggcccatgaagtagggaatgatgcagtactctcatttaaatcaggaaagtctggctgggtgcagtggctcatgcctacaatcccaacactttgagaggccgaggtgggaggatcgcttgaggccaggtgttcaagaccagccttggcaacaatgtgaaaacctgtctgtttctcccttccccccacaatcagcaaagtctttctggtttcctactttagaatgggatttgagaagcagggttttccatgggaaaatttaaatacagcaatctgctcttca

SEQ ID NO: 148679 - DNA, 369 bp, Homo sapiens
  misc_feature (1)...(369): n = a,t,c or g
gctgcgagaagacgacagaagggcactaacgattccctgatgaggcagatgcgggaattggaggaccgatttgccagtgaggccagtggctaccaggacaacattgcacgcctggaggaggaaatccggcacctcaaggatgagatggcccgccatctgcgcgagtaccaggacctgctcaacgtgaagatggccctggatgtggagattgccacctaccggaagctgctggagggagaggagagccggatcaatctccccatccagacctactctggccctgtccctcccacctctgtgacctcaagcactagcctttggctctggagacagccccanaagcanagtgttgggatactgcanggccaa

SEQ ID NO: 148680 - DNA, 443 bp, Homo sapiens
  misc_feature (1)...(443): n = a,t,c or g
gctgcgagaagacgacagaagggcactaacgattccctgatgaggcagatgcgggaattggaggaccgatttgccagtgaggccagtggctaccaggacaacattgcgcgcctggaggaggaaatccggcacctccccacgccctcccctcccctgctggaggggctctggagagaaacaataaagagattcacacacacnnnnnnnnnnnnnnggggcccttttaaaggaaccaagtttaagtcccnnnnnnnnnnaaggaaaaattttttttaaggggccccaaaattaaattcccgggcccgcgtttaaaaaccgcggggagggaaaaacccgggggtaccccaaataaaaccccctgggaaaaaannnnnnnnnnnnnnnnnnnnnnnnnnnnancnncnnnnnnnnnnnngccccccncccacctnccctctcgacca

SEQ ID NO: 148681 - DNA, 392 bp, Homo sapiens
  misc_feature (1)...(392): n = a,t,c or g
ctgcgganatcccgccggaattcctgggtcgacgactgcgagaagacgacagaaaggcactaacgattccctgatgaggcagatgcggcaattgcatgaccgatttgccagtgaggccagtggctaccatgacaacattgcgcgcctggaggaggaaatccggcacctcaaggatgagatggcccgccatctgcgcgagtaccaggacctgctcaacgtgaagatggccctggatgtggagattgccacctaccggaagctgctggagggagaggagagccggatcaatctccccatccagacctactctgccctcaacttccgagaaaccagccctgagcataggggttctgaggtcgtcagcagtgaggccacacagcagcagcatgaat

SEQ ID NO: 148682 - DNA, 194 bp, Homo sapiens
gctgcgagaagacgacagaagggcactaacgattccctgatgaggcatatgcgggaattggaggaccgatttgccagtgaggccagtggctaccaggaccataccaagaagacggtgatgatcaagaccatcgagacacgggatggggaggtcgtcagtgaggccacacagcatcagcatgaagtgctctaaaa

SEQ ID NO: 148683 - DNA, 673 bp, Homo sapiens
  misc_feature (1)...(673): n = a,t,c or g
ggttttagtttccccaattttttcaaacccaaaaaattttagcgttttttttccccctttcccccttaaaannnnnnnnnncccctaaaagctttaatttttttggggaggttggcccaatatgtcccccccccaaaaaaagggttctttccaaaaattcccaagtaggttttaattcggctccctataaggaaaaaactataacgttgcaagcacgcgtaaactttggcccccccaaggatcctttaaaacggccccccccnnnnnnnnnnnnnnggtgtgtgaatctctttattgtttctctccagagcccctgcagcaggggaggggagggcgtggggaggtgggcgcccctcccaccagcctgagaccgctctctgcctctctcctctcctctcttctccagcatctcacccactttctctccttctcaatctcctgctcccacctccagcaccttcggggattccctcttgtagcccctgctttctaagtccaccctgggctggggaaaggaaagtaagagaccacggggacaatttcaagccccccagtctccacaggggctagtccccctggctacctgcctggctttctctctcctgggctaggggctggggaggtctgcggggctcagtcctggccctgcagtatcccaacaccctgctctggg

SEQ ID NO: 148684 - DNA, 1117 bp, Homo sapiens
ggactcggcccgtaattcccgggtcgacggctgcgagaagaccgacagaagggcactaacgattccctgatgatgctgatgcgggaattggaggaccgatttgccagtgaggccagtggctaccaggacaacattgcgcgcctggaggaggaaatccggcacctcaaggatgagatggcccgccatctgcgcgagtaccaggacctgctcaacgtgaagatggccctggatgtggagattgccacctaccggaagctgctggagggagaggagagccggatcaatctccccatccagacctactctgccctcaactttctgagaaaccagccctgagcaaaggggttctgaggtccataccaagaagacggtgatgatcaagaccatcgagacacgggatggggaggtcgtcagtgaggccacacagcagcagcatgaagtgctctaaagacagagaccctctgccaccagagacccgtcctcacccctgtcctcactgctccctgaagccagccttcttccatcccaggacaccacacccagcctcagtcctcccctcacagcctctgacccctcctcactggccatccctcgtggtccccaacagcgacatagcccatccctgcctgggcacagggcatgccccggccacctctgcggataccaagaagacggtgatgatcaagaccatcgagacacgggatggggaggtcgtcagtgaggccacacagcagcagcatgaagtgctctaaagacagagaccctctgccaccagagaccgtcctcacccctgtcctcactgctccctgaagccagccttcttccatcccaggacaccacacccagcctcagtcctcccctcacagcctctgacccctcctcactggccatccctcgtggtccccaacagcgacatagcccatccctgcctggtcacagggcatgccccggccacctctgcggaccccagctgtgagccttggctgttggcagtgagtgagcctggctcttgtgctggatggagcccacgcgggagcggaggccctgtccctcccacctctgagacctcaagcactaacctgtgggtctggagacagccccagagcagggtgttggg

SEQ ID NO: 148685 - DNA, 481 bp, Homo sapiens; identical to SEQ ID NO: 148077
  misc_feature (1)...(481): n = a,t,c or g

SEQ ID NO: 148686 - DNA, 995 bp, Homo sapiens
tagacaggctgtttaaattaaaaaaaaaatgtaaggatgcttgtttaaacaactcagaaagcatttttcccccagaaatattacagtgataagggaaacgatctgaccacctaagcctcagttccacaatctccctctaaattctctggtctagaaaacccatggctctctgggatgcttcttatgcttttcaggagtttccctcacaggtctgcatttctatcatggaatttttcattttttttttttaagctaggaaatgtcttactaacaagttgttttatcacctaaaatctactattatccatttttacaccatagataacacttggttgacttaaattctaaaagaaaaaagtcttgctttaccaatcaaaaacttaaaaccaaaggggtaaaaggatactgaaatgtcctaatagtttgtgtaggaccacaaacattaaaggcaagatgatagttttaaaaatgtaataactcaagtctaaacatgaatgaatttaaatttaatcctttttgtatgaaaccaaatagcagtctaataccactgggactaagtgctataaaagtaagtaataaaacaaatacatgaaacatgattacaatttaaattctttggattatctttttttttttttttttgatatggagtcttgctctgtcgcccaggctggagcgcagtggtgccatctcggctcactacaggctccacctccggagttcacgccattctcctgcctcagcctcccgaggagtagctgggactacaggcacccaccacgcccggctaattttttgtatttttagtagagaggggtttcaccgtgttagccaggatggtctcaatctcctgacctcgtgatctgcccgccttggcctcccaaagtctttggattatcttgtaagaccccacatttaatatagaagtttaaaactctctaaaataatactactaagcatcttagtattatttaatacttttctatctaaaaagt

SEQ ID NO: 148687 - DNA, 332 bp, Homo sapiens
  misc_feature (1)...(332): n = a,t,c or g
catcaagggccaagggtccaaaaaattataactttggccaagggcccccaaccaaagttaaagggcccttggcaagccccttttttccccttttaccccccttcccccggccgccctggttcccctttccccccttttaaaaccccatttttccctggtggtaaaaagggccaaaaaaaccctttcttttaaattaaaaccctgggcacaaaattaaaatccgttttnnnnnnnnnnnnnnnnnnngaatttattaacatctttttgcattcataaaaaactttcaggaaactttaattaaatatctatttgttgtttgggtttaaatacat

SEQ ID NO: 148688 - DNA, 429 bp, Homo sapiens
tcgatacgacttttttttttttgttttttttttttaagcagagacggggtttcgccatataggccaggctggttttggactcctgacctcaagtgttcctcctgccttggcttcccaaagtgctgggattataggtgtgagccaccgtgcgcggccttgttcctctcttatagtgctgcacctctaatttttcttcttcccttctgctctctcactctcctttgcttttcctcttttcccttcctttcctatggaccttgagtttgcagggctttcctgagcaagctggacagatgggctgggcctctgggaccacacccctctgctactctcaactccccaagctcagggaatccaaaggtgccacagggatgctgggaccagttataggtacctcaaccagtctgacagcccacagctcacctctgg

SEQ ID NO: 148689 - DNA, 326 bp, Homo sapiens
cggccgagtagacatcctcatagctcagcttatccaagtttgaaatttggtcctcatcctagattaccaccattcattttcatcatatatttaataatatacaaaatcctattctattgattctattttaacatatttttgtttattgtggctaaaaattggaaatatgtagaagagcaagagtttcactaaaaataggttttatcaggcctggcacagtagctcatgcctataatcccagcactttggaaggccgaggcaggcagatcacttgagatcaggagttcgagaccagcctggccaacatggtgaaaccctgtctctac

SEQ ID NO: 148690 - DNA, 448 bp, Homo sapiens
ctgctgtattcggcacgagaagataccacaccattcaaattactactcttaaaacaactactcttgcacccaaagtatctacaacaaaaaagacaattactaccactgagattatgaacaaaccaattttcaaaggatttggaggactaactggacaaatagtggcagcgctttcaacagctaaatataagaactggcctgaatctgtgtattttttcaagagaggtggcagcattcagcagtatatttataaacaggaacctgtacagaagtgccctggaagaaggcctgctctaaattatccagcgtatggagaaacgacacaggttaggagacgtcgctttgaacgtgctataggaccttctcaaacacacaccatcagaattcaatattcacctgccagactggcttatcaagacaaaggtgtccttcataatgaagttaaagt

SEQ ID NO: 148691 - DNA, 5044 bp, Homo sapiens
gcggccgcgactattcggtacctgaaaacaacgatggcatggaaaacacttcccatttacctgttgttgctgctgtctgttttcgtgattcagcaagtttcatctcaagatttatcaagctgtgcagggagatgtggggaagggtattctagagatgccacctgcaactgtgattataactgtcaacactacatggagtgctgccctgatttcaagagagtctgcactgcggagctttcctgtaaaggccgctgctttgagtccttcgagagagggagggagtgtgactgcgacgcccaatgtaagaagtatgacaagtgctgtcccgattatgagagtttctgtgcagaagtgcataatcccacatcaccaccatcttcaaagaaagcacctccaccttcaggagcatctcaaaccatcaaatcaacaaccaaacgttcacccaaaccaccaaacaagaagaagactaagaaagttatagaatcagaggaaataacagaagaacattctgtttctgaaaatcaagagtcctcctcctcctcctcctcttcctcttcttcttcaacaatttggaaaatcaagtcttccaaaaattcagctgctaatagagaattacagaagaaactcaaagtaaaagataacaagaagaacagaactaaaaagaaacctacccccaaaccaccagttgtagatgaagctggaagtggattggacaatggtgacttcaaggtcacaactcctgacacgtctaccacccaacacaataaagtcagcacatctcccaagatcacaacagcaaaaccaataaatcccagacccagtcttccacctaattctgatacatctaaagagacgtctttgacagtgaataaagagacaacagttgaaactaaagaaactactacaacaaataaacagacttcaactgatggaaaagagaagactacttccgctaaagagacacaaagtatagagaaaacatctgctaaagatttagcacccacatctaaagtgctggctaaacctacacccaaagctgaaactacaaccaaaggccctgctctcaccactcccaaggagcccacgcccaccactcccaaggagcctgcatctaccacacccaaagagcccacacctaccaccatcaagtctgcacccaccacccccaaggagcctgcacccaccaccaccaagtctgcacccaccactcccaaggagcctgcacccaccaccaccaaggagcctgcacccaccactcccaaggagcctgcacccaccaccaccaaggagcctgcacccaccaccaccaagtctgcacccaccactcccaaggagcctgcacccaccacccccaagaagcctgccccaactacccccaaggagcctgcacccaccactcccaaggagcctacacccaccactcccaaggagcctgcacccaccaccaaggagcctgcacccaccactcccaaagagcctgcacccactgcccccaagaagcctgccccaactacccccaaggagcctgcacccaccactcccaaggagcctgcacccaccaccaccaaggagccttcacccaccactcccaaggagcctgcacccaccaccaccaagtctgcacccaccactaccaaggagcctgcacccaccactaccaagtctgcacccaccactcccaaggagccttcacccaccaccaccaaggagcctgcacccaccactcccaaggagcctgcacccaccacccccaagaagcctgccccaactacccccaaggagcctgcacccaccactcccaaggaacctgcacccaccaccaccaagaagcctgcacccaccgctcccaaagagcctgccccaactacccccaaggagactgcacccaccacccccaagaagctcacgcccaccacccccgagaagctcgcacccaccacccctgagaagcccgcacccaccacccctgaggagctcgcacccaccacccctgaggagcccacacccaccacccctgaggagcctgctcccaccactcccaaggcagcggctcccaacacccctaaggagcctgctccaactacccctaaggagcctgctccaactacccctaaggagcctgctccaactacccctaaggagactgctccaactacccctaaagggactgctccaactaccctcaaggaacctgcacccactactcccaagaagcctgcccccaaggagcttgcacccaccaccaccaaggagcccacatccaccacctctgacaagcccgctccaactacccctaaggggactgctccaactacccctaaggagcctgctccaactacccctaaggagcctgctccaactacccctaaggggactgctccaactaccctcaaggaacctgcacccactactcccaagaagcctgcccccaaggagcttgcacccaccaccaccaaggggcccacatccaccacctctgacaagcctgctccaactacacctaaggagactgctccaactacccccaaggagcctgcacccactacccccaagaagcctgctccaactactcctgagacacctcctccaaccacttcagaggtctctactccaactaccaccaaggagcctaccactatccacaaaagccctgatgaatcaactcctgagctttctgcagaacccacaccaaaagctcttgaaaacagtcccaaggaacctggtgtacctacaactaagactcctgcagcgactaaacctgaaatgactacaacagctaaagacaagacaacagaaagagacttacgtactacacctgaaactacaactgctgcacctaagatgacaaaagagacagcaactacaacagaaaaaactaccgaatccaaaataacagctacaaccacacaagtaacatctaccacaactcaagataccacaccattcaaaattactactcttaaaacaactactcttgcacccaaagtaactacaacaaaaaagacaattactaccactgagattatgaacaaacctgaagaaacagctaaaccaaaagacagagctactaattctaaagcgacaactcctaaacctcaaaagccaaccaaagcacccaaaaaacccacttctaccaaaaagccaaaaacaatgcctagagtgagaaaaccaaagacgacaccaactccccgcaagatgacatcaacaatgccagaattgaaccctacctcaagaatagcagaagccatgctccaaaccaccaccagacctaaccaaactccaaactccaaactagttgaagtaaatccaaagagtgaagatgcaggtggtgctgaaggagaaacacctcatatgcttctcaggccccatgtgttcatgcctgaagttactcccgacatggattacttaccgagagtacccaatcaaggcattatcatcaatcccatgctttccgatgagaccaatatatgcaatggtaagccagtagatggactgactactttgcgcaatgggacattagttgcattccgaggtcattatttctggatgctaagtccattcagtccaccatctccagctcgcagaattactgaagtttggggtattccttcccccattgatactgtttttactaggtgcaactgtgaaggaaaaactttcttctttaaggattctcagtactggcgttttaccaatgatataaaagatgcagggtaccccaaaccaattttcaaaggatttggaggactaactggacaaatagtggcagcgctttcaacagctaaatataagaactggcctgaatctgtgtattttttcaagagaggtggcagcattcagcagtatatttataaacaggaacctgtacagaagtgccctggaagaaggcctgctctaaattatccagtgtatggagaaatgacacaggttaggagacgtcgctttgaacgtgctataggaccttctcaaacacacaccatcagaattcaatattcacctgccagactggcttatcaagacaaaggtgtccttcataatgaagttaaagtgagtatactgtggaaaaggacttccaaatgttggttacctcagctatatcactgcccaacatcagaaaacctgacggctatgattactatgccttttcctaaagatcaatactataacattgatgtgcctagtagaacagcaagagcaattactactcgttctgggcagaccttatccaaagtctggtacaactgtccttagactgatgagcaaaggaggagtcaactaatgaagaaatgaataataaattttgacactgaaaaacattttattaataaagaatattgacatgagtataccagtttatatataaaaatgtttttaaacttgacaatcattacactaaaacagatttgataatcttattcacagttgttattgtttacagaccatttaattaatatttcctctgtttattcctcctctccctcccattgcatggctcacacctgtaaaagaaaaaagaatcaaattgaatatatcttttaagaattcaaaactagtgtattcacttaccctagttcattataaaaaatatctaggcattgtggatataaaactgttgggtattctacaacttcaatggaaattattacaagcagattaatccctctttttgtgacacaagtacaatctaaaagttatattggaaaacatggaaatattaaaattttacacttttactagctaaaacataatcacaaagctttatcgtgttgtataaaaaaattaacaatataatggcaataggtagagatacaacaaatgaatataacactataacacttcatattttccaaatcttaatttggatttaaggaagaaatcaataaatataaaatataagcacatatttattatatatctaaggtatacaaatctgtctacatgaagtttacagattggtaaatatcacctgctcaacatgtaattatttaataaaactttggaacattaaaaaaataaattggaggcttaaaaaaaaaaaaaaaaa

SEQ ID NO: 148692 - DNA, 1254 bp, Homo sapiens
aaaaatacatgccaatgtcattcatattatgaaattacaggcagaataacttagatttctgggcatttcaaagaaaagcatcctgagtaatataatttaattaataaaattagtttctcaggaacttctttctgatcttacagactctgcagtgatgcaaatcattataaccttgtgccaaacaaggtatctgttaaatgccacaaatgatagaagtaaaatactattgtcagtagcaagtttactctagtaactggatgttttatcgtaatctcatgaaggttagagcagaattgaattgcagtgccatcattttaattgaaattaaagcaaaagtcttaactcttttccacagcaattagaataagtaccgtagtgtaacttctcacattcagtcatcattgcagccagcatttttactttatcttcatggttttcaccaaatgataatcacctcccttgggaaacctggtaggttaataccttaccctttaggaaaaggcatagtaatcatagcagtcaggttttctaatgttgacagttgatatagttaaggtaaccacatttgaaagtcctctccacagtatactcactttaacttcattatggaaggacaccctgtaagtggcatgtttaaataaaagataccagatttaaagggcaatgtactaaccttggaaagagccagacatctgagttttaatctcagttttagccctctgatgtagaactattgagggttatagactggtatataatgttcttggtaagaagtacttgataaatagtattggttataactaacaaacctgaacaaactgctttccttacccacaaggaaaaagaaagtattggtctttggttattcactaaggcaagtggatgagtttttcatcagtaagcttaaattattagggcttgtttgatccagtatccctatttccataagccttactgtataagaaactgtattacatctacttatgtttaaggatttttttaacacaataaaaatgttacctttgtcttgataagccagtctggcaggtgaatattgaattctgatggtgtgtgtttgagaaggtcctatagcacgttcaaagcgacgtctcctaacctgtgtcgtttctccatacactggataatttagagcaggccttcttccagggcacttctgtacaggttcctgtttataaatatactgctgaatgctgccacctgttatgtattagaatatcacatggaaaatgaaaa

SEQ ID NO: 148693 - DNA, 2305 bp, Homo sapiens
acaaagctacaactctgactctctcttttttttgagacggagttttgctcttgttacccaggctggagtgcagtggcgtgatcttggctcactgcaacttccgtctcccgggttcaagtgattctcctgcctcagcctcccaagtagctgggtttataggtgcccgccaccagacccggctaattttttagttttagtagagacggggtttcaccacgttggccaaggctggtcttaaatgaccctcttatttttaacttggatacctgctattctgccaaaagacaatttctagagtagttttgaatgggttgatttcccccactcccccaaactttgaagccagtgtctagcttactaaaaaaagagttgtatataatatttaagatgctgagtatttcataggaaagctgaatgctgctgtaaagggctctttaagtctttttttttttttaatccccttctaatgaatgaaactaggggaatttcaggggacagagatggggatttgttgtatgataaaactgtatgtagtttttagtcctttctgtttttgagaagccagtggttgggggcatttttaagatggctggctactcttgttttccctcatgataataaatttgtcataactcagtaacatgaacttgcccctagaggtagttgttaataattttgaaatattaaggtcttgccaagcttctgatgattcacaccgtgtactactgattattaagcaggacagacgtgagctttctgttgcaaataccgttggaggagaaagtaatttctaaatatacagagaggtaacttgactatatatgttgcatcctgtgcctcccttcatattaatatttgataaagattttaatttatgtaaaacttctaaagcagaatcaaagctcctcttggggaaatggcaagtctttaggataggcaagaccctgtatgaatagtagcaaagcattaccgcatggtaggagaacacactcgattaaaaatgttaagctatctgaagagataaaatgtgcaagtcttcaggatggcaccaaaccaaagggttaatgcctcctgggggcacatttcttagaggggcttgctgagtgtgtaaatataatccgacttttgtttgtgttacatgacttctgtgacttcattgaaaatcctgcacaattcagtttcagctctgggattactttcagttgacctttggtgaaggtttttaacctgtgtagaatgggtgtttgacttgttttagccctattaaatttttattttctttcactcctgtattaaaagtaaaacttacctaaaagaaaagaggtttgtgttcacattaaatggttttggtttggcttcttttaagtcaggctttctgaacattgagatatcctgaacttagagctcttcaatcctaagattttcatgaaaagcctctcacttgaacccaaaccagagtactcttacctgcctcttttctaaatgttcaggaaaagcattgccagttcagtcttttccaaaatgagggagaaacatttgcctgccctggtaataacaagactcagtgcttattttttaaactgcattttaaaaattggatagtataataaccaattagggagtaagccacccttttatagggcaccctgtagtttttatagttcttaatcctaaaccattttatatttccttccttttggaaaaaaccctaccatgctaccaagcccacccatatgccacagactaataccagtggagttggagttgggctctccccaccagtctttgagggtgaattacaaaaaagtccagcccattatcatcctccctgagttatttgaaatgatttttttggtaccatttttggctgcagtattggtggtagaatatacctataatatgggatcattctctacttcctgatttatttatttattactagacctccaaccccagtcttctttttccccttccacctctctttgcctgtaggatgtactgtatgtagtcatgcactttgtattaatatattagaaatctacagatctgttttgtactttttatactgttggatacttaataatcaaaacttttactagggtattgaataaatctagtcttactagaaaataaaaggagctgttttgtggctttgtttgacaggtcttcagtaagaataatgtttttggctttcacatatactcagtttaagtgcttagtattaataacaagccatgaagggaataaattcctcttccctgagacatagactttggaataaaagacattttaactgaaaaaaaaa

SEQ ID NO: 148694 - DNA, 859 bp, Homo sapiens
tggtcttgagaatttaaaatatcaaattaagaagctccatgcagttaacttgcacttaaaatacaaaaatttaaaattaaagctcaagacacaaaggacacaatttcctcccgtgctgactgcacctgggtcctctttggttggatgctggtgagcccatcagtgacaggtaaatcacactgggaagagtagactgctgctaagaggctcaccaaaaagatagaagatattcctttttttttttttttttaaaaagaggcagggtctcactctgtcatgcaggctggactgcagtgtgcagtgacacaatcactacccactgcagtctcgaactcctgagctcaagcaatcctcttgcctcagccacccaaagtactgggattagaggcacgagccactgtgcttggcccctaagaaagaagatactcttcaagagcagcttgaaatcaggctcttgatctactgacatctactcctcgaatttgaagcactgcagctcaaagtgcttctgataaaaataaagaaatgtcaatatgctacagaatggatggcctattggctgtcagggcacacggtcaaacggctgctcctgagcacatggtcaaaagcacatatgcaaaacacggctaagcaggagcatttggagctgtggggcgagctatggggcaagctgctcggggccattacagaccttagtcctggaaaccttccccacctgtgagggcactaggaagggcatctattgggaaacaaaacaaacaaaccaacatggatttgttgttttcaaaataaaagctctgatggcatcagaaaaaaagttattaaccatttataacatgtgcaaattatgctcgtgccg

SEQ ID NO: 148695 - DNA, 325 bp, Homo sapiens
  misc_feature (1)...(325): n = a,t,c or g
nnnnnnnnnnnnnnnnnnnnnnnnnnnnnnnnnnnnnnnnnnnnnnnnnnnnnnnnnnnnnnnnnnnnnnnnnnnnnnnnnnnnnnnnnnnnnnnnnnnnnnnnnnacgatatttgttttcttactgaattttaaaaattctttggatattcaggatatttctcttgtcaattaaatgtttcttttagactaatatgcatgtgtgtgtgtcttgtctttttatattcctaacagtgtctttcatagaacagacgttttaaatttctttcttttatgcatcatggatcatgcttttgatgtcatttttcttcnnnnnnnnnnaaca

SEQ ID NO: 148696 - DNA, 1129 bp, Homo sapiens
ttttttttttaaatagggcctcactctgttgctcaggctggagtgcggtggtgtgatctcggctcatgtagcctcaacctccccggctcaagtgatcctcctgcctcagcctcccaagtagctgggactacaggcgttcactactacacccagctaatttttaagttttttatagagatgagggctccctaaggtggcccagggttggtctcgaactcctggactcaaagtatcctcccgcctcggcctcccaaagtgttgggattataggagtgagccaccacaccggccaagatgcttttcaaactgatacagatgacaatgggagcctcataaagatggcttttgtttcttcccttcaaggtcatttacttgtacgagacagaaaaagatagcattggggacatgggatgggggagggagggcaatagtggaacgaactttccatgggaaactttcccttttgtaagttgagggccaggggtagggatattttttagtttgtgattttacatttatctgtacatactttttcaaagattgatccatttttataaccatggttttcctgaaatcctcaattcatcaatatgaaggaaatgaacccacataggactttatgccaataaataacagtgcaagtgaggtataactcctaactgatgttccacaaaacatttttgatttcaggtttgtatgatgtagtttttaatcgtacattttccatatgcttcaaactaacacattttttaaagctttcccccacttttctctctatttgtattgttaggccatcttggaggtgatggttggttttaacataaaattgtaccggttggaattggggcttacgggtgtaaacactgatgggtatatcagtatctgagaccccaaactcttccaaatactgatggtgcattttaattcttgaagtgaaatctgtgcaataaaattaccagactgtctgcaaaactggccttgcaatcttctgttgtatccagaggtatcattattgatttaaaaaaaatctcattaatctctactggtaatttatagggaatctgatcagtgattcaagaacatagtaattctgcattgccttgaataattaataagttttattttaaaa

SEQ ID NO: 148697 - DNA, 5232 bp, Homo sapiens; identical to SEQ ID NO: 125035

SEQ ID NO: 148698 - DNA, 7047 bp, Homo sapiens; identical to SEQ ID NO: 125036

SEQ ID NO: 148699 - DNA, 422 bp, Homo sapiens
acactcacccagagtcgctgccccagcaggaggcagaggtgggccagtgggcagtatttcttcctaattagtaaagggcgtcaggtcaacattttagcaccttttgagagtagtaattggattactcaggccaccaacagggatgaatttcaaactgatgaaactttgatacaatatgaggggtcttttaccttcctacttactcagtaaaggaccaaactcttacccaggatctactggagcagctgttggagcccatgacgcctgtcgggatgcaaaagagaagcgctctaaaagccaagatgcagattcacctggaagttctggggcccctgaaaacttgacattcaaggaacgccagcgtcttttttcacaaggtcaagatgtatccaataaagtgaaagcttctcgtaaattaaaaa

SEQ ID NO: 148700 - DNA, 3644 bp, Homo sapiens
atgggtggacagacacagagagatgtaggggtgagggtggaaaccatccacaggagagatgtgtggacagacacagagggatgtaggggtgagggtggaagccatccacaggagacatgtggacagacacagagggatgtaggtgtgagggtggaaaccatccacaggagagatgtgtggacagacacagagggatgtaggggtgagggtggaagccatccacaggagacgtgtggacagacacagagggatgtagggggtgctggtcaagataaactaggaatctatgtgaagtcggttgtgaaaggaggtgctgcagatgtggtcagtatcattttgaaagaagtacattttcagtgtgtcatatattcagcaaatgatgatggacgtctagctgcaggtgatcagctcctcagtgtggatggacgaagtctggttggactctctcaggaaagggcggcagaactcatgacaagaacaagctctgtggtgacactggaagtagcaaagcagggtgccatctaccacggtctggccacccttctcaatcagccatcccccatgatgcagagaaaacaattcttatggaattttaatgataatcagggtgttgaaaataaaatcttaagagatactgaatatgctttgattccagtttcagatcgtcgtggctcaggtaaaccccgaccaaagagtgaaggctttgagctctataataattcaactcaaaatgggtctcctgagagtcctcagctgccttgggcagaatatagtgaaccaaagaaattgcctggtgatgacagactgatgaaaaatagagctgatcaccgttccagccccaacgtagcaaatcagcctcctagtcctggagggaaaagtgcatatgcctctggaacaacagcgaagataacatctgtctctactggaaacctctgcactgaggagcagacgcctccgcctagacctgaagcctaccccatccccactcagacgtacaccagagagtattttaccttcccagcttccaaatcccaggatcggatggctcctcctcagaaccagtggccaaattatgaggaaaagccacatatgcacacagatagtaatcattccagtattgcaattcagggaaatgagacagacacaacagacacagcatggtcagtgctgtgggagaagaggccccagcaggggatggagcttctcagtcttggacgagaacctgggcacagctgtatgcacggaagggccttccaggaggagggaaaggcacagagatgtgtagtagttcagcaggaaccctggcgtgttacacgttcccaagaagaacttcgagaagataaagcttaccaacttgagcggcatcgaatagaggcagctatggaccgaaagtctgatagtgatatgtggataaatcagagctcctcactggactccagtacctctagccaggagcatctgaaccattcctctaagtcggtcacccctgcttccacactgaccaaaagtggccctggccgttggaaaacaccagcagccataccggccacccctgtggccgtctcccagccaatccgaacagacctgcctccgccacccccgccacctccagtccactatgccggtgatttcgatggaatgtccatggatttgcctctcccaccacccccttccgccaaccagatagggctgccgtctgcgcaggtggctgctgctgaacggagaaagagagaagaacatcagcgttggtatgagaaggagaaggcccgcctggaggaggagcgggagaggaagcggagagagcaggagaggaagttgggccagatgcgcactcagtccttaaaccctgctccgttttctcccctgactgcacagcagatgaagcccgaaaagccttccacactccagcggccacaggaaacagtcattcgggagctgcagcctcagcagcagccccgcacgatcgagcgcagagacttgcagtacattacagtcagcaaagaggagctttcctcgggggacagtctgtcccccgacccgtggaagcgggacgccaaggagaagctggagaagcagcagcagatgcacatcgtggacatgctgagcaaggagatccaggagctccagagcaaaccggaccgcagcgccgaggagagcgaccggctgcgcaagctcatgctggagtggcagttccagaagagactccaggagtcgaagcagaaggacgaagatgacgaggaggaggaggacgatgatgtggacaccatgctgatcatgcagcgcctggaggctgaacgaagagcgagggcatgtttgtctcttctgggtagcgccacctccatgggaacagtgacctttgtccaagtttctagaagagttctggagtgtggtaggcagtcgagtgagtgggatcggattccaggccaaggtcccaagctctcgaagtttttcttgacccctgaaatccttgctgaacgtttccatcctttgctctggcccctggtgcaggaagcctgtggggagctgtggctggttctgtcaactcaagggcaaggcgtcaccgacggcttccttgacgaggagcggaggcggcagcagcagttagaagagatgcgcaagcgggaagcggaagaccgagcgaggcaagaggaagagcgccggcggcaggaggaggagcgaacaaaacgagacgctgaagaaaagaggcgacaggaagaagggtattacagccgcctggaagccgagaggcgcagacagcacgacgaggcggcgcgcaggttgctggagcccgaggcgcccggtctgtgccgccctccgcttccccgggactacgagcccccgtccccgtcccccgcgcccggcgcccctcctcccccgcctcagcgaaacgcctcctacctcaaaacacaggtcctctcccccgactcgctgttcactgccaagtttgttgcatacaatgaggaggaggaggaggaggactgcagcctagcaggaccaaactcttacccaggatctactggagcagctgttggagcccatgacgcctgtcgggatgcaaaagagaagcgctctaaaagccaagatgcagattcacctggaagttctggggcccctgaaaacttgacattcaaggaacgccagcgtcttttttcacaaggtcaagatgtatccaataaagtgaaagcttctcgtaaattaacagaactggagaatgaactgaacacaaagtgaaagaaaatgaggagaacactttgtatttaccccaaaatcttttcagttgtgggtttgtaggtgcgagtttgaagaggaaaagaggaagggggttatatttctaagtgatttacaatttctgtttctaaaattgttgggatttagaaagggttcacttccaagaaattttattttactttaccatgagattgccattctatgtaatttaaacactgactaggttcttaattatctaactcacacgagggtaagttttttgttgctttcttttttggagtcctgaggtcaaaggggacagaactaacggcaggagaagagaatggatgtgacttctctcccatcttgccctcatcatcggccgacgagcacaaacaagttctagtgctcgtgttttcagacactttattctagct

SEQ ID NO: 148701 - DNA, 731 bp, Homo sapiens
  misc_feature (1)...(731): n = a,t,c or g
gagacactgccacttgctgtgccaaatggaacacggaggataaagtcagccatgtgagcactgggggtggcgccagctaggagctcctggaaggaaaagcccttcctggggtggatgctaccagcactatttactactttcctgccttttaagtcctgtgcacagcccctaagtcaacttagcattttctgcatctccacttggcattagctaaaaccttccatgtcaagattcagctagtggccaagagatgcagtgccaggaacccttaaacagttgcacagcatctcagctcatcttcactgcaccctggatttgcatacattcttcaagatcccatttgaattttttagcgactaaaccattgtgcattctagagtgcatatatttatattttgccttgtaaaaanaaaagggacagnggttagctaacttctttttagaggagcctattatgatagctttgtcactgttcactactcagcatggaaacaagatgaaaatccatttgtagtagtgagacaaaattgatgatccatttaagtaacantanaagtgccattgaacccgtgnnnnnnnnnnnnnnngccggccgttctagagatcctngaaggggacaggcttacgcgtgatggcacgnnatattctttcctatagnagcgaatataactggctggaactgggaacgaccttaccttctggtggacatatggccactacttacaagataa

SEQ ID NO: 148702 - DNA, 1850 bp, Homo sapiens
aagcctccggagcgcacgtcggcagtcggctccctcgttgaccgaatcaccgacctctctccccagctgtatttccaaaatgtcgctttctaacaagctgacgctggacaagctggacgttaaagggaagcgggtcgttatgagagtcgacttcaatgttcctatgaagaacaaccagataacaaacaaccagaggattaaggctgctgtcccaagcatcaaattctgcttggacaatggagccaagtcggtagtccttatgagccacctaggccggcctgatggtgtgcccatgcctgacaagtactccttagagccagttgctgtagaactcaaatctctgctgggcaaggatgttctgttcttgaaggactgtgtaggcccagaagtggagaaagcctgtgccaacccagctgctgggtctgtcatcctgctggagaacctccgctttcatgtggaggaagaagggaagggaaaagatgcttctgggaacaaggttaaagccgagccagccaaaatagaagctttccgagcttcactttccaagctaggggatgtctatgtcaatgatgcttttggcactgctcacagagcccacagctccatggtaggagtcaatctgccacagaaggctggtgggtttttgatgaagaaggagctgaactactttgcaaaggccttggagagcccagagcgacccttcctggccatcctgggcggagctaaagttgcagacaagatccagctcatcaataatatgctggacaaagtcaatgagatgattattggtggtggaatggcttttaccttccttaaggtgctcaacaacatggagattggcacttctctgtttgatgaagagggagccaagattgtcaaagacctaatgtccaaagctgagaagaatggtgtgaagattaccttgcctgttgactttgtcactgctgacaagtttgatgagaatgccaagactggccaaagcacttgggccttctggcattactccggggctggatgggcttggactgttgtcctgaaagcagccagaaagtatgctgagggctgtcactcgggctaagcagatggtgtgtaatggtcctgtgcgggtattttgaaatgggaagcttttgccccggggaaccaaagctctcatggatgaggtgggtgaaagcccacttctaggggcttgccatcaccatcataaggtgggtggagaccactgcccacttgctgtgcccaaatggaaacacgggaggataaaagtcagcccatgtgagcaactggggggtggtgcccagtttggcagctccttgaagggtaaagtcctttcctgggggtggatgctctcagccaatatttaggtactttccctgcccttttaagtccctgtgcacagccccctaaggtcaacttaggcatttttctgcatctcccacttgggcattagctaaaaccttccatggtcaagattcagctaggtggccaagagatgcagtgcccaggaacccttaaacgagttgcgacagcatcctcaagctcatcttcactgcaccctgggatttgcatacattcttcaagatcccatttggaatttttttagtgactaaaccattgtgcattctagagtgcatatatttatattttgactcgtgctctaaaaagaaagtgaagcagtgttagcttagttctcttttgatgtaggttattatgattagctttgtcactgtttcactactcgagcatggaaacaagatgaaattccatttgtaaggtagtgagacaaaattgatgatccattaagtaaacaataaaagagaactaagctaacactgctcactttctttttaaca

SEQ ID NO: 148703 - DNA, 750 bp, Homo sapiens
atggactcctcgcgggcccggcagcagctccggcggcgattcctcctcctgccggacgccgaggcccagctggaccgcgagggtgacgccgggccggaaacctccacagctgttgagaaaaaggagaaacctcttccaagacttaatatccattctggattctggattttggcatccattgttgtgacctattatgttgacttctttaaaacccttaaagaaaacttccacactagcaggtccccggaatccccggccccccggcggggcggtgtgcgcgccagcgtcccacagaaactggccgagatgctgagcagccagtatgggctgatcgtgttcgtggcggggctgctgctgctgctggcctgggccgtgcacgccgcgggcgtgagcaagagcgacctgctgtgcttcctgacggcgctcatgctgctgcagctgctgtggatgctgtggtacgtgggccgcagctccgcgcaccgccgcctcttccgcctcaaggacacgcacgcgggtgccggctggctgcgcgccagcgcccgccaacggtttcaaccggccgcggggagcacgtggactcgccgccgccagcccagcgccgcagctacctgcctctcaggcttcgcggtgcagaattcgcttctgaaccacccagcgcgcctgcgcaccgcggccacgccccccccagtggaagtgacgccaacggaagcaggaaggcggttccggcaagccaagggggcgttgtcgtga

SEQ ID NO: 148704 - DNA, 1512 bp, Homo sapiens
atggacgcgttgaccagtgaggactttcctttgctggttttgaggtgtcttagcccagaagctaagatgggaagtgattctggagcaggtgagctgatcacaagcctgagccaagaatccatggagctcataaatagcagaagccgggaccctgtgcaaatccttctgaaatattctccatttactgggctcctaggggtttgtgcagcttcactatctggggagagacacagaaagaccacattcggtggaattctggctataaccttttgtggccggcaagaaggatcaccaagctgtcctgttaccttgctggagcgatcactggtttcacgcttggcccccgtgcaggacatggatgaagctggaaaccctcatgttcagcaaagtgacacaggaacagaaaaccaaacagtgcatgttctcactcataagtgggaagtgaacaatgagaacacatcaacccagagaggggaacatcacacactggggcctactgcaggggattcaattatcctcattttacttaaagatcccagtccagtggctgcagttcctgctgtaacattttgcctactgagagcacaagctcaaagctcttccaggatactgggctcctctcacaatattctttctcatgatcgttgtgaggaccaaccaaccaagtcaccaaacaagcaaacagccaaccaatcaaccaacaagcaagcaagcaagcaacaaaccaaccaaacaaccaagcaaggaagcaagcaccaaccaaccaagcaagcaaccaaccaacccctgtactggggtcaagatctggcctgttctcaatgcagcaagatccaggcagatcacactggactcccagcactgaatctggctcgaggggacatcaaatttgactgggtcatggggctcaggagcatcactctcaaaaatagcagtacaggaagaggcgatggccctaaacagcatttgcaggcagatcccatgttaatcatttatggggagacagagagaaagaggagacactccaggaagacctgcaggtgggagtaccaggttgaaaccaagaacacattcctggaggagctgctgtttgagccagctctgagaacaggaggggacaggactggagaggaggagggggtcccctatgagcaaagactggccaccaccccatctaacacccccacagggcccctgtggcatccctgtccattccctgtcaccacccagtttttccctctggacccaggaattcaaagtaagcaaggaggtccactgctccagttgactgcaaataattccaaccttgagcccaagcagcactttgggtcctggtttgggaccacgaagcggctcggcagccagaaggggttgtccagccagcacctgggctttggcgctcaagaaggtggaggaagtttcaggcacctggctcctcaggtgtctgccatccaggtgctcttcaggcctgcccagaagagctctcttgatccagctagaactggccagaactga

SEQ ID NO: 148705 - DNA, 1305 bp, Homo sapiens
atggtggctggatctgataattaccatgaggtgtcattacatgacggggtcatcggggcccgcggctgcccgcctccctcgccgtcggcccgaggtgcccggagtccccggccccccggagggtgtgcgcgccagcccacagaggctggccgagatgctgagcagccagtatgggctgatcgtgttcgtggcggggctgctgctgctgctggcctgggccgtgcacgccgcgggctagcagagagcgacctgctgtgcttcctgacggcgctcatgctgctgcagatgctgtggtacgtgggccgcagctccgcgcaccgccgcctcttccgtctcaaggacacgcacgccggcgccggctggctgcaccggctgctttggatacctcccgcttttggctgtcgacctgagtatgacaatggattggaggagattgtctttggctttgaaccctggataattgtggtcaacctggccatggctttttctattttctatgcaatgcacgcagctgcctccctctttgaggtctattcaggcatctctgaaacatcagttttgggtgattggtctaagccaagcacctttgatagcaaggcttctgggctaagacacctcaaaaccagcaaaggaaagtcctcactggtcaacgcgtccatcccaactcccccatctccctttaggccaagccagccaagtgagccagctagccagccagccaagccagccaaaccagccaagccagtcagccagccaagccagccaagccagacagccaggaaagccagccaagccagccaagccacccaagccagccaagcctccagccagccaagccagccaagccagccagccaggcatgccagccaagccagccaagccagccagcaagcaaagccaggcatgccagccaaaccagccaggcagccaagccagccagccaagacagccaagccagccaaccagccaagccagtcagctagccaagccagccaaccagccagccagccaagccggccggcctgtcagccaaccaagtcggccagacagccaaggcagccaagcctgccagcagccaagcgagccaatgccacgtaccagcgaagccactcagccagccaagacaggcacgccagcgaaccgaccagtcagccaagcagccagcattcagcagcgaggccagctgcgaccagccagccagacagccgagctgcaaatcagtctgcagtcgagcaagcaaggcagccgagtgccaagcattcaggaaagcagcaggcagacagcgaggcagcggcaggcagctag

SEQ ID NO: 148706 - DNA, 1173 bp, Homo sapiens
ttaggaattgggttgcaaaaagccccttttgtttattttattttggaaaaaaattttattgtgaaaattcacatatatatataaaaaattcaatcaatacaaaaggatagacaatgaacaaatgaattccccttccactccagatccccaccccagatccagacctcctgagcccactttcccataagcaggcagaagaaacggcagctgtgttgtgtgatggacatggatgcagcggtgtccaatgtggggtcagccctagaggagagacagagagagagacagacagtgagagagtcctggcccttatgattaacattggggatctgcctgcaaatgctgtttaagggccatcgcctcttcctgtactgctattttttgagagttgatgctcctgagtcccatgacccagtcaaatttcatgtccccttgaagccagattcagtgctgggagtccagtgtgatctgcctggatcttgctgcattgagaacaggccagatcttgaccccaatacaggggctggatatgaacaggcaatagctgggtttctgagtcagaaagacttggttgattgctaattgcttaggcgagtaatttaattttgttgagtcagattcctcagctacaaaatgcagatgacagtacttactcctccaggttgtggggaaaatggagattctgagcacgatgtccatttcacagaaaggtaccaatttggtggcttattttcctttctaccttcagaagtggctatccctgccacccaaacagacccttgactctctctctctgctggctagaggggattctggctttttccttcccagagccacccctttcccctccttccttaaagttgatggtggttcttttaaggaaaagggagaagtgcacggtgtgattagggcaggaagagaagaaaaatggaggagaggaggggactttcccataagcaggcagaagaaaaggcagctgtggtgtgtgatggacattggatgtagtggtgtccaatgtggggtcagccctagaggagagacagagagagagacagaaaagtgagaggcctgacccttacgattaacatgggatctgcctggaaatgctgtttagggccatcacctcttcctgtactgctatttttgagagtgatgctcctgagccccatacccagt

SEQ ID NO: 148707 - DNA, 2563 bp, Homo sapiens
tttttttttttttttttttttttagataggaattgggttgcaaaaagccccttttgtttattttattttggaaaaaaattttattgggaaaattcacatatatatataaaaaattcaatcaatacaaaaggatagacaatgaacaaatgaattccccttccactccagatccccaccccagatccagacctcctgagcccacttcccccatctcatcacagatccagacctcctgagcccactttccccatctcatcacagatccagacctcctgagcccacttcccccatctcaccacagatccagacctgctgagcccacttcccccatctcatcacagatccagacctcctgagcccactttccccatctcatcacagatccagacctcctgagcccactttcccgatctcatcaccagtgatttcttgggcccctgccattagttttcctaattgctgctgcaaacaaacagctacagactcaagtggcttccatttctgtcttatagttctgattgccaaaagtcctaagaggatctcaccaggctaaagtcaaggtgctggcggggctgtgtcccttctggaggctcaaggaaagaatcgggtccctgccttttctagcttctaggggctccagcttctaggtttgtggcctccttcctccatcctcaaagccagcaacagcaggtgaagtccttgcccatcgtgcatcactctcccttctgcctccttcaacttttttttatatttagggggaacgagtacaggattcttacatagtcaaaaagctccttatagagaagctcggaactttcaatacagctttgcattttttaccattttaattttccatttaatttaaatgtattctctcatttgaccttcatactctgtggagaaatatttctattttggcttgtattgacaagctgttttcacacagcccccacatcacccaaccacccagcagagatcctcattcccatgaaacagataaagaaattgagacccagggaggctaagagtcctggcaggatcattcaccttccaaggtaaggagccagttccagacctgggtttgtgcagctccaagctcccccgtctttctacaatgctagatttagactatagcaatctagcaagtgtggccacacaatggtcaagttggatttagaatgatgttctctataaatccaatgtcatctcacgtgtgagcaaggcaaagtagtccagctcatgggtagtccatgaagactcgatgaacatgcaatggccatatcaggaggttgcaggttgaccagaactcaccgacacagcaggagagcagcttggaaccttcaacccagccaagacccagtgccttggactgggggagaaaacatgcagccattcctctctctctctgctggctagaggggattctggcttttcctgccagagccacccctttccctcctcctaaagttgatggtggttctttaaggaaagggagaagtgcacggtgtgatagggcaggaagagaagaaaatggaggagaggaggggactttcccataagcaggcagaagaaaaggcaggattaacatgggatctgcctgcaaatgctgtttagggccatcgcctcttcctgtactgctatttttgagagtgatgctcctgagccccatgacccagtcaaatttgatgtcccctcgagccagattcagtgctgggagtccagtgtgatctgcctggatcttgctgcattgagaacaggccagatcttgaccccaatacaggggctgaacatcagctccacctgagcagagcctttcatagctgaaaccccagcaccctgtgacctctgcatccttctctcttctggactgaacctccttttgctcctcctgccgccactctttccaagggcctgtgaaatgctcaaggaggatgagaccctccacacacagtctgatttcctttccaatgaaagccaagcctgcatctgattttttggcagccacattcgcttgtttgtgttgaaatcgtgacactatgtctatattttccattggaccagaaatatcatttgtgcccaggccctgaggtggctctaggaccgagagacagggatcacagagctccccagtggagtggagggtacagacatgtggacaagaacactggaacccagtgcgggctgggagcgtgcggtcagacgtgacctccatcatggggtcagtagggccactgtatggctttaagccagggaaggacaggagaggtttctgtaactgtggctgtaatgatggaagcctctggaggcggagaggaggctcccgcggcgacccaggcagccggtgcagccagccggcgccggcgtgcgtgtccttgaggcggaagaggcggcggtgcgcggactgcggcccacgtaccacagcatccacagcatctgcagcagcatgagcgccgtcaggaagcacagcaggtcgctcttgctcacgcccgcggtcatcggcccaggccagcagcagcagcagccccgccacgaacacgatcagcccatactggctgctcggcat

SEQ ID NO: 148708 - DNA, 442 bp, Homo sapiens
  misc_feature (1)...(442): n = a,t,c or g
cctgtggaagtgagcctccttcaaggtctggttgatatgggagtaaagaccttggcatggtacatacccctcatgcaagaactggggaaagtttgcatcgggttcagtaacaatctggtttaagttgccttctggtccacttgctctctctgggatattaatgcggctgctgctcctttcattatcactccatgaaaactctgtatcttgagaatcctgaaagatagggtttctcttattccttttgggctgggtggaatgatggttgccctctttactgccatttcttcttcttttcctgcaggtcatgagagccgagcgccaccaaccccggaagaaaatacatatccgctgcgtttccgccctgagccccgagatcttggctgagaaagcaaagcgtgatgaccgtggaattccaccgcnctggactaatgacgtcggc

SEQ ID NO: 148709 - DNA, 806 bp, Homo sapiens
  misc_feature (1)...(806): n = a,t,c or g
ccagtccgagctctggtccccacggtcatcacgctttgctttctcagccaagatctcggggctcagggcggaaacgcagcggatatgtattttcttccggggttggtggcgctcggctctcatgacctgcaggtgacagtgttggccggtggcgcggccctgcttgcctcgtgccccgcccttcgtgcttgaaaaaaaatcccgcgaagccttctccgaaagaacatgctggttctttggttgaaaagaagaagaaatggcagtaaagagggcaaccatcattccacccagcccaaaaggaataagagaaaccctatctttcaggattctcaagatacagaggtagcaattttcatggagtgataatgaaaggagcagcagccgcattaatacccccagagagagcaagtggaccagaaggcaacttaaaccagattgttactgaacccgatgccaaactttcccccagttcttgccatgagggggtatgtaccatgcccaaggtctttactcccatatcaaccagaccttgaaggaggctcacttcaacagcctgcagcagtgagggcaagccnccaacatgatgaattaggacttccttattccaacctaaactgtgtttataaaagtaattgcatacacaccaaaaaaaaagtctattggtttttaagtctaaattttaagtaacaagttaatgggcagttgtttaattggggttttacttcactgctgtacttttaaaggggctgtgaataaatgtttatgaaattaaaaaaataaaataaaaaaataaaaggaaaaaaaaa

SEQ ID NO: 148710 - DNA, 1500 bp, Homo sapiens
  misc_feature (1)...(1500): n = a,t,c or g
attaaccttcaagtattctacacatcaaggaaaacatttagtggcatacaaatgtcacctaataagtgggtgaaacctgggcatgctggctcatgcctataattctagaaatttaggaggccaagtcagaacgatcatttgaggccaaaagtttgagactagccatgaaaatatatcaagaccctgtcttgtatagggtaatatatgtgcatacatacatacatataacaaaaaagtgtaaaaatattttctaatcacatatttcgtaggtgttaatttccaaaagatataaacttctaaaattcaacaacaacaaaatgttaataacttgatttagaatggtaaatgtnnnnnnnnnnnnnnnnnnnnnnnnnnnnnnnnnnnnactaggtatttaaaaggatactcgtccgagggcaggactatgggaggctgccctgtacggaaaataagaagaaatggcagtaaagagggcaaccatcattccacccagcccaaaaggaataagagaaaccctatctttcaggattctcaagatacagagttttcatggagtgataatgaaaggagcagcagccgcattaatatcccagagagagcaagtggaccagaaggcaacttaaaccagattgttactgnacccccgatgcaaactttccccagttcttgcatgagggattgtctaaacctgtttatgtcataaactggtttatgtcctttggtcctgaaataaaactcaatacttcacagcagggaaggaaccaagctgtttaaaactacttatctccgctatgaaggagaaagtatttttcaaggaatatcagaagaaagtaggaaagtgagaggaggttccagctggggcttcctgggggtcaagtagggggctcaggaaagctgtggaaacttcacttcattttccctggcatggcgggactttactttggtcctggatgaataatattgaagatatgtgcttaaaacattcctaacatcagaatttgcgcctgtgttttcttccccaagaaagctataaacagcgagaaatgttgttgtaagcttcccctgtgtcctctctccctgctctgctgtttcatgacctaggacaaactaaaagggaatgttaaaagccccacttttctgtgaccagcagaccttatctatggtcccaattccaattccttgtaaacacaatttgtaaaatcccgtgagatcctgtctcctttgccatcccccctgcaaggttataaggaagagaaaacttaagttacaattccagttttcctcaagatctgagacatgttaattgtctttgtttctccctctggtaacatcttcccaccacacatatttcctgccttagagagtttaaaaggtgataaaaaaatctaacactggcgtaccccgctcgggacccccttccacgctgtgaaagctttgtactgtcactctgcgttaataaagcctacagcttttttactctcaaaaaaaaaaaaaaaaaaa

SEQ ID NO: 148711 - DNA, 2089 bp, Homo sapiens
aatatttacatgtttttaatatgctttgtattaatattcaattttttaaatgaattgattacttaaaaacacattgttatattcatatgctggataattctcagtttgctgctgcttactctccattgattttggtgtcataaattccatgtttcatggaatttagaattttgcattttctattttggtttcaaaatcaaattggatacctttacataaaatgagtatatttagttcgttcaaagaaacttcaacaccagactgctgtagggggccaactgagagtttgttgaatagtaagaattttcccatgggtaaaacaaatcattttgggacattctcttgggtagcaagcactgataagaggagtacaaagattaatttaaaaagtttcactataaacaattgccagtcacaatctcattttagaagtaaaactttaaaaatttaatttaattctaaaatttaaaggggctaaagattctttgttaaatttgagtgggtgtaaaatgaaatttaacaactaattataaaaataataacttaataattacagctatttaatagcataacctgtaatagaaattggtttatgtttaaataagttctatgacttaaaggaagactaacattttcagatattaatgagggaaggttttacaactgagactcccgaagaagtttgtctttctaaatgttcatatggcagggccagattgaataattacagtttttattataccttgcaacgatgaaacgacatacatttttgataactctccttttgcttctccaagaatggcaaagatttacagttttatacaatgaatcctaatcatccaaaaggaaatttattacacagtaatgtgaatagaatctcatttatgaagcttattttttcattctcaaatgatataaacaatgattaaaactctccttctggatctaaacagcggacttttttttccctaaaattctcagtctcagcgttttgattcctgtgggtaaagaggaagacgtgaggtatcattcccccatactggatgagtaagatcatctattcagagtaactaagcaaaaattcttaaccagttcaactacggaaagtcttgaaatcttaaaatcacaattttggttttagtctgactgattattcagcaatccccacatttgcgaaactgtagagaggggcaagtagttaagacttcagcatcttctttactcttgattataatttaatatacttaaactttaaatatgaattgctttccctttttacacaagttataaaaataagaggccctgtttacacagtttgcatttttatgaaatttgcagtttgaaaaaaaagctttttaaaaagtggtaactaatgcttttctttgaatatgctgtaaccttagaatttttttctgaaatagtttctcaatttaacccactaaacatttgaagatagagtttttatttagcactagagtaaaacatactaagcattgaagaaaagtaagtttgtttctttttcttctggttccacttaagtttctttaatatgtggcaccccctttatggacagctatcaatattatatttaaattttatatattgacaaaatgcaatctacctctgtaagcattgtgccattcaacaatactactattaaatttacataccacagtttaaattacatccatttcaggaatggtaaaatgctaaaactcaagtgtctaactgccttactgggaatgagaggtacaatttaccaaatacaataattacattttaaaaccattaaccaatattacacctgggaggtaaatactgtaggactggtcatcatggtagtgtgtgagggaaatcacagatgaaagtcattgactttccacctgatatatcccaagtgcagatattggtttgttttcatcaaaccaaaattaaaatctgtttatcatacatcagttctccctcgtgccgaattcgcgcacgagaaacaattcaacttcattttaatgagaatatgtaagttcacaataaaatcccatgaccccgaactgctcggtccaactcgtgcgaaattccccaagccaatgtt

SEQ ID NO: 148712 - DNA, 2258 bp, Homo sapiens
  misc_feature (1)...(2258): n = a,t,c or g
gagacagggtcttgctctgttgcccaggctggagtgcagtgtcgcaatcatagctcactgcaccccaaactcctgggttcaagtgatcctcccacctcagcctcccaagtagctgggactacaggcacataccaccacacctggctaaaaaacaaaaatattttaagtagagatggagtcttcctgtgttgcccaggctggtctgaaattcctgggctcaagcaatcttcccgtgtcagcctcccaaaggtctgggattacaggcgtgagtcactatgcccagcctaaattcacattcttgaggggaagagacatatataaggctgcattatttttatttaaaggaaaaaaaaagaaaaaagaaaagcaatcatttcatgggcaactgaaagccactttctaatnatttcaactatttcagaagtttaaagtcaattccttaacacaaattctaacttcagcagaaatcaatggttactcatgggaggtaggaatagaaacaaaaaggttaaaaaatacaataaaaagaaaagacaaaaggtaaatggaaattctgatgatatgctgaattcaggaactctgctatcaaacctgtactttaccaatagttctatgacaagagatcctaatgccagaaaaagaggccaacacaggtttctccattaaagctgccacagccattattactatccccaaatgaaaatgactcaagtacatttatagcaatatctgaatgttattaatttcttatgaatttcattattctcttgtcataaataaggataatagagcatttgccccagaatgattttgatctttttttttccaagcaatacaatgtcctacagaatgccacagaaaatctaggaagtctagggctaaaaaaaagtgaagaataaagttacattagctaagaaaaataaatggaaaaacaattcacagtatttggtggatagaaggaaaccaaagttttaaaaatcatatataaatagaacctctaatacagcatttattcagaaaaagaaaaagcatttggtgaagagatcaatatactgcagtaatgagtcctcacccaaaacaaatgagggcaacatcattcacgtaagctagtcagcttcgtattatttcaaccaaacttggaaatgtctgccttcaaccaacagacctctagactagaagctttggatagccaagtcatttcagcattaaaacaaatcacagggagatagaagccaggggtctagaaccacaaaagaatagcgttatttggactaataagggataaccaaaatcctttgtggttaaagcatccaaagacctaatctgtaagtactatccatatggtagacactgtatggatactccccccagccattaactttttctggggcagccttcacatccctagatcggggctaccttaggaattcaaaacttggtgagaattcaggcaagaatttctacaaagggatgagattgtggatgaatgtggaattttaagaaaagaagggttaggaagggtgttttttttttaatagttagatgactttatttagaatatacattgtaatgattccctcccacagaaatcacttcaaaccgtaattctcaaatactgtgcaacattcaaccagctaaggatttcacgtgactttcaggaaataaatgacccacaattacccagtgaattccatgtagtgttaagaataattgcaggtaacttcttcatgtaattacccatgaaattgagtataatttagagaataaaatcaggaacatactcctaattgcttttttgatccattaagcatcattctcaatctctcactaaatgcttgggtgcctcaaactagtttttgtttataggctagattttaaaacactgttttattataactctgttaatgtatctctacatagcacttttaaggcagatgtgaagagatcaactggaataagctgccaaccatttatatacaatataaatattttgcccaagaatgcagttttacaagcttaagtcactgagctctaaacccatcaaacttttcctatgaataaacccagtgactttttaaatgtactctatccagttttttacttattagacatggacaggtctgttttcatataaatgaaaatcaggtctaaaagatggccttgataagagttaatactgtctgtcagcttcagcacagaggtaggcatttaagtctgaattccattacttgaataagagcctcgtgccgaattcttgg

SEQ ID NO: 148713 - DNA, 633 bp, Homo sapiens
gagacagtcttgctctgtcgctcaggctggagtgcagtggtgtgatctcagctcactgcaacctctgcttcctgggttcgaacaattctcctgccgcagcctcccgagtagctgggactacaggcgcgtgtcactaagactggctaatttttgaatttttagtagagacggggtttcaccatattggccaggctggtcttgaactcctgactgaggttatctgcctaccttggcctcccaaagtgcttggattacagatgtgagtcactgcgcctggccacctcttttcaaatattatttcccattcctaattatgatgactagtggtttcagaaaaaattgactcatggtgtaggcatcatttttcccctcatttaataaataatacttctgatatttaattaaatatgctgactcttagtttgaaatgtttatttttacaatgtcaatggaatatttatatactcctatcttactggtctcccttcttggcaatcagggacaaatgttgaattttgtcacatgttctgtgacataatctcctaattttttataatgtgatagatataatctcattttcacttttacttctaatacagtgaattcctcgtgccaagcttggcgtgatcttcg

SEQ ID NO: 148714 - DNA, 1420 bp, Homo sapiens
gttagtttggccgccctgtgaagcttcagcattcaaggtcctcttctgttaaaacccaactcgtagccgggcgtggtggctcactcctataatcccagcacttcgggaggccaaggcaggtgcatcacttgaggccaggagttcgagagcagcctggtccacatggcaaaaccccatctgtaccaaaaaatacaaaaaatttgccgctgacttctgtaaaataggtccattcattgcaggatctaaatgccacacctgaattcaaggggccttgtttaattaaccccatgtccactttgcctctgcaatgcctttttctttttagcaatatggctctgagcacaaagatttggttggaaatcatgttcgtgttttcagagtttacagcgtcaattgtactgaaaaccacttccagagtctaaagcagctcagatgttatctctgggggaattagtgttcccctcatttaggcaacctccataccacaaggtctctgtctgtagttactgggattatccagatacactatcaatgatacaaattcataggagtattaatgcatttctttaaacacaacttgattaagaagcaaatatgttaagcagttttctttttctgctgctaaattacagttagacacttcagtatcttctctttacatgtgtatataaattagtaagaacctgcatccaaagcaatgtaggggggggatgtatctatatatatttattctaactcagcacttcagaagcctttttgagttacaacaatattttagtttgcctcatctgtagaggtaaaatttctatattaccaagctccagaggaatatgatattttacaggcacaattttctggctgtagtccctggggcattcatttgctggcctccatgggatgctgttagaacaattgttagccggcaagagaagaaaggctaccaggacagcatttataattgtagaatgggagccttcttccctctcccctccactttcattttagcatgagataaaaaaatagattggaaatgattgttgcatctcacttcatgggaaagtaggggcaagaagttccctctggatcctttttcttgacaagcagtcaagagggaaggtccccaatacacatgtactctgtgagatacttgggtagtttctaagaatggtgctacataagcgttgctgttaggctgggatcctattaatgaacgtttgattagttcaggcctcccaatggcaaaggcagacaccgtggagatggaccatttactgactccccttctgtgtggcttcggtctccctggctaacaccacacctgtgcgtactgcgctcggcccactttgctgcagaaacgtagcaagcgtttccatgtcagggctacagctgagagcaaaaactgcaaaaaaaaaaaaaaaaa

SEQ ID NO: 148715 - DNA, 401 bp, Homo sapiens
  misc_feature (1)...(401): n = a,t,c or g
ttgtgcccttcccaggcatcatcctcctaccaccaacctggggccccatcttggaatgggggctccttggggccagcccagtgtggctcaccacactcttcnnnnnnnnnnnnnnnnnnnngaaaagggattttggttttgtgcccagggtggaaaaaatttgcctggaggaaattccctggaaccttcggcttcggggttaaaggaaattttcgggcttaaccttctgaataactgggaataacgggggggcccaaaaaccccgggtaatttttggatttggaaaaaagggggggtttaaccattgtggccagggtgggggtaaaacccgggccttnnnnnnnnnnnnnnnnnnnnnnnnnnnnnngggtgggaataacggggggaacctcccccccccg

SEQ ID NO: 148716 - DNA, 887 bp, Homo sapiens
  misc_feature (1)...(887): n = a,t,c or g
aaaagaaaaaattttcccctccccgggttttaaacacccgcccccgccccccttttaaaaaacccccctaaaaggaaaaagaatatttttttcccccccccggaaaaattggcccccccaaagaatttttaaaaaggcccccccccnnnnnnnnnnnnnnnnnnnnnnnnnnnnnnnnnnngcgcagatatgaagctttaattcaccataggcatttctccaaccattctgtacattaaactttcatgtcttcacacatatacatcttttataagacagttttcttagcaatatggtactctgtaccataccaacattcccatttaacctagttaaggggtgtattatataacatgaacccactgakkkaaatataaatacagaagttgaatacatagggttaggaaagtttaaattttaaaaaaatttaaggaaagggcttaaataccatggaaaggtttacatggtatttctttaattctagacacccgtacaacagtggacaaccaattacaataaaatcacaattgcttttagatggacagtactttcagatttctaatacccaattacttttcattttccacaatgtcaacttcatggcggcattttcatttctatagagcagacaagcttccagactggcagaccaagtttcttgtgtaataatactactatcttgatcatgaccacaggaaaccaattttatattccctgtactatagagatgagacattatttggtgtatatgaaactcttcagtggtggtgttcaagaatattcaaatagtagctgaaaatagggtttgctagagcagtccacatatttcattaaaagaaaaatgcccagtcaaaacatttagaaataaatatatagtacagcctttc

SEQ ID NO: 148717 - DNA, 283 bp, Homo sapiens
  misc_feature (1)...(283): n = a,t,c or g
cagccacctccgagagcctggatgtgatggcgtcacagaagagatagtcgctctggatcacccatggctagacgctgagcagacggccccgtggatggagacaaagagctcttctgaccatatccttcttaacacccgctggcatctcctttngcgcctccctccctaacctactgacccaccttttgattttagcgcacctgtgattgataggccttccaaagagtcccacgctggcatcaccctncccgaggacggagatgaggagtagtcagcgttgatg

SEQ ID NO: 148718 - DNA, 2142 bp, Homo sapiens
atgggtggagcaggctcgccgcaagtcatactagtgagccacacgccacagtcagcgtctgctgcttgtgaagaaatagcctaccaggtagctggcgtctctgggaacctggccccgggcaaccagccagagaaggagggccgggcgcaccagtgcctggagtgtgaccgcgccttctcatcggcggcggtgctcatgcaccacagcaaggaggtgcatggccgggagcgcatccacggctgccccgtgtgcaggaaggccttcaagcgcgccacgcacctcaaggagcacatgcagacacaccaggccggcccctctttgagctcccagaagccaagagtgtttaaatgtgacacttgtgagaaggcatttgccaaaccaagccagctggagcgccacagccgcatacacacaggggagcggccgttccattgcacgctttgtgagaaagccttcaaccagaagagtgcgctgcaggtgcacatgaagaagcacacgggggagcggccctacaagtgtgcctactgcgtcatgggcttcacgcagaagagcaacatgaagctgcacatgaagcgggcgcacagctatgctgtggccgtggccatgggtggtactgcccagtgcccgccaggtgccactgcctgcctgggcactgccatctgcccatcagggttaagagctcagcgtccctccaaccttagtgtaccagaagcagctaagcctaaaagtgggagaaacagaaaaattgaagcccccacgtgggcactgtctacctccaaggacccccagactgaggggctgcgaaatcctcagacctgtgttcagatcagaagcaaccctttctgtgcatttgcccaaggtttcagtctcatctctgagctaaggacccttaactgtttcgtgggactctgtgactcgcaatctggaaagcagcagcttggtttctacagcggccaaccagcaacagaagcctggcagaaatactccttggccgtgtgcattctgagaagtgaacaggaaattagtgcaacacggttagggttgaaaaacacaaatgtgaacaagctggatggtggttgtggagcctggaattttcttggaggcatgtctgagcataactcaccgccttcaggaagagcaatacttctgcctgttgtgtttactgaggtgttcccaggtccttggacaccggagcaaggctcgcatatctgccgaatgaacttagctcccacattccaagcctttctgcccaaaacagggtttcctattgaccctcaagaattgttgcaagggcccattgagagaacaatttggccgggaacagtgtacactttccgttcagccatcgtcacagcacgtgctgtgtgggtgcggccacgtatggatcgcagagccgacctcagctcagcgacgcagagtgcttctgctgaaaaatttggagggagggttagtgctggccactgtgcactgccgctgccagcacgcccggtcacagccagtgtctatgggcgactggcgcggctgcgaggctgtctagaggactcctacccttctgctctgagtgcgcaagtcttcctggactctccggctgtgggctgtggtttggaaacgaggttgttcatagaggctgctctggggccaccatgcagggcaacggtgacgtccagaggccacctgcttgacatctccatcaccaaatctccaggaagaccctgtttcctatctgtgtgcctccatggcagtgaccagcaaaagcgcaagggtgccgcagccacggcgaaaagaaagtccaagggtggaggggtgaacgtggagggacgtctgtgcacctggccccctgaagacccacccaaatcctggtctctggccttcggccccctgcaagagaagaccacggagctcaacctccacccgcggtgctgggcacgctgcttgagccactgggagctgccaccagggccccggggaagggcccaggccccggactggactggatctaagtcgtttagggaacagttgcttaccttcacgctgtggggtgttcaagagaagattagcaaacatcaagcaaatcaaggtaaggaggctcctgcctacacgggtttggaggactcggaccctggggggctgtgcgctgtgtag

SEQ ID NO: 148719 - DNA, 2231 bp, Homo sapiens
gaaaacagtgcagccacctccgagagcctggatgtgatggcgtcacagaagagaccctcccagaggcacggatccaagtacctggccacagcaagtaccatggaccatgccaggcatggcttcctcccaaggcacagagacacgggcatccttgactccatcgggcgcttctttggcggtgacaggggtgcgccaaagcggggctctggcaaggactcacaccacccggcaagaactgctcactatggctccctgccccagaagtcacacggccggacccaagatgaaaaccccgtagtccacttcttcaagaacattgtgacgcctcgcacaccacccccgtcgcagggaaaggggagaggactgtccctgagcagatttagctggggggccgaaggccagagaccaggatttggctacggaggcagagcgtccgactataaatcggctcacaagggattcaagggagtcgatgcccagggcacgctttccaaaatttttaagctgggaggaagagatagtcgctctggatcacccatggctagacgctgaaaacccacctggttccggaatcctgtcctcagcttcttaatataactgccttaaaactttaatcccacttgcccctgttacctaattagagcagatgacccctcccctaatgcctgcggagttgtgcacgtagtagggtcaggccacggcagcctaccggcaatttccggccaacagttaaatgagaacatgaaaacagaaaacggttaaaactgtccctttctgtgtgaagatcacgttccttcccccgcaatgtgcccccagacgcacgtgggtcttcagggggccaggtgcacagacgtccctccacgttcacccctccacccttggactttcttttcgccgtggctcggcacccttgcgcttttgctggtcactgccatggaggcacacagctgcagagacagagaggacgtgggcggcagagaggactgttgacatccaagcttcctttgtttttttttcctgtccttctctcacctcctaaagtagacttcatttttcctaacaggattagacagtcaaggagtggcttactacatgtgggagctttttggtatgtgacatgcgggctgggcagctgttagagtccaacgtggggcagcacagagagggggccacctccccaggccgtggctgcccacacaccccaattagctgaattcgcgtgtggcagagggaggaaaaggaggcaaacgtgggctgggcaatggcctcacataggaaacagggtcttcctggagatttggtgatggagatgtcaagcaggtggcctctggacgtcaccgttgccctgcatggtggccccagagcagcctctatgaacaacctcgtttccaaaccacagcccacagccggagagtccaggaagacttgcgcactcagagcagaagggtaggagtcctctagacagcctcgcagccgcgccagtcgcccatagacactggctgtgaccgggcgtgctggcagcggcagtgcacagtggccagcactaaccctccctgagaagataaccggctcattcacttccttccagaagacgcgtggtagcgagtaggcacaagcgtgcacctgctcccgaattactcaccgagacaacacgggctgagcagacggccccgtggatagagaccaaaagtctcttctgaccaatatcccttcttaaaacccgctgggcatctccctttcgcgccctcccctcccctaaacctactgaccccacccttttgaatttttagccgccaccctgtgaattgaataggcccttcccaaaagagtcccccacgctggcatcgcccctcccccgagggacggaggatgaggaagtaagtcagccgtgatgcccaaaacgccgtccttccttaatcccaattcctaattcctgaatgtttccgtgtgggcgttaatacccatgtctattaagattaataacgccctcgatgatgagagggttacaaagaacaaaactccagacacaaacctccaaatttttcgagcagaagcactctgcggtcgctgagctgaggtcggctctgcgattccatacgtgggccgcacccgacacagcacgtgctgtgaacgatgggcttgaacggaaagtgttacactgttcccggccaaattgttctctcaatgggcccttgcaacaattcttgagggtcaataggaaaccctgtttt

SEQ ID NO: 148720 - DNA, 451 bp, Homo sapiens
actgcatagggctcggcgtggtggctcatgcctgtggtcccggcactttgggaggtcgaggtgggagaatcacttgagcccgggagttcgggactagcctgggcaacatagcaagatctcacctctacaaaaaaagaaaaaattcagagtctcaaatgtcccttcatctccttactctcgacctgactccctacatctctgccgcctttgcctctcccgtggatgctgacactcaattgtctgcatgcacttttcaactgaaagagactccaatgccatccttctgatgaaatttttgctttggatactactgcagaaaaaatgctatcttgtattctggtccatggtggggaagaccctgtcgtagaacctggcaactcaagtggagggaggggccagaacattgttcttatgctatttacagtgagacaacagggttgaagcagctctc

SEQ ID NO: 148721 - DNA, 366 bp, Homo sapiens
tcgtgcaatattatgggcctgctacttaggtacaagacggctcatgaggataccggacccacatgtacatgatcaaccaaatcatatggttacaagctgtcttaaaaataatcactaataaaaccggcagagccttgaccattctgacccagcaagaaactcagatgagaaatgctatctatcaaaacagattggctcttgactacttgctagcagctgaaggagaagtctgtaggaaatttaaccttattaattgctgcctacacatagataatcaagggcaagtatttgaagacatagttagagatatgacaaaactggcacacgtgcccatgcaagtgtgacggatttgatcctggggccatg

SEQ ID NO: 148722 - DNA, 978 bp, Homo sapiens
tttaattagctgggcatgatagggtgcgcctatagtcccagctattcaggagactgaggagggaggattgcttgagttcaggaggtcgaggttgcagtgagccatgatcacaccaccacactccagtctggaagacaaagctaggccctgtctcaaaagaaaaaaagtacaatcaaatagtttaatgaacttcaaaagtaatttctgagatcctgtatatctcatacctgtgtttaaacacctgaaaaaaatagataaaaattcaaaacttcaaaaaatatgaaggaaatatcatttgtcttagaaacaacgaaccttcattaaaaactcagaagcctttattatattttaaattactaaaactcagcacatctcggaaattctgaatacttgttgactgaatttctggatttacagatttgatatgtagagatggtggacatcaccacacgtatagaaaggaaaacaatttttgttaagttatacatcttcatcactattatacttcaaagtagtgaccttgggaaccttattccaaaaatggaaaacatctttggagcctgtgtaaaagccacacaaaagtcagttctatcattttggttaatcttaagtattttaccccattacatattatttacctcaagtacctacttatttttcaagacatagagttaagttactgtattacagttcttgtctacaagcattagaaacattagtaactgactctggctatctttaaaaagcaactttactggaaggctgttgaaactcacaacactgaaagatgactggaaaatcagactggaaaaaaccagtgccaacagaccagagaaagcagctcaaagaaccatgccaaagaacagtctgatccacacgctgacatgactctggaaaggtctccaaaaaaccctacagctcgttattctctcaagatccaaagccctgaaagaaaacatatgattggacaagtctggc

SEQ ID NO: 148723 - DNA, 365 bp, Homo sapiens
caaagtatttttcaaatttgtattttcttcaaattcactgtctatatgtttaaaactttcttgaaattccaaacagttttcctctgtggaagatgctggtttctctgaaaaggtctgatcattttcttcactctctactttaagacgtttcaccacattgtaagaggaattaaatgaaaatcttgttttccttaatctttctctaagtgttgcactcataggttgttttcgggaactatttgtatagggagatgatggattcgcagaggcctgaggagtgctaggtaaaaccacagctgagcctgacggactttccatcttgaaagtgaaatcttggtttttctctccctccgccattcccagcg

SEQ ID NO: 148724 - DNA, 612 bp, Homo sapiens
ggcggagagaaaaaccaagatttcactttcaagatggaaagtccgtcagactcagctgtggttttacctagcactcctcaggcctcctgcctcagcctcccgagtaactgagattacaggcacccgccaccatgcccggctaatttttgcatttttagtagagactgggtttccacccacgttggcccaggctggtctcgaactcctgaccctcaggtgatccaccgcctaggcctccccaaaaccattaggggctcagaggaaggtatccccgatgaatatcaattaaagggcactttaatatataaattataaactaaagttctaaaaggaaaattacgtattcttggatagatttgtcaaaacgacatttaagtcatgtttaaaaagtcatttggggcaagttctggaaactaagttttaatacatttgttttttatgacaaaaagttttattttaaaatgttaaaaattgtccaatctggtgaatgtctaaccctaaagtttaaaaatttctgcctcctaagtttatgtaccttgtttccatccatttaccacatatttccatctgataatctagcaggtaattaaacttatatgtcccaaaaccaaa

SEQ ID NO: 148725 - DNA, 475 bp, Homo sapiens
  misc_feature (1)...(475): n = a,t,c or g
ggtaagactttcaagcagaaacaaaaacaggagcagaagaaacaaaaataggagctaaaatagaaggctatggggaagggacccctggctgcaggtgaaattaagaaatctnnnnnnnnnnnnnnnnnnnnnnnnnnnnnnnnnnnnnnnnnnnnnnnnnnnnnnnnnnnnnnnnnnnnnnnnnnnnnnnnnnnnnnnnnnnnnnnnnnnnnnnnnnnnnnnnnnnnnnnnnnnnnnnnnnnnnnnnnnnnnnnnnnnnnnnnnnnnnnnnnnnnnnnnnnnnnnnnnnnnnnnnnnnnnnnnnnnnnnnnnnnnnnnnnnnnnnnnnnnnnnnnnnnnnnnnnnnnnnnnnnnnnnnnnnnnnnnnnnnnnnnnnnnnnnnnnnnnnnnnnnnnnnnnnnnnnnnnnnnnnnnnntctggcaacaagtaagctgtgccttgtgcctgangagatggtgacccttgatttcattn

SEQ ID NO: 148726 - DNA, 634 bp, Homo sapiens
cgtcgcagtcgactaaaaacctcccaagtcttgcgagagatatggacattcagatccaggaagctcaaagatccccaaaaaggtcacctccaaggcacattatatttgaactgacaaaagtcaaagacaaagagaaaaatccaaaagtaccagtagaaaagcatcaagtcatatataagggaatcttcattagaataacagcagaaacctcacaggccaggaaaaaatgggatgatatatccaaatttctgaaagaaaagaaaaaatatcggtcaaaaatactatgcacagcaaaccaatccatcagaaattaggtagaaatagccagccacagtggctcatgcctataatccatgattttgacagcatgacctgctaattctaccagagactccagtgggaacactcagcaaaataggctttgactcccacagtttccatccttttgcagataaataaggaagtaagtacacctttggctaaaactctggcactctgggcagttgatcctggcacagtccaagggtcagacccatggacctgtgaagtgggcaaccgtttccgggaacggtccatagcacttgctggggtgagcaggtcctgccttacctcatgcggaattgcagctagcagc

SEQ ID NO: 148727 - DNA, 8062 bp, Homo sapiens
ctgctctccctgagcccgctcccgagcgctgctttcccgccgcgggtgggcttcgcagcctcaggccagccgcggcccttggcccgctgcagccccggccctccaccttccccgtgcaggggcggcccggccagtgtcgctcatcccgggacgctcccttctcccacccaggactgccccgcggagctggcttggacacccaactttgccacctcgagggtcgtctctgctgggcgcgaacctgcccacccaccggttggccgcgcgctcggggaccgtgctcgtggcccccaagccggtgcccccattctggaactcagcgagtagggggcggctctggggaagtggcagggggcggctgcagctgctgcctccacttccctagccaggtgctgaagaggatcctcggagccgctctggcccccaggcgctggatgactggcaccagcgctcctcgcacctgtgttggtgtgtgagacttgggctggagtgcccacgtggctgtggagtcagtgtgattcatgattgaggaaacgcgtcctccatcctctctctccttggcactttccacacatgaggagaagaagagcttctgtttagaagacacgtgcccagagtcagaggccccttgcccaccatgaagggaacctgtgttatagcatggctgttctcaagcctggggctgtggagactcgcccacccagaggcccagggtacgactcagtgccagagaaccgagcatccagtcatctcctataaagaaattggcccctggttacgggagttcagagcgaagaatgctgcggatttctcgcagttaacatttgacccaggacagaaagaacttgttgtaggagcaagaaactacctcttcaggttacagcttgaggatctgtctcttatccaggctgtggaatgggagtgtgatgaagctaccaaaaaggcctgttacagcaaaggcaaatcaaaggaggaatgtcagaactacatccgggtgcttctggtgggtggcgaccggttattcacctgtgggaccaatgcattcacgcctgtctgcaccaaccgctcgttgagcaacctggctgagatccatgatcagatcagtggcatggcccgctgtccctacagtccccagcacaattccacagcgctcctcacagctggtggggagctctatgctgctacagccatggattttccaggacgtgatcctgccatttaccgaagcctaggcattttacctcctctccgcacggcgcagtacaactccaaatggctcaatgagccaaactttgtgtcatcttatgacatcggaaattttacctacttctttttccgagaaaatgcagtagagcatgactgtgggaaaacagtgttctccagagctgcccgggtgtgcaagaacgatattggtgggcgcttcctgctggaagacacctggaccacattcatgaaggctcgcctgaactgctcccgtcctggggaagtccccttttactacaacgaattgcagagtactttcttcctgcctgagctggatttgatctatggcatctttaccaccaatgtgaacagcattgcggcctcagctgtgtgcgtcttcaacctgagcgccatcgcgcaggccttctctgggcccttcaagtaccaagaaaactcgcgctcggcctggctaccgtatcccaacccaaacccccacttccagtgtggcaccgtggaccagggcctgtacgtgaacctgaccgagagaaatctgcaggatgctcagaagttcattctggtgcatgaggtggtacagccagtgaccacagtgccctccttcatggaggacaatagccgcttttcccacgtggcagtcgacgtggtgcagggcagagaagcgctcgtccacatcatctatttggccacagattacggaaccattaagaaagtgcgggtacccctgaatcagacctcaagcagctgtttgctggaagagattgagctcttccctgagaggcggagggagcccatcaggagcctgcagatcctgcacagccagagtgtcctgttcgtggggctgcgggagcacgtggtcaagatccccctgaagaggtgccagttctaccgcacacgcagcacctgcattggggcccaggacccttactgtggctgggatgtggtaatgaagaaatgcacaagcctggaggagagcctgagcatgacgcagtgggaacagagcatctctgcgtgtccgaccaggaatctcaccgtggatgggcactttggtgtgtggtctccgtggacgccttgcacgcacacagatggcagcgccgtgggatcctgcctctgtcgaacccgctcctgcgacagcccggccccgcagtgtggtggctggcagtgcgagggccctggcatggagatcgccaactgttccaggaacggaggctggactccctggacctcgtggtctccctgcagcactacctgtgggatcggcttccaggtgcggcagcgctcctgcagcaaccccactcccaggcacgggggccgggtgtgcgtgggacagaaccgcgaggaaagatactgcaatgaacatttgctatgtcccccacacatgttctggacaggctggggtccttgggaacggtgcacagcccaatgcgggggtggcattcaagctcgccgcaggatctgtgagaatgggcctgactgtgcaggctgcaatgtggagtaccagtcttgcaacaccaacccgtgtcctgagctgaagaagaccacgccctggacaccctggacacctgtcaacatctctgacaacggcgaccactatgagcaacgattccgatacacatgcaaagcccgcctggctgatccgaatttgctggaagtgggaagacagagaatcgaaatgcggtactgttctagcgacggcaccagtggctgctccacagatgggctttctggggatttcctgcgtgctgggagatactctgcccacacggtcaacggggcttggtcagcctggacgtcgtggtcacagtgcagccgtgactgcagcaggggcattcggaaccggaagcgtgtttgcaacaaccccgaacccaagtatgggggaatgccttgccttggcccatctctggaataccaggaatgcaacactttgccctgcccagtggatggcgtgtggtcttgctggtccccctggacaaaatgttcagcaacatgcggcggtggacactatatgaggacccgctcttgctccaatccagccccggcctatggaggggacatctgcctggggctgcacacagaagaggcactctgcaacacgcagccctgcccagagagctggtcggagtggtcggactggtctgagtgtgaagcctctggcgtccaagtccgcgcccgccagtgcatcctcctgttccccatgggcagccagtgctccgggaacaccacggagagccggccgtgtgtgtttgactctaatttcatcccagaagtatctgtggcaagatccagtagcgtagaagagaaaaggtgtggagagttcaacatgttccacatgatcgccgtggggctgagcagctccatcctcggctgcctcctcaccctgctcgtctatacttactgccagcggtaccagcagcaatcccacgatgcgactgtcatccaccccgtctcacctgccccccttaataccagcataaccaaccacatcaacaaactggacaagtacgactcggtggaggccatcaaggcatttaacaaaaacaacttgatcctagaggaaagaaacaaatacttcaacccacatctcactgggaagacctattctaatgcctactttacagatctcaataattatgatgagtactaacagctttcatgttttgggcttcttgtaaatccccagttcctcaaggcctgtgccccatgactgcccatgtttctgaggcttcagagtcgaagtttggatacatttcaagtgcatttcaagccaccagagtgtcccattggtgccaaaaatacacgtctttaaaagcaacaaaaattgaaataagacatcgtgaaaatcttgaccattgttgattgagccagggtggtgaagtttttaattggtgttcatcctatttttctgacaagtccattggtttgttttttgagcattattttataaatgtgccacccacattggaaggagtctttctttagaactttggagtgtaaatcttcatgatgttgtaaattcaagaaaataggcactttctctgaaagacctgctccttccacaagaagtgcataggtccataatatttcataaaatgaagaaaaagaatgtggccaaacaattattcaccatggattgcccaactttccaaatctggataaagctgtgggattcttggaagcagcttgagtgttttcatcttgcctgggaagcccaggaattccacctggtccacaccggcagaagttacagtagactgtgaggcaccccaccttgctcctgatgcagtttctgtgccattgctggtgctggtggaggcagcggagcagaggctcaggcacaatgaagcgtggatgtgttctgcaggttgctgcaaaactcaccttattctgacttttggatttcatggcattccaggaagctccttgccatgctgttggcctggaagtccacctgtctggtccatagtgacgtcctgaagagccagtctgtaaaataaccaaccacttacttagcgtttggatagactccatgccttctctctccctgcaaagaaaaatcttgaacatttatgatgtcaattagtgaaagtattgaaaatactaaattataactaaaagcaactttttatgttattgaaaatattgaaagaactgatattaatgataatcattttatttttcatctctctgatatacccaatgtgtggcaatcagcccctaccatgagcattaatgccatgtaaagctggctttctggagtctgccaggtccacacgaagtgctacccccagtttctgctgttacttgctgcctccaggccaggggagcaggagatgctcagctctggtgccttttcttttatttcagtgctgccttcccacccacccagtccattcaccctcacctctccctgcatggaggcaacagcatttccaagatgtaccttgggaagtcaggatagctggaagtaagggtttttggggatccctgtggtctcttcactgatcatcgataagcatttaagagtgtgctaacaccattcacagaggtccctggaaaaaaatatataattttctcacaaacaaccaatacataacctatggcagttggttgaataattattgaaaaaaagaacacgactgaaaaagttcatctgatgcctctgagcatgtgataaagtcctgggtagacatggaaacgtgttcttacaaatgaaccttcggatctatgaaagaaaatatagtagggggactaaggaacatagaattttattagcatatgtgattttacccttatctttgtttctaatttaaagaaacaatttcagaaagtgttagaagaattctatgtttaataatgaatattgttgagttcaaaatattctcatatacccagatttacagagatgacacagtattgaaatggcaggtgggctctgtaagttatttggggattaatgaaatccagggtcttggcaggggggactcaatgtggccctctcactcatccctcatatgtcaagagtccttcctgtcttatatgcacatgctccaaggtccatactcagtagggggaaatctagccggatggttccccaattgttcctcggctggattttcatcatcagaaatttccaactcatctcatcagttttcttgtaagaaaaaaacatttttcactttgtagcacaattttagttatttttgagtcttcttccctaatagtttgtaagcttaaagggacaattttaattttcccctggttaaagagggattctaatatttccaagaatgttttccactggaattgatgggaaatggtttctaaatggcatcgaagctggtctttaatgatcttttgcaatgacttgggaaaaacaccctccctcactacaggatcttcatgttgttaataatataaacaaacctttgaaattagcattgcaaaagaatcccatttttgtttcgtaccacactgttcaaaggaaaattgtttatctctcttcctttctctctctctcttatttgacagaatagcaagtgtttagataatttcagatatattcctaagtattttaccagctgtggaataagttgtgtttgtccatcactgtgtagctaccgttcacatgttctggctctgtactccacgcttatcgcgtgaaccctcacatgttggactttcacagtgtgatctctcacctgtcttggaaactccttcataaagccgctcttccttaggcctgggctgtttggaagtcctggtgaaactttgcggttcacattttaaattcctgaatgaccttttcattctctctttctttatctttgtttttgtccttcattccctccttttgttcttccttcctgcctttcacgtcacctacttatccgactatttcctccatttgcttcttttctatttgccatcacctgtgacccgagtggaacaaaaaccaacacatagttttaagctacacctttctgcacctgatgtaaaatgacattaatccactatttaacttctaaaattatttctgaatacagttgcagataggctggttttcatgaggaagctcgcttggctttagtcttacatttaaattctttgaaagtggctcccagtgctattcagggtcctttcttgaggccagactcatcaccatctactattgattttacagtgcactgacagtttacaggaaggagaagaacagaatttctgcacactacacaacatgtgggcttcctgtagctccagggacatgtagctttggtgaaactggggttttgtaacctctgaatgatatggacttagtgaattctaaggaactcagggggcacgtggtcaggctccaccgcacagaagagccacagtctccagactcatggcgttccctccagaactccccattcccctctgagcatatttctatgctgctgcttcttgtgacttacatgaggcatctcagcttcttcatgtttgtagggatggttccctaagcctgttcaagtaggctctcactagagttaccattcatatttgagaagaaaagaacatttattaaatgtatgtgtggggctgaggttctaaaggaattgaaaagagacgataaacattgaatgagggtgagggcatccctgctggggagaaacctctgtcccctaggaagagtccgttcatgtcatgtggtttgggatgaaccaggggtctgcccccatcgggtcacaggtgatgccaaatagaaaagaagcaaatggaggaaatagtcggataagtaggtgacgtgaaaggcaggacctggtcaccccagcaagtgctatggacagttcccggaaacggttgcccacttcacaggtccatgggtctgacccttggactctgccaggatcaactgcccagagtgccagagttttagccaaaggtgtacttacttcccttatttatctgcaaaaggatggaaactgtgggagtaaaagcctattttgctgaagtgttcccactggagtctctggtagaattagccaggtcatgctgtcaaaatcatggacaaaggctgggtgcagtggctcatgcctataatcccagcacttttgggaggccaaggtgggcggatcacctgagctcaggagtttgagaccagcctgggcaacatggggaaactccatctctacaaaatatactaaaatattagccagccatcgtggtgcgcgcctgtggtcccagtttcttgggaggctgaggcgggagtatcatttgagccaggaggttgaggttgcagtgagctgagatcacatcactgcactccatcctgggtgacagagagagaccctgtctcaaaaaaaaa

SEQ ID NO: 148728 - DNA, 311 bp, Homo sapiens
  misc_feature (1)...(311): n = a,t,c or g
aaaacgtgaacagaccagtatcaagtaacgagatcaaaatcataataaaaagtctcccggtaaagaaaagcccatgactcaatggcttcaatgctgaatttaccaaacatgtaaagaacttattnnnnnnnnnnnnnnnnnnnnnnnnnnnnnnnnnnnnnnnnnnnnnnnnnnnnnnnnnnnnnnnnnnnnnnnnnnnnnnnnnnnnnnnnnnnnnnnnnnnnnnnnnnnnnnnnnnnnnnnnnnnnnnnnnnnnnnnnnnnnnnnnnnnnnnnnnnnnnnnnnnnnnnnnnnnnnnnnnnnnnntcaag

SEQ ID NO: 148729 - DNA, 362 bp, Homo sapiens
gggttcaagcaactctcctgactcagcctcccaaacagctgggatcacaggcacacaaccaccacacccagagagatggggtttcaccatgttggccaggctggtcctgaactcccgatctcaggtgatccacccgccccggcctcccaaagtgctgggattacaggcgtcagccaccgcacccggccaagaatttaacttacatctttaaccaaaaagctaagaaactgtgatttaatttttgctgttcttcattcttgaggcaagagtttcaatcgaagttgaacgtaattacttttccctccaaaacctattcaggctctaaaaattgctgtcctctggtttgaatcccttaagaaaag

SEQ ID NO: 148730 - DNA, 403 bp, Homo sapiens
caactctaccacctcagcctacaaagcagccgggaccacagatgtgagccaccacgcccagccaattttttgattatctgtagagatgaggtctatgttgcccaggctggtctcaaactcccgagctcaagcgatcctcccgcctcagcctccaaaagtgctgggagtacaggtgtgagtcactgcacccaggcaaaattctactttttttagaatctcatgggagagatgagggggaaaaataataagcatttgacatcttttaaataagtctttgagctctctttataattttctcttgagtatttgctcttcctttgtaaaactatggaaacacaaaatacatatgatgctcacaatgctctagcattcaaaaattccagagtagttttaatcattatct

SEQ ID NO: 148731 - DNA, 305 bp, Homo sapiens
caactgaggaaatacacggggtcctctcatggaaccttgtgcctgacaattaccccccatattaccatccgcctccaccctcttacatttatggggcacaacatttgctgcgattgtttgtgaaacttccagaaatccttggaaagatgaccttttctgataagaatctgaaggctttattgaaacactttgatctctttttgaagcatttagcagaataccacgatgacttcttcccagagtaagcttatgtcgctgcctgtgaagcacattactgcactcataacccccggtctatttaatat

SEQ ID NO: 148732 - DNA, 732 bp, Homo sapiens
cctcccaaagtgctgggattacagatgtgagccactgcgcccagccttctttttatatttttaaatgtgtcttccccaaatataaatggttggtaagcatgccaaatatattcaataacccccctcctttatttttttttgttgaagtgaggctctccctatgttgcctaagctggtcttgaactcctggtctcaagcaatcctcctacctcagcctcctgctgtgttcatctacaaattgataagagtgaaagtcataatcctacaggaggattaccctatttatttcacaaaccctatttctaccggattttcatacaaggaatacaggcatgtgtttcacctcattaatttattttttcacttagttttgatgatattcacatatattatcaagtgtgcaaacattaaattcttgtgtacaaaactcaaatggtcttccaaataattccccattcttttttcttataaactttcacagctttacccttgacagactttactcaaggaaatctaagttggtcatatgtggctctttcactgattgctatttacttcattgtccagtagcttatgtatgaaaatataattataaaatgtaagggtcctacttccagtgaaactgaagggacttaggcccacttttatcctttactgagagcttatctctacttgataaaatttctactgtattcttggattaactccggtcctgtgattaaaaaaaaaatg

SEQ ID NO: 148733 - DNA, 501 bp, Homo sapiens
tttttttttttttaaagagatggggtctcactatgttgcctaggctgcagtgaagtggctgttcacaggtgcaataatcacactctaaagcctcaaactcctggactcaaataatactcctgccttatcagaatgtaagctcatcataactcaagaagcatctgtacttaagattaaaaaggtagaaataaaaaaaacaaaaaataggaactaagcagtcttaagaaaaaaaaaaaaatgggcaggctgccaatccaggaccaaggggtaaggccgtgtcaatgcacctagagaacggaatatcaagccacagagaactattttcaagtctcagaactgaatggaatttgtcctgcagacttacaaacctgctttaaaccccttttctccttccaatttatctcttttggaatgggaatgcttcttcacctgtcccaccattgcatctcagaaacagataacttgttttctatgtatcacagctttagaaatagcctcgtg

SEQ ID NO: 148734 - DNA, 490 bp, Homo sapiens
  misc_feature (1)...(490): n = a,t,c or g
caccatggtgctgtctcctgccgacaagaccaacgtcaaggccgcctggggatgttcctgtccttccccaccaccaagacctacttcccgcacttcgacctgagccacggctctgcccaggttaagggccacggcaagaaggtggccgacgcgctgaccaacgccgtggcgcacgtggacgacatgcccaacgcgctgtccgccctgagcgacctgcacgcgcacaagcttcgggtggacccggtcaacttcaagctcctaagccactgcctgctggtgaccctggccgcccacctccccgccgagttcacccctgcggtgcacgcctncctggacaagttcctggcttctgtgagcaccgtgctgacctccaaataccgttaagctggagcctcggtagccgttcctcctgcccgctgggcctnccaacgggccctnctncccttcttgcaccggcccttcctggctttgaataaagtctgagtgggcg

SEQ ID NO: 148735 - DNA, 624 bp, Homo sapiens
  misc_feature (1)...(624): n = a,t,c or g
cggcaagaaggaggccgacgcgctgaccaacgccgtggcgcacgtggacgacatgcccaacgcgctgtccgccctgagcgacctgcacgcgcacaagcttcgggtggacccggtcaacttcaagctcctaagccactgcctgctggtgaccctggccgcccacctccccgccgagttcacccctgcggtgcacgcctccctggacaagttcctggcttctgtgagcaccgtgctgacctccaaataccggtaagctggagcctcggtagccgttcctcctgcccgctgggcctcccaacgggccctcctcccctccttgcaccggcccttcctggtctttgaataaaggctgaaagggcggcccacctgaccaaaaaaagaggaaaaaaagctcgactataaacaannnnnnnnnncccctaaaaaaaacccctgggggggcccccacaacccccggcattaaaagaacaaatgccctgttggttgggggattgataaccaatgggcccagggatttatgggcagacccctttttgtggggggagcacatgttgcggcacccccccgagaaagacaagatgcgggaaagaaaaaaaaacctctcgacagaatattggtgaaaac

SEQ ID NO: 148736 - DNA, 699 bp, Homo sapiens
  misc_feature (1)...(699): n = a,t,c or g
actcttctggtcccacaagactcagagagaaccacccatggttgctgtctcctgccgacaagaccaccgtcaagggcccgcctggggtaaggtcggcgcgcacgctgggcaagtatggtgcggaggccctggagaaggatgttcctgtccttccccccccaccaagacctacttcccggcacttgaacctgagccacgggctctgcccaggtttaagggccacgggcaaaaagtgtgcccgacgcgctgaccaacgccggtggcgcacgtggacgacaatgcccaacgcgnctgttcggccttgaccgacttgcaggcgcacaagcttcgggtggacccggtcaacttcaagctcctaagccactgcctgctggtgaccctggccgcccaccttcccgccgagttcacccctgcggtgcacgcctccctggacaagttcctggcttctgttatgcaccgtgctgacctccaaataccgttaagctggagcctcggtagccgttcctcctggcccgctgggcgctcccaacgggcccttcttccctccttgcaccggcccttcctggtctttgaataaagtctgagtgggcggcaaaaaaaaactgaacatctccttcccagccactggctgccagaaactcattgaagtggacgatgaacgcaaacttcgtactttttattgaaagcggttgggcccag

SEQ ID NO: 148737 - DNA, 103 bp, Homo sapiens
gtagatgggtgggtggatgggtgggtagatgggtagatggacagatgagtaggtagatggattgacggctgggtggatggatagatgcatgagtggatggatg

SEQ ID NO: 148738 - DNA, 453 bp, Homo sapiens
gcgtcgactttttttttttttagtatagatagggtcttgctctgttgtccaggctggactcgaactcctgggttcatatgatcctcctgctttggcctcccaaagtgctgggattacaggagtgagccaccatgcctggccacattcttttttataaaaaaaaaatacaaagaagagcatttcattttaatactctgtcaaatagtaaatatgatactaattctttatcagcctacccaataactacgaatgaaatctatatacattatccacccactgaacgaaaaaagagacatccataaaatttaaataggtgttgctcaacatgtctgtcacacttgagctactttaccttgtatgaaagaccaactcaaaaatcctcaaagacaacctttattttatttgattaattcaccatgggtaaaatgtataagtaacttattaaaaaggggc

SEQ ID NO: 148739 - DNA, 415 bp, Homo sapiens
  misc_feature (1)...(415): n = a,t,c or g
ggcgtgagccaccactcccggccgctaattttgtattttttgtagagatgaggtctcaccacgtccgccaggccggtcccgaacccccgagctcaagcgatctgcccgcctcagcctcccaaagtgccgggattacaggtgtgcaccgncacgcctggccataatacacttatttgtaagttcaatttagtcaaagaaattcaaaataaaatcatgagatttctgtgtgtgtctaactggcatagcttttttcttttcatgaaaagtcctagtgtttagaaaggatttggaggctggacatagtggatcactcctataatcctagcactttgggagncaaggcaggaggattgcttgagtccaggagtttgagatcagcctgggcagcatagcgagaccttgtctctattattta

SEQ ID NO: 148740 - DNA, 1131 bp, Homo sapiens
tagtccgtgtgctggaattctagaggacgaccgcgcggactatcaggggacgcggaaaacctctgaatactcttctgtgaccccataagaagcctgccatacgtaggaaggccctatcgcgttcatttcttggccatagaaggtgccgattcaactgacgttcaatgaaaggaacagggctagagggttccaggtcccatacgggacatatgatagaggactaccaggaactcattgaagacatagttcgagatggcaggctctatgcatctgagaaccatcaggaaatacttaaggataagaaacttatcaaggctctgtttgatgtcctggcccatccccagaactatttcaagtacacagcccaggagtcccgagagatgtttccaagatcgttcatccgattgctacgtttccaaagttgtccaggtttttgagaccttacaaatgactcagcccacgtgccactcaatacaaatgttctgctatagggttggtgggacagagctgtcttccttctgcatgtcagcacagtcgggtatatgctgcctcccgtatcagtgactcattagagttcaattcaccatagataatacagatattttggtaaattgaacttggtttttctttcccagcatcgtggatgtagactgagaatggcttttgagtggcatcagcttctcactgctgtggggcggatgtcttggataagaatcacgggctgggctgagctgggacttttggtcagccttaggtgagactcacctgtccttctggggtcttactcctcctcaaggagtctgtagtggaaaggaggccacagaataagctgcttattctgaaacttcagcttcctctagcccggccctctctaagggagccccttctgcactcgttgtgcaggctctgaccaggcaggacaggcaagaggggagggaaggagacccctgcaggctccctccacccaccttgaagacctggggaggactcagtttctcccacaagccttctccagcctgtgtgatacaagtttgatcccaggaacttgagttctaagcagtgctcgtgaaaaaaaaaaagcagaaagaattagaaataaataaaaactaagcacttctggagacataaaaa

SEQ ID NO: 148741 - DNA, 583 bp, Homo sapiens
ttttgaattgttacagcagctttattcacattagccccaaaccagaaataatcgaaatatccatcaagtggtaaactgataaacaagttttggtacatctataaaatggaataaacaagtatcagcaataaacaagtatcaactacttacagcatgcaagcatgggtgaatctcaaaagcattacgctaagctaaagacacaaaggggtatatattatatgatctcatttgtatgacattctggagaagacagaactgtaacactagaaatcagatgagcagttgtgaagacccggggttggcaggtagaaaattgactacaaagaggtgggaggaattttggggtgacagaaatgtcctattacttgattgtggcactggttacatggctgtataaatttgccaaaattctggatgctttaaaaacgcgaacttcaccgtaggttaattatacctcaataaacttgactttgaaaggtagctctttcaatctaaagcatgaaccaggtataattaatcattctctcctccacataccaggtctaaggcccaccctcaattctgcagcttaagtggaagtaga

SEQ ID NO: 148742 - DNA, 309 bp, Homo sapiens
  misc_feature (1)...(309): n = a,t,c or g
nacagacagggtaataatagcctaggttcccccaaagtactgtacaagaagataagttatattcacctagcgggaaaaaaagtgggatcatctagctccagagaacttgtgaattctgtggtaaagtctcttcgttttaggcatttgacgaagcaattgctaaattgtattcggtgaatgaatagtcttataaaggcagcactgtcatcatgcagttagttagggtcaatctcgcagtaagtgctacgtccacagggtttatagtctctttcgtattcacctacccaataattccctgttatcttcaag

SEQ ID NO: 148743 - DNA, 474 bp, Homo sapiens
agtttcaagattttcagtatataaaatctgtcctttcctacctggacatgtcccattaaaaagtggaagatcttaaataatttctttacagatgttttatttaagcaggtagcacaatctactaatgttgtttgatctgtgtttgttatactggttgtaattaatttttttaattcatgaactagcggaaaatttattaaattaactgttaaccacattcaccttgtaaatgactgtataaaacttgttgacaatgcactgactttagaaagatgttaatgtgcataaatagagtgtaaataaaatagtgttgatgtactgaaatatgaactgtataaaaagtattggtaattgtatatggggtgtacctatttatctgtaactgttatccaaacaaattaaatactgtggatgcctctatgtgctgtttttcctcatacaagtaaacacagaatgtcaaatcaaaaaaaaaaa

SEQ ID NO: 148744 - DNA, 1017 bp, Homo sapiens
tttttgagacaggttcttgctctgttacccaggctggagtgcactggcgagatcacagctcactgcagccttgatctcttgggttcaagcagccctccaacctcagcctcccaagtagctgggactacaggtgcacaccaccacacctggctaatctgtgcattttttgtaaagacagggtgacatcatattgcccaggctggcatccagtttaattttctactgaggaatctgaggtcccaacaggagagaaatgtaaaggataagagtgattgcctctgttttttttctgattactaggtataatattcatgttggaaagcagagaaaaatgttaaaaggcagggaatccttttatattcttaattatattcttaatacaaaggcaaccactgtcaaaatattggcagattttcttctgtcctttttcctaaatagtatttttttcaatattgaaggtattatttccagtatatgcaactttatgtcttgtttttaaaaaaatgttcacatatcataagcatgttcccataaatgttagcaaaaactcctggtaatcattttcaacaactgcattatagtttatccaatgaatacaccatgctttatttaaccattcctctaatgtgagacaaatataagttgttaataactttttactctccctaaaaaatgcctatggatgatatttgcctgccaaatttatggagtaattacagagtattctcccctcagataaattcctaaaagggaaatcactggaataaaaaatataaagcatatggacaataatcccaatttaaaaagatgttaatgtatataaatagagtgtaaataaaatagtgttgatgtactgaaatatgaactgtatcaaaagtattggtaattgtatatggggtgtacctgtttggctgttaactattaggcaaacgaattaaatactgtggatgcctctatgtgctgtttttcctcatacaagtaaacacagaaagtcaaattcttcagcctccctctctg

SEQ ID NO: 148745 - DNA, 609 bp, Homo sapiens
ctagaagggaattggaaaagggcagaatttctagagaagaaatggaaacactttcagttttcagaagttatgaaccgggtgaaccaaactgtagaatttatgtaaagaatttagctaaacatgttcaagaaaaggaccttaaatatatttttggaagatatgttgacttttcatcagaaacacagcggatcatgtttgatatacgtttgatgaaagaaggtcgtatgaaaggacaagctttcattggacttcctaatgaaaaagcagcagcaaaagccttaaaggaagctaatggatatgtgctttttggaaaacccatggtggttcagtttgctcgatctgctagaccaaaacaagatcctaaggaaggaaaaagaaagtgttaaaaattaataaaggtttttttgaatcccgtgtccttcaagtgttttctaactttgagaggaagaaattgaccacctggactatggaactgtgcgtaacagctttgaaagtgtatttaaaaattaaatctatatgcctttaaatcagtgaattggaaacatattacatgtattttaatgattttcctcaaatataataaattgtttcctttcccataaaaaaaaa

SEQ ID NO: 148746 - DNA, 657 bp, Homo sapiens
  misc_feature (1)...(657): n = a,t,c or g
atacgtttgatgaaagaaggtcgtatgaaaggacaagctttcattggacttcctaatgaaaaagcagcagcaaaagccttaaaggaagctaatggatatgtgctttttggaaaacccatggtggttcagtttgctcgatctgctagaccaaaacaagatcctaaggaaggataaagaaaaaaaagaacttggttatttaacaaggtaggaaaatgggaattggcacccaaacccatggggctggacttttccctttaaattcatgccctcaaagtatatgtacccacccaccttcccagcacaatccctagcaaacattgtaaatgccttggcaagcgtgccctaagttcctatgtacaggtcccttcatcttatgaataaaatgaatttgcccacaccttttggaccaattactgcgcgacctccccagtatgaagactatatgccattgcatgcaccttntttccacccacatctcctcagccacctgaggaacctcctttgccagacggaggatgaggaattatctagtgaagaatcagaatatgaaagcactgatgatgaggaccgacagagaatgaacaaattaatggaactagcaaatcttcagcccaaaagacctaaaacaataaagcagcgccatgtaagaaaaaaaaa

SEQ ID NO: 148747 - DNA, 475 bp, Homo sapiens
ctgactgacattgactgtgtctgtggaaaatgggagctcttgttgtggagagcatagtaaattttcagagaacttgaagccaaaaggatttaaaaccgctgctcttgatccgcctgccttggcctcccaaagtgatgggattacagatgtgagcccccgtgcctagccaaggatgagatttttaaagtatgtttcagttctgtgtcatggttggaagacagagtaggaaggatatggaaaaggtcatggggaaacaaaggtgattcatggctctgtgaatttgaggtgaatggttccttattgtttaggccccttgtgaagaatatgagtcagttattgccagccttggaatttacttttttagcttacaatggaccttttgaactggaaaaccccttgtttgcattccctttaaaatgtcaaaactaatttttataataaatgtttattttcccattgaaaaaaaaaaaaaaaa

SEQ ID NO: 148748 - DNA, 701 bp, Homo sapiens
ctccgcctcccgggttcaagccattctcctgcctcagtctcctgagtagctgggattgcgggtgcgtgccaccatgcctggcctaatttttgtgtttttagtagagaccagggtttcacccatgttggtcgggctggtctcggggctcctgaccctcttgatcccgccctgccctggccctcccccaaagtgatgggatttaccagatgtgaagcccacccgtgccctagcccaaggatgagatttttaaagtatgtttcagttcctgtgtccatggttggaagaccagagtaggaaggatatggaaaagggtcatggggaagcagaggtgattccatggctctgtgaatttgaggtgaatggttcccttattgtctaggccacttgtgaagaatatgaagtcagttattgccagccttggaatttacttctctagcttacaatggaccttttgaactggaaaacaccttgtctgcattcactttaaaatgtaagcagaggtgattcatggctctgtgaatttgaggtgaatggttccttattgtctaggccacttgtgaagaatatgagtcagttattgccagccttggaatttacttctctagcttacaatggaccttttgaactggaaaacaccttgtctgcattcactttaaaatgtcaaaactaatttttataataaatgtttattttcacattga

SEQ ID NO: 148749 - DNA, 374 bp, Homo sapiens
caccgcttcccagaaagtccgtagaaccaggagggggaacgaagtataagacagagcagaaaaaacgacaagagcggagagacagagggagcaaatagcggaaacaacaaaaggcggccacatcggaagagcagcagagaaagtgagcaaagacccaggaggacggtgggacgaagaggagcccagacggagaagaggacccggaaaaaaaaattcataggaacagagaaggaacccgtaagaagggacaagacccgaggaatggcgtcaacaacaaaaatcgtgaaaaagaacaaaattagaggactcacacttcttaatctcaaaaattcctaccaagtaacattcctcgtgccgctcgtgccgctcgtgcc

SEQ ID NO: 148750 - DNA, 420 bp, Homo sapiens
ggcacgagagactcagtataaggagggctgaagctgatccccatcttcctgatggacttctggaaggagccccttggcccagcccttgcccatgaactccagtaccctggccgcgattgaagctctgacatctggattcgaactgcagcctcattacacacactgcctattgtgggccctcacttacttggtgacctggcttcattctgcactctcttgacacccgacccttgtcagcatgtaccacgcagccgagctgatactgtggagatgggttgagtcgtatacatgtacatgccactggtgcttgatgctcactgtgcatgtcttgcatgagctcttggagcaccaagaattatactcgtaaccctgccttctgataacactccttggtgataaagcaaagttgttttttatgga

SEQ ID NO: 148751 - DNA, 254 bp, Homo sapiens
ctagtctggtccagtgggtctcaaacttgactgcaacaaatggcccagagatctttttgaagtgtagagtctgactcaacaggtgtgggtggagctgagaggccagcaagatcccaggtggggccgaggctgctcatcctcctaccacattttgagtagcaaggagctaccaagagcagccgacggggtttcattctcgtctactggaagcaaccttaatagacaactgaaaaacaaaacaaaacaactgagat

SEQ ID NO: 148752 - DNA, 1451 bp, Homo sapiens
ttttttttttgagtcagggtctcgctctgtcacccaggctggagtgcagtgacacagtctcggctcactgcaacctctgcctcccaggttcaagtgattctcctgcctcagcctcccgagtagctgggattacacgcatgtgccaacacgcccagctaatttttgtatttttagtggagacggggtttcatcatgttggccaggctggtctcgaactcccaacctcaggtgatctgcccaccttgggatttgcctcccaaagtgttgggattataggcgtgacacgttacggcgcagcctaacaaattctaaaagagctgtaacactgacagtctcttcatggtcccagttatttccaaaagggcacgttctgctctggttccttctggtggggttagcaacaggggcagatcccactagaatacagctctcaaaatctactgcacatgggacttaacccaaagtgcttttacaaaaatccctgatcccgggccacattccagatccacttaacatttggaacctcaggttccaaactcagggcatcagcattttaaaaacattcctcaggtgactcccaacatgcagctgatttgccagccagccctctgcagtctgggatcaaaggttcttcaacatgaggtccctggaaccaggcgggtgcttttgcttaaggaactggggaacttgtgggaaaggcagcgtctcagaccccaccccagatctactgaatcagaaactctgggggtggggccagcactttgtttcaacaagccctccaggagattcttaaggcactagtctggtccagtgggtctcaaacttgacttgcaacaaatggcccagagatctttttgaagtgtagagtctgactcagcaggtgtgggtggagctgagaggccagcaagatcccaggtggggccgaggctgctcatcctcctaccacattttgagtagcaaggagctaccaagagcagccgacggggtttcattctcgtctactggaagcaaccttaatagacaactgaaaaacaaaacaaaacaactgagatacctgtttctgccagaaaacccaggccattcactggtcagctgttccaaaaccagagttaagctactgcagctgttcccgcgtgcctgcctgcattccagtaaataatcccacgtggcaagtcagctcacctggttactgccaaagcatgttcccagctggtgtgactcagaggcacaccagaatttctttattataatttggcgatagggtcttgctttgccacgcaggctggagtgccgtggtccgatcacagttcactacagccttgaactcctgggctcaagtgatcttcctgccttagactcccaagtagctgagattattaggcacacgccaccacaacccagcttaatttaaaaatattttttgtagggaccaggtcttcaatatggttgcc

SEQ ID NO: 148753 - DNA, 399 bp, Homo sapiens
ggcacgaggggttccgtaaaggaaggggcaaagtacacctctcacagggacatggggctcagcacctttgacagggatgcagaccaatgtaaagagaactgtgctaacgtctatggatgaggctgcaggtataataactgccaagcagccaatctcaatggaatctactaccctgggggctcctatgacccaaggaataacagtgcttatgagaccgataatggagtggtctgggtttcctttacaggggcacattattccctcagggctgctcgcatgaaaatcaggccccttgtgacccaataagctgaagacatgggaatgggagcactctgtcttctttgctatagaaatggagagaaaagactataggctttgcagttgagattctctacaacg

SEQ ID NO: 148754 - DNA, 372 bp, Homo sapiens
gacatgctggactgggtgcccatccacttcatcacccagtcattcaacaggaaggattcctgccagctcccaggggctttggttatagaagtgaagtggactaaatacggatccctgctgaatccacaggccaaaatagtcaatgccaactcaggaaatgaaaggacgattcttatttccactgcggttacttttgtggatgtgtctgcacctgcagaggcaggcttcagagctccaccagccatcaatgccaggctgccctttaacttcttcttcccgtttgtttgacaatgctcagatgcatcagttccttaatatacacgtgaaatttgaaaactgtacattcggtgagattaaattttatatacaact

SEQ ID NO: 148755 - DNA, 580 bp, Homo sapiens
gcgtcgacctttttttttttttttttttgctagttgtatataaaatttaatctcaccgaatgtacagttatcaaatttcacgtgtatattaaggaactgatgcatctgagcattgtcaaacaaacgggaagaagaagttaaagggcagcctggcattgatggctggtggagctctgaagcctgcctctgcaggtggagaacacatccacaaaagtaaccgcagtgggaaataagaatcgtcctttcatttcctgagttgggcctcagggaaagggagggatgaaattaggatttggcagttacatttgactattttggcctggtggattcagcagggatccgtattttagtccacttcacttctataaccaaagcccctggggagctgggcaggaatcctttcctgttgaatgactgggtgatgaagtggatgggcacccagtccagcatgtcctggggcctgggaatttccaaaaggggccacgtaatctgggaagccctggccccacagcaggctcttcaccttctgtggctacgagctgacacgggagagctccagtcagtcttggtgaaggaaaaa

SEQ ID NO: 148756 - DNA, 1751 bp, Homo sapiens
  misc_feature (1)...(1751): n = a,t,c or g
agcggccgcccttttttgttttttttccagggaaaagagagagtttattttataccagtagttgttttattttatacagtagttgtacagtaattgaggaaaaatgttgtcaggtggcagaaaacaatggagccacctagaagctggctgatgcagctggggcacacagaggaggggcctgggtacccccttttgggggaaactgagacgaagctatttagaacagcttgaaaataagagacttttctagaatggggtggcagctaaagtagcttctttttctttctttcagaatgctcagatgcatcagttccttaatatacacgtgaaatttgaaaactgtacattcggtgagattaaattttatatacaactagcaaattgtcccagctttgttgcctcattttcaattaaaggcctaaagtgttccaacatgagaaaatgtgaatacatttgatacagtgtggggtgggagtggatgggcagctcttgggtgggtactgggaccttcccacaagggctgtgtccacccaggaatccatgctgggcaggagggagggcagagggtatcaaaccaaacctctcaccaaggcgggcccgggaggggcaggctgtttcctctcgtgacaggcacagggcccatggaggacagtgtcttctttttgagcgggagctggtccgggtctagttcactttcaccaagaagtccatgctgtcgcaatagtttgttaagtctttcaatttcttgttcctattgcaaaagcagacaaacacttctcagagcagctgaactcaaggtgatgaatcttggcggccaattgtacattcatctgtattaaccttaagagttgccgttcaaaacgtatcttaactgagatgataatcccattgatgatccgggccacccgccacagccggagcagaatcagcaggcccagagcctcaaactggtgctcctggaacaggaggacaatgtcgaggatgaatgagaccaccaccacgacggcatccaggatctcaaacttgtggtgaaagaactccaggcggaagacaaataatttaaagatgatctccatcataaaaaagaccaagatggtgatgctcatgtagtggaataccatggcagcatagttattcttgtcgggctggatgatcttcaggtccaggatgagctcagcaagcaccaggagggcatccagaaccaccaagcagatgatgatgacctgaaacctgtgggagctgaacagtttcctcaacatgcccctgaagtcaaggggggccctgggtgcggggccaggggcaggggcaacgtcaggggctgcagctctgccttcctcgcctgagactggtgtgggtggtggctgctcctcctcctcctcctccttttcattctcccatttcttgtagttgatgttccaggcatggtagtcgtctcccacgaccgtgaagtgccttaagaacttgctcatcctctcagcgggagccaccttggccctgcgggtgactgccttttcgtcccaggtggccatgtccctgttgcctctggatctggttgtgagttctggctgtgctctcctttggctgtgtgacccaaggcaaggggcttggcctttctgcgtcttggtttcttcacctccctcaccccgggtgccttccgccccgcagggtgggcctgtcctgggcctcccgccggacgcgtgggtcgncgcggtntctagngncgatcttacgcaggnatcttatnactctct

SEQ ID NO: 148757 - DNA, 2356 bp, Homo sapiens
tttttttttctctaatcatcgtttttaaatggctttataagctaaagtgcataggtaagaccaataaagtaaatgcctacataggaaagggacacttaaaaaggacctgagatacctaaatgtctgttctaaggaacactggaatggagggaatgcagatgcaggcatcaggcctggggtctggcttctggcctgggtttggagcctgcagaagctgctggcatgctagctctacccagtgtaacagctccaagaggtagtgttgggatgaaaggatcacacttgggataggtgctgctggtacccaaaatgtgaattttaggcttccattcaaggggcccaaggggtaaccaggcagttgccaccaaaccttgtcagcagggtaaagaaactttcttaccatccccaaagtgccaggtttacaggaaagggggtcactcccttaatgacgacctggggcctgctggcataaggcccatcttatgcagccatgtgggctgtcccatcttcccaactctaagtgactatgtaactgtgtcagggtgagttggtgcagtcctttggtcttatcacgtgcctccatcttcctggaggcagggtgcccaaggaaggcaagggaaggggttcttgtgctccttttaagggataagcaagttcataaacaactattgggcctcgtgtttattatgagagttagtcatgcaaattagggcctggcaattagaatcggtcgtgcatcaatgagctcatactctgttcctggggaacaatgtagaataaacatctgaccaagtaaagacccagagataccactaggtggccctaggtggaagccccaaacatgttccagggagtctgtccactaatttgcaggagagaaggggtgagaatttgttaactttgctctcagttctggagatataagtgcttactctagcgcaggggtaaatctagaaacaaatgtgggtgagccctaaaagtggatccttaagtaggtgcttaaactttaaaaaatgattttttttttttttgagacagagttcttgctcctgtcgcccagactggagtgcaatggcatgatctcagctcactgcaacctccgcctcctgggtttaagcgattcttctgcctcagcctcccaagtagctgggattacaggcgcccgccataacgcccagctaatttttgttaatttttagtagagacggggtttcgccatgttggtcaggctggtctcggactcctgacctcaggtgatccgcctgcctcggcctcccaaagttctcggattacaggtgtgagccaccgtgcccggactatgggcctctccagggcgctctaccggatacctgccctgaaggtttggctcctaatcaatgtggaattaaaaaagcaaatgatggctcatgtagatgttacatgccttattaataaatctccttccctcaccaggccaatgggcaagagactcagtgctgagactgggaagggacagaaggagaaacagaaacagacaggagctggctgcgccgtgctcccttcacgcggctttccacccaaagcgcatcacggccgccagcccctgacgctagccccttcgccacctcccagaaccttctctccctctcccccacacacgcacactcacactcacacatgcagtcccatctgcccccgccagagccgctccttccagggccccaggatgccagatccggatccgggagatgcaacttgcggcgccggcccaggaggctcggcacctgctcgagccgccgggccgcgctcagccccgcgccgagccaaagcccgagtccaagcccgagtccaagcccgagcccaagcccgctgggtccgcgccctcaccttgctcgccgcgcacccccgcctgcagcccgtcccggctcggatcgcccgccgcgccgcgcagagctcctcctcgcctccgccggcgactcccgcgaagtccccacccccagaggcgtcgggcgcggcggcgccgcccgccctcggcctggagcgctttcctggggcgtcacccaaccacctgacccggtcgacctgtgcgctccgccacgtcggcgcgggcggcgcagcgctaggagggccgggcgcaccccgactcccgcaccggctggaagtcggccgggaggagggaagaggacggcgaggagatggactcggccatggaggctgcgtggagcctgcttgggaaccgggatggcgtttgccttccaccatcaagttatttataaaatcaaaagtttcctccgaggccttggagatgccctttctctgcatctgcgaacacctactttcctatacttacagtaggaaacacaggaacgttatttag

SEQ ID NO: 148758 - DNA, 478 bp, Homo sapiens
accctaaacagtggatttgagttccagcgtttattcttttttccttttttcagatcaccatctaagttacatctttagctcaggtccatccttctcaagatctccttcttagccccccagcccctggtgctgtctgtggtcaggtgaccttactcaggagcagatatctccttggccgccatggagcctcatccatccacacgtgcctgtagcattccagagctcactgcccttctagatgtgccttcccgcttggcttccagcggcttgtgctcactctgtctgccaggtatgagaagaacacgtaagaccgccaccacactcaggaaaggatttctacagtgttctataaaagccaaaagagagagtgggtttgggaagagtgagggtggttggggagaggggaccgatgtgcctcattgtttagtggtgattacaaatatgcttttctggataaagtttggttgtttgctcttgg

SEQ ID NO: 148759 - DNA, 2164 bp, Homo sapiens
tttttttttttttttttttccaagagcaaacaaccaaactttacccagaaaagcatatttgtaatcaccactaaacaatgaggcacaatcggtccccatctccccaaccaccctcactcttcccaaacccactctctcttttggcttttatagaacactgtagaaatcctttcctgagtctgcaaatggcccccagactgggatgggagctgcccagagtagtcttgggctggactgagtcctgggtgcccagagagggagacctatgcaactgcctccagtatccaaaagttctggggggcaggtcgggtgggccacccctatgggcacagggccctttgaggggaggggtgagtgtgggtgggcggtctttacgtgttcttcttcatacctgggcagacagagtgaggcacaagcccgctgggaagccaagcggggaagggcacattttaggaaggggcagtgagctctggaatgctacaggccacgttttggatggatgaggctccatggcggcccaaggaagatatctgctccctgaattaaggtcacctgacccacagacaagcaccaggggctggggggcttaagaaggagatcttgaagaaggatggacctgagctaaagatgtaacttagatggtgatctgaaaaaaggaaaaaagaataaacgctggaactcaaatcccactgtttaagggtacaggagtacacagctaagttcccaggtatccagaatcttgtgtccaaatcatagcacaaggagaacaggaattctcttgagttaaggcaaaatcaatcttcacccatctgggctcttccattgcatggtttggaaaggaaggggctgggcagagatcattcctctccccatctccccctactgcccagtgaaagactctgaaaagcttctgccagccaaggcccagaatggtgttgcccaagccccagggcagcgggccctgagagcggtcggtgtgaccagctctgggaatctcccatggcctcagcaacatggaaaccttacaggccccagcccagcaggtcaccccagcgccagagagtggttcttcctcctttggttaaagggaagaccccacccctgttcaagctgctccaagaatcagtgcccggggatctcttgccaggtgaactttccctttaaccctgggaaaaacccatctgaaataactttgccttcaatttctcccaacaatgtaaaggaatgttcaaattcccccagttcaggtctctggctagaggcagcaatcctacttccctcactggggtgggtcccctccctctgcctagagaattccctggggaagaaagagaaggcgccccccaaatcttcaaacagaacacagccaatgggttgggcccttcggcatgaatgagagccgggacagcacagggatgctgggaatcttaaggtgggaatactgctccaggcccaggagcagttaatacagcaaactaaattatttctgtaacagcgggacttctcagtctttgataagctaatgagcatctccaagaaagggagacagcaccgttgacaaacatatttggccttgaaaccctcttttaggagaggcggctcctgagccaggggtcctgactcacccacccttttaatgcaaacagcgctggactgcaagtatgggttccaatcttactctggctgttcccaagagcaggctctgggtccccatctgtaagaagggggtggggttcaccttaacattccaccatggtcgtggaactcctaatgcaaacagatatgggggagggtgggagatgaggggggcggcagaagcctgtggaggaaggctggggaaaagacttgtgtcacggagaggccaggacagttagtgtgtgtttggcactggcctgcaaaaaccttaaggacaaaggcggagtaggtagaggcaagaggagactccacaagtgtaagggtacaacccaccggcttctcctatcggtccccacctcggcggatgggccccaccccaagacaaccgagcacagagagaccggctgggaggagcttcgcaggatgccagcacaatccccagctaaaaccaaactcgtcgctcatcctgggaccagccaaggcctgtcctcagctccgcccgcggacgaaacgtcgacccgggaattgc

SEQ ID NO: 148760 - DNA, 353 bp, Homo sapiens
ggcacgagtgaggttatcaataagctcctagtccagacgccatgattcattgcacagagtgacattctgcatctctgaccctcactaccggaaatggaccaacccagacgggaccacctccaagatctttggtttcgtggccaagaaaccggcaagcccctgggagaatgtgtgtcacctctttgcaaagcttgacccatattaacctgctggcgccattgtcaccttcatcaccaacgttcctaccgctccctagactatgaatgaaagccacaaactcaaagcccacatcaacactgccctcctcccaacatcccacaagcctcacatccccatgccctgtacccaagaca

SEQ ID NO: 148761 - DNA, 661 bp, Homo sapiens
tgtgacacagtcttgctctgccacccaggctggagtgcagtggcgcaatctcagctcaccacaacctctgcctcccagatcaagcgattctcctgcctcaacctcccgagtagccagaataccaggcgcgcgtcaccacacccagctaattttttttatttttagtagagatgaggttttactatgttggtcaggctggtctcaaactcctgccctcaagtgatccacccgcctctgcctcccaaagtgctgggattacaggcgtgagtcaccgcccccggcctgttgtttcactttaatatgccctttgatgcacaagagttcattttgatgaagtccaattattttatccattattccttttgccacatgctgtagctccactcattttgatttctgaaatggggttgagatgggaagaagttcccttgatactggaaaaattctggggggacagattcaaagctaaatttgaacttttgccaactacaactaagagactagttgtaactggggataatacaagcatttctagtacaatgcaatatacacattcctaaataaccctttagttctgcaaaatcacaaattaaaaataatcacccttataacccaagttaggtttgaggtagttactcataagcaactttgtcctcgtgcc

SEQ ID NO: 148762 - DNA, 473 bp, Homo sapiens
  misc_feature (1)...(473): n = a,t,c or g
ggcacgagttgatacagacaataatgttagatactgaacaaataattttttcttcggtaggaggtcctatattgctgttgtgtatccttagtttctttctttcttttttttttaaatggggtgtcactctgtcacccagtgtggagtgaagtggcatgatctcagctcactgcaacctccccatctcacgttcaagtggttctcccgcctcagcctcctgagtggctgggattacaggtgcctggcacagcaccaggctagttgttgtatttttagtagagatgggatttcaccattttgaccatgctggtatcaaactcctgacctcaggtgatgcacctgcctgcagcctcccaaagtactgtgaattataggtgtggggccaccttcaccgggccttgatttnagtttctttnaatggaaggatttattggagatggatntgggctgttgttaaaattagtcnttttatt

SEQ ID NO: 148763 - DNA, 364 bp, Homo sapiens
ggcacgaggatataaatatgttccctgccttcaacagttgatgtaatcgaatttcttgactattacgtaaaagtgtctttaaagttataaagcattataaaaatctgtgatagtgataaacacacacacatacacacatatggatatgtatatattttttccccaccagggaagcctgtctgaggctatattattgagtaggaaatatggctaccagttactgcagttttgtcggaaaccatctttgtactgatatctatgcctccactgtacttgagccatgaagttcctagagactgcttttatagctctcaattgaatgacatcagcatgtctcagtagacataccttctatatgctcaac

SEQ ID NO: 148764 - DNA, 751 bp, Homo sapiens
acagtctcgctctcttgctctgtcgcccaggctggagtgcagtggcacaatcttggctcactgcaacctctgcctccagggttcaagtgattctcgtgcctcagcctcccaagtagctgggaccacaggtgcccaccaccatgcctggctaatttttgtatttttttgtagagatggggttttgccaggttttgccatgttggtgaggctggtctcgaactcctgacctcaagtgatctgcacacgtctgactcccaaagtgctgggattataggcacaagccaccatgcctggcctcatttattagttctaacgtgtgtgtgtgcacacacgctctttaggcatttctacttataagatcctatctgcaaatagagataattttacttctttcttttcaattttgatgccttttatttccttttcttgcctaagtgtgccggttagaacttctagcactgtgttgcatagaagtaatgaatgcagacatccttgtcttgttcctaattttagaggaaaagctttcagttttcaccattgagtgtgttgtggctttttcatatatgaattttattatgttgaggtagttttctctattcttagtttgctgaatgtttttaatcatgaaagcgtgttgaattttgtcagtgctttttctccgttaactgaaaaaatcatacatttttggaaatggaaatgcagccacatataatgggccagctgggctctcctggtgcccacttgcccagcc

SEQ ID NO: 148765 - DNA, 2115 bp, Homo sapiens
tttttttttttttttacaatttcatatatttttatttacactttaacaacttgctgggaatttaaacaacttgctgggaacatcctttgtgaggcactgtagcctttttttatttgaaactacttaaactccaagacaggctcactaactctttttcaagtgcaacaacaaatgtgttagctgaaaatagctaatttaatgattatttgtgacacagacacgattatgtgagccaagagagcctccccacctctgtctcccctgtggaggaggaggtctttgtgtgcttttgtgtgatggttccactgaattcattacaatagaaatggacatttgatattcataacgatccaacatctgagcaatcttctttcgagacacaccatgtttattcctcttttctaattcttcaggatcaaatttccaccaagtttcaggttcatgaaactctactctgtatccttttcctatggccacttccacatatggcttcatttcccaagcttgtatattagtgttatctattataactggagatcttccctgatcgatagcttgttttgctctgttctggttccagtcatgggcatcaccaagttgattaacattatacctgtacccatcttgatggtgaaaatagtcatcagtgctgaacacaatgccatcacgattctgaccaagcagaattcgagacaatgttgttttcccagaaccaggcagacctcttaaaagaataagtaacttctgcaatttatttaacttttcctcttgaaactgctggttcacaaacctgtctgttccattatgcttgtccatacaatgatctttccagcatctttctctgacttcacagaaaccattactcacatatcgatcttgcatactgcagccatttccagagggatgaacactactcctattctcactacagtcagtatattcattgttctgatcaaaagtcatgcaattccagttaacatgacaattatttacataatatccattttgtatctgagagtcatcttgggcttggaaaatatttgatggtggatttggtggaccactgaatctctgaatgtttaaatgatagttcaaactgggaagagggggaccatagggcactataaaaggatatactgactgccattcaggcctgaaagaagtaaatgaagtgtcacaaaatgtaggtattacttgtccattacagggatatttgtctggctcattccccaagttctgctgataatcacaatgtgatggcatagctttattactaagatctttcttttcttcatcaggttttaagagaccattattatgaccctcataaaatggaacaaattgttcctgagaaggttcagattctttacaactgttctcaaaaccatctttttccttttcaagctcttcaatttctttgtaaaactggaataattcattgtcaatctctgatttttcagagttaaatttctgtttctctttttgtcctcctctgtcatttataccatttagaacatgtgcctcattcctcccttcattacgtttctttttctcagggggtttgtaaatgggtcctataaatgctttacttgtgctatatatctcatcgtctgcggatactaatggaggacgtgcttcctgtaaaacctgtgaatcaatggattcaataacatctggtctattaccaggcatctcatcatgcaaaggtctatgcaaatctgtagttttgattttgttctcctgcaaataactatgtcctctgacatcaatgatggtcacagggacccaatcatttccagttttctcttggattctgtgaaaatcagcattactatgattgtgaaaaacatacgactctgtggttgacttcaattttttacagcgtggctcactcgttacttcttctctaggtcccaagaatttaccttcaatttcaccataagacatcttactctacccctacgcattgacctttacctcccaataaaaccttcttttaggaagacacgaacctctgtgaaggtgaaagaaaagcggagacagcactaaagccgaggtctggagggactaaaagcccacctctcagaatcgcggtaacaaacctcacctccccgc

SEQ ID NO: 148766 - DNA, 2403 bp, Homo sapiens
cagtttcaagaggaaaagttaaataaattgcagaagttacttattcttttaagaggtctgcctggttytgggaaaacaacattgtctcggtaagtaaaggataccaactgaatacttggtaattcattatttaaaaattataaatgatatttgtcgccggctgcagtgactcatgcrtgtaatcccaacactttgggaggccagggtggaccagtcacttgagctcaggagtttgagaccagcctgggcaacatagtgagaccctgtctctaaaaaatgaaataaaaatgttagaactataatgatacttgtaatcactgacaagtgcttttatgtttctagtagaagaaaatctttaatttgctacacttgagaatagcatctgacagtgtaactatttaaaaatcttttctgatagaagaaaggagaattggcatatgtttatatttagattctgctaagggctttaaaaatagataacactacgtataattatggcagtgatgaaagcaaatgctacttgagaactgtcctggcctacccttttgagtcagctgttcaaaggaaaagttggactcagtgttagaaaatttggagtttttcaagttcagttggaggtgagaaaaagagaaaatttgggtatttgactcagttatttccctttttcaccttgggcaagttttgctctctgttaatggaataaatgatacttactttttctggaattgggaatcaaatgagatgacccaaggaaaggaattttgaatgtgttgagcactgtgccatgttcataccattgattggcagaaggaacccttttttgatttcttaaaattcaggagtttgaagtgagtaatatctgaattggtgttagaactgttggtggtttattgtattacaagatatttcaaattcctttttttgtttacacttttaaactattgatgcacttgaatatgtttatgcagttgtgaaaaaatagtgtaaagaaagcagtacaaattatcttgagtttatataagatgattcaagatttgtgccggacaaggagaaaaagaaaatttgttgatatctttgggtgaggatggagaggtccaagaaaccattttgcaaatgttttatattactaacaagacaatctaaacctaaataaacatctttttcagagaaaagacactagagaaagatttaatttgtgatatttcaagctagattataaactgtgatctttgtgaatgaattaattcattccagaattaaattttggtctttgtattttgattccttttactttagtgaggattttgtagagaagatgaaatttcacctctataataatagaagttaggagtgaggtctcacaaacatgggctgccttctagatttgggatataccatcagggacaataaataactgaaatttggaaactggataaaagagtctgctagttaggaccacttgactaagagtgggtatagaagaaacctaaggaagaaaagttagatttgagacaacatattggagtatgttgaaattaaaggtgaataaagtagtgggaaattccatagaatttaaaggagacattgtagtgggagatggtagaggtgattagatataatatgtatatttatttgaaaaatagatatataagaatgaaagttgtatgtagtaccaacaagtaccattccgtattatgattcacaatttacagagtattttcatatataaaaatcttgtgcaatgggttgttttttcattttatagaaggagcagaggctaaaggaagttgaggttaagtgatttggaagttacaaaaactagtaagagctcaaactagcaataaaattattagtatgtttttccccttgcccttcactgtaatgccttaatggttgtgtagtccttataccgtgactccctgacttcaaggatcctggtctgtaccctctttaggtcaacacgttttgagtgaactggtgttggttatttggaattagatataaagtccatatattctttggtgaggaatggcttcatataggagttcacatttcaaaacaagcttttgacaaaattaataggagtgaaaattggtaggttcagagtttgagctgattgggagggaccaaatttaaaagactgggctggggcatgatggctcacacctgaaaacccagcactttggggaggccaaggcagggcagattggttggaggcccaggaattcaagaccagcctagataacctgggtatcccagctactttgggaggctgagctgcccgaggctacagtgagcccttgatcgtgccattgctttctagcctgggtgacagattgagaccctgtctcaaaaaaaaaaaaaaaaaaaaaaaaaaaaaaagggcggccgctctagagtatc

SEQ ID NO: 148767 - DNA, 1387 bp, Homo sapiens
cgattctcctgcctcagcctcctgagtagctgagactacaggcgcgtgccaccacgcccagctatttttgtatttttagtagagacgaggtttcactatgttggccaggatggtcttgatttcttgacctcgtgttctgcccgcctctacctcccaaagtgccgggattacaggcgtgagctgctgtgcccggccccagcatcacttttatagctttctgtgcctcttcctctgggccttggtgtatgaagccacttgcctttctctgttgggaagcgagcagaatcagattgctactcatgatgcagtccgggcagggcatactgtcacctttgcctgtggacacagttgtcaggataggggagaagccctttaggtccgtcttcttgacacagccctcctacctgggttacgctggtgctttcgcttgggtttaagacaaccaaggacactttgaggaattatgctgtcctcaagaatgttcttgatggaaaagaacagattcacttttttggacacaatggcccattagccatctttgggcaagtgttttctgatcaaaaggttcccccatgcctgcctctaaggaaaagtaaaactttttttcagaattaaatcctcaaatggattactgagtagtctttggcaccattcccatcaagccctaatcagactgaatggtcacgctcagtgcaaaaagctgttttgctgttaggatgtgtcagtgtttcttggctttcctggaacagttcaggtgtttaaatttagtaattcaatcctgaccagtgtaaaccccacttaattattgcagcctaaagaattcagctacttctactcttcataaatgtgcccaagtaaatatgtgtttttaatattcaaccctggaaaattagtaattcagatgataaaagctcatgttttggtgtctttgtactcagattgtgaacaaggcatatttcactgatttagacttagtatacttgatggagaatgcctcaggttgaagagatagttcctgtcagcaatcccaacatcctatagcaatgtggaaaaagtaatcaactcatatttcacgaatttgatgtattgttgtgatttagagggcatgagataaagtttatatttgaactgtgtggggtagggggaagaagaggttgcttaagcaaatagtggggtgattgtggaacaagatgttctctaagatgagaagttattttcttgcatcatagaagcactctttttacccgtgagtgattgtgttaactataaatcatttatatctgtacattaaagcagattccctcaattaggcaaatttggttagccaagcccaagttattgtttgtacttgaaagtaataaagctgcatttccttaaaaatataaaa

SEQ ID NO: 148768 - DNA, 1083 bp, Homo sapiens
tgagacagattcttgctctgtcgcccagactagagtgcagtggtacgatctcggctcactgcaacaaccacctcccagattcaaacgattctcgtgcctcagcctgccgaatagttgggattacaagtgtgtgccgcccacgcccatctaattttttctatttttagtagagatggagtttcactgtgctggtcaggctgatcttgaactcctgggctcaggtgatccacctgcctcggcctccccaaagtaagccccggcccatttttttttttaagagatagtatctcagtctgtgacagactggagtacaatggcgctatcaattttagttctaattaacctgtcaacaaaatctttgactaccttctctctctacctcaagatagcttgctcaattgcaatgtcaccctgcactctcattttacaacacacatcttcttttagtttctcagtaagtgttgctttctctctacaactgaaagctccaggaggcagggacaaaacctgtatttgttcttttctttttttcttttttcagcaaagggagggctgattttttaactttttgaaaatagatgaaagtaaccaataaaataataaaacctcacatgtgccatcgctcagcctcagtaaccatcaacccatggccaatcctgtccctactgcaaccctgcccattccctacactcacacattattttgaagtaagtcccagacaacacatgattttatttgtaaatatttcagtctgtttctgaaatgactcctttttgtaacataaccacaatgtcattattacacctaagaatgaataatatacctctttaatatcatcaactatccaggcagaattcagatttttaattatctctttcagataatctttttaatgtcttttcgtgaatcaggatacaaacaaggttcacacattgagattggctggtagtctattgtctctttttacctaccgattcaccttctattttttctttttgtttcatcatttataaagcaaaaaactatgtttttaatagccatgtctccagctcctcacccatttttggtaataataggtcttag

SEQ ID NO: 148769 - DNA, 283 bp, Homo sapiens
ttatttgatcatgtattatcccttctcacataaagtcatattagaggaattctttttaaaagaagctttcaaactagtcctttgggcatttaaaaaatcattatataaaagtacacttcttcaatacataagaacaaatattttttctttaccaaaaaaacctcatttttaggccaaaataagttacaacttgctgaaaaccttttatggctcagtgctcattctagatatatgaagctatattttcttgtacatcttcagaaatcagatactgagagtggtc

SEQ ID NO: 148770 - DNA, 1574 bp, Homo sapiens
agcactttgggaggccgaggcgggccgattgcttgaggtcaagtgtttgagaccagcctggccaacatggcgaaaccccatctactaaaaatacaaaaattagccaggcatggtggtgggtgcctgtagtcccaactacctaggaggctgaggcaggagagtcgcttgaacccggggggcagaggttgcagtgagctgagtttgcgccactgcactctagcctgggggagaaagtgaaactccctctcaaaaaaaagaaagaccactctcagtatctctggatttctgaagatgtacaaaaaaatatagacttcatatatctggaatgagcactgagccataaaaaggttttccagcaagttgtaacttattttggcctaaaaatgaggtttttttggtaaagaaaaaatatttgttcttatgtattgaagaagtgtacttttatataatgattttttaaatgcccaaaggactagtttaaaagaagctttcaaaaagaattcctctaatatgactttatgtgagaagggataatacatgatcaaataaactcagttttttatggttactgtaaaaagactgtgtaaggcagctcagcaccatgcttctcgtaaaagcagcttcaaatatccactggggttatcttttggacaacttgccattatctgatgttacacaattcaatagcaagcaagtttgagacaatccgcagtttaaaagcatgaacccatttaaccaaaagtggaataattaaagataaagcacttcttcccaaagggaattatcacctagtgaaaaattatgcatttcatctactcagttaccgactgcaagtctctcctcgctctagctccccagcctttggggtgaatattcctgtgaaatatatcttcaacttgaaagttcataactcccaatcaaaaaactcccttttactgaagtttgccagtactggtaattgccactggtttgaattcctctggggcccttatttgctacttttggctttcctttgttaacacagatttggtgttgcactttttctccagaggggtgttgtagagccttggttgtatgaataataccagtggtagtgtccacggggtctaatgtaagcccatttggcatcactcctctcctctctcttgagaggatttcttgtgcacaagagtatgaagcagttgtggagccgctgtgcctttgtcaagataccatccttgtttgatgacttctttctttgctgttttttcttcaaaaaggtaagtaagctctggcatgcctctaagcaaattggtaagactaaattaatttggttccacctcataacctggtggcaataaatattacttctcatacagtttaatattgttgtttgttggagaaaatgaaccataaaaattgatttgctgttcagttttcaattattcaagtacacccaattaaagatgcagttatgtttataaaataagaagaaatagacttgtaaaatgcttatgtgagggttattgaaggtttccctggaagactgactggaaatggtggctgtttttttctatttctgactctgccatgga

SEQ ID NO: 148771 - DNA, 515 bp, Homo sapiens
agatacagaaaagatgagtccttgggatatggagcttatacctaataatgctgtttttcctgaagaactaggtaccagggttcctttaactgatggtgagtgcaaaacactaatctataaacctcttgatggagaatggggtaccaatcccagggatgaagaatgtgaaagaattgtggcaggaataaaccaggtgatgacactagatattgcctcaacatttgtggcccccgtggatctgcaagcctatcccatgtattgcacaggagtggcatatccaacggatctaagttcaattaaacaaagactggaaaacaggttttacaggcgggtttcttccctaatgtgggaagttcgatatatagagcataatacacgaacatttaatgagccttgaaagcctaatgggagacctgctaaatccgggactgatcttcttctacattttataaaggatcagacttgttataacataattccactttataattcaatgaagaagaaagttttgtctg

SEQ ID NO: 148772 - DNA, 452 bp, Homo sapiens
ggcacgaggccgacaagaccaacgtcgtgaccggcaaaacagaggtcggggcgcacgctggcgagtatggtgcgcaggccctggagaggatgttcctgtcctttcccaccaccaagacctactttccgcactttgacctgagccacggctctgcccaggttaagggccacggcaagaaggtggccgacgcgctgaccaacgccgtgactcgcataaaagagatgcgcaacgcgctgtgcaccctgagcgacttgtatgcgcacaagcttttaggggactcgtgcaccttatagctcttaagccactgtatgctggtgaccctggccaactaaccttcctccgagttcacccctgtggcgcacaccctcgtggccaagatactggcttttgtgagcaccgagctgacctccaaatactgagacccttagcacccctggcatacatcttgcact

SEQ ID NO: 148773 - DNA, 1448 bp, Homo sapiens
tgtttggagacagagtgtcgctatgtttcccaggctggaatgcagtggcactatcctggctaactccagccttgacctcctgggtacaagttatcctctcacctcagtctcccgagtagttgggactacaggcacgtgccagaacaccccactaattttgtttatttttttgtagagaggaagtctcactaatgttgctcaggcgggtctcccaattcctgggctcaagtgatcctccccacctcagcctccccaaaatgctgggattcacaggcctgagcccactctgctcagctgacattttcaatcttgttattagatcactcttcctcttttctctgagctctgataactttccaaattgtactcatatccacagaggcaacaactttgggagttagattaatatccaatcttccggactacactggggtcaaaatacagcctgacaagtttttgaattggttttgaacttaagcagtaagggaccagggtccaatctctaagtgaattcctgggtgggattcaaataaagtatacagacaacttagccatcttttggagagcagctcagtctttatttcccatcagttcagagtagaacccacggtgaactgtttatatatctcacctaagatttaaaactctaatctattttacctacaccctgataaatgctctattcagttgcaaatgctttgtactttatattttgaagtcaggtgctgagcagagcacccaagcaactgccagagtgaggacagcttcaaaaggtagccacagtgtgacttctaagctgaatataatcaaacgaactccctttcatcctgttttcttccaaactctcagaactactatcgttccacacacaaaacagccagggttgaaaactggagcacagaattagcataaagctaactttaaataagcagttttctgctgaggtggaaggatatacctaagtaatttctagctctaaagatttaggttaaattttgaatgctaccagcaagtggtaaatgagagtaaagcaaaactaataaaccctagatggtaactgctctcagggcaggaattaactgatcaccagaaccaaacataactcctggcctatagtaaggaagtagttgttcacttcagtaaatgtttgctgagtgaattaaatatttcacagaaaccacagattccttaaaggtcatctaacccaacttccccattttatatatgaaaaaataaaactgaggtgtagagacaattttagcttatctgctgtgacattttgaagcaatggcttgttggtatgttatttgtcatgtgcaacgtaaagcagcataatgggtaagattatgaagcctctctgagttctggttttgctacttacttgctgcatgactgtggacacatcatttaacacaaatatgcctagtgttccattactggaacgctaa

SEQ ID NO: 148774 - DNA, 4629 bp, Homo sapiens
ttacacaaaacaaactggcccaatttcaacgccgaattcctggtctgtgccgccaacatccacaggagcaagatctatgatgggcaagcgtgccacattctgtgttctatattcaaagacagtcttgcccacatttccattccgcttagagcaagtgtcttgaagaacgatataccggaatctaatatttccctctgctttgatatctaagtcatttgcccctttgagaaccacagcttttttgaggttcttagcttgatcgtccatgtatcctacactgtttttacagatgtaagtgatgttctgggaggcttcttttgataaaaggcgcaaaaaagtcatctgagtaatggctgtattaggtgattggtggtctccataagcgaactgagaccctctgttcatatcaagaccataccaaacaggtttattgtcaggagatttactggcccaccaggttttacgtggtacactggatgggtttgctgaaatacatgtttctcctgtttccatgttgcagtaaactttgatggcatcttcaacagatccttggttaggatcaatccagtattcaccactctgctttgcggaatggcaaagctttaggtcatcacacgtgcgggctgggtgctttttcgagccatcggggctgcgcatggtttcaatctgactactgagtgacttcagggtagcatgaacccctgggtccgttttgtttttgtcatcaggagccgcctgatcttcagtaaactcaggaagtggatctggcatgctttcatcatagtgccccatgatatccccaagagcagctgtaaggtggccagggggacccggagggccaggtgggccaggctcaccaggagggccctcaggtcctgcttctcctacactgcctcgtacacctggaggtcccaatggcccaagtggcccagggtttccttctttacctgaaggaccaactgggcctggaggacctcttgggccaaatggtccagggattccagcacttccttgttcaccatttggaccaggagggccaggaagaccctgaagaccagtaaagcctctgtggcccttctgacctctgtcgcctcggtctccatgatcacctttgtcaccacgaggtccttggggtccaggtaatccacgttttccagctcgacccaggtgtcctataggaccccgagaacccggatctcctctttgtcctgcatctcctggagcacccacagggccaggagttccaggggcaccctgagagcctggcagacctgcaggcccagggtctccacgatcaccacgttctccaacagcaccatcccgtcctggggtaccatcattgccagctggaccttctggtccaggttcccctacaggaccattggagcctgggggccccacaggtccaggtggacctttatctcctgttgcaccagttggtcctacttttcctggtgttcccgctgggcctggtaggccgggcatgcctctctctccacgttgcccaggcatgccaacaattcctctctgcccggtcgttccagctggaccaggggggccatctggaccaggttgcccatcttctcctgggtcccctttgtctcctgggccaccaggggggccagctggtcctcggactcccacacgcccatgagagccagggtccccacgaggacctggaggtccctccttcccgggttcccctaggggtcccgcaggtcctggagctccagcagggcctggaggtccaactctgcccgcagaaccaggaaatcctgtagcaccaggcggaccttgggttcctcgaccaccttttagtccaggaacaccattaggaccatgagggccaggggatcctgctaaaccttgtggtccaggagaaccagcatctcccttctgtcctggctctccaggttcaccttttactccaggctgtccgtcagacccctggggtccggcaaaaccaacagctccagttggcccattttcacctcgagaaccaggattgccccgggagccaggaggaccaactaaacctcgaggaccaggttcacccttttctcccagtaggcctgccggacctggagggcccaaaggacctggaagacctcctgcaccatcatttccagctgtgccttcagcacctttttctcctatgccacctctgtcacccttggggccaggagttcctgcaattcctctttctcccggcataccttgaagacctggtgggcctgtatctccaggggtcccagatggacctggactgccttttgggccatcaggaccatgtcctccagccattcccttctcaccagggagtccagttatcccaggttctcctctttccccaggatttcctcgttctcctctaggtcctaacgggccaactgctccgggacctccaggaacaccttgatcacctggttttccaccttctccaggaggacctggaggaccaggatgcccctgaaaacctgtgggccctggaggtccttgttctcctctttcaccacgtagacccggcggcccaggaggaccataaggaccaactttaccatcttttccaggagctcccctttgcccaggaactccaggatttcctgcttctccaggtttcccagggtcaccattgctacctttggggcctggaaggcccatggtcccgggctgccctttgattcctatggagcctggaggacctggacggccatcttcccctggcgcacccaaaggtccaagttttccttcaggaccttgaacaccaggatttcctgtcaaaccccgagcacctggaagcccaggttcccctggacgtcctggatccccctggcttcctttgggtcctgaagaacctacaggaccccgttctccttgagcaccctttggcccaggtaaaccatcagagcctggaaaaccacgattgccaggagcacccctttctcccactggccctggaggaccaagtgttcctgggtcacctctgggacctcttttgccttcttcaccgggtgggcctatcggaccctgaataccatgtggccctggttccccttttgggccagcttctcctttgaaacctggatcacccggaaggcccgaattcccctgaggaccagtgctaccctgaggtcctggagatccaggaggccctgctgagccaggaggaccagaggtacccggagagcccgttgggcctttgggaccaggagtaccatcagttcctattgcaccaggaagacctggagagccaactggacctgggggcccagtttcacctctctgcccctgaggaccttcagggcctcgcgcccctgtaggacctgcttctcccttcattccaggatttcctggaaaaccagaagagcctggtatcccaagaggacccattggtccaggttttccaggcataccatgtgcacctcgttgtccaggagcaccctgtggcccaagtctccctctctctcctggcattcccctcggacccagaggacccatggcacccattggaccagtggggccagcttcacccttggaaccaggtgctccaacttcacctttagggccttcaagacctttgtgtcctcggtgacccttcagacctggaagaccaggagccccaggaaatccacgagctcccggagatcctgcaaatcccacttcaccaggatttccatttctgccaggttcaccatcttccccaggtttaccaggagggccctctggtccacgtgaaccaatcggacccattggtccaggatcaccaggttcaccaggaggtcctgtaggtcctgcaccaccttgctgtccttgtaaaccctgtggtccccttgggccaacaggacccacagagccaggcattagtcctacttgactcccaagtccagatttttcatccaacccagccatttgagctgaaaacggcctgctcaagccatcgggtcctgggtgggacggatgtccaggaggtcctggagcaccaggttgaccaggaacacctggttctccatcaattccctgaggtccacgagggccaggtcttccttttggccctcgctctcctcttggtccctgtgatcctggaggtcctgccggtcctggacgaccacgtatgcctgttacaacaggcactaatcctggttctcccttttgtccctttcttcctctaccaaaatttgtattgccacctccaggtgtttgtgaacagacaggacagcattccccagggggcgttacagggtcggcacagtccagcacatcctggcattctatcttgtcacagagaatggctccattgtcacagacacagatctgacaaggggcaggtttccaaatgtccctgtttaagtacatctggccattctgagtgcaggctatttcttcaccatatccttcatcctcgtcttcttcctgggcttttattgagacaaattgccctaataaaacaataagaatgaggagaggtcttgcttccgcccagtttgccatcatgtctaaatattagactgtgggttctcctgagagtgaaaagtagattctgaggttattgtagcaccatgaagtcagctgtgggctcttctttcagcaccagccccagggcagcctctgcaaaccccctttttcaccccc

SEQ ID NO: 148775 - DNA, 445 bp, Homo sapiens
cccaaggtctggttctgaatcattcagttgtcagttgtctccttttttttttttttttggagacagggtctctctctgtggcccaggctgaagtgcagtggtgtgattacagctcatgtagcctggacctcccaagctcaagcaatcctcctgcctctgcctcccaagtagctgggaccacaggtgggcagcaccacacctggcttaattttttaaatttttttttatagagacagggtcttaccatttgccccagctggtctcaaacccctgggctcaagcaagcctcctgccttggcctcccaaagtgctgggattacaggtgtgagccaccacacccggccttatctcctaacattttgatagcacaaaattttgaaaacccacttctgtgtacgttatgaagcatagaaaattaaacagtatgcaccaaaaaaaaaaaaaa

SEQ ID NO: 148776 - DNA, 456 bp, Homo sapiens
gctaattttttttgtatttatagtagggacggggtttcaccatgtgggccaggctggtctcgaatgcctgacctcaagcgatccatcagcctcagcctcccaaagtgctgggattacaggcgtgaaccaccacacccggccaccatctgcttttggctgctgaacttgagggacgtaattttgtttttgtaggactaaccattaactgataaccaaacacggactgaggaaagccctgtctcacagcagaccaggattgttgagctgcagggaagagttgaatttgttttgttgacagaatgtcttttgtataaacagacaacccagacaacctggtgatctgcgtgtcaccagggtttggttttgttttgaatctgacacccagggctcagggtctttcaaattctcattccccttctgtcgtcttctcgcagccgtatagtagtagtagtaggc

SEQ ID NO: 148777 - DNA, 352 bp, Homo sapiens
tctttagagtattatatttaagacagcttgcagctgttttcttatatatattttacatgacaaaattatatttaaaacatattaaactttaaaaaaccatagtttataatttataagccatgtagcatatttctatttttgagacaggatcttactctgtcacccaggctggagcgcagtggctcgatcatggctcactgcagccttgacctcctgggctcaagtaatcctcctgcctcagcctcccaagtagttgggactacaggcacatgccaccatgcccagctaatttttatattttttgtagagatggggtttcaccacgttgctcaggctgtaatttttaaaaact

SEQ ID NO: 148778 - DNA, 3264 bp, Homo sapiens
  misc_feature (1)...(3264): n = a,t,c or g
tttaatttttagtagagatagggtttcaccatgttggccaggctggtctcaaactcctgacctcagatgatctgcctgccctggcctcccaaagtgctgagattacaggcgtgagccacctcgcctggccttattctcaacataattgctggtgaaatactaaccacttacccttttgggttctgttttcatgggaaaaaactttgtttccgatgtgaatgtttttcttcttaatatttttctgtagtgtgtaattttttatagtgatacatttcttttataagaaaaataaagctaaaagaaacaatgttaaataaaaaaaaaaaatccagggttggaaagagaagagacttggaatgaggctggtggcttatgtttggatctccttcccatcttgggcctttatgtaaacaggtttcaaaactctctgagagagaagcgcctagttaaaacaccacacaacacaccctgcctatttcctttactcagcaccatttaatgtattaaaaaacagcttaaaaacaaaacaaaacaaaaaaaacttgaaataggaacttcaccgtctcttaagagcgatatatttaatacattcacaagattcgaaatgaaaacaaacattattcatgctacaggttttaattttccttggacaacaccaaaaacacagtactcaagcggcatgttttttttttgaaaatttggttttgagatggaatttcactcttgtttcccaggctggagtgcaatggtgtgatcttggctcactgcaacctccgcctcccgggttcaagagattcgcctgcctcacaggcgcccaccgccacacctggataagttttggtttttgtttttttttttgagacggagtctcactctgtcgcccaggttagagtgcagtggcaccatctcagctcactgcaagctccaccttccaggttcatgccattctcctgcctcaggctctcgagtagctgggactacaggcgctcaccaccacgcccgcctaattttttctattttttaatagagacggggtttcacccgtgttagccaggatggtctcgatttcctgacgtcgtgatccacccgcctaggcctcccaaagtgctgggattacaggcatgagccgccgcggccggcaatttttgtattttaagtggagatgaggtttcaccatgttagccaggctggtcttgagctcctgacctcaggtgatccatccgccttggtctcccaaaatgctgggattacaggcatgagccactgtgctcggcctgcaggttttaacaagaggagcatgaactatcattttgacacaaagacagcttaaaaaaaataataaagctggctggacgcggtggctcacacctgtaatcccaccactttgggaggctgaggtgggtggatcacaaggtcaggagatcaagaccatcctggacaacatggtgaaaccccgtctccactaaaaacacaaaattagccaggcatggtggcaggcgcctgtaatcccagctcaggagggtgagccaggagaatcacttgaactcgggaggcagagcttgtagtgagcagagatcgcacctctgcactccagcctgggcaacagagggagactccatccccaaaaaaaaaaaaaaaaaaaaaagactatttgttgaatgttgaaaggaggagctaaaattcggagtagaaggaaaactggagtgtctcattcacttcactctgatttgaattttttttttttttgggacaagagtattgctctgtcacacaggctggagtacaatggtgcgatatcagctcactgcaatcttcgcctcctggggtcaagtgattctcctgcctcagcctcctgagtagctaggattacaggcatgcgccaccacacccagctaattcttgtattttttagtagaaatggggttttaccatgttggccaggctggtctcgaactcctgacctcaggtgatctgcccacctcgaccccccaaagtgctgggattacaggcgtgaaccaccattcccggcctgaattttttttttttttttttttgaggcagggtcttgctctgtcccccaggctggagtgcagtggcatactcatggctcactgccgcctccaattcctaaactccaatgatcttctcacctcagcctgccaagtagctaggattacagatgtgtgccgccatgctaatttttaaaaattttttgtatagatgggttctcactatgagccccggctccatccttgaagttcctgggctcaagcaatccctccttaccttggcttccccaaagtactgggattacaggcgggagccaccatgcccagccgtcactctcatttttgagcacaggaattgtgcccaaaggtctaggataaggaattaaagatgccatgccccaagaaataccccacaaacattaattataaaagggagacctatactaatgtttgtgaaaagcttatacctaacatagagcaatatttaagttataaagttaaatgaaaaagggtataaaactgtatgaacagtacaatctcaactatgtaaaaaccaaccaaaatctgccctaaaaaaggctggaaggaaatagctcaaaatgttaatgtgattgtatttaagaagtgtatctaatagggatcttttttcttcctttttagttttctgtcttttccaaatgtttctctactgcggagatttttttaaaaagctattagggaaggagtagaacaaaagtggaaaaaaaaatctattagttacaaaaaactgagtctgattagaagcattgaatttgagttaatgaatctaagtctagcctataagaatttgtacattttagaaaactatgaaacagtccaggctactccatgaatcccattggtaggaccagaggctggaggtgggaagtgccacctggtccctgcctgataaaaaatgctggaatcagccagggcacggtggccccacacaccntgttaatccccacccactttggggaggccgaggtgggcggatcacctgaggtcaggagttcgaaaccagcctgggccaacatggcgaaacaccgttttccactaaaagtacaaaaattgggccaccgtggtggcaggcacctgtaatcccagctactcaggaggattacgtgaactcaggaggcagaggttacgcctgcctcacaggcgcccaccgccacacctggataatttttgttttttgtttttttttttcagacggtgtctcactctgtcgcagaaa

SEQ ID NO: 148779 - DNA, 278 bp, Homo sapiens
tttaaaaccccttaattaaaaattaaatggggcaaaaagaggtaaacagacaccatgaaaaaaaggagtgtccatgccagataagcatatatcattagatgtgctaagatacaacatcattagtccttagggaaatgtaaattaaaacctaaatgaggccggatacagtggctcacacctgtaatcccagcactttgggaggccaaggtggaaggatcacttgaacccacgagtttgagaccagcctgggcgacatgatgaaaccctatctctacaaa

SEQ ID NO: 148780 - DNA, 336 bp, Homo sapiens
agcttcaatacctggtatttatcagtagcaaggcttggcccagctagaagttggaagatggggagacctagtcagctggggaaaataacaactataatactatcctatagctagatctcttcagccacagagaaggaaaatggtccaaaattccatatgtataggccttttttgccctgcagaataaccgcaagctctgtcagcaatgtataatagaccttgcacttatagcagtgatatccagccagacttaatccagacagaagggaaaaaacagtctgcctccttagaagaggagacagaggcccctgcaccagcccaggtcccagctcctct

SEQ ID NO: 148781 - DNA, 880 bp, Homo sapiens
agagtctcactcacctcactgcaacctccatcctcctcaagtaattctcctgcctcggccttccaagcagctgggatcacaggtgcccaccaccacgcctggccaacttttttgcatttttagtagagacggatttcaccatgttggccaggctagtctagaactcctgacctgaagtgatccgctcacctcggccttcgaaagtgctgggattacgggcatgagcaccgcacccggccctgtggctatgtattttgttaaccttctaggagcatggtaaataaacactgctgttgataatatttcagtgttcactggccttcctcttcatgggtggtggagcttgacagacttacaaaattagaacttaaaatccaattgagaccttttaggcagcaccagctctcaagaatagctctcaagaacttctaccagtagggttcctctttctctaacacccgcatctgtcccatgattatgtaagtaatcatgtataatgttcccattactcacaccgcctcattaacaccatctggacagcctttgtttaatggatggcccagcccctagtgaggacttgagggcatatgatttcccccagtgctccattggtcccctaagccgtcaaagtcaggggcaatgatacaagtacaagaaaaagtcaacagccctgggaaatcaaactggttcctgcaagtctggagaactgcagcccacactgggcctcagatacacccaagaatgtggtgggggcatttgtaaaactagaagagcacaaaccatccggtcccaagggacacgggatgtcagtcttccaatgatgactcaaagagacagccagctgggtataagggggtagctccaccaactggttcttcaa

SEQ ID NO: 148782 - DNA, 1760 bp, Homo sapiens
  misc_feature (1)...(1760): n = a,t,c or g
gggggggctttaagtgggggtaccccagggttttccccttcccccccgggaaaaaccgcggcaccgggccaaagtggcaaccccccggggggattttagagggttccatcccccgggggttcccaaaggggggggttcccagggaatacccccgcccccgggcccctttnnnnnnnnnnnnnnnnnnnnaaagggggttttggggattgtaccccaagggataaatcccgaaagggagggaaacctccattttcttagggggggttttttccccagggcagcgctgttccaaaacatctcgcggcccccacaaataggtatacctcttttcacccccaaaaataaaaaataaaaaaaatttaaattccaaaaagaaaatatcaaggcatgaggagccactgccctcaaccaatttctgtggtggcttttacccactacaggaaatacaacccagagttctaggccctccagttccaggactatgttgtttctggacagtggggaaacaaaggaatttgggtaagagctctcttgcttaagtaataaacatgagcccaacacgatggttcttgtgggcatcttgaatgtgctaattgaaagtaatatgacaagtctgttattctaaaccaggtttcatgtgtgtagagttgttgacggttctgttattttgtcattattgcagggatgaaagtaagcttcaagataaaatcttcatcacccagcaaattgcaatatcagactcttctggtgaagtggtgctacccactattccaaaagaacctcaggagtctgacacagtaaggagtctgtatctaatcaaacaatgtatattgttgtcacccttccccatgtcgcttcttgataaatcacggttattttctctactagttgagagacttcagggatcagtggaatgagtaataaatagcattagtagattacataaatttttaaagcaatatccgtacaaatgcatattatactaatgcaaatgcaaatgtgtgcctcttttgggtaggcaacctataggttgccttttgaagtaggcagcctacacctaaatgtgtactttcttctccgtaagagtaaacatagtgcccttgggactcttagctttccatcacaggtgggaattcagagtcattacaccttagaggacaaaggcttataaggagatatgaaatgatttttttaagccaagtttttctctttaagagtttttaaatttataatttgttattccataattagttacaatgttagaatcctgagaaatttcgaatggacccgcattacatcaaaaataaaatgctcactttggtagccgcgatcacatgaatataactcgatgagtttttttcatctaagaaataagaaactctgagcagcaaatagttggccagatgagttgtttctaattagagcatcacagttctgattagtgtgtttttttagaagggatttccctttaaaattaagggaaaatggtagggaatctctgtgactacatttaattccacttggaatatagacaataatgaccttttatttaacccagcctatagttggtggaattggataaaattttcactcccagggccaggtgcggtggttcacgcctgcaatcccagcactttgggaggctaaggtgggtggatcacctgaagcgaggagttaaagaccagccagatccaacatggtggaaccccatctatactaaaagtacaaaaaattatccgggtgtgggggcatgcacctgt

SEQ ID NO: 148783 - DNA, 398 bp, Homo sapiens
  misc_feature (1)...(398): n = a,t,c or g
acaacctgggcaatatggtaaacacccggttttaattaaaaattccaaaattaagccattttggggggacccaccggtagttcccaatgcccgggaaggttaagcctgaaaaatggtggaacctgggaaggtgagggttcaaagtgcccaaattaaggccctggaattcaacctgggcccaaaaaagaaagtccctttcnnnnnnnnnnncccatggttggccaagggtggggggttaaggccggaaatcccagcctttgggaaggccagtaaggggggttcccctaggtccagaattttaagaccacccgggtttttaccttaccctgcccatttttagaagccaccgggacccccttaaaaaaagaaaaaaaataaagatctttaattctcgtgca

SEQ ID NO: 148784 - DNA, 415 bp, Homo sapiens
caatgcttttttttttttttttttctctgataaaatagaaaagcattcaatcttatgccatttaatataatgttacctgtgggttcttcaaatctgcccttaatggggttggaagtgttgccttctgttctcatcatgctgagcattttctggggtttgtttttataaatcatgaaaaaagttttcaattttgccaaatgcttttactgtgtatgacaaggtaatcatacggtttttctcttttgccctgataatatataaaatgatattttttaaatataaaaaagaggccgggcatggtggctcacgcctctcaaggaaatccctcccgccttgtctctagacagccaagtcccacggcctgtcctctactcttccagaaccctgttgttctgacagcagggaggacaaatcc

SEQ ID NO: 148785 - DNA, 467 bp, Homo sapiens
gaatacctgctgttactcttttaattcagcattatactagagctctaagtcaatgcaataaagtaagaaaaattaataaagtattgaaaagaaagaattgaagctgtctttattcacagataatgactgtgtttgttaacaatgctagaaatctacaaaaatctaccagaactaatcagtgagtttggtagtgttgcagaatgtaagctctcaatgtaagtggtcttttgtatttctgtatattagcaatgagcatttggaaaatgaaataagaatacaatttcatttaaagtaacatctaaatacatgttgtgcttataaataaattcaacagactgggcaccatggctcacacttgtaatctcagcactttgggaggccgaggcggcagatcacgaggtcaggagatcgagaccatcctggctaacacagtgaaaccccgtctctactaaaaatacaaaaaaaaa

SEQ ID NO: 148786 - DNA, 552 bp, Homo sapiens
agaggcaagtgtgcaggtgggtgtagttgggagtcagcagagttgggttggaattcaagctttgccacctgctggctataaaccttggttgggtaagtaacccaaggtaaatgagatcatctctgtaaaactcttagccttgtgcctggcacatagtaaatgcttaataagggttcactgttagtattactgttactgataacatacaaatagattgtattaatggaccataattgcaactgtataaaacaaattccatgtttggccaggcgcagtggctcaagcctgtaatcccatcacttcgggaggccgaggtgggcagatcacgaggtcaggagatcaagaccatcctggctaacacagtgaaaccccatctctactaaaaatacaaaaaaattagccaggcatggtggcgggtgcctgtattcccagctacttgggaggctgaggcaggagaatggcgcgaacccagggggcggagcttgcagtgagctgtaattgtgccactgcactccagcctgggcgacagagcgagactccgtctcaaaaaaa

SEQ ID NO: 148787 - DNA, 419 bp, Homo sapiens
gagaagacgacagaagggtcttgcctcagtagcagagaataatcagtcctaaactaaatgcggctctggtcctaacaagtcttaaaagcagaccttaggccaggcgtggtggctcacgcctataatcccagcactttgggaggccgaggtgggcagatcatgagatcaggagatcgagaccatcttgcccaacacggtgaaaccccatcgctactaaaagtacaaaaattagccaggcctggtggcatgcgcctgtagtcccagctactcaggaggctgaggcaggagaatcacttgaacccaggaggcaggggctgcaatgagccgagatagcgccactgcactccagcctgggcaacagagcgagattctgtcccaaaaaaaaaaaaaaaaaaaaaaaaaaaaagtcgtatcgatgt

SEQ ID NO: 148788 - DNA, 4123 bp, Homo sapiens
atggaggaggtagaagaggacagattcaaggaaaatttggaaggcgcgctggctgggcagctcctgggagatgaagcgacgcaggcgctccaggtactggctgtagagctcgatgtcgttgtgcccggcgccctccacccacagcggctccaccgccttggggcagcgctcgtagagcgccagcccgtgcgagaagtcgatcacctcgtcctccctgccgtggatgatgagcacgggagacgtgatcttggacaccttctcgatgttagggaaggcgtcgaagcagtaggtcttcttggtgtcgcggaaggcgacgcgcatgcccgaggtgagcggcgagtgcagcaccaccgcggcacactcgtagcgcgaggccaggtccatggtgggcaccgtgccgatgctctgcccgtacaggatgatgctgtccgggctgatgccgtacctggcggcgccggagcagggtcagccgcggcctccaacgcgcgcgcacccttcccaccagcgggcgtccccgggcccagctccggatgcgaccctccagtctccccactcagccaagtcagtgcacactgggaactgtgtggcccccacatcctgaatgcttcataccttcctgcccgggttagaaagccgttcctggtgcactggccaggacagcggacactcttcctccctgcagcccttgcccacccccttggccatgaggaattcaggcagctgtgtccccaaatgtctccacccaattttggactctcggagtccccacgcccagtgagatgccagtgcaacccaggtcagcatcgagggtggtggctgcggaggtggcaccccctcccaccagcaccttcccttgggagtggacaagtcctcggccacctcagcaccaccagctcccacccaggggcaccctcacccccaggtcattggtgtgcggcccctgacccagctgatccagcaccagttacaaggcctcctcgtgcccagtcccaagcacgcgggacccacctgccaccctgcccatgccgggaccccacaactctcctcccacacgctctaggctctgatcccaggcagacgccctcttgcaaggcaggagcatgggcaggcaggagcccccagctgccacctggatgtcaccactcaaacgaacgggacacatccccagtggaggccctgggcacgctctggcctccccctcatggctctgggcctaggttcctgcaggacaaaggggcagcaggacagatggccgagcagacagagctcagagctggccatggcaggatggccaagctccgcagccacagggcctcatgggccagtcctccggacctggatgcagcagcctcgcctcacttggccccaagtgctgcctcagccgatgggctcccagccacacgtgcacagacccccagaccaccacccactccctcccgccaggctgagctgcccccagggtcgccctcacctggtgcgcagggcctgccaggtggcgtcgatgtcggcatagaggttcctctcggaaggcctgcccgagctggcaccgtagccggaggagtcgtaggtgaagatgttgcagtggaggcgggagcccaggccaatgtagaagctgctcatctggcccaggtccacggcattgccgtgcgagaagaggaccgtgtacctggcaccaggcacgcagcgaacatacatgcaggagacacggttgccgcgggcgctcttggtggggaagacctcgatggtgtccagctcgcgctggctgtactggaagtcggcacgctccgtcagggcttctggtggactctccgaggcaccgatgtagaaacttacccattcagtgcaccaagagcagcttcacatggtgtgggccgacatgaagagctgccagatccaacaggaccttgtggtggacgccttctttcactgaccattcatggggtgactattaggtaccatgccctgctctgggctagaggccccataatgagtaaatctcaggtcctgggggagtgggagccagtgcaaggagggaagtccagtgagaatgacaaatggacgatgtcagacccaggggctgaggcccccacctgcagccgggcagcttctggagtggacaaggagcagcagggaaggtggcaagggctctggaacagccacataaagcccttgaagataaggatggtcaaacaaaataatatcatacctggagaaactcagatcttgctaagatttactggttgggaatccaaagttaatgccaagaagcagctgccagttgggatcaaatgtgagcctatggatcaagaaaatgagcaaacaggtggccatgaaacagatggtcatagaattgtttcagtgcttatccactttccactcatttccatcctgtcttacgccacttggggcttgtcccttctagaatgcatccctggctcccctgtgtgcacacttctagttaggtttagcaatgtgggcacccgatggagcctggaagtgagaggaagcccatgtggttttggcagcaataaggtgtgtggggtaatgactcctgaaattaaaatggtgtgtgtatgtgaaggaaaggcgggcaaagctgtggggagcggtggagtggaaggaacaaaggaggtcagtactgggaacgctgaaggtcccgtccgccacgaggctgtagatggaggtgtccacctggcctttgcgttgctgcaggggctcctctggtcgctgctgctggggccgcctgggctggcgggttggggaggcggagagctcgatgcagtccctgactccacctcttctgccacaaacgtcagcatggtggtatcagccggcccttggtccagcgagaaggcagagatgaacattctagaaatcaacgagaaattgcgcccccagttggcagagaacaaacagcagttcagaaacctcaaagagagatgttttctaactcaactggccggcttcctggccaaccgacagaagaaatacaagtatgaagagtgtaaagacctcataaaatttatgctgaggaatgagcgacagttcaaggaggagaagcttgcagagcagctgaagcaagctgaggagctcaggcaatataaagtcctggttcactctcaggaacgagagctgacccagttaagggagaagttacgggaagggagagatgcctcccgctcattgaatgagcatctccaggccctcctcactccggatgagccggacaagtcccaggggcaggacctccaagaacagctggctgaggggtgtagactggcacagcaccttgtccaaaagctcagcccagaaaatgacgaagatgaggatgaagatgttcaagttgaggaggatgagaaagtactggaatcatctgcccccagggaggtgcagaaggctgaagagagcaaagtccctgaggactcactggaggaatgtgccatcacttgttcaaatagccacggcccttgtgactccatccagcctcacaagaacatcaaaatcacatttgaggaagacaaagtcaactcatctctggttgtagacagagaatcctctcatgatggatgtcaggatgctctaaacattctcccagtccctggccccacctcttctgccacaaacgtcagcatggtggtatcagccggccctttgtccagcgagaaggcagagatgaacattctagaaatcaatgagaaattgtgcccccagctggcagagaagaaacagcagttcagaagcctcaaagagaaatgttttgtaactcaagtggcctgcttcctggccaagcagcagaacaaatacaaatatgaagagtgcaaagacctcataaaatctatgctgaggaatgagcgacagttcaaggaggagaagcttgcagagcagctgaagcaagctgaggagctcaggcaatataaagtcctggttcactctcaggaacgagagctgacccagttaagggagaagttacgggaagggagagatgcctcccgctcattgaatgagcatctccaggccctcctcactccggatgagccggacaagtcccaggggcaggacctccaagaacagctggctgaggggtgtagactggcacagcaccttgtccaaaagctcagcccag

SEQ ID NO: 148789 - DNA, 822 bp, Homo sapiens
atgctgcagatccctaaacagcagcaaaacgaaaaataccaagtgcctcaattcgatcaatcaacgattaaaaatattgagtctgcaaaaggacttgatgtgtgggacagctggccgctgcaaaacgctgacggaacagtagctgaatacaacggctatcacgttgtgtttgctcttgcgggaagcccgaaagacgctgatgacacatcaatctacatgttttatcaaaaggtcggcgacaactcaatcgacagctggaaaaacgcgggccgtgtctttaaagacagcgataagttcgacgccaacgatccgatcctgaaagatcagacgcaagaatggtccggttctgcaacctttacatctgacggaaaaatccgtttattctacactgactattccggtaaacattacggcaaacaaagcctgacaacagcgcagatccactttccactcatttccatcctgtcttacgccacttggggcttgtcccttctagaatgcatccctggctcccctgtgtgcacacttctagttaggtttagcaatggagggcccccgatggatcctggaagtgagaggaagggattttgccgatttcggaaccaccatcaaacaggattttcgcctgctggggcaaaccagcgtggaccgcttgctgcaactctctcagggccaggcggtgaagggcaatcagctgttgcccgtctcactggtgaaaagaaaaaccaccctggcgcccaatacgcaaaccgcctctccccgcgcgttggccgattcattaatgcagctggcacgacaggtttcccgactggaaagcgggca

SEQ ID NO: 148790 - DNA, 740 bp, Homo sapiens
cccattcatcaagcaactccatccctagctatagatacccaggaaaataagtatgtatcttcacagaaataattgtatgagaatattcatagttacttatgcacagtagttatcaagtaaacctgtctcccatcagaaaaatggatatcaaattgtgtgataatcatacaatcaataggatattacttggccaaaacaaaatgaaacaagggaaaaacacaatcaaacaaattagtggcatatatacccacctgagtaaagagaagtcggccgtgtgcggtggctcacgcctgtaatcccagcacgttgggaggccgaggtgggcagatcatgaggtcaggagatcaagaccatcctggctaacacggtgaaaccccgtctctactaaaaatacaaaaaattagccgggcatggtggcaggtgcctgtagtcccagctactcggtaggctgaggcaggagaatggcatgaaccccggaggcggagcttgcagtgagccaagattgtgccactgcactccagcctgggcaacagagcaagactctgtctcaaaaaaaaaaaacaaaaacaaaagaaatctacccgtttggggccgggcgtggtggctcacacatgtaatcccagcactttgggaggctgaggcgggtggatcacgaggtcaggagttcgagaccagactggccaacatggtgaaacaccttccctactaaaaatacaaaaattaccctggcgtggtgatgg

SEQ ID NO: 148791 - DNA, 1773 bp, Homo sapiens
atgaaatataactaaccctttataatacaactgttggaacaacagttgaaaataacaatatcttgactcctggctgagtgctttacactgagctgtcttttccgaatatgagcacagacttggggatattagtgtcacctagcgttattagctagtattctccttttgtttccccataacatcccctcctccttcccacagatccactctccactcatttccatcctgtcttatgccacttggggcttgtcccttctagaatgcatccctggctcccctgtgtgcacacttggagttaggtttagcagtgggggcacccgatggagcctggaagtgagaggaaggtgagggccgtatttcttccctctccctccctgctctggcactgagtatctgggcaatagctgcatctgtctattacttcagtgggccacttcttccacagccccaatttttcagtggggtcccattaggcattattttacctttgttcctttagctcccatcaagggaagacccagaggcattctcctcaccaagggcatttaaggaaatggcatggggtgagggggaacagcgggcgttgcgtgttaaaggtcctgttggcacctctcctctgcaggctgggaggtcatggcgggagatgctgcatggatttgtcctccctgctgtcagaacaacagggttctggaagagtagaggacaggccgtgggacttggctgtctagagacaaggcgggagggatttccttgagaggcagggacatgtggtggttactaatcattcgaatcattgtgaggtgtctgggaatgtaatggatgggaaatctactaagaaatcaacttacgttacacttataaaagctctagttctgaggacagagacctgatggagtcaccatagtgggaatttatgacctggcatccagttcagatacctggagcttcttgactgaggggagattggatcccttgaggaagagtgaagccttcaatgctgccacaagtgtgatccgcccgcctcagcactttgggaggccgaggtgggcagatcatgaggtcaggagatggagaccatcatgcctaacacagtgaaaccccatctctactaaaaatacaaaaaaaaaaaaaaaaagaaaaattagccgggcgtggtggcgggcgcctgtattcccagctacttgggagtctgaggcaggagaatagcgtgaacctgggaggcagagcttgcagtgagcctagatcgcgtcactgcactccagcctgggcgacagagtgagactctgtctcaaaaaaaaaaaaaaaaaaaagaagtagattggctggatgcagtggctcacgcctttaatcccagaaggatttgggaggccgaggtgggcggatcacgaagtcaggagattgagaccatcctggctaacacagtgaaaccccatctctactaaaaatagaaaaaaaaactagttgggcatagtggcatgtgcctgtagtcccagctactcaggaggctggaggcagggagaatcacttgaaacccgggaagtgggaaggttgccgtgagttggagatttggaaccactggttcttcccagccctggggcaaacagagtaaaaactctgtcccaaaaaaaaaaaaagaatacaaccttgcaggatgtctctcctggagacagcaagagggagaggagggagagggctctttcttagaaaagaggcctttggtgagcccagaagtttgaaaccagcctgggcaattcagcaagatcccgtctctac

SEQ ID NO: 148792 - DNA, 4739 bp, Homo sapiens
gcacgagccggctggccgtgatgctgcccactggtggtcccccgctcccggggtccccggccggccaagcaggagggctctaactccgtgaggaccccagcattatttctataattgtttgtgagaaggactgaatcccagagcattgccttgttgctgacctttcagtatggggaggattggcatctcctgtctttttcctgcttcttggcattttagcatatctccagtagggtgtcctcgaattctgaataccaatttacgccaaattatggtcattagtgtcctggctgctgctgtttcacttttatatttttctgttgtcataatccgaaataagtatgggcgactaaccagagacaagaaatttcaaaggtacctggcacgagttaccgacattgaagctacagacaccaataaccccaatgtgaactatgggatcgtggtggactgtggtagcagtgggtctcgagtatttgtttactgctggccaaggcataatggcaatccacatgatctgttggatatcaggcaaatgagggataaaaaccgaaagccagtggtcatgaaaataaaaccgggcatttcagaatttgctacctctccagagaaagtcagtgattacatttctccacttttgaactttgctgcagagcatgtgccacgggcaaaacacaaagagacacctctctacattctctgcacggctggaatgagaatcctccccgaaagccagcagaaagctattctggaagaccttctgaccgatatccccgtgcactttgactttctgttttctgactctcatgcagaagtaatttctgggaaacaggaaggtgtgtatgcttggattggcattaattttgtccttggacgatttgagcatattgaagatgatgatgaggccgttgtggaagttaacattcctggaagtgaaagcagcgaagccattgtccgtaaaaggacagcgggcattctcgacatgggcggcgtgtcgactcagatagcgtacgaagtccccaaaactgtaagctttgcgtcctcacagcaggaagaagtagctaaaaacttgttagctgaatttaacttgggatgtgatgttcaccaaactgagcatgtgtatcgagtctatgtggccacgtttcttgggtttggtggcaatgctgctcgacagagatacgaagacagaatatttgccaacaccattcaaaagaacaggctcctgggtaaacagactggtctgactcctgatatgccgtacttggacccctgcctacccctagacattaaagatgaaatccagcaaaatggacaaaccatatacctacgagggactggagactttgacctgtgtcgagagactatccagcctttcatgaataaaacaaacgagacccagacttccctcaatggggtctaccagcccccaattcacttccagaacagtgaattctatggcttctccgaattctactactgcaccgaggatgtgttacgaatggggggagactacaatgctgctaaatttactaaagctgcaaaggattattgtgcaacaaagtggtccattttgcgggaacgctttgaccgaggactgtacgcctctcatgctgacctccacaggcttaagtatcagtgcttcaaatcggcctggatgtttgaggtgtttcataggggcttttcgtttcctgtcaactataaaagcttaaagactgccttgcaagtttacgacaaggaggttcagtggacccttggagccatcctctacaggacccgctttctaccgttaagagacatccagcaggaggccttccgagccagtcacacccactggcggggcgtttcctttgtctacaaccactacctgttctctggctgcttcctggtggtgctgctggccatcctgctgtacctgctgcggctgcggcgcatccacaggcgcactccccggagcagctcggccgccgccctctggatggaggagggccttcccgcccagaatgccccggggaccttgtgatccagctcacagctccacgaagactcaaaaggaaaagccatttttgcctcagggtttctcctctttattttcctgtggttttgttttttctttcccttttttgttcctccaaacaaaaacaaaatgcaggccgagcgcggtggctcactcctgtaatccttagcacttttgggaggccaaggtgggcagatcacgaggtcaggagatcgagaccatccctggctaacacagtgaaaccccatctctactaaaaaaatacaaaaaaaaaaaaaaaattaactgggcgtggcagcgggttgtagctgtagtcccagctactcgggaggctgaggcaggagaatcgcttgaaccccgggaggcagagcttgcagtgagccgagatcttgccactgccactgcacactccaatctgggtgacagagcaagactccatctcaaaaaaaaaaaacagtttcctgaaatattgagaagttatttttattttacttggttccaaaactagtgtgaataaggttgcttctgcaactttagtttatatgtgattcttaattttttacggtttgtagactctgagaatttgatgaaagccacagattctcttcctctagtacccatacacatctaattgcatgtaattttgggcttttgttagcctccctggagcccgggtcccagccatgtgtctaaggccaacataatggtaatagttaaaggacttcatgtagcaagccagaactgaactaaatacatggacatctcaaacatgagtgtcatttaggactgaaggcaaattaatgtcatggggtggagatcaataagaaggtaaggagccactggcagtatgagtccaaacagggtataccatggaaatcacctgtggaagaggaaggtggattccagaagaaagaaaacttgtgggagtgagcatttcaaggatggagagatcttgaagatactcacagggaagatagtggtggggcatgccatccacaacgacttcaaagcccttcagtactttcaccccaagtccctcacccgtgacacctcccatatcccccccctcaaccggaaggctgactgcccggagaatgccaccatgtctctgaagcatctcaccaagaagctgctaaaccgggatatccaggttgggaagagcggacattcctctgtggaagatgcccaggccaccatggagctatataagttggttgaagtcgagtgggaagagcacctagcccggaatccccctacagactagtggcagtggggacgctggtgatatgaggaggcagaggcagcacccaggagaaacagggcagtggaccaatggacagctccaccagctccacatctttggaagctagatttggggagagagaagctctaccccagacttaatacccattgaaatttcacctcaggtgttgtgtcctgtgtctggttaagtgtcccatggaaggggaaagccttcacgtcagaacccaaccctataccttttacttcttaaatggtgctaaccacaggtgtcccagggtgctctgtgccagttaagatttttaactttcaaggggcagggcatactgggaaatgtagtttcccaaactgccttatcacttgggtggacatatgtctccttttatgccttttggtcttgagtaattaacagcatcctcttccacgctcagaagtgttctggttggggccaggcatggtggctcacgcctgtagtcccaacacttagggaggccgaggcgggcggatcacctgagatcaggagttcaagaccagcctggccaacatggcgaattcccgttctctactaaaaatacaaaaaatgtgtggggtgtggtggcaggagcctgtaatcctagctactcaggaggctgaggcaggagaatcgcttgagcccaggaggcggagattgcagtgagccgagatcgagccactgcactccagcctgggtgacagagcgtgagactccgtctccaaaaaaaaaaaaaagaatttattaacctggttggttaataaattgtgtggtccctgccgggcgtggtggctcacgcctgtaatcccagcactttgggaggccgaggcgggcagatcacgaggtcaggagatcgagaccatcctggctaacacggtgaaaccccgtctctactaaaaatacaaaaaattagccaggcgtggttggcgggcacctgtagttccagctacttgggaggctgaggcaggagaatggcgtgaacccaggaggcggagcttgcagtgagccgagattgtgccactgcactccagcctgggccacggccacagagcgagactctgtctcaaaaaaaaaaaaaaattaaaattgtgtggtccctttccatgtcacagagtctgcttttggctcagagtctgtatctagcctgtgtcaggatattgcctgttcttcccaccttgacttccagagcagccatcgctggtgagctttagttctccttagggttccaaggcattagaagtaagagtgtagcttggaaaccaacttctgtgatttaggaaagctgtctctttcctaaggtaatagggggtttatttcatttaggccccagttggtaggttttaaaataatttataaagtgttttaataatttggttgtcttttttaccttgctaaaccaagcctctaaaaactcaaattattcccttgataaatttttataatggaaaaaaaaaa

SEQ ID NO: 148793 - DNA, 849 bp, Homo sapiens
tttttgagacagggtctcactgttgcccaggtgggagcacagtggtgagatcttggctcactgcagtctcaacctcccaggctcaagcgatcctgccacctcagccccccaagtagctgggactacaggcacgcaccaccacgcctggctagatttttttttttttgtattttttatagaaatggagtttcgccatgttgcccaggctggtcttgaactcctgagcttcagtgatccgcccgcctcggccttccgaagtgccgatcacaggtgtgaggtcactgcgcccggtctccactgctttctaattccaagggatgcgatctgtttagagcctcatctggtgactctaatccttatgaccagaattgtgcagggatcctgactgcattccacactgtggaaatgtaacagctttagcctggggcacagaaggcttttctctttcctgttctttcctgaaccagcaaacttcagggaccctgactgggactcccgctgggagggaatgaaggcccagctcctagggacttattaaaaaaaaaaatgacattagatttatggaggctgagcgggaagatctctgaactaaaacaattactgaaaagagaggagcattctgatgtgctgttctttggaatttctataattaaaaaataaacacagaactatttcgtaagaaaatacatcttagtgtgcaatccaatgcacatggattggtagatgaaaggtaaaatgcaaaaaagtatgaaaatacagtcctttaaatgtggcaataaaagtttaccatactgatataaaatcaatccagagaaaataaatgtacaagtgcaaaaaaattccatcatt

SEQ ID NO: 148794 - DNA, 1009 bp, Homo sapiens
tttgagacagaatcactctgcagcccaggctggagtgcagtggtgcaatctcagctcactgcaacctcccacattctgggctcaggcaatcctctgggaccagaggcacgtgccactgtgcctggctaatttttatttttttgtagagatgaggtctcactatgttgcccaggccagtttcaaactactgagcccaatcaatctgcccaccttggcctcccatactgctgggattacaggtgtgagccactgcaccgggccatctgccctttactaccaactgtgagacggatggagctgtatatctgaactctatgataatctacaacaatcctttgagggtttctagcacatttcatctagcgtgcttggagacctcgcattacataggcaagagtgtgtaccaggtccaaagattccacagtttctccatgacgctatataagagtggctactagttcatgaacagctagacataataccatgtggcctgaatctgacttttaaagtactttaaagacagaatagactataagcagcctagttgcaaatcagttgaattattagtggggtaatttcttctttaaaagtaagcactgggctgagacagctccctggtgaaggaactaagagtgaacaaccagaagtcaacacgtaggttacccctaaatagaagaatgagagggcaagtaacaaagggagccacaagaagaagacaatgtaatgataatcagactcttggggctttttcctatggaaatatatcttggaatgtgtaactttttactaaacaactattaaccaagtgtgagacaagaatacagaaattttcagatatgcaagggatcaaacaatttaactaccacatacccagactaggatgatttctcgagactcctgaaaaactaagagagcaagccaagaaaggaaaatacaggatacaggaaacagtgggtccaatttaagagagcaacaaagggaatgtccttggctgacagtatctagcaaa

SEQ ID NO: 148795 - DNA, 5378 bp, Homo sapiens
cgctcgatcttgggacccaccgctgccctcagctccgagtccagggcgagtgcagagcacagcgggcggaggaccccgggcgcgggcgcggacggcacgcggggcatgaacctggagggcggcggccgaggcggagagttcggcatgagcgcggtgagctgcggcaacgggaagctccgccagtggctgatcgaccagatcgacagcggcaagtaccccgggctggtgtgggagaacgaggagaagagcatcttccgcatcccctggaagcacgcgggcaagcaggactacaaccgcgaggaggacgccgcgctcttcaaggcttgggcactgtttaaaggaaagttccgagaaggcatcgacaagccggaccctcccacctggaagacgcgcctgcggtgcgctttgaacaagagcaatgactttgaggaactggttgagcggagccagctggacatctcagacccgtacaaagtgtacaggattgttcctgagggagccaaaaaaggagccaagcagctcaccctggaggacccgcagatgtccatgagccacccctacaccatgacaacgccttacccttcgctcccagcccagcaggttcacaactacatgatgccacccctcgaccgaagctggagggactacgtcccggatcagccacacccggaaatcccgtaccaatgtcccatgacgtttggaccccgcggccaccactggcaaggcccagcttgtgaaaatggttgccaggtgacaggaaccttttatgcttgtgccccacctgagtcccaggctcccggagtccccacagagccaagcataaggtctgccgaagccttggcgttctcagactgccggctgcacatctgcctgtactaccgggaaatcctcgtgaaggagctgaccacgtccagccccgagggctgccggatctcccatggacatacgtatgacgccagcaacctggaccaggtcctgttcccctacccagaggacaatggccacaggaaaaacattgagaacctgctgagccacctggagaggggcgtggtcctctggatggcccccgacgggctctatgcgaaaagactgtgccagagcacgatctactgggacgggcccctggcgctgtgcaacgaccggcccaacaaactggagagagaccagacctgcaagctctttgacacacagcagttcttgtcagagctgcaagcgtttgctcaccacggccgctccctgccaagattccaggtgactctatgctttggagaggagtttccagaccctcagaggcaaagaaagctcatcacagctcacgtagaacctctgctagccagacaactatattattttgctcaacaaaacagtggacatttcctgaggggctacgatttaccagaacacatcagcaatccagaagattaccacagatctatccgccattcctctattcaagaatgaaaaatgtcaagatgagtggttttctttttccttttttttttttttttttttgatacggagatacggggtcttgctctgtctcccaggctggagtgcagtgacacaatctcagctcactgtgacctccgcctcctgggttcaagagactctcctgcctcagcctccctggtagctgggattacaggtgtgagccactgcacccacccaagacaagtgattttcattgtaaatatttgactttagtgaaagcgtccaattgactgccctcttactgttttgaggaactcagaagtggagatttcagttcagcggttgaggagaattgcggcgagacaagcatggaaaatcagtgacatctgattggcagatgagcttatttcaaaaggaagggtggctttgcattttcttgtgttctatagactgccatcattgatgatcactgtgaaaattgaccaagtgatgtgtttacatttactgaaatgcgctctttaatttgttgtagattagggtcttgctgggaaggacagagaaaacttgcctttcagtattgacactgactagagtgatggactgcttgtagggtatgtctgtgccatttctcagggaagtaagatgtaaattgaagaagcctcacacgtaaaagaaatgtattaatgtatgtaggagctgcagttcttgtggaagacacttgctgagtgaaggaaatgaatctttgactgaagccgtgcctgtagccttggggaggcccatcccccacctgccagcggtttcctggtgtgggtccctctgccccaccctccttcccattggctttctctccttggcctttcctggaagccaggtaagtaaacttcctattttcttgagtcaaaaaacatgagcgctactcttggatgggacatttttgtctgtcctacaatctagtaatgtctaagtaatggttaagttttcttgtttctgcatctttttgaccctcattctttagagatgctaaaattcttcgcataaagaagaagaaattaaggaacataaatcttaatacttgaactgttgcccttctgtccaagtacttaactatctgttcccttcctctgtgccacgctcctctgtttgtttggctgtccagcgatcagccatggcgacactaaaggaggaggagccggggactcccaggctggagagcactgccagggacccaccactggaagcaggatggagctgactacggaactgcacactcagtggggctgtttctgcttatttcatctgttctatggcttcctcgtgccaattatagtttgacagggccttaaaattacttgggttttttccaaatgcttcctatttataggaattccccaaagacctcccacttggcttaagtataccctatcaccttacatttttgtggttttgagaaagtacagcagtagactggggcgtcacctcccaggccgtttctcatactacaggatatttactattactccccaggattcagcagaagattgcgttagctctcaaatgtgtgttcctgcttttctaatggatattttaaattcattcaacaagcaccctagtaagtgcctgctgtatccctacattacacagttcagcctttatcaagcttagtgagcagtggagcactggaaacatttaattttttaaatggtttaaaaagtttctaatattaaagtcagaatattaatacaattaatattaatattaactacagaaaagacaaacagtagagaacagcaaaaaaataaaaaggatctccttttttcccagcccaaattctcctctctaaaagtgtccacaagaaggggtgtttattcttccaacacatttcacttttctgtaaatatacataaacttaaaaagaaaacctcatggagtcatcttgcacacacttttcatgcagtgctctttgtagctaaacagtgaagatttacctcgttctgctcagaggccttgctgtggagctccactgccatgtacccagtagggtttgacatttcattagccatgcaacatggatatgtattgggcagcagactgtgtttcgtgaactgcagtgatgtatacatcttatagatgcaaagtattttggggtatattatcctaagggaagataaagatgatattaagaactgctgtttcacggggcccttacctgtgaccctctttgctgaagaatatttaaccccacacagcacttcaaagaagctgtcttggaagtctgtctcaggagcaccctgtcttcttaattctccaagcggatgctccatttcaattgctttgtgacttcttcttctttgtttttttaaatattatgctgctttaacagtggagctgaattttctggaaaatgcttcttggctggggccactacctcctttcctatctttacatctatgtgtatgttgactttttaaaattctgagtgatccagggtatgacctagggaatgaactagctatggaaataactcagggttaggaatcctagcacttgtctcaggactctgaaaaggaacggcttcctcattccttgtcttgataaagtggaattggcaaactagaatttagtttgtactcagtggacagtgctgttgaagatttgaggacttgttaaagagcactgggtcatatggaaaaaatgtatgtgtctccccaggtgcattttcttggtttatgtcttgttcttgagattttgtatatttaggaaaacctcaagcagtaattaatatctcctggaacactatagagaaccaagtgaccgactcatttacaactgaaacctaggaagcccctggagtcctgagcgaaaacaggagagttagtcgccctacaggaaacccagctagactattgggtatgaactaaaaagagactgtgccatggtgagaaaaatgtaaaaatcctacagtgaaatgagcagcccttacagtattgttaccaccaagggcaggtaggtattagtgtttgaaaaagctggtctttgagcgagggcataaatacagctagccccaggggtggaacaactctgggagtcttgggtactcgcacctcttggctttgttgatgctccgccaggaaggccacttgtgtgtgcgtgtcagttacttttttagtaacaattcagatccagtgtaaacttccgttccattgctctccagtcacatgcccccacttccccacaggtgaaagtttttcctgaaagtggttgggattggttaaggtctttatttgtattacgtatctccccaagtcctctgtggccagctgcatctggctgaatggtgccgtgaaaggctctcagaccttacacaccatttttggtaagttatggttttacatggccccggtttttggagaactgaatctccgatgccaggtggatctcccttgaagatcctggatagcctgttacaggaatgaagtaaaggtcagtttttttttgtattgattttcacagctttgaggaaccatgcataagaaatgtagcttgaagtaagaagggggcttgagagaaagggcccaggccggcaggccaacccttcctccaatggaaattcccgtgttgcttcaaactgagacagatgggacttaacaggcaatggggtccactttccccctcttcagcatcccccgtaccccactttctgcttgaaagaactgccagcaggtaggaccccagaggcccccaaatgaaagcttgaatttccccctactggctctgcgttttgctgagatctgtaggaaaggatgcttcacaaactgaggtagataatgctatgctgtcgttggtatacatcatgaatttttatgtaaattgctctgcaaagcaaattgatatgtttgataaatttatgtttttaggtaaataaaaacttttaaaaagttgttaaaaaa

SEQ ID NO: 148796 - DNA, 385 bp, Homo sapiens; identical to SEQ ID NO: 147008

SEQ ID NO: 148797 - DNA, 1171 bp, Homo sapiens
ggaaaagtggtcctggagctggagcgcttcctgccccagcccttcaccggcgagatccgcggcatgtgtgacttcatgaacctcagcctggcggactgccttctggtcaacctggcctacgagtcctccgtgttctgcaccagtattgtggctcaagactccagaggccacatttaccatggtcggaatttggattatgcttttgggaatgtcttacgcaagctgacagtggatgtgcaattcttaaagaatgggcagattgcattcacaggaactacttttattggctatgtaggattatggactggccagagcccacacaagtttacagtttctggtgatgaacgagataaaggctggtggtgggagaatgctatcgctgccctgtttcggagacacattcccgtcagctggctgatccgcgctaccctgagtgagtcggaaaacttcgaagcagctgttggcaagttggccaagtctccccttatttgctgatgttaattacattgctggtggcacgtgcccccgggagggggtggtggtcacgaggaacagagatggcccaggagacattgggcctctaaatcctttgaatggagcgtggctccgagttgagacagattactaccactggaagccagcacccaaggaagatgaccggagaacatctgcccatcaaggcccttaatgctacaggacaagcaaacctcaagctggaggcacttttccagattttgacggtggttccagtttataacaacctcacaatttatactacggcaatgagcgccggtagcccatacaagtacatgactaggatcagaaacccgagttagaaagtaagtcagcagaagagcgagttcgcccgtgctgtgaaagatgattttttaaaaaatgaaattcttgaagagctgcaccttaaaaaataagacaaagtgaaagtattggattatgttacaaacaatgcaggctccttcctcatttaactttacaaccttgcgaagtgggtccaggagatttggagtttgtggtaaagccagtaatgggcattgtcctgcattcccttcccttcatggtttgcctcgatcctctctaagcttctatcctggcctgaataactcaaagataattggtctcagagatcaagccatatcctcaggccttatttcca

SEQ ID NO: 148798 - DNA, 1137 bp, Homo sapiens
atgagtgaactcccattcacaattgcttcaaagagaataaaatacctaggaatccaacttacaagggatgtgaaggacctcttcaaggagaactacaaaccactgctcaacgaagtaaaagaggacacaaacaaatggaagaacattccatgcccatggataggaagaatcaattatcctgaaaatggccatactgcccaagaattggaaaaaactactttaaagttcatatggaaccaaaaaagagcctgcattgccaagtcaatcctaagcaaaaagaacaaagctggaggcatcacactacctgacttcaaactatactacaaggctacagtaaccaaaacagcatggtactggtaccaaaacagagatatagaccagtggaacagaacagagccctcagatataataccacacatctacaaccatctgatctttgacaaacctgacaaaaacaagaaatggggaatgggttccctatttaataaatggtgctgggaaaactggctagccatatgtagaaagctgaaactggatcccttccttacaccctatacaaaaattaattcaagatggattaaagacttaaatgttagacctaaaaccataaaaaccctagaagaaaacctaggcaataccattcaggacatagacatgggcaaggacttcatgtctaaaacaccaaaagcaatggcaacaaaagccaaaattgacaaatgggatctaactaaactaaggagcttctgcacagcaaaagaaactaccatcagagtgaacaggcaacctaaagaatgggagaaaatttttgcaatctactcatctgacaaagggctaatatccagaatctacaaagaactcaactttacaagaaaaaagcaaccccatcaaaaagtgggcgaaggatatgaacagatacttctaaaaagaagacatttatgcagccaacagacacatgaaaaagtgctcatcatcactggccatcagagaaatgcaaatcaaaaccacaatgagatacatctcacaccagttagaatggcaatcattaaaaagtcagggaacaacaggtgggaaatgaacaatgagaacacttggacacaggaaggggaacatcacacaccgggacctgtagtggggtaa

SEQ ID NO: 148799 - DNA, 517 bp, Homo sapiens
catttacattcggtatatctcctaatgctatccctccacgctccccccaccccatgacaggccccggtgtgtgatgttccccttcctgtgtccaagtgttctcattgttcaattcccacttctcttctcgcttcatttcattcatttgatcttcaatcactgataccctttcttccagttgatagaatcggctactgaagcttgtgcatgtgtcacatagttctcgtgccacggttttcagctccatcaggtcacttaaggacttgtctacattggttattctagttagccattcgtctaatcttttttcaaggtttttcgcttttttgcagtgggttcgaacttcctcctttagctctgagaagtttgattgtctgaagccttcttctctcaacttgttaaagtcattctccatccagcttttttccgttgctgatgaggagctgcgttcctttggagggcgagaggtgctctgatttttagaattttcagcttttctgctctgtttttttcccat

SEQ ID NO: 148800 - DNA, 469 bp, Homo sapiens
cccacaacaggccccagtgtgtgatgttccccttcctgtgtccaagtgttctcattgttcaattcccacctataagtgagaacatgcagtgtttggttttttgtccttgtgatagtttgctgagaatgatggtttccagcttcatccatgtccttcattttattcatttcatcttccatcactgataccctttcttccagttgattgcatcggctcctgaggcttctgcattcttcacgtagttctcgagccttggttttcagctccatcagctcctttaagcacttctctgtattggttattctagttatacattcttctaaatttttttcaaagttttcaactttgcctttggtttgaatgtcctcccatagctcagagtaatttgatcgtctgaagccttcttctctcagctcgtcaaagtcattatccatccagctttgttccgttgctggtgaggaactgtgtc

SEQ ID NO: 148801 - DNA, 267 bp, Homo sapiens
tcatttagcattaggtatatctcctaatgctatccctccctcctccccccagcccacaacagtcctcagtgtgtgatgttccccttcctgtgtccatgtgttctcattgttcaattcccaccttctgaagcctacttctgtcaattcatcaaactcattctccatccagttttgttcccttgctggtaaggagttgtgatcctttggaggagaagaggcattctggtttttggaattttcagcctttttgtcctgttttttcctcat

SEQ ID NO: 148802 - DNA, 631 bp, Homo sapiens
atgctacctgacttcaaactatactacaaggctacagtaaccaaaacagcatggtactggtaccaaaacagagatatagaccaatggaacagaacagagccctcagaaataatgccacacatctacaactatctgatctttgacaaacctgacaaaaacaagaaatggggaaaggattccttatttaacaaatggtactgggaaaactggctagccctatgtagaaagcagaaattggatcccttccttacaccttatacaaaaagtaattcaagatggattaaagacttaaatgttagaccaaaaaccataaaaaccctagaagaaaacctaggcaataccattcaggacataggcatgggcaaggacttcatgtctaaaacaccaaaagcaatggcaacaaaagccaaaattgacaaatgggatctaattaaactaaagagcttctgcacagcaaaagaatctaccatcagagtgaacaggtgggaattgaacaatgagaacacttggacacaggaaggggaacatcacacactggggcctgttgtggggtggggcgagggtggagggatagcattaggagatatacctaacgtgaatgacaagttaatgggtgcagcacaccaacatg

SEQ ID NO: 148803 - DNA, 430 bp, Homo sapiens
  misc_feature (1)...(430): n = a,t,c or g
acccagatgtggcttctgacttgagtggacccccatgaagagctgcagagnnnnnnnnnnnnnnnnnnnnnnnnnnnnnnnnnnnnnnnnnnnnnnnnnnnnnnnnnnnnnnnnnnnnnnnnnnnnnnnnnnnnnnnnnnnnnnnnnnnnnnnnnnnnnnnnnnnnnnnnagagtgagaccaattcctgggaagccacaaggaaaccaaattttagtagcaactcagagtcagcattcattagcaggtcacagggccataaggatgccaagaaggaatttgtccctctcctnnnnnnnnnnnnnnnnnnnnnnnnnnnnnnnnnnnnnnnnnnnnnnnnnnnnnnnnnnnnnnnnnnnnnnnnnnnnnnnnnnnnnnnnnnnnnnnnnnnnnnnnnnnnnnnnnnactgcagtcccatcctcttgtcagg

SEQ ID NO: 148804 - DNA, 428 bp, Homo sapiens
  misc_feature (1)...(428): n = a,t,c or g
cggacgcgtgggctgcagtnnnnnnnnnnnnnnnnnnnnnnnnnnnnnnnnnnnnnnnnnnnnnnnnnnnnnnnnnnnnnnnnnnnnnnnnnnnnnnnnnnnnnnnnnnnnnnnnnnnnnnnnnnnnnnnncaaggagagggacaaattccttcttggcatccttatggccctgtgacctgctaatgaatgctgactctgagttgctactagaatttggtttccttgtggcttcccaggaattgtgagccatgttggataaggacctgcaagggaagaatgaggaagcctgggacagtgcaggaggggagagcactggtggtagagaggagtgatgacaagggtctccgccaaaagggaaatggaggggttaaagaagctgctggggagggttaaaaacaatgnnnnnnnnnnnnnnnnnnnnnnnnn

SEQ ID NO: 148805 - DNA, 1065 bp, Homo sapiens
tcatttagcattaggtatatctcctaatgctatccctcccctctccccccaccccacaacagtccccagagtgtgatgttccccttcctgtgtccatgtgttctcattgttcagttcccaccttagtccagatgcctccattacaggtggttggtgagtctgagcatttcctgatggctttgacgctgtgggtataatgaagtgaaaagacacttgcaagatcttgtctttgaggaagaacaaatgtccacgcagacaggaagcggctggcctggcgttagctcctcctgtgaggacagaatttttgccgtgggctctgaagactagctgcatttctttactttgatttttatcttcatacaagaggaccattacctgcttatatatgtttctggttggttgcaggacctgggtacataaacttttacaagggtagttgaattccaggatcaaggtgccagcaggatctgtatctggagagggctctcttcttcggttgcagggcttcttgattagctgtatttctaggtattccaggttattatttctgatcatcacagacaatactgaattctcaattaggctctctgcttgaatgttattggtgtatagaaatgcgactggtttttctacattgattttgtattctgaaactctactgaggtcatttatcaattctaggagccttttgatggagtctttagggttttctttatcatcaactctcttgcctggtgaaattccaacaccaattaaatcagaataattccatgaacctttgtagttgaacttggctgcagaaaagtgacaaatattgctgactgatctttcagcactacccatgtgctctccgtgtcttggcaacccgaagtcttcataggtgcgtgaaccactttgcttggtgggaacttcctcctccagttcccatgggctccgagctttagagagcccaaatgccaagtaatgctcacacgctctccatctgcttgttctttctcctgctgggttttggtgccctctttccttagcataaccattaattgttgccatttctttgtcattcat

SEQ ID NO: 148806 - DNA, 1983 bp, Homo sapiens
tcacagttctgggggtgggaagtctaaaatcaaggtattagcagggttggatccttctggggcctctgagggaggaggggttccacgcctctccccaggctcctggtggttgccagcaatccttggcattctccggtttgtggtagcataaccccagcctctgcctctgtcttctgtggtcatcttctcttgtgcctctgttttctcttctgttaatgattccttgtctcctgagttaaatgaagattcatggtgccttttctgtcctaaactttttccagctctttggtagaaataaaggctgttgaattctttttgatttgcattagaatcagaagcacgaaataaatccaaactggggacagatggtaattctctccagaaagtctcatcttttgaactttcacatgtgaggccttcagactcatctgatagacatttttgctgatcagtgaataaattacctttctgagagtacaatttgttacatgcagtctgctgtgcaccatattgtaagttgaacgggtgattctcttgttcccatatatttttcttaaagttccaatgaagaggagattgagtgccctctagtgaaaagatagggtccgatacatctttatttatgaaaccttttgcttcatgtgttctccttttctgagaatttataaaacgggggacaactgacactctcttctgagtgtcagttggtgattttatagtttcacagttcatttgtgttagacccaaagaaaagacatctgactctgaatcactgtggtttagaaaggagttataagccggtctccttgattctatattaattagaaaaggagtattctgccctatattagatttacagctggagtctttccagtagctggtctgattgtatgaagtcacaggtggtaaaaaacttgagatttcttttagttccataatggaagagttgtcattcaaaatggtggttttgtcttcctgcactgtctctcctaatcctaaatactgataatattcattatgttcttgaatgacagagtctaaatcagaagctgaactttgagaagacaaggtactaatctgattcctattttcctcagatggtgaaactttaagccaggatttatccaaccattcatgaggatctctctttgaggtcattaaactgtggtcagcaatttgtcgaattatcaaggcagttgcttctactcctggggcaattataagctcccgccaccccacgacaggccccggtgtgtgatgttccccatcctgtgtccaagtgttctcattgttcaattcccacctatgagtgagaacatgcagtgtttggttttctgtccttgtgacagtttgctcagaatgatggtttccagcttcatccatgtccttggattctagcagctgaagtatgtctggagtattaagaagtccttcagatgcaaaaaacacatatggaatctgaatttccaaaagaaaacctccaaatctatccagcaaggtgcttctttctaaaactgtgtctggaagaatcactttaaaggccatgtaaggaatattcaactctttgcagtgtttagtccaacaagagtcttccacataattgtattccaccacaaatgagaaattactccaggggaaatctgctccaatatattgattatgtacaactacacaggaacttgtatgctggggaaatatattttcattgctgaaggaagagtgcactgtgcaattcctcgtggagggagggggcagtaggatgcctgcccatggatttccccaggctccacctgagtctttctccctcctcattacattgccgtaataaaccttagccatgaatacaactatagtctgggtcccgtgagcccttccagtgactctccaaacataaggtatccttgggcaccctccacatgagtaattagattgacgaatcccaatgtctccgatagggtcgaagtcactggtgccatctcccat

SEQ ID NO: 148807 - DNA, 984 bp, Homo sapiens
tcagtgaacatctgcagcagttaaagtcaacataagccgccattgctgaaagctgacgttgattggataattgatggaaatgatcttaaaaggagtaatcacaaacaggagaaactgacgaaaactgttgggaaaagctaccagctccagccatggctgaaaagggccaacgtagaggttatgctgtggcttcagagggtgcaagcccctagccttggcagcttccatgtggtgttgaccgtgcgggtacacagaagtcaagaattggggtttgggaacgtctgccaaggtttcagaagatgtaggaaaatgccccacgacaggccccagtgtgtgatgttccccttcctgtgtccaagtgttctcattgttcaattcccacctatgactgagaacatgcggtgtttggttttctgtccttgtgatagtttgctgagaatgatggtttccactttcatccatgtcctctcttctggcttgtagggtttctgccgagagatctgctgttagtctgatgggctttcctttgagggtaacccgacctttctctctggctgcccttaacattttttccttcatttcaactttggtgaatctgacaattatgtgtcttggagttgctcttctcgaggagtatctttgtggtgttctctgtatttcccgaatctgaacgttggcctgccttgctagattggggaagttctcctggataatatcctgcagagtgttttccaacttggttccattctccccatcactttcaggtacaccaatcagacgtagatttggtcttttcacatagtcccatatttcttggaggctttgctcatttctttttattcttttttctctaaacttcccttctcgcttcatttcattcatttcatcttccattgctgataccctttcttccagttgatcgcatcggctcctgaggcttctgcattcttcacatagttctcgagccttggttttcagctccat

SEQ ID NO: 148808 - DNA, 2479 bp, Homo sapiens
tcagtcgctggatatagaattggaataaacaggcttaacaaatggcacaacacctaccacatttggtctttggttctcacagtggaagcctctgggagcttttatcccattaggtgtatctcctaattctatccctcccccctccccacaccccacaacaggccccagtgtgggatgttccccttcctgtgtccaagtgttctcattgttcaattcccacctataagtgagaacacgcggtgtttggttttttgtccttgcgatagtttgctgagaatgatggtttccagcgtcatccatgtccctgttgtttcctgagtttttaatgatcgccattctaactggtgtgagatggtatctcattgtggttttgatttgcatttctctgatgaccagtgatgatgagcattttttcatttgtctgttggctgcataaatgtcttcttttgaaaagtgtctgttcatattttttgcccactttttgatggggttgtttgatttttttcctgtaaatttgtttaagttctttgtagattctggatattagccctttgtcagatgggtagattgcaaaaattttctcccattctgtaggttgcctgctcactctgatggtagtttcttttgctgtgcagaagctctttaatttaattacatcccatttgtcaactttggcttttgttgccattgcttttggtgttttagtcatgaagtccttgcccatgcctatgtcctgaatggtattgcctaggttttcttctagggtttttatggttttaggtctaacatttaagtctttaatccatcttgaatgaatttttgtataaggtgtaaggaagggatccagtttcagctttctacatatggctagccagttttcccagcaccatttattaaatagggaatcgtttccccatttcttgtttttgtcaggtttgtaaaagatcagatggttgtagatgtgtgatgttacttctgaggcctctgttctgttccattggtctatatctctgttttggtaccagtaccatgctgttttggttactgtagccttgtagtatagtttgaagtcaggtagcgtgatgcctccagctatgttctttttgcttaagattgttttggcaatgcaggctcttttttggttccatatgaactttaaagtagttttttccaattctgtgaagaaagtcattggtagcttgatggggatgtcattgaatctataaattaccttgggcagtatggccattttcatgatattgattcttcctatccttgagcatggaatgttcttccatttgtttgtgtcctctcttatttccttgagcagtggtttgtagttctccttgaagaggtccttcacatcccttgtaagttggattcctaggtattttattctctttgtagcaattgtgaatgggaattcactcatgatttggctctctgtttgtctgttattggtgtataggaatgcttgtgatttttgcacattgattttgtatcctgagactttgctgaagttgcttatcagcttaagattttgggctgagacgatggagttttctagatacacaatcatgtcatctgcaaacagggacaatttgacttcctcttttcctaattgaatgccctttatttctttcttttgcctgattgctctggccagaacttccaacaccattaacttgtcatttacattaggtatatctactaatgctatccctccccgcttcccccaccccacaacaggccccagtgtgtgatgttccccttcctgtgtccaagtgttctcattgttcagttcccaccttgggaaggccattttcatgatattgattcttcctatccatgagcatgcaatgttcttccatttgtttgtatcctcttttattttgttgagcagtggtttgtacttcttgaagaggtccttcacgtcccttgtaagttggattcctaggtattttattctctttgtagcaattgtgaatgggaattcactcatgatttggctctctgtttgtctgttattggtgtataggaatgcttgtgatttttgtacattgattttgtaccctgagactttgctgacgttgcttatcagcttaaggagtttttgggctgagacgatggggttttctagatacaaaatcatgtcatctgcaaacagggacaatttgacttcctcttttcctaattgaataccctttatttctttctcctgcctgattgcctgggccagaacttccaacactatgttgaataggagtggtgagagagggcatccctgtcttgtgccagttttcaaagggaatgcttccagtttttgcccattcagtatgatattggctgtgggtttgtcataaatagctcttgttattttgagatatgttccatcaatacctaatttgttgagagtttttagcatgaagggctgttgaattttgtcaaaggccttttctgcatctattaagataatcat

SEQ ID NO: 148809 - DNA, 4728 bp, Homo sapiens
gtgttctaagcggtaccgggagtttgctatcctacaccagaacctgaagagagagtttgccaactttacatttcctcgactcccagggaagtggccattttcattatcagaacaacaattagatgcccgacgtcggggattggaagaatatctagaaaaagtgtgttcaatacgagtaattggtgagagtgacatcatgcaggaattcctatcagaatccgatgagaactacaatggtgtgtccgacgtagagctgagagtagcattaccagatggaacaacggttacagtcagggttaaaaagaacagtactacagaccaagtatatcaggctatcgcagcaaaggttggcatggacagtacgacagtgaattactttgccttatttgaagtgatcagtcactcctttgtacgtaaattggcacctaatgagtttcctcacaaactctacattcagaattatacatcagctgtgccaggcacctgcttgaccattcgaaagtggctttttacaacagaagaagaaattctcttaaatgacaatgaccttgctgttacctacttctttcatcaggcagtcgatgatgtgaagaaaggttacatcaaagcagaagaaaagtcctatcaattacagaagctatacgaacaaagaaaaatggtcatgtacctcaacatgctaaggacttgtgagggctacaatgaaatcatctttccccactgtgcctgtgactccaggaggaaggggcacgttatcacagccatcagcatcacgcactttaaactgcatgcctgcactgaagaaggacagctggagaaccaggtaattgcatttgaatgggatgagatgcagcgatgggacacagatgaagaagggatggccttctgtttcgaatatgcacgaggagagaagaagccccgatgggttaaaatcttcacgccatatttcaattacatgcatgagtgcttcgagagggtgttctgcgagctcaagtggagaaaagaggaatattagttagagactgattatctcatgtgagccaggacattcttccagcaaggttggcctctggatggtgaacgggctgtgcaaaaaagccctgcttcttcccttgtctagagggtggacattggctacaggctcttccatctctcatgacttcatggaccctcctctgccagttttttaaatcagatcaccctccatgttgttcctgacccacaggggaagctgtcctcagttgtagccgtcttgactggatgagtcctggcagtctttctaggcgaaccaagaatgtttgtgtgagggaaggtgtttgctgttgctttactgctgtctgtatgtgccagtgctggaacagaatttggaagattctgaataattagttacttattctcaaagaaaatctttgaaagaatcaggaggtcaagtcaagaacatgaaaatttatattttagtacagtagaaagaacattgggctctgggaattttatctgggttttctcctggctttttttttccctctgtgtaattttgggtaaatcagcctccctagctttcagttttctcttctgtgaaacaggaagactgaaccacgtaattaatatccaaggtcccttccggctctaaaaggctatgattctagatgagaagttatatcaagaaagatgtggccaatcagattgagtcatccaggcatacctttttagcttctgtttgtggagttgtctccagataagaggagatgtgccttcccaataactctttttttttttcctttcagaacattttccagatggcgaggtcacagcagagagatgtggccacctagcctttccttatccccttcccttcccttcacccccatcctcttactcctttcatgtcccatttcagacagagtaaccattaacaaaaaagaagagaaaaagttaaagtcgttatattcaaaagccctaaactaaatattattaataaccccctctgaatttcatgtctctggaattgaggtggtagtgaacagcagatcggtcagcaccagaagtcaactgagttaaggcaggaaaagaaataagcccaaccaacttgccaaaggtatctttgtcctttcacctgggcctcataccaacagcctctccttgtactatatttttaaaactggaactatgaacttcatccatttgcactgttcagacatatatatgtatgtatgtaaaaattatatatacacaaattagctgcacgtatatacatatatatatttctttttaaatttcatattgatggcagtaccttttttagcttgtgtttttacacacctttcactagaatccatgacctccctcgtgctctctttcttttgaaacaaactttaaaaaggaaaaaaaagcattttacagggaaaaatacctctcctcatgaaggacttgaaaagtttacaacctgcttggatttttgcccctttttttgtattgagtatagattccggctcatgggttgccatagagtctaggaacaaggagtatagtttctttatcttccaagagggtgctggggaggagaaagaggtgtgtttctcaaggttaacaggctgtagttctgcagggagagcctgaagtcctggtatgggctcttgattctgtgacaatttttttgatccatctatttctctcactcctggctttctagccacattctgcacctccttcctgctttcctagagcctcggtatgctttccctcaaccgaccctggctcaggaggttgatgccatgggaacctgaacctgaaacacttcatggtagtaatttcctgttttccttgccttttttttttttttttttttttttttctgagacagggtcttactctgtcgcccagactggaatgtggtggcatgaacatagctcactgttaccttgaattctgggctcaggtgatccttccgcctcaccctcctgagtagctgggactacaggtgtgcaccaccacacctggctaattcttcttaaaatttttttgtagagacagggtctcactatgttgcccaggctggtctcaaactcctggcctcaggtgatcctcttgtctcagcctcccaaagtgctgggattacaggcatgagccactgtgtccttccctgccttttttgcagcagggatagtactcaggaccagagttaagctgataccttaggcacacaggttggacttacatagaggaaagaaagcaagaaatgccctatgtacatgaggttttacctcctccattcctgaccaataaccacccataactacggcattctctgtgacttccttaaacagcagtgatgggaagggatccaatagtatcttcaaggccttggggaaacttgcagtgggtcagtggtctgtgccaaccaaacgatagccccatccaagccagctgagaacctaggaaggagtagtaggaatatggttgattagattggatctcccaagttttaattgaaaggagactgaacgaaaacctttctgctttctgtccgttaaagagctcctcatctgatcttgcagctagaccctttgagacttaagagctgcatcccaggatcagaagccagggctaattggggtaggacaatattcccagcccctaagctctgtagataatgcataagaagcaccaagtcaggctcagatgcaactaaaacacatctttgagccttttctttttcccttctcccctttctaaacaaaaaccttcctaggatggcatcttttgctctaactgggagacagtcataattggttgtagtcaattctactaagcagtgttggggtggttggaaagtctcttttttgtaatttgtttttgcaaatcattgtgaggccactttttctttctttctttctttctttctttctttctttcgttctttcgttctttcgttctttctttctttctttctttctctttctttcttttgctttccttctttcatctcttttttgtaatttgttgttgcaaatcattgtgaggccacttttctttccccttccttccttcctttttttctgtttttttttttttttttttcccagagtcttgctctgtcgcccaggttggagtgcagtggcacgatctcggctcactgcaccctctgcctcttgggttcaagcgattctcctgcctcagcctcccaagtagctgggattacaggacaaggagagggacaaattccttcttggcatccttatggccctgtgacctgctaatgaatgctgactctgagttgctactagaatttggtttccttgtggcttcccaggaattgtgagccatgttggataaggaccctgcaagggaagaatgaggaagcctgggacagtgcaggaggggagagcactggtggtagagaggagtgatgacaagggtctccgccaaaagggaaatggaggggttaaagaagctgctggggagggttaaaaacaatgtgttctcactcgtaggtgggaattgaacaatgagaacacttggacacaggaaggggaacatcacacactggggcctgtcgtggggtgtggggagggaggagggatagcattaggagatatacctaatgtaaatgatgagttaatgggtgcagcacaccaacatggcacatgtatacctatgtaacaaacctgcacattgtgtacatgtaccctagaacttaaagtataattaaaaaacaaaacaaaacaaaacaaa

SEQ ID NO: 148810 - DNA, 3536 bp, Homo sapiens
tcatttagcattaggtatatctcctaatgctatccctccccgctcccaccaccccacaacaggccccagtgtgtgatgttccccttcctgtgtccatgtgttctcattgttcagttcccacgtatgagtgagaacatgcgacatttggttttctttccttgcgatagtttgctgagaatgatggttttcagcctcatccatgtcccatgctgttttggttaccgtagccttgtagtatagtttgaagtcaggtagtgtgatgcctccagctttgttcttttggcttaggattgacgtggcaatgtgggctcttttttggttccatatgaactttaaagtagttttttccaattttgtgaagaaagtcattggtagcttgatggggatagcattgaatctataaattaccttgggcagtacgaccattttcatgatgttgattcttcctatccatgagcatggaatgttcttccattagtttttgtcctcttttatttctttgagtagtggtttgtagtttttcttgaagaggtccttcacatcccttgtaagttggattcctaggtattttattctcagctatttgacctggaacagtcacttgagtgctgtgggcgtcagtgtcctcagcttcagtagcctctcttggttgcatcatgacaccattttcagtattgccaaaattatattcctgtctgcaagtgtcctcaggcaatatctgatcaggcactctgtctgaagctggacagatgcagttataaggcttccaagtgtcagtgttcagaccagtggagtctagcagagttcccataggtcctatgacaggccccggtgtgcgatgttccccttcctgtgtccaagtgttctcattgttcaattcccacctatgagtgagaacatgcagtgtttggttttttgttcttgcaacagtttgctgagaatgatggtttccagcttcatccatgtcccatgctgttttggttactgtagccttgtagtatagtttgaagtcaggtagcatgatgcctccagcttgttcttttggcttaggattgtcttggcagtgcgggctcttttttggttccatatgaactttaaagtagttttttccaattaaaaattctggcatcgctttgatatcttcaatttgggcttgatttggatacaaaggtattggtaagtctacgtcgctatcgaaactagctatgaatagggcatccccacccccaacaggccccagtgttgtgatgttccccttcctgtgtccggtgtgttctcactgttcagttcccacctgtgagtgagaacatgcggtgtttggttgtttgtcctggcgatagtttgttgagaatgatggtttccagcttcatccatgtccctacaaaggacatgaactcatccttttttatggctgcatagtattccatggtgtatatgtgccacattttcttaatctagcctattgttgttggatatttaggttggttccaagtctttgctattgtgaatagtgccgcaataaacatacgtgtgcatgtgtctttatagcagcatgatttataatcctttgggtatatacccagtaatgggatggctgggtcaaatggtatttctagttgtagatccctgaggaatcgccacactgtcttccacaatggttgaaccagtttacagtcccaccaacagtgtaaaagtgttcctatttctccacatcctctccagcacctgttttttcctgactttttaatgattgccattctaactggcatcaggtggtatctcattgtggttttgatttgcatttctttgatggccagtgatgatgggcatttttccatgtgtttgttggctgcataaatgtcttcttttgagaagtgtctgttcatatcctttgcccactttttgatggggttgtttgtttttttcttgtaaatttgtttgagttctttgtagattctggatattagccctttgtcagatgagtagattgcaaaaattttctcccattctgtaggttgcctgttcagtctgatggtagtttcttttgctgtgttttcagtcttcagataccccagcaaagaacagaagctctttagtttaattagatcccatttgtcaactttggcttttgttgccattgcttttggtgttttagacatgaagtccttgcccatgcctatgtcctgaatggtattgcctaggttttcctctagggtttttatggttttaggtctaacatgtaagtctttaatccatcttgaattaagttttgtataaggtgtaaggaagggatccagtttcagctttctacatatggctagccagttttcccagcaccatttattaaatagggaatcctttccccattgcttgtttttgtcaggtttgtcaaagatcagatagttgtagatgtgtgttattatttctgagggctctgttctgttccattggtctatatctctgttttggtaccagtaccatgctgttttggttactgtagccttgtagtatagtttgaagtcaggtagtgtgatgcctccagctttgttcttttggcttaggattgtcttggcaatgcgggctgttttttggttccatatgaacgttaaagtagttttttccaattctgtaaagaaagtcattggtagcttgatggggatggcattgaatctataaattaccttgggcagtatggccattttcacaatattgattcttcctatccaggagcatagaatgttcttccatttgtttgtgtcctcttttgtttcgttgagcagtggtttgtagttctccttgaagaggtccttcatgtcccttgtatggtggattcctaggtattttattctctttgaagcaattgtgaatgggagttcactcatgatttggctctctgtttgtctgttattggtgtataagaatgcttgtgatttttgtacattgattttgtatcctgagactttgctgaagttgcttatcagcttaaggagattttgggctgagacaatggggttttctagatatacaatcatgtcatctgcaaacagggacaatttgacttcctcttttcctaattgaataccctttatttccttctcctgcctaattgccctggccagaacttccaacactatgttgaataggagtggtgagagagggcatccctgtcttgtgccagttttcaaagggaatgcttccagtttttgcccattcagtatgatattggctgtgggtttgtcatagatagctcttattattttgagatacgtcccatcaatacctaatctattgagagtttttagcatgaagcattgttgaattttgtcaaaggccttttctgcatctattgagataatcatgtggtttttgtctttggttctgtttatatgctggattacatttattgatttgtgtatattgaaccagcctcgcatcccagggatgaagcccacttgatcatggtggataagctttttgatgtgcttctggattcggtttgccagtattttattgaggatttttgcatcaatgttcat

SEQ ID NO: 148811 - DNA, 807 bp, Homo sapiens
tcatagagatggagatctcatcatgttgcccaggcaggtctcaaactcctgggctcaagcaatgctcccacctcagcctcccaaaatgctaggattatagatgtgggccatcacaccctgcctacacttgccttcttgatgttcctaattagttcccattctgatcctatttcacttggtcatttccactatcttccagtcacttggtttttctggtaggaacttttttctatgctaaacagttttaatgataaaaaggatattaagaaataaggtaagattactgggagatttaaactgttacctgatagtggtccttttacaaacagaactctactacccaatcatgccaagttttggccatttatgaacgttcatgtgaattcacagagggcagttaaatccatctgtgtagaaatataagcaatcccttttctcctgcctctgaagaaaaggaagaggagtacaaaaaggcaggaataaaagatactgatctacttttagctctaattacaaaaccgagaactatttcataccttgtcttagaacagttaattcatgattggtgatgagaccacagaggtaataaatctgaaagtgctcaagacttgttagtagctcattgaagctttgaagctacaagtcattctcatcttttgcattctcataatttaacataaggtgaatccagcacttttccaaaatgccaaagccattttggaaaacagctcttgaggactcaagactgaagtaggacaacacatatgaagggctctgacacattctggaagctttgagtccatttct

SEQ ID NO: 148812 - DNA, 1017 bp, Homo sapiens
cggtatggacagagtgatgagtcagcttttgtgttcaagcggaaacccaattggtttaaaagaagagccagtaagttcatgactcacgtggcctcccagtttgcctccagctatgtgttttattggcgggattactttgaggaccagccccttctgtatcccccaggctttgacggaagagtcgtggtgtatcccagcaaccagactttaaaggactacctcagctggcgacaagcagattgtcacatcaataatctttataatacagttttctgggcacttatacaacaatctggacttaacccccagtacaaagcccaaggggagattacagggaactcttgcagccagaccaggaatgagattttgttttctgaattcaacatcaactataataatgagctgccgatgtataggaaagggactgtgttgatatggcagaaggtggatgaagtgatgacaaaagaaattaagctgccaacagaaatggaaggaaaaaagatggcagtgacccggaccaggacaaagccatgcaagccctcccacctcccaagggctccttgccttaggtggctgtagcatccctaccacccaggacactggtgcgaatgacacaactcaagttggggaggggaacagggaaggaagggatggatgggggtggtgtatcttactctgtttaagcagaacaccttgtttgcggtgttggaacatggttcctttggcagaagtgctttttttttaatcgcagtactatttttataaagcaagaactattccatgccttggagaatgaatcatttttagattgtgacataaatcttgtaaaaacctgtcagttattttcatctatgagagaagaggagcccaaactctcgcccacctgttcttaaccagaaaacccactgactttgaaaatctcacctctgccacccatctacttgcattcgtctttggcagacctcaagataaatatgggttaatgcctgcatgatgcctctgaattcaggaattgca

SEQ ID NO: 148813 - DNA, 614 bp, Homo sapiens
  misc_feature (1)...(614): n = a,t,c or g
caacaatctggactaacaccagtacaagcccaagggagattacagggaactcttncagcagacaagaatgagattttgttttctgaattcaacatcaactataataatgagctgccgatgtataggaaagggactgtgttgatatggcagaaggtggatgaagtgatgacaaaagaaattaagctgccaacagaaatggaaggaaaaaagatggcagtgacccggaccaggacaaagccagtgcccttgcactgcgatatcatcggggatgctttctggaaggaacatccagagattctagatgaagacagcttgacccttttgcgcttcagttctggtgtgcttaaccatgcaagccctccccacctcccagggctccttgccttaggtggctgtagcatccctaccacccaggacactggtgcgaatgacacaactcaagttgggaggggaacagggaaggaagggatggatgggggtggtgtatcttactctgtttaagcagaacaccttgtttgcggtgttggaacatggttcctttggcagaagtgctttttttttaatcgccgtacctatttttttaagccagaactattccatgccctgggggatga

SEQ ID NO: 148814 - DNA, 1269 bp, Homo sapiens
atggctggggctgcacattccatggagctggtgggagccccaccccttccagagtggagagcagccccccgagtttctggtgctgggccatgcagctccacctccaaggaatggaaagtcacctataaagatagcaatgccagtggaaccacgctgcttgaggctctggactttattctaccattaactcatccaacttatgagcccttgtgtctgtgtctccaggatgtctacaagattgttggtattggtactgtacctgtgggccgagcggagactggtgttctcaaacctggcatggtggtcagctttgctccagtcaatgttagaattgaagtaaagtctattgaaatgcaccatgaagctttgagtgaatctcttcctggggacaatgtgggcctcaatgtgaacaagaaaaaaaaaaagaacgcatctgccaaagatgttcatcatggcaatgttgctggtgacagcaaaaatgacccaccaatggaagcatctggcttcactgctcaggtgattatcctgaaccatctaggccaaatcagtgctggctatgcccctgcactagattgtcacacatctcaaattccttacaagtgttctgagcagaaagaaaaggtgaccattctgctctgcctggaaacttatccaggttcagggaccagtggattgcgaagtccaaatgtggctcccgttgtccagtgccctccaagctgggcatctcggccagttctcttatcaaacagaagaggctttacacttccaccaactgcagcagttgtcaggtcccggggtccgggtccagcccatgctgaagtccagagggagttggtggatgagcagaaagaacactcggggctgaaggcaggacaaactaaatcccatgaagacttactggaacctgcatctgtctcttattgcctccaacctaaagaaagagctggcatccatagtcgtggaagtgcacacaaacctgacttaggacttggagaagttgaagaaggagatcttgtcagagttggagttgctgcaggtcctgttgctgccccacaccaacgaggtgtgccagttgatcagtgccagtgtatggcagtgttgttaataaagaagtggaggagctgtagccagctgttgctttatgagttgcagtcagctgtgtctgaagagaacaagaaactaagccttactcaattgatagactactatgggttagaagataaattgctacactataacagaagtgaagaagaattcatagatgtttaa

SEQ ID NO: 148815 - DNA, 438 bp, Homo sapiens
  misc_feature (1)...(438): n = a,t,c or g
cggcacgagaacagagaggaactgcaagtaattgctgacctttgcatcaaatatgacacactctgcatcagtgatgaggaattcatgaatggggttgaatatatctggaaaggaccctgcttctgccttactacattcaccctttatctgaagggggacatttnnnnnnnnnnnnnnnnnnnnnnnnnnnnnnnnnnnnnnnnnnnnnnnnnnnnnnnncctgttattcatctgataaccagctgctaagtgactagtgggcaggtatacagcacagatacgccaagnnnnnnnnnnnnnnnnnnnnnnnnnnnnnnnnnnnnnnnnnnnnnnnnnnnnnnnnnnnnnnnnnnnnnnnnnnnnnnnnnnnnnnnnnnnnnnnnnnnnnnnnnnnnnnnnnnnnnnnnnnnnnnnnnnnnnnnnnnnnnnnnnnnnncg

SEQ ID NO: 148816 - DNA, 583 bp, Homo sapiens
tttttttttttgacggatctgtctctgtcgcccaggatggagtacagtggcacaatctcagctcactgcaatctctgcctcccaggttcaagcaattctcctgccttagcctcccaagtagctgaagtctttatctcctaccttgatctctgtagcagaaaagaacagtatagatatcaattgtcatcaacagatgcaacatatcttgtaaatcaatatattttcaagtgaggtctctgaatcacctgcactgaaatcatctgtgatgcttatcaagcatgcagattctcaggacccttcactgacttcataaatcttcatctctggaggtgagaccctggacactgtatatgcaacgagcacaccaccaatcctggatgagccccgctttttctctgtgccagaaccttaatgccacgcagcattacattaagtcacattacaactttggtcaatggaaacacaggtctttttctgacaaaatgccatcaagccaggtttgctccccacttaagttcaaatattaatcattaattttctgagcctaaatgcatttatccatgttaaacataattattttaac

SEQ ID NO: 148817 - DNA, 901 bp, Homo sapiens
aagggtgttgtgcccagggctttacatggtaatgttagacagcgcagtctcggaaataagtgtgccttcgagtccaagtaacgcgtcacactggctgagcactggttcccatccttgtaccggtcgctgaagtcaaaggcaggccttggatgcacccgcagggctcccctgccttgtgagctccccttggaaataaacacgaccatgcagagaggttgctggtgagagcgtgggacagaccgggggtggatgctgggatttggatgcttatttccaggtcgggggtggagagacctacaccatcggcttgcagtttgcgcctagtcagagagtgggtgaggaggagatcctgatctacatcaatgaccatgaggacaaaaacgaagaggcattttgcgtgaaggtcatctaccagtgagggcttgagggtgacgtcccttcctgcggcaacccaaactggggccctgtctgtgcccctcctgccctgcaggctgtcctccccgcctctctgcaacctttcacttcagtgccccaccctggctgaacctgtgcacttggctgaggaagcagagaccgagcgctggtcattttgtagtacctgcatcccagcttagctgctgctgaccccccagcaggccctgggttcccgtgagcgcgaactccgtggtggtgggtcctggctctggtgctgcccatcctacgccatgtgggaccctcgttaatcgctgttgctcaaaatgtattttatgaatcatcctaaatgagaaaattatgtttttcttactggattttgtacaaacataatcctattatttgctatgcaatattttatgctggtattatatctgttttttaaattgttgaacaaaatactaaacttttacacgtctaaaaaaaaaaa

SEQ ID NO: 148818 - DNA, 953 bp, Homo sapiens
tcgcccaggctagaattcagtggcaggatcatagctcactgcagcctcgaactcctaggctcaagcaatcctcctgcccctgcctcctgggtagctggaactgtagatgcaagccaccaagcccagctctaatcacactttgaatagctatgaattaacaataaacacaaattcaaaaggaaatagaaaagcaaacattatctttatttaataatctttgatatttaaaatacaactcattgaacatccacactaacaacagaatcctgtgttcaacagtgctttggaagcccggcttttctaacgaccagacaggaaggcctgtgtgtgtaataacagcaaatgaactttaacgagggagcacacacagaagggctgcagggctggggtcctgagcaagcggcactgccacagtgcacttggtatcatgggccaaacaacaatggctttttgtttcagatattttctgtacttgaatttcaaatatttatacagaacagtaatttttaaaaagttattcctaatagcccagtgttgtaaaaattagataatcacatttaaaaatgtatgttttcctctttcaaaaaaaaaaaaagcattaaaaaaattcagaaaacattccttgaactatgcaagagacaattgagagcttcctaaatgcatcaggaatatccatttatattttactaatgtttcctcattggctttgtcctatgaatcccacaggcttaaaatgttttttgatatgctattaaacatgcccaattatgacaaatttagaagttacgttattagcactaattcttaaaatgccagaccacttggaaaaaataataatagcaaagattttcttcaaattaaaaaacaaaatcaaaattctagaatttaccaacgatgtcaataatcttcattcatgaaagcaaattagaacaaaaatatttttattatgttta

SEQ ID NO: 148819 - DNA, 448 bp, Homo sapiens
  misc_feature (1)...(448): n = a,t,c or g
cacaggtctgcctgtcccccaagaagctcttagtagcagctgtgcttgaactcgtggccatttctcctcggatgacctttagaaatggtttactggtgcggtgctgttttctctgagttcttattgggcaattcaggggcaagtctaaatgatgcctcttttcgagggaaagaagcaaggcaggaagctgcagagtccaacagggagcgcggccagggccaggagcccgtgggatcgcaggagcatgcgtctactgcctcactgacactcatctgagccctcccatgacatggagaccgtgaccagtgctgctgcagaggaggtcacgcgtccccaaggcctcctgtgactggcagcattgactctgtggctttgccatcgtttccatggacaacagacacaacacagttctcggngctcaggaggggaagtccagcctaccaggcac

SEQ ID NO: 148820 - DNA, 3356 bp, Homo sapiens
cactaacgctcttcctagtccccgggccaactcggacagtttgctcatttattgcaacggtcaaggctggcttgtgccagaacggcgcgcgcgcgacgcacgcacacacacggggggaaacttttttaaaaatgaaaggctagaagagctcagcggcggcgcgggccgtgcgcgagggctccggagctgactcgccgaggcaggaaatccctccggtcgcgacgcccggccccgctcggcgcccgcgtgggatggtgcagcgctcgccgccgggcccgagagctgctgcactgaaggccggcgacgatggcagcgcgcccgctgcccgtgtcccccgcccgcgccctcctgctcgccctggccggtgctctgctcgcgccctgcgaggcccgaggggtgagcttatggaacgaaggaagagctgatgaagttgtcagtgcctctgttcggagtggggacctctggatcccagtgaagagcttcgactccaagaatcatccagaagtgctgaatattcgactacaacgggaaagcaaagaactgatcataaatctggaaagaaatgaaggtctcattgccagcagtttcacggaaacccactatctgcaagacggtactgatgtctccctcgctcgaaattacacggtaattctgggtcactgttactaccatggacatgtacggggatattctgattcagcagtcagtctcagcacgtgttctggtctcaggggacttattgtgtttgaaaatgaaagctatgtcttagaaccaatgaaaagtgcaaccaacagatacaaactcttcccagcgaagaagctgaaaagcgtccggggatcatgtggatcacatcacaacacaccaaacctcgctgcaaagaatgtgtttccaccaccctctcagacatgggcaagaaggcataaaagagagaccctcaaggcaactaagtatgtggagctggtgatcgtggcagacaaccgagagtttcagaggcaaggaaaagatctggaaaaagttaagcagcgattaatagagattgctaatcacgttgacaagttttacagaccactgaacattcggatcgtgttggtaggcgtggaagtgtggaatgacatggacaaatgctctgtaagtcaggacccattcaccagcctccatgaatttctggactggaggaagatgaagcttctacctcgcaaatcccatgacaatgcgcagcttgtcagtggggtttatttccaagggaccaccatcggcatggccccaatcatgagcatgtgcacggcagaccagtctgggggaattgtcatggaccattcagacaatccccttggtgcagccgtgaccctggcacatgagctgggccacaatttcgggatgaatcatgacacactggacaggggctgtagctgtcaaatggcggttgagaaaggaggctgcatcatgaacgcttccaccgggtacccatttcccatggtgttcagcagttgcagcaggaaggacttggagaccagcctggagaaaggaatgggggtgtgcctgtttaacctgccggaagtcagggagtctttcgggggccagaagtgtgggaacagatttgtggaagaaggagaggagtgtgactgtggggagccagaggaatgtatgaatcgctgctgcaatgccaccacctgtaccctgaagccggacgctgtgtgcgcacatgggctgtgctgtgaagactgccagctgaagcctgcaggaacagcgtgcagggactccagcaactcctgtgacctcccagagttctgcacaggggccagccctcactgcccagccaacgtgtacctgcacgatgggcactcatgtcaggatgtggacggctactgctacaatggcatctgccagactcacgagcagcagtgtgtcacactctggggaccaggtgctaaacctgcccctgggatctgctttgagagagtcaattctgcaggtgatccttatggcaactgtggcaaagtctcgaagagttcctttgccaaatgcgagatgagagatgctaaatgtggaaaaatccagtgtcaaggaggtgccagccggccagtcattggtaccaatgccgtttccatagaaacaaacatccccctgcagcaaggaggccggattctgtgccgggggacccacgtgtacttgggcgatgacatgccggacccagggcttgtgcttgcaggcacaaagtgtgcagatggaaaaatctgcctgaatcgtcaatgtcaaaatattagtgtctttggggttcacgagtgtgcaatgcagtgccacggcagaggggtgtgcaacaacaggaagaactgccactgcgaggcccactgggcacctcccttctgtgacaagtttggctttggaggaagcacagacagcggccccatccggcaagcagggaaagaagcaaggcaggaagctgcagagtccaacagggagcgcggccagggccagggagcccttgggatcgcaggagcatgcgtctacttgcctcactgacactcatctgagccctcccatgacatggagaccgtgaccagttgcttgctgcaggagggaggtcacgggttccccaaggggcttctgttgattggcagcattgactctgtggctttgcattcgtttttccatgacaacagacacaacacagttcttcggggctcaggaggggaagtccagcctaccagggaacgttttgcagaaacagttgcaaggaagggcagcgatttcctgggttgagcttcttgttaaaacatgggacatgcttcagtagctgctcctgagagagtagcaggttaccactctggcaggccccagccctgcagcaaggaggaagaggacttcaaaagtctgggcctttcacttgagcctccacagcagtgggggagaagcaagggttgggcccagtgtcccctttccccagtgacacctccgccttggcagccctgatgactggtctctggctgcaacttaatgctctgatatggcttttagcatttattatatgaaaatagcagggttttagtttttaatttatcagagaccctgccacccattccatctccatccaagcaaactgaatggcattgaaacaaactggagaagaaggtaggagaaagggcggtgaactctggctctttgctgtggacatgcgtgaccagcagtactcaggtttgagggtttgcagaaagccagggaacccacagagtcaccaacccttcatttaacaagtaagaatgttaaaaagtgaaaacaatgtaagagcctaactccatcccccgtggccattactgcataaaaatagagtgcattttgaaataaaaaaaaaaaaaaaa

SEQ ID NO: 148821 - DNA, 501 bp, Homo sapiens
tgccttcagagttcgttgtgccgagctctggagatcctgcggacaaggtcctgcagatgcttcttcaccgtgtagcccagctccttggtccgcccctccagcagggcgtgcttctcgcggctgcggctcacacgctcgccgtcgcccacgctctctgcgtgcctcagcttctcgtgcgcaatctccagctgcttctggtagtggttgggcttccccaatttggcctgcaagttcttgaagctcttcgcgaaacgcttcagcttcttgtccgtgaagttggcggactgcgccaggtcccacaggtcaatcaccctgggctcctcgaactcagcctcagtgctgtagccctggtggctgaccctgcgcaggcggtccaggccctggttgatgctgcgcagcttctccttcagctccgtgtgcctgctgtgcaggacgctgcacttgatcttcacatcaagctgacagcacgtaagaggcccatgccatgagcaatccccgagg

SEQ ID NO: 148822 - DNA, 4358 bp, Homo sapiens
cctctcctcctacaccggcctacccatctgggcccaagagctgcactcacactcctacaacgaaggacaaactgtccaggtcggagggatcacgagacacagaacctggaggggtgtgcacgctggcaggtggcctctgcggcaattgcctcaccctgaggacatcagcagtcagcctgctcagagcgggggtgctggagcgcgtgcagacacagctcttccggagcagccttcaccttctctctgggatcagtgtccggctggccgacgtggcatttgctgaccgaatgctcatagaggttgacccccacagggtcacgcaggactcggacactgccctggaaacatggatggacaagggcttttggccacaggtgtgggtgtcctgttggaggagggcttgtttggagaagggaggctggctgggggagaaacccggatcccgctgcatctccgcgcctgtgggtgcatgtcgcgtgctcatctgttgcacacagctcactcgtatgtcctgcactggtaatgtagtttggctggatgaaatgacagccacacgagcacttatcaatatgagctccctgcctgcacaggataagatcagaagcagggatgccagtgaggacaagtcagctgagaaaaggaaaaaagacaagcaggaagacagttcagatgatgatgaagctgaagaaggagaggttgaagatgagaactcaagtgatgtagaggtagaagaggagtctttgttaagaaacgatcttcgtccagctaacaaacttgctaaaggaaataggttattcatgagatttgctacaaaagatgacaaaaaggaacttggagcagccagaagaagtcagtattacatgaaatatgggaatccaaattatggaggcatgaaaggaattcttagcaattcatggaagcgaagatatcattcccgtcgtattcagcgggacgtgatcaagaagagagccctgattggggatgacgttggcttgacgtcgtataaacatcgacattctgggctagtgaatgttcccgaggaacccattgaagaggaggaagaggaggaggaggaggaagaggaagaggaagaagaagaccaggacatggatgcagatgacagagtggtggtagagtaccacgaggagctcccggctctcaagcagccccgggagcggagcgcgtctagacgatccagtgccagcagctcagactcagatgaaatggactatgatctagaactgaaaatgatttccacgccttcaccaaagaaaagcatgaaaatgactatgtatgctgacgaagtggaatctcagttgaaaaatattaggaactccatgagggcagatagtgtatcttcaagcaatatcaaaaaccgaattggtaacaaattaccacctgagaaatttgcagatgtccgacatctattagatgagaaacgtcagcactcccgtccacggccaccagtcagcagtactaaatcagatatacgccagcggttaggaaaaagaccacattctccggaaaaggcttttagtagtaaccccgtcgttcggagagagccctcttctgatgtgcataggagggacctgacctgtccccccacggtgagaatcccgtgctgggtccagacccttccgtttgcgggcaggggctgcggcccgggaaatgagattttgcctgcccaaggctgcactgtggtggcaggctccacagactgctggcgtttcctgcacagcaggtgttggcagtgctgctgccccctcagtgctaccctggttcttagcgctgactgcgaaagtgaaatgccatctcatccaaacaggaaccaccaggtggtttttccaagcagctgtatcattttccattccaccagcagtgtgcgagggttccagtttctccacatctccaccaacactcattattttctggtgtggtataagtggaggaatgcgggcatccagtcccgagaggcccacggtggaggtggtgaggaacgtggggacctgagtgccggcctgggggagcttggagttcctgctgagggcagcctggccctgctggccgctttcaatgtggatgtggcccggccctggctcacgcccaagggaggtgcccctttcgtgctcagctcccttctgcaccaagaccccagcaccaaccagacctggctcctggtcaccagccccagaaccaagaggacaccagggcccctccatcgatgttcccttgtccaggatgaaatcctttgccatcctatatgcattcaagtgctggtccggcggcctcacagcctcagctcagaactcacaggcacctgtagcctcctgggccctgacctccgtccccaggctcaggccaacttcttcgaccttggcaccgagattgccatcatcctggatggctcaggaagcattgatcccccagactttcagagagccaaagacttcatctccaacatgatgaggaacttctatgaaaagtgttttgagtgcaactttgccttggtgcagtatggaggagtgatccagactgagtttgaccttcgggacagccaggatgtgatggcctccctcgccagagtccagaacatcactcaaagaataaagtctctcctggagctcggtcatccttctggcaaagctctcttcttcatttactctcccctgcttagagacagcatcttcacctcaagccacggctccaggagaaaggcatccaaggtcatggtggtgctcaccgatggtggcatattcgaggaccccctcaaccttacgacagtcatcaactcccccaaaatgcagggtgttgagcgctttgccattggggtgggagaagaatttaagagtgctaggactgcgagggaactgaacctgatcgcctcagacccggatgagacccatgctttcaaggtgaccaactacatggcgctggatgggctgctgagcaaactgcggtacaacatcatcagcatggaaggcacggttggagacgcccttcactaccagctggcacagattggcttcagtgctcagatcctggatgagcggcaggtgctgctcggcgccgtcggggcctttgactggtccggaggggcgttgctctacgacacacgcagccgccggggccgcttcctgaaccagacagcggcggcggcggcagacgcggaggctgcgcagtacagctacctgggccactttgaaggcctgactgggaagatggggtcctattttggctctgagctgtgccctgtggacattgacatggatggaagcacggacttcttgctggtggctgctccattttaccacgttcatggagaagaaggcagagtctacgtgtaccgtctcagcgagcaggataagctcacagatgtggccatcggggcccccctggaaggttttggggcagatgatggtgccagcttcggcagtgtgtatatctacaatggacactgggacggcctctccgccagcccctcgcagcggatcagagcctccacggtggccccaggactccagtacttcggcatgtccatggctgcccctgcgctccattctccacacagcagcagccctatcccttcactctgctgcctgaaactcctccacggctcctatttagactcccggcctgtggttcgcctgaaggtctccatggccttcacccccagcgcactgcccatcggcttcaacggcgtcgtgaatgtccgtttatgttttgaaatcagctctgtaaccacagcctctgagtcaggcctccgtgaggcacttctcaacttcacgctggatgtggatgtggggaagcagaggagacggctgcagtgttcagacgtaagaagctgtctgggctgcctgagggagtggagcagcggatcccagctttgtgaggacctcctgctcatgcccacagagggagagctctgtgaggaggactgcttctccaatgccagtgtcaaagtcagctaccagctccagacccctgagggacagacggaccatccccagcccatcctggaccgctacactgagccctttgccatcttccaggagctgaccctgaacattaacctaactaactccggggaagattcctacatgacaagcatggccttgaattaccccagaaacctgcagttgaagaggatgcaaaaggtgactgtgacggtggctgtggaaacaggaagaccttacgaattcctccgagttggaattcatatttctccactgctgttctctgcagctccctcacagaagcaccccttcgaccttgtatttaaattcctcggggatctactgctgaccctgcctgtccggcttgtgaggaagacagggaccaagtggactttatttctttag

SEQ ID NO: 148823 - DNA, 2227 bp, Homo sapiens
  misc_feature (1)...(2227): n = a,t,c or g
cagcagctcagactcagatgaaatggactatgatctagaactgaaaatgatttccacgccttcaccaaagaaaagcatgaaaatgactatgtatgctgacgaagtggaatctcagttgaaaaatattaggaactccatgagggcagatagtgtatcttcaagcaatatcaaaaaccgaattggtaacaaattaccacctgagaaatttgcagatgtccgacatctattagatgagaaacgtcagcactcccgtccacggccaccagtcagcagtactaaatcagatatacgccagcggttaggaaaaagaccacattctccggaaaaggcttttagtagtaaccccgtcgttcggagagagccctcttctgatgtgcatagtaggctaggtgttcccaggcaggatagtaaaggcctctacgccgatactcgggagaagaaatcaggtaatttatggactcgcctaggatctgcacccaagaccaaagaaaagaatacgaagaaagtggatcacagggcgcctggcgctgaggaagacgactctgagctgcaaagggcatggggggctctgattaaggagaaagagcagtctcgccaaaagaagagccggttagataacttaccatctctccagattgaagttagtcgggaaagcagctctggttcagaggcagagtcctgatgcccctggggcctaatggcagctgccctaaagcctgacattcttgcacagggtggggcgcgcagtaggaacctcccccgcaggagctggcgccctctcgctcctgctcatacagtcattcctccgctcttgctacttcggcaagacatcttacgaatgtgacacattttcaagggcatctctatctttcgctgcagagatgtagttctgggccctcgattcctttcccaccaccccacaggctttaccctttgagaaaaaggcagccctccagattttgtagacatttttcttaatatttctaacattgtgtcttttaaaagaaatgttttacacagttcatccaaagagcacagaactgaacttctcactattgccttggccctgacagctgttaccagcacccttttcccaagaaaagtcaatttccaggtgcttattggacatcccttcgagggggaagaggagggaagcggcccagctcacccttccgggaccctagtgtggggcgaatctcacgggancctgacctcagaggtgcaccagttccgcccaggtagataagagctgcagcattgactgtgcttccgttcttccctcggggattgctcatgggcatgggcctcttacgtgctgtcagcttgatgtgaagatcaagttcagtgctgtgggatttttaggaacaaaaaactgtgacgtctggatttggggttgatttttgtgctggggtgggattatgggtcaatgttgaagaatttttaagtctgtattatgtttaaaacatgaatgatttgaaagtttaaatttttaatttttatatgtggaaattcttcctgttggctaaaggggaagctcaagtggtgtcgtcttttgtgctgttaaatatatattctattctttggaagaaggcagagagaggagtcttattatttttaaatgctcctagttgtatagtctgtctgttgtacatagagttcagctttgttttttggctccagtaggaaaaaaaatccatccatctgagatggggtcctgttgtttattatcactctagaagttatacattgatatttattctttctgtccccacgttgtggcacctgaagacatcttcaaaattggcagaaaagataatagttataaaaattttagttcatttatttttaaactcctttcagattattttaccattaggaggaggtagattgtttcgtcttcctgtctgatttttgttttgtagtatttaattttgtattcctctgcagttttaagaaacagtgtttttcttcggtttgctggaacatgggcgttagagatggtaataaaccgtcgtgtcctttttgcgatgtcacgactcttcacctgcctgggctgttgtgcacacagtgcagccgtggatcctgtcgatctttacttgtggcggagctaatggtcacattgatagttgattacactgtggcacgaattaatgcagaacactgttattaataaaggaagtaaagggctgcaagatttgagagctgcaacaacaaaaaaaaaaaaaaa

SEQ ID NO: 148824 - DNA, 598 bp, Homo sapiens
agatggagtctcatcatctgtcagccagactggagtgcagtggtgtgatgtcagctcactgcaacctccgcctcccgggttgaatcctgttttactttcctgtggtgagaaaaaagtttaagggaaatcaaagtgggatacatggggccacatccacagagcaatcgactgttccttttcataaggtctgttactttaccaactaagtccaaggagtgataataggattctgatagaacaaacactgcttccttaagaaccaacattctttagggattgggggcaaagtttttttaaaggaatataatgtccaagttattttgttataatagtctgatctgtatttccagtcttccatctagtattttatattaagatcatgcccccacacacatctactgtatgtttccttaagttctagattcaggaaaactaaattacaaaaaaatcaaaatagtgctctgactctggagggaagggcagagttgactggcaacaagggaactttgaggtaagagtaatgttgtataccttgatcagagagtggaattgtctgtgtatacacttaaaatgtatgggtttgccgggcgctcgtgcc

SEQ ID NO: 148825 - DNA, 857 bp, Homo sapiens
ttttgtatttttagtaatgactgggtttccccatgtttgccaggctggtctcgaactcctgacctcaagtgatctgctctccttggcttcccaaagtactgagattacaggcgtgagccatggcggccggccaataatttccttttgagatatacttgctgtgtcagtgagttgacctgttagcctgttcaacaacaaggcttgccaactgcagaatgagcccatcttcccgggtgcagcaggaaagccataagaacaagtttcttgaaatgctcaagagaccgccctattgcaaaaaccggcgcagagaggaggagcttgaacagccaatgctgtgctatcctcagggcgagatacaccttttcctctgtccacactgtggtacagtgcgtggggggtctgccgtcaaggggaactggcagtggggttcaggagcattgcccaatcccctaacccccaccatccatcacccaaccacagagggtgaaattaacgttctcaggtgtcgacctccaactgttgcccctggacagcaaaaccctgacacccacccactgtgtcaatatcgagcatgagtcaaaaacactttggccccatttcttttgatctaatcgagcttcaaattcctgcgctaggactaggacccatcactgccaggagagctgcggagaatactgtcattattcctaacaacagaaattctctgtcctgcgctcattcatcccagaaaatgaccaaaaagggggtcagaaagtggaggacaagatattttacaaaggataaaatgacggctgcgggggacagaccccaatttaaaactgaattatgactaaagggattgtttcatttcttcctgt

SEQ ID NO: 148826 - DNA, 1158 bp, Homo sapiens
ttgagatagtctcactctgtcgcccagggtggagtgcagtggtgcgatctcagctcactgcaacctccacctcccgggtccaagcaattctctgcctcagcctcccgagtagctgggattacaggcacctgccaccacacctggctaatttttgtattttcagtagagacagcatttcaccatcttggccaggctgttcttgaactcctgaccttgtgatccacccaccgtgccgggccataacaatgcattttacaagggcaattaggaaggtaataaaagaatgtcgctacttaaaacattatgggctatcttggaataactcaaataggtctggggaaaggcccaaaatggagggcattcataaattttactaggggtttccctataaaatgtttgatacaagggatatgtgaaacttctgacttacatgtctgctaaatcaacttaatgaatgtggaaatcagactagaaatttgcaaaagctacttaaggaatacttttaccttcagtaaagacaagagcagaataggagaagaaaacattttttacacaaagcacaatatgctttcatattccaaatattggaaaaaagggctaaggccatatcccctttcttcctcatatccaacagtttgcttttaaactgaattcaaattcagtatgcaaacaccaaagaccacccaatgaaaaatggcctgagccacctaacagtcactgaactttaaggctgcctttgacagcccctggagtaggagaaggattcaaaaaggaagctagacttgagacatctgagagtaaatcagcagcattactgagggtgaaaatggaggcctttaaaatagagggaaaggatgggtgtgggaaggaaatggtggaaatccagtgcaaaaataagctggagtcagctcaatggggctgatgaagaggatgaaaagacattgatgtagcaaatgatgctggaagatgtaaggtatgagattaggggaaaaactgcttagaaaagagatgatttggatgttcaagaactttctccagagacactacagtaattcctccttgcccacctgtaggtttacggcagtagttttgagggtaccttctaacttatccccaaatctcttctctctgttcactgtttttttccattataaaagg

SEQ ID NO: 148827 - DNA, 727 bp, Homo sapiens
ctggaaatgtcattacaggcaatagttttgcatgtttatctgttaaatatatatatatttaaaaagcaattggactgtcagttggactgtcgatagctttggaggcagggaaaagttagaggaagtaagggagaacgggttaggcggggtttttctctctgggacttacagtgcatctaaagggttctcacagagccgccgctatcagtgtttccagtagaccctaacggaggtgtcgccatgactctctttctcgctctttccttctcaggagtacttcttgcaagcagagctgacaagcaacgtcttaaaaacaggcgtggtgcgctgctgcgtgggacagtgcaacaatgccatccctgttgacaccgtccttaccatgaataagctgcccatcacctatgtacgtctgctgtctgtggaacttaattcagccatttgcattttttgcttgtgagctctgtgcttatctgggttgtaggtgaggagataagagagagctgtgtgatcctttattaggggcttttcatatgagaggcacaagaggtgtgtggtctgtcccagggtcagaggtcagggcacgtgatgctgcctggctgtgctgaagccgcaggtctgggaggctgggttgtgatacacgcttagagagagagctgttccctggggtcccagtgcagctttcttggttctttatctgactgcataaatgacgtgtctgagctcaggg

SEQ ID NO: 148828 - DNA, 3190 bp, Homo sapiens
atgatctttcctgcagagagcagctgtgcactgcctcaggaaggcagtgcagggccgggctcaccagggtctgccccgccctccaggaagcggtcttggtcctctgaggaagagagtaaccaggctaccgggaccagccggtgggatggagtttctaagaaagctccacggcaccatttgtctgtgccatgcacaaggcctagggaggccaggcaagaagcagaggacagtacgtctcggctctctgcggagtctggtgaaaccgaccaagatgctggggacgtgggtcctgatcccattcctgactcatactatgggcttcttgggaccttgccctgccaggaagcactgagccacatttgcagcctgcctagtgaggtcctgaggcacgtgtttgccttcctcccggtggaagacctctattggaacctgagcttggtgtgccacttgtggagggagatcatcagtgacccgctgttcattccttggaagaagctgtaccatcgatacctgatgaatgaagagcaagctgtcagcaaagtggacggcatcctgtctaactgtggcatagaaaaggagtcagacctgtgtgtgctgaacctcatacgatacacagccaccactaagtgctctccgagtgtggatcccgagagggtgctgtggagtctgagggaccaccccctcctccccgaggctgaggcgtgtgtgcggcaacacctccccgacctctacgctgctgccgggggtgtcaacatctgggccctggtggcggctgtggtgctcctctccagcagtgtgaatgacatccagcgactgctcttctgcctccggagacccagctccacggtgaccatgccagatgtcaccgagaccctgtactgcatagccgtgcttctctacgccatgagggagaaggggattaacatcagcaatagcaagaaaaccatccaacttacacatgaacaacagctgattctgaatcacaagatggaacctctccaggtggtgaaaattatggcctttgccggcactgggaagacctcaacgctggtcaagtatgcagagaagtggtctcagagcaggtttctgtatgtgacattcaacaagagcatcgcaaagcaggccgaacgcgtcttccccagcaacgtcatctgcaaaaccttccactccatggcctacgggcacatagggcggaagtaccagtcaaagaagaagttgaatctcttcaagttaacacccttcatggtcaactccgtccttgctgaagggaagggtggattcataagagccaagcttgtgtgtaagactctagaaaacttctttgcctcggctgacgaagagctgaccattgatcacgtgcctatttggtgtaagaacagccaaggacagagagtcatggttgagcagagtgaaaaactgaatggtgtccttgaagcgagccgcctctgggataacatgcggaagctgggggagtgcacagaagaggcgcaccagatgactcatgacggctacttgaaactctggcagctgagcaagccttcgctggcctcttttgacgccatctttgtggatgaggcccaggactgcacaccagctatcatgaacatagttctgtctcagccatgtgggaaaatctttgtaggggacccgcaccagcagatctataccttccggggtgcggtcaacgccctgttcacagtgccccacacccacgtcttctatctcacgcagagttttcggtttggtgtggaaatagcttatgtgggagctactatcttggatgtttgcaagagagtcaggaaaaagactttggttggaggaaaccatcagagtggcattagaggtgacgcaaaggggcaagtggccttgttgtcccggaccaacgccaacgtgtttgatgaggccgtacgggtgacggaaggggaattcccttcaaggatacatttgattgggccagaggaagaacggaggaaacgtgagtacccacctggccttggtgcattggaaggacgcacccaagtgacagggacgagaaagaagcaggcccagtctgagtcagggacccgtttccctccagagaagggcgagctagtgttgctgtcttcccatgacgagggggaaaacctcgtcattaaagacaaatttatcagaagatgggtgcacaaagaaggctttagtggcttcaagaggtatgtgaccgctgccgaggacaaggagcttgaagccaagatcgcagttgttgaaaagtataacatcaggattccagagctggtgcaaaggatagaaaaatgccatatagaagatttggactttgcagagtacattctgggcactgtgcacaaagccaaaggcctggagtttgacactgtgcatgttttggatgattttgtgaaagtgccttgtgcccggcataacctgccccagcttccgcacttcagagttgagtcattttctgaggatgaatggaatttactgtatgttgcagtaactcgagccaagaagcgtctcatcatgaccaaatcattggaaaacattttgactttggctggggagtacttcttgcaagcagagctgacaagcaacgtctttaaaaacaggcgtggtgcgctggctgcgttgggacagtgcaacaatgcccatcccctgttgacaccgtccttaccatgaagaagcttgcccatcacctattaggcaacagggaagggaaaacaaggggggctacctctgccactcctgtgcggagcagcagcatcgggacccctggcgtttcctgacagcctccccggagcaggtgcgcgccatggagccccattttgggggaacatcgtactgcccccggcatgaggccctgctcttcctcgtcttctgaggacaaggcgcacgttctccgcagtgcagagcagcttgccgaggaccccgcgtgaagaaagccagcgaagggggggcttctgctccctgagactctggggttcacccacagcactttctgaggaagaggacaccagcccaagctggacctgccatttctccactccctacagacagccagtctccaacttgcctcccctctggatgtatctggtcagggaagtgggggatgttcttttgataaaaaaaaaaaaaaattttatgtatttaaacttttattacaagatttcaattaaacaggcaccatagctctggcaaaaaa

SEQ ID NO: 148829 - DNA, 471 bp, Homo sapiens
  misc_feature (1)...(471): n = a,t,c or g
naatacgacgtcgtacgcccnngcgnggaannnggngaggtgatgggcccagctgatggttctgtctgtgcagactcagcaaaagccttggttgtgaggaggagggccccctcagtgacaagtgcagccgcaagaccctcttctacctgattgccacgctcaatgagtccttcaggcctgactatgacttcagcacagcccgcagccatgagttcagccgggagcccagccttagctgggtgagggtcaggtggagggaagggacccacagccaccccactgtccttccccactttgggtagccctgggctcctgtcaccctgactgtgacctgccctaggtggtgaatgcagtcaactgcagtctgttctcagctgtgcgggaggacttcaaggatctgaaaccacagctgtggaacgcggtggacgaggagatctgcctggctgaatgtgacatctacaggtgggccgn

SEQ ID NO: 148830 - DNA, 1278 bp, Homo sapiens
  misc_feature (1)...(1278): n = a,t,c or g
gatgcccacatcattggcaggattgagagctactcatgtaagatggcaggagacgacaaacacatgttcaagcagttctgccaggagggccagccccacgtgctggaggcactttctccaccccagacttcaggactgagccccagcagactcagcaaaagccaaggcggtgaggaggagggccccctcagtgacaagtgcagccgcaagaccctcttctacctgattgccacgctcaatgagtccttcaggcctgactatgacttcagcacagcccgcagccatgagttcagccgggagcccagccttaagctggttgggttgaatgcagtcaactgcagtctgttctcagctgtgcgggaggacttcaaggatctgaaaccacagctgtggaacgcggttggacgaggagatctgcctgggctgaaatgtgacatctacagcgtataacccagacttggactcagatccctctcgggaggatggtagcctctggtccttcaactacttcttctacaacaagcggctcaagcgaaatcgtcttctttagcctgccgttccatcaagtggctccaccctacacaccctcagaggcaggcaacgaagctggacatggagctgggggaggaggaggtggaggaagaaagcagaagcaggggcagnggggcccgagggagaccaagcacccattggaaggaaggacaangggtccccagtgatctgtatttgatgaggaggagccgaggccccagcttcatccagcttcaaccaatgcctggacctgtccacctgagaggcccctggggcctccccagtctgctggccagaccctggcgctgccacagtcctggcaactgcccaaaggccaataacctgccctaagcccctttgggcttccatcctgtggatgccccaatcaccccctcagactcctgctgcccatgctgtggccggacttgttcagcagggggccctggtgggaggagcgacctgcccctgccccaaatgaaactgccacagcaggggacagctggaccgcaaaggttatttttgtatttctactgggcctgcacactccaggcccaaaggggtctgtggccggaggccccacgagcaggccccagcaagtcaccggctctggtcttgggccggccccggtgcccacctgcgcccccacctcgcccatttggccgcgtgcactgagtgtcactttgctgcagctcgtttctttccaactaaaagttttctgtgacttaaaaaaaaaaaaaaaaagggggg

SEQ ID NO: 148831 - DNA, 587 bp, Homo sapiens
aggagggtgaggacgtacaaggagcatcgcaggcgaggaaacaacacaacggccaggacctaactgtggtgggaactgcctttgtctccacacactcgcaatcaacatgcgtatttgctattctcaaacaactcccttccacccccttaggctgaaaggacaaaggtggcctttttctctccagccttgaattgttccctgttggcttcccaagggcccatctgttggtacagtccacacttccaaagccaagacccgagagggctttcactgccccaagcctttttcctgtgaccttgggattctgtcttggcagaatcctttgtcagcggctcttactctgtccttcctgtttggccacagctctttcaatcaatgggtattctagaacgcaggaatgtcaaagctggaagggacgcgataccggtttacacaaggggaaactcctcgaggctttgggagggacggagggttttggtgacagagcgagagctaaaattgaggattcctgaatccagatcttgcctcccatcagccatctttttcccaataaatttttgttttgtgcaaaaaaaaaaaaaaaaaaa

SEQ ID NO: 148832 - DNA, 1446 bp, Homo sapiens
ggcacgaggttaatttttgtatttttagtagagaccaggtttcatcatgttgggcaggatggtcttgaacccctgacctcaggtgatctgcccatctcggcctctcaaagtgctgggattacaagtgtgagccatcgcgcccggcctgcaaacttttttgtaggtatttctggtaaacaaatccttaggttatctttgctgtggttgtggtttggctttagtcatgatttcaaagtagaaatagctaggcattattttttgaaatatatgacctatatgtagtcaagaatccactgaacagaggggaagcaaaccttttgggaaactggcttttggggcagacagttaaacgtccagcttgatgctggaagcatgaacagctgtcatcaggtaggtactcctcaaactctgaatgaagtttgtcctttcaagcctaaagggggtggaaagggagttgtttgaagaaatagcaaaatacgcatgttgaattgcgaagtgtgtggaagacaaaaggcaagttccccaccacagttaggtccctggccgttgtgttgtttccctcgcctgcgatggctccttgttacatcctcaccctcctctcccgccttctggccttctggctggggtcaaaaggtggccctttttcctctcccaacccttgaaaatgttcccctgttggccttccccaaggggcccatcttgctggtaacaagtcccacacttcccaaaagcccaagaccccgaagagggctttcactgccccccaagccctctctccctgtgacccttgggattcctgtccttggcagaatcctttgttcaggcggctcttgcctctgtccttcctgtttgggccacagctcttttcaatcaatggggtatttttaggaaccgcaggatgtcagagctggaagggacgcgataccggtttacacaaggggaaactcctcgaggcttctggagggacgggagggttttggtgacagagcgagagctaaaattgaggattcctgaatccagatcttttttcctcccatcagccatctttctcccaataaatttttgttttgtgcaaggctatgcgtgtgtttgtgtggaggctggctcaccaagtttttccttttaagtcgtcagataagggtgtctcccccaggtgaggctgacacattccacgtggcagtctgttttttttaggggatggtgaataagaagatgggatcatctgttttttagtcatcattctctagcatgagaaagcttagcagagaggagaatgcggcttcctggcaatagaaaatgccagtaacttggtcagcggcgctccagtgccctgttgaagcttttaggatgtgtgagttacacctcatccccatcagctgtgggaagagaggacgggcctcggggcacactgtccacagtccctggctcattcatgctatagaagtg

SEQ ID NO: 148833 - DNA, 1413 bp, Homo sapiens
atgctcggcagactctgcctggggctcccggctgtgctgcccaggctcccagaacccactgcagctgccctgcagcccaccttttgcctgttgtctccagccttatacagcagcaaggaaagtgagggagcaatgctggaaggactgccagaggtgacccagctcgtgaggtggaaggcagcagtaggacacacagacaagattgggagattgaaagaactctgtagcagtatggcatatggcttcatgtggaggggtgcctttcctgaagactatcttctgtctcgaaatggacatgatagatccagggatgtacagcagagagctaggagtccaaccgccgtagacaggaaggactggagtgacagcctggcccgctggctcaagccagggcagccctctgtggaaccccaaccccgagcctgcgtccggcctgtggcgcaccctgcaagtgggctggaacatgcagctgctcccgcgggcttggtgtcctttgtcgaagtggtcagcctatggtttgcagggggcagcggtacagccacgcggcaggagagtgtgctcgcaacgccaccgcacccactacacgcaggacagctgctgctcctgagccctcgaggaggggtggtcacaatagggtttctgatcccctgtgtctcctgtagctcgtgtgggccactcaagccagctgggctgtgggcggcacctgtgctctgcaggccaggcacgatagaagcctttgtctgtgcctactcccccagaggcaactgggaggtcaacgggaagacaatcgtcccctataagaaggtgcctggtgttcgctctgcacagccagtgtctcaggctgcttcaaagctgggaccatgcaggggggctctgtgtgaggtgcagcctgcagtgtgtgcacggccggtccgggaggaggagtgctcgtgcgtctgtgacatcggctacgggggagccagtgtgccaggtggggttacagaggaaaggcggggtgctggcccagataagagccagaaagtgcaggacatcctcgccttctatctgggccgcctgggaccaccaacgagggctcacctacaagaccgccaaggctccttccgctgggccacaggggagcaccaggccttcaccagttttgccttgggcagcctgacaaccacgggtgcagagagttgtgggcacagctggtgtgggccggtggtggggtttggcaactgcgtggagctgcaggcttcagctgcttcaactggaacgaccagcgctgcaaaacccgaaaccgttacatctgccgtttgctttctgaacaaggtaaatcctgaatgtgatcatcattcaaccttcatctctgcaaaaagcatttcttttcctccaggcgaaaacaaacagtgcctgctgtctagcactagttaa

SEQ ID NO: 148834 - DNA, 468 bp, Homo sapiens
gtacgcccctgcatgtatacaatgaagtgatgagtgttggccagaaatacggaatccggaatgctgggtattacgctcttcgcagtctccgaattgagaagttttttgccttctggggtcaggatataaataacctcacccacgcccctggaatgtggacgagagtctcgggtgaaattagagaagggcatggatttcattggtcgcgatgccctcctgcagcagaagcagaatggagtgtataaacgcctcaccatgttcatcctggacgaccatgattcagacctagacctttggccttggtggggagagcccatttaccggaatgggcagtatgttggcaagaccaccagcatgtgcctacagctacagcctggagcgccacgtttgcctggggctttgtgcacaatttttctgaggacacgggggaagagcaagtggtgacagcagatttcatcaaccggggga

SEQ ID NO: 148835 - DNA, 1239 bp, Homo sapiens; identical to SEQ ID NO: 123054

SEQ ID NO: 148836 - DNA, 1752 bp, Homo sapiens
atgaaaagagacaactccgggggatgcctgcctgctccggcctcggcctggccagcccgcccccgacagcaggcagagtggcgtgcactgacccgcggccctgctaatcattgtgggattattagcacccttggggagcccccagagaccccgctgattggcctgcggacattccagtgctgcagattagtgaccgatggccgtgtcctggctgggacagtgtcctccgagcccactgatggcttccgctccccagccccgggccctgggaggaggacctcggctatggtccttctgaaactgggcaagaccccaggggagttctttcctttcttgggaagctcgtcccaaccccccagccatgaattaaacataggcaagaggctggatgacaccaaaatcctcccaggcaacatgaaggataacttctgggagatgggtgacacgggcccctgtggtccttgcagtgagatccactacgaccggattggtggtcgggacgccgcacatcttgtcaaccaggacgaccctaatgtgctggagatctggaaccttgtgttcatccagtataacaggtttggcaactgcgtggagctgcaggcttcagctgccttcaactggaacaaccagcgctgcaaaacccgaaaccgttacatctgccagtttgctgacctcaggaggaacctgaatatcattaatgacgacatcaccgggcgagtacataaggaccgtaaacttctcaccggcgacagtccttttgcagcgaatgcgttgggtaaactggcggcgcaggaaatgatggcagcttacgcggtgtcattaccaaagctgactgcgcttctccgggtatttagtactgtggtgaggagcattggggaacgcttcagcccaattcgggtcctccgattactgaggcataccactcctaactatatctatcagcggcttatcccgtatgtctgcgttctcccgaccacggaacttagcatcaatcttaatatgctaacggagaacgatattccgctcttcagagcgttattcctcaataacatcacggatgctgacgctcgggtcttattgcaaaaaaggccgagggaaggctggctaaccacggatgcatttctttactgggcgcagcaggatttctccggtgtgaagccactggttgctcagcattgggaatggatgacgttctccgcagatagcgtatcttcggtacatacgctcacggacgatcttccgctggagtcgctggccgatcagcccggtgccggaaatgttcatcttttgatcccaccagagggccttttatatcgttccctcacgctgcccaacgccaaatacaaactcaccgcacaaacattacaatggctggcagaggagacgttacccgacaacacccaggactggcactggacggttgtcgataaacaaaacgaaagtgtcgaggactgtcttattccactcttcggtaaaccacaaggaaaagggtgcttagaaaagtctgtctgggcagcagggcggccattcagctatgcaggagacaagaatcgccagcttacccgttacagcgatacccgctggcatgaagattccgtgcgtaaccgctggttcagcgtgatggtggggccgtctgtgcgcgtgaatgaatggttcagcgcgtatgcgatggcgggtatggcttacagccgtgtgtcgactttctccggggattatctccgcgtaactgacaacaagggaaggtgcgaataa

SEQ ID NO: 148837 - DNA, 908 bp, Homo sapiens
atggcctgcaggtttggcaactgcgtggagctgcaggcttcagctgccttcaactggaacaaccagcgctgcaaaacccgaaaccgttacatctgccagtttgcaggctggactgtgatccacagcgcaggcactggcagtcacgccccagggacatccacagtagctcgtggatcccgcgacctagctttcgactacctacctggcctacacttccacccaccgtgtgccctgggcatggatttcattggtcgcgacgccctcctgcagcagaagcagaatggagtgtataaacgcctcaccatgttcatcctggacgaccatgattcagacctagacctttggccttggtggggagagcccatttaccggaatgggcagtatgttggcaagaccaccagcagtgcctacagctacagcctggagcgccacgtttgcctgggctttgtgcacaatttttctgaggacacgggggaagagcaagtggtgacagcagatttcatcaaccggggagagtatgagattgacatcgcgggataccgcttccaggccaaggccaagctctaccctgtcgcctccctcttcacccagaagcgccgaaaggatgacatggagctgagtgacttacatgggaagtgatgccaccagggcagcctcacctcctccccatcatcttgtcctagagtgggcgtcaccttggagcttctcttccttccgcctctgttcctcttctggagcctttgcctcccatctcttatctccttgatataattttgaacttgacctactttaaacttttttgctctgcagccttccttgcccttccacctactcctcctaatattcactctgggctcttcttcccttcccacccctgactcagttgctcgtggtggcaggaggtatgt

SEQ ID NO: 148838 - DNA, 1746 bp, Homo sapiens
cagctgattcataatttaataccctgtggggttcatgccacagggaagctccgctgccccacaggtactgggccaggtggaagagagcagcctttttggaccactggcggtgtcctctccttcgccatctaattgaagcccatcttcccaatcaaaagcaggcgaagggccccagcttcttctaacactcactccctggccctcactggcctccctgcctctctctgcccaacttctggcattgtgcaaagtctgagaccttctttggacatgaggcatgtgatcttaaccttggcccttgttccagacaggtgggcagacaggtaagcagagccggtgctcccagggcaggcgagggagccatgtggtcaggccatcaggacccatgggccccaccgcgagaatgtgctcctgggcaaactggcagatgtaacggtttcgggttttgcagcgctggtcgttccagttgaaggcagctgaagcctgcagctccacgcagttgccaaaccccatggcagcactcagccacaccagcccgtggttgtcaggctgcccaaaggcaaaactggtgaaggcctggtgctcccctgtggcccagcggaaggagtccttggcggtcttgtaggtgagcccgatccagaagttcctggtctcgaagtcactgtcaatcacctcgttggtggtctccaggcggcccagatagaaggcgaggatgtcctgcactttctggctcttgatctgggccagcaccccgcctttcctctgacatttcatcctggctctgtaataggtgtctgcctctgaagacaccatgaagcagtctccgtcgatcctcaggtcacaggtgtggaagggaaaatgcaccttggtggcacactgggctcccccgtagccgatgtcacagacgcacgagcactcctcctcccggaaccggccgtgcacacactgcaggctgcacctcacttggcagtatctgcccgtgtagccagggggacagtggcagtggcaggtgctgatgttgagacgtccatggttctggcagctcatgcgacaaggattcctggggacctcacagagcccccctgcatggtcccaggctttgaagcagcctgagacactggctgtgcagagcgaacaccaggcacccttcttataggggatgattgtcttcccgttgacctcccagttgcctccgggggagtaggcacagacaaaggcttctatcgctgcctggcctgcagagcacaggtgccgcccacagcccagctggcttgaggtggcccacacgagctgcgtgtagtgggtgcaggtggcgttgcgagcacactctcctgccgcgtggctgtaccgctgcccctctgcaaaccataggctgaccacttcaacaaaggacgccaagcccgcgggcagcagctgcatgttccagcccacttgcagggtgcgccacaggccggacgccaggctcggggttgggattccacagagggctgccctggcttgagccagttgggccaggctgtcactccagtccagcctccgcatgtcagccgcagggggctggacccagctgcgcaggcggttgtgcagggagaggagcaagaaactctccttcctgttcagggctccggccatcggagcctgctcctgcagctggggtggccacacctctgcccaggcggtgccaaggagggccaggagcacagccaggagatgcccccggccaggggaggtctctggatgcagcat

SEQ ID NO: 148839 - DNA, 1716 bp, Homo sapiens
atgtcccagtactaccagccccagaggcctcctgagcacatcgagcttgacagccatgcaaaattcttcccccaccaccatcttcaagttgccgacagcgctgctcacctggccgcctcccctttaagacgcacacaccgggctctcacctgggcgcaggcgcttccgcaggaagaaggaagcggcgcgccatcgcctcccggcgctccctccccgactcctaagtccttcggccgcaccatgtccgcctcggctgtcttcattctggacgttaagggcaagatggagtcttgctatgttgtccaggatgtcttgaactcctggtccccagctatccccctgcttcagcctcccaaagtttcggatgacagtggtggccaccacatcgaagaatgccaatgcctccctgtgtactccttcctgtataagacaatagaggtaggtattctgcgaatacttcaaggagctggaggaggagagcatccggacaactttgtcatcgtctacgagttgctggacgagctcatggactttgcttcccgcagaccaccgacagcaagatcctgcaggatacatcactcagcagagcaacaagctggagacgggcaagtcacgggtgcacccactgtcaccaacgctgtgtcctggcgctccgagggtatcaagtcaatgcaacggcagcgtccttctgagcgaaatcgtcggtaccatcaagctcaagtgtttctgtcaggaatgccagagctgcggctgggcctcaatgaccgcgtctcttcgagctcactggccgccaaggggcagtttaagaaaagtcagtggccaacggtgtggagatatctgtgcctgtacccagcgatgcgactcccccagattcaagaccagtgtgggcagcgccaagtatgtgccgggagaaacgtcgtgatttggagtattaagtctttcccggggggcaaggagtacttgatgcgagcccactttggcctccccaggtggaaaaggaagaggtggagggccggccccccatcggggtcaagtttggatcccctacttcaccgtctctgggatccaggtccgatcatgaagatcattgagaaaagtggttaccaggccctgccctgggttcgcacatcacccagagtggcgattccaacttcgtaccagctagaagggagaagagatgggggcttgaacacgggcttccttacagccccggatgcagattttagagggagggcaggggaggagcccgccgggagggccggggtctcgggctggggagccgggacggagagcagcgcagccgggtgcaccgcggccgcgccccgggagggctgttcggccagcgcccgccggctgctccgcgctgacagcgccgggctggggcgggcggggggctttgcaggccgccagtgtcgacatgctgctggaggaggttgcgccggcgaccggctgagtggggcggcggcccggggcgacgtgcaggagtgcgccgccttctgcaccgggagctggtgcatcccgacgccctcaacccttcggcaagacggcgctgcaggcttcattgttcccccacagtcccccttcgaaggtcatgatgtttggcagcaccgccatcgccctgagctgctgaagcaaggtgccagccccaatgtccaggacacctccggtacagtccagtccatgacgcagcccgcactggattcctggacaccctga

SEQ ID NO: 148840 - DNA, 558 bp, Homo sapiens
gagatatctgtggctgtaccaagcgatgccgactccccaagattcaagaccagtgtgggcagcgccaagtatgtgccgaagagaaacgtcgtgatttggagtattaagtctttcccggggggcaaggagtacttgatacgagcccactttggcctccccagtgtggaaaaggaagaggtggaggtccggccccccatcggggtcaagtttgagatcccctacttcaccgtctttgggatccaggtccgatacatgaagatcattgagaaaagtggttaccaggccctgccctgggttcgctacatcacccagagtggcggctgggagagaaactctctgcttccctcgcccttggagctttccccatccccctgattttatatgaagaaatagaagaggggcttgaagtccccctcgcgagtgccttcttgcaattacctgccttagcgggtgttgcgggtccctccttcacaaccgctgagcccagaggtcccgctggcccctcctctgaattttaggatgtcattaaaaagatgaatctaaaaaaaaaaaaaaaaa

SEQ ID NO: 148841 - DNA, 1777 bp, Homo sapiens
gcctcccggcgctccctccccgactcctaagtccttcggccgccaccatgtccgcctcggctgtcttcattctggacgttaagggcaagccattgatcagccgcaactacaagggcgatgtggccatgagcaagattgagcacttcatgcctttgctggtacagcgggaggaggaaggcgccctggccccgctgctgagccacggccaggtccacttcctatggatcaaacacagcaacctctacttggtggccaccacatcgaagaatgccaatgcctccctggtgtactccttcctgtataagacaatagaggtattctgcgaatacttcaaggagctggaggaggagagcatccgggacaacgttgtcatcgtctacgagttgctggacgagctcatggactttggcttcccgcagaccaccgacagcaagatcctgcaggagtacatcactcagcagagcaacaagctggagacgggcaagtcacgggtgccacccactgtcaccaacgctgtgtcctggcgctccgagggtatcaagtataagaagaacgaggtcttcattgatgtcatagagtctgtcaacctgctggtcaatgccaacggcagcgtccttctgagcgaaatcgtcggtaccatcaagctcaaggtgtttctgtcaggaatgccagagctgcggctgggcctcaatgaccgcgtgctcttcgagctcactggccgcagcaagaacaaatcagtagagctggaggatgtaaaattccaccagtgcgtgcggctctctcgctttgacaacgaccgcaccatctccttcatcccgcctgatggtgactttgagctcatgtcataccgcctcagcacccatgtcaagccactgatctggattgagtctgtcattgagaagttctcccacagccgcgtggagatcatggtcaaggccaaggggcagtttaagaaacagtcagtggccaacggtgtggagatatctgtgcctgtacccagcgatgccgactcccccagattcaagaccagtgttgggcagcgccaagtatgtgccggagagaaacgtcgttattttggagtattaagtctttccgggggggcaagggagtacttgatgcgagcccactttggcctccccaagtgtgaaaaagaaagaggtggaaggccgggccccccatcggggtcaagtttgagatcccctacttcaccgtctctgggatccagggtccgatacatgaagatcattgagaaaagtggttaccagggccctgccctggggtttcgctacattcaccccagaagtggcgattaccaactttcgttaccagctaggaaggggagaagagatggggggcttgaacacggggcttccttacagccccggatgcagatttttagaagggagggcaggtgcggggctgtgtgtgtctgtgtgagggcaggtccttggacttgggcagtttcttgctcccagcaccccgccccttcctcacctcttccttattcccataaggctgggaaaagaaactctctcctgcttcccttggcccttgaagctttcccccatcccccttgattttatatgaagaaatagaagaggggcttgaagtccccctccgcgagtgccttccttgcaattacctgccttagcgggtgttgcgggtccctcccttcacagccgctgagcccagaggtcccgctggcccctcctctgcaattttaggatgtcattaaaaagatgccatctaaaaaaaaaaaagaaaaaaagtcgacgcg

SEQ ID NO: 148842 - DNA, 486 bp, Homo sapiens
  misc_feature (1)...(486): n = a,t,c or g
aactgatcgcctgcggatcgacncccgatttcccgggccgacccacgcgtccgctgatatccaggtgaaagaactggagaagcgtgcctcaggccaggcttttgaccgagggctgagaatctgttccagaattccccctttcccctccaaagaagaaggatctttccctggaggaaattcagaagaaattagaagctgcagaagaaagacgcaagtcccacgaagctgaggtcttgaagcagctggctgagaaacgagagcacgagaaagaagtgcttcagaaggcaatagaagagaacaacaacttcagtaaaatggcagaagagaaactgacccacaaaatggaagctaataaagagaaccgagaggcacaaatggctgccaaactggaacgtttgcgagagaaggataagcacattgaagaagtgcggaagacaaagaatccaagaccctgctgaccagactggagctgactaatttgtctga

SEQ ID NO: 148843 - DNA, 477 bp, Homo sapiens
acaacaacttcagtaaaatggcagaagagaaactgacccacaaaatggaagctaataaagagaaccgagaggcacaaatggctgccaaactggaacgtttgcgagagaaggataagcacattgaagaagtgcggaagaacaaagaatccaaagaccctgctgacgagactgaagctgactaatttgttctgagaaactgaaagtgttttactctttttctaaagtgttggtctttctaatgtagctatttttcttgttgcatcttttctacttcagtacacttggtgtactgggttaatggctagtactgtattggctctgtgaaaacatatttgtgaaaagagtatgtagtggcttcttttgaactgttagatgctgaatatctgttcacttttcaatcccaattctgtcccaatcttaccagatgctactggacttgaatggttaataaaactgcacagtgctgttggtggcagt

SEQ ID NO: 148844 - DNA, 1534 bp, Homo sapiens
  misc_feature (1)...(1534): n = a,t,c or g
ggggnaggcggcgcccggnnnnnaaattgtaatctantggctcgttngaattcggcacgaggactttccttatcccagttgattgtgcagaatacactgcctgtcgcttgtcttctattcaccatggcttcttctgatatccaggtgaaagaactggagaagcgtgcctcaggccaggcttttgagcatgattctcagccctcgggcaaaggaatttgttccagaattccccctctccccccccaaagaagaagggttcttccccggggggaaattccgagagaattaggaagctgccagaagaaagacgccagtccccatgaagctgtagttcttgaaggcagctggctgagaaactgagagcaccgagaaagaagtgctttcagaaggcaatagaagagaacaacaactttcagtaaaatggccagaagaggaaactgaccccccacaaaatggaagcctaataaagagacccccgagaggccacaaatggcttgccaaactggaaccgtttgccgaagagaaggataaggcacattgaaagaagtgcgggaagaacaaagaatcccaaagacccctgctgacgagactgaagctggactaatttdgttctgaagaactgactttcttccccatccccttcctaaatatcccaaagacttgtactggcccagtgtccattttattttttccctcctgacaaatatttttagaaagctaatgtaggactgtataggttagatccagatccagacctgtaagatgttgttttaggggcttaaaggggagaaacttgaaagtgttttactctttcttctaaagtgttggtctttttaaaggaagcaatttttcttgttgcatctttttcctaacttcagtacacttggtgtacatgggttaatgggctagtactgtatttggctctgtgaaaacatatttgtgaaaaagagtatgtagtgtgcttcttttgaacctgttaagatgcctgaatatccgttcaacttttcaaatcccaattctggtcccaatcttaccagatgctactggacttgaatgggttaataagaactgcacagtgctgttggtggcagtgacttcttttgagttaggttaataaatcaagccatagaggcccctcctggttgatacttgttccagatggggcctttggggctggtagaaatacccaacgcacaaatgaccgcacgttctctgccccgtttcttgccccagtgtggtttgcattgtctccttccacaatgactgctttgtttggatgcctcagcccaggtcagctgttactttctttcagatgtttatttgcaaacaaccattttttgttctgtgtcccttttaaaaggcagattaaaagcacaagcgtgtttctagagaacagttgagagagaatctcaagattctacttggtggtttgcttgctctacgttacaggtggggcatgtcctcatcctttcctgccataaaagctatgacacgagaatcagaatattaataaaactttatgtactgctgtagt

SEQ ID NO: 148845 - DNA, 594 bp, Homo sapiens
acagagcttcagcaagaacagcttcaaacagtggttggcacttaccatggttccccagaccagtcccatcaagtgactggtaaccaccagcagcctcctcagcagaacactggatttccacgtagaatcagccctattacaatagtcgtggtgtgtctcgtggaggctcccgtggtgctagaggcttgatgaatggataccggggccctgccaatggattcagaggaggatatgatggttaccgcccttcattctctaacactccaaacagtggttatacacagtctcagttcagtgctccccgggattactctggctatcaacgggatggatatcagcagaatttcatcccataaagacaggactacaattgtcagctttctattacctggatatggaaggaaactatttttactctgcatgttctgtcctaagcgtcatcttgagccttgcacatgatactcagattcctcacccttgcttaggagtaaaacaatatactttacagggtgataataatctccatagttatttgaagtggcttgaaaaaggcaagattgacttttatgacattggataaaatctccaaatcag

SEQ ID NO: 148846 - DNA, 2648 bp, Homo sapiens
  misc_feature (1)...(2648): n = a,t,c or g
cggcttcctcccgctttttcttctctctccttgcggtctgaagatgccctcggccaccagccacagcgggagcgcagcaagtcgtccggaccgccaccgccgtcgggttcctccgggagtgaggcggccgcgggagccggggccgccgcgccggcttctcagcaccccgcaaccggcaccggcgctgtccagaccgaggccatgaagcagattctcggggtgatcgacaagaaacttcggaacctggagaagaaaaagggtaagcttgatgattaccaggaacgaatgaacaaaggggaaaggcttaatcaagatcagctggatgccgtttctaagtaccaggaagtcacaaataatttggagtttgcaaaagaattacagaggagtttcatggcactaagtcaagatattcagaaaacaataaagaagacagcacgtcgggagcagcttatgagagaagaagctgaacagaaacgtttaaaaactgtacttgagctacagtatgttttggacaaattgggagatgatgaagtgcggactgacctgaaacaaggtttgaatggagtgccaatattgtccgaagaggagttgtcattgttggatgaattctataagctagtagaccctgaacgggacatgagcttgaggttgaatgaacagtatgaacatgcctccattcacctgtgggacctgctggaagggaaggaaaaacctgtatgtggaaccacctataaagttctaaaggaaattgttgagcgtgtttttcagtcaaactactttgacagcacccacaaccaccagaatgggctgtgtgaggaagaagaggcagactcagcacctgcagttgaagaccaggtacctgaagctgaacctgagccagcagaagagtacactgagcaaagtgaagttgaatcaacagagtatgtaaatagacagttcatggcagaaacacagttcaccagtggtgaaaaggagcaggtagatgagtggacagttgaaacggttgaggtggtaaattcactccagcagcaacctcaggctgcatccccttcagtaccagagccccactctttgactccagtggctcaggcagatccccttgtgagaagacagcgagtacaagaccttatggcacaaatgcagggtcccgataatttcatacaggattcaatgctggattttgaaaatcagacacttgatcctgccattgtatctgcacagcctatgaatccaacacaaaacatggacatgccccagctggtttgccctccagttcattctgaatctagacttgctcagcctaatcaagttcctgtacaaccagaagcgacacaggttcctttggtatcatccacaagtgaggggtacacagcatctcaacccttgtaccagccttctcatgctacagagcaacgaccacagaaggaaccaattgatcagattcaggcaacaatctctttaaatacagaccagactacagcatcatcatcccttcctgctgcgtctcagcctcaagtatttcaggctgggacaagcaaacctttacatagcagtggaatcaatgtaaatgcagctccattccaatccatgcaaacggtgttcaatatgaatgccccagttcctcctgttaatgaaccagaaaactttaaaacagccaaaatcagtcccaggnccagttataaccagagcttttctagttcagccctcaccaagttagnaacaaacagagcttcagcaaggaacagcttcaaacagtggttgggcacttaccatggttccccaggaccagtcccatcagagtgactggtaaccaccagcaggcctcctcaggcagaacactgggatttccacgtaggcaatcaggccctattacaatagtcgtggtgtgtctcgtggaggctcccgtggtgctagaggcttgatgaatggataccgggggccctgccaatggattcagacggaggatatgatgggttacccgccccttcattcctcctaaaactcccaaacagtggttataccacagtcctcagttccagtgcctcccccgggattacctctggcctatccaacgggatgggatatccagcagaatttcaagcgaggctctgggcagagtggcccacggggagccccacgaggtcgtggacgggcccccaagacccaacagagggatgccgcaaatgaacactcagcaagtgaaataaatctgattcacaggattatggttaatcgccaaaaacacactggccagtgtaccataatatgttaccagaagagttattatactatttgttctccctttcaggaaacttattgtaaagggactgttttcatcccataaagacaggactacaattgtcagctttctattacctggatatggaaggaaactatttttactctgcatgttctgtcctaagccgtcatcttgagccttgcacatgatactcagattcctcacccttgcttaggagtaaaacaatatactttacagggtgataataatctccataggttatttgaagtggcttgaaaaaggcaagattgacttttatgacattggataaaatctacaaatcagccctcgagttattcaatgataactgacaaactaaattatttccctagaaaggaagatgaaagga

SEQ ID NO: 148847 - DNA, 1471 bp, Homo sapiens
cccacgcgtccgcccacgcgtccgcagtctcagttcagtgctccccgggattactctggctatcaacgggatggatatcagcagaatttcaagcgaggctctgggcagagtggaccacggggagccccacgaggtaatattttgtggtggtgatcctagctcctaagtggagcttctgttctggccttggaagagctgttaatagtctgcatgttaggaatacatttatcctttccagacttgttgctagggattaaatgaaatgctctgtttctaaaacttaatcttggacccaaattttaatttttgaatgatttaattttccctgttactatataaactgtcttgaaaactagaacatattctcttctcagaaaaagtgtttttccaactgaaaattatttttcaggtcctaaaacctgctaaatgtttttaggaagtacttactgaaacatttttgtaagacatttttggaatgaagattgaacatttatataaatttattattcctctttcatttttttgaaacatgcctattatattttagggccagacaccctttaatggccggataagccatagttaacatttagagaaccatttaggaagtgataggaactaatgggaatttgcaatgccttttgggacctctattagtgatataaatatcaagttatttctgacttttaaacaaaactcccaaattcctaacttattgagctataccttaaaaaaaattaccaggtttaggggagttttttgtttttcttttactgttggggaaaactacttcccattttggcaggaagttaacctatttaacaattagagctagcatttcatgtagtctggaaattctaaatgggttctctgatttgagggaggttaaaacatcaaacaggtttcctctattggccataacatgtataaaatgtgtgttaaggaggaattacaacgtactttgatttgaatactagtagaaactggccaggaaaaaggtacatttttctaaaaattaatggatcacttgggaattactgacttgactagaagtatcaaaggatgtttgcatgtgaatgtgggttatgttctttccccaccttgtagcatattcgatgaaaagttgagttaaactgatagcctaaaaatctgttttaaccagccatgtaaaaagttattttatctgttaaaagtcattataccagttttgaatgttatgtagtttctttttaacagtttaggtaataaggtctgttttcaattctggtgcttttattaattttgatagtatgatgtttacttactactgaaatgtaagctagagtgtacactagaatgtaagccccatgagagcaggtaccttgtctgtcttctctgctgtatctattcccaacgcttgatcacggtcgcctggcacatagtaggcactcaataaatatttgttgaatgaatgaaaaaaaaaaaaaaaaaa

SEQ ID NO: 148848 - DNA, 1016 bp, Homo sapiens
gtagagacagggtttcaccatgttgcctaagctggtctcaaatttctgggctaaaaaatctgcctacctcagcctcccaaagtactgggattataggtgtgaaccaccgttcccagactaattgtattgttaattttcactgtttttttttccccaaaaatgtttttgatttatggtttgttgactccatgaatgtggaacctgcagataccaagggccaactgtttatccttcctcttctaaacagcccatttttgtggggtttggggattgtctgagaaccagatgggcattggaggggcaaagatgagaaaaggctaccttacattatgcaagaggtaaatggccagaagtaacagcagaggcctccaaaaacaaactcatctctgtttttggtgagcaaatcctgtctgtgttagatactatgtgaagctggctgccaggaagactgatttacaaacttgtcaagatgtattgacagggttgcaatacccacatgggtccctgcccaaatccctcttctgggaattcttgctagccagggctggtttagtgacaacaaaactgttcacatcagcctcacaaaaaaaccatgtacttcctgacccggaaccttccttcctacctcagaaaagaggccacaagaaggccttctgtctgagctgggactgtcagcataatgctggtggccaaaaggtcccctcgaatgctttccatccaggcagcagcatggagcatcatcggctcagggctgtgaccttggctactgactgaagaggtccactgccaacagaacaggggccgtacttcctgtctcagatgtgttgctccactatgcctccccatcccaatcctttctgctccccacaaacaggtctaattctaagcctggatttgctttactttctgtggtcagagagctggactacaatgagctcatggatttggtttcaattccagacactgtaccaaggaatagagttgaagacaccctctctggctactgaaactcttag

SEQ ID NO: 148849 - DNA, 495 bp, Homo sapiens
gagcagatggtttctgaggacgtcccttgtaccacgcgttcacgcccgcatcattggttcccgcgcaaagccattcgcaaaatcatggacgaattcaaggtggacattcgcttcccacagagcggagccccagaccccaactgcgtcactgtgacggggctcccagagaatgtggaggaagccatcgaccacatcctcaatctggaggaggaatacctagctgacgtggtggacagtgaggcgctgcaggtatacatgaaacccccagcacacgaagaggcctggccgtgcccgctcaggacctgctccactgtttaacactaaaccaaggtcatgagcattcgtgctaagataacagactccagctcctggtccacccggcatgtcagtcagcactctggccttcatcacgagacgtccgcagccgtggctaggattccacttcctgtgtcatgacctcaggaaataaacgtccttgactttataaaagccaaa

SEQ ID NO: 148850 - DNA, 4751 bp, Homo sapiens
  misc_feature (1)...(4751): n = a,t,c or g
gaattcggggggcgagtaagccagcggcaggaccagcgggcgggggccacaacaaaagctggcaggctgacagaggcggcctcaggacggaccttctggctactgaccgttttgctgtggttttcccggattgtgtgtaggtgtgagatcaaccatgagttccgttgcagttttgacccaagagagttttgctgaacaccgaagtgggctggttccgcaacaaatcaaagttgccactctaaattcagaagaggagagcgaccctccaacctacaaggatgccttccctccacttcctgagaaagctgcttgcctggaaagtgcccaggaacccgctggagcctgggggaacaagatccgacccatcaaggcttctgtcatcactcaggtgttccatgtacccctggaggagagaaaatacaaggatatgaaccagtttggagaaggtgaacaagcaaaaatctgccttgagatcatgcagagaactggtgctcacttggagctgtctttggccaaagaccaaggcctctccatcatggtgtcaggaaagctggatgctgtcatgaaagctcggaaggacattgttgctagactgcagactcaggcctcagcaactgttgccattcccaaagaacaccatcgctttgttattggcaaaaatggagagaaactgcaagacttggagctaaaaactgcaaccaaaatccagatcccacgcccagatgaccccagcaatcagatcaagatcactggcaccaaagagggcatcgagaaagctcgccatgaagtcttactcatctctgccgagcaggacaaacgtgctgtggagaggctagaagtagaaaaggcattccaccccttcatcgctgggccgtataatagactggttggcgagatcatgcaggagacaggcacgcgcatcaacatccccccacccagcgtgaaccggacagagattgtcttcactggagagaaggaacagttggctcaggctgtggctcgcatcaagaagatttatgaggagaagaaaaagaagactacaaccattgcagtggaagtgaagaaatcccaacacaagtatgtcattgggcccaagggcaattcattgcaggagatccttgagagaactggagtttccgttgagatcccaccctcagacagcatctctgagactgtaatacttcgaggcgaacctgaaaagttaggtcaggcgttgactgaagtctatgccaaggccaatagcttcaccgtctcctctgtcgccgccccttcctggcttcaccgtttcatcattggcaagaaagggcagaacctggccaaaatcactcagcagatgccaaaggttcacatcgagttcacagagggcgaagacaagatcaccctggagggccctacagaggatgtcaatgtggcccaggaacagatagaaggcatggtcaaagatttgattaaccggatggactatgtggagatcaacatcgaccacaagttccacaggcacctcattgggaagagcggtgccaacataaacagaatcaaagaccagtacaaggtgtccgtgcgcatccctcctgacagtgagaagagcaatttgatccgcatcgagggggacccacagggcgtgcagcaggccaagcgagagctgctggagcttgcatctcgcatggaaaatgagcgtaccaaggatctaatcattgagcaaagatttcatcgcacaatcattgggcagaagggtgaacggatccgtgaaattcgtgacaaattcccagaggtcatcattaactttccagacccagcacaaaaaagtgacattgtccagctcagaggacctaagaatgaggtggaaaaatgcacaaaatacatgcagaagatggtggcagatctggtggaaaatagctattcaatttctgttccgatcttcaaacagtttcacaagaatatcattgggaaaggaggcgcaaacattaaaaagattcgtgaagaaagcaacaccaaaatcgaccttccagcagagaatagcaattcagagaccattatcatcacaggcaagcgagccaactgcgaagctgcccggagcaggattctgtctattcagaaagacctggccaacatagccgaggtagaggtctccatccctgccaagctgcacaactccctcattggcaccaagggccgtctgatccgctccatcatggaggagtgcggcggggtccacattcactttcccgtggaaggttcaggaagcgacaccgttgttatcaggggcccttcctcggatgtggagaaggccaagaagcagctcctgcatctggcggaggagaagcaaaccaagagtttcactgttgacatccgcgccaagccagaataccacaaattcctcatcggcaaggggggcggcaaaattcgcaaggtgcgcgacagcactggagcacgtgtcatcttccctgcggctgaggacaaggaccaggacctgatcaccatcattggaaaggaggacgccgtccgagaggcacagaaggagctggaggccttgatccaaaacctggataatgtggtggaagactccatgctggtggaccccaagcaccaccgccacttcgtcatccgcagaggccaggtcttgcgggagattgctgaagagtatggcggggtgatggtcagcttcccacgctctggcacacagagcgacaaagtcaccctcaagggcgccaaggactgtgtggaggcagccaagaaacgcattcaggagatcattgaggacctggaagctcaggtgacattagaatgtgctataccccagaaattccatcgatctgtcatgggccccaaaggttccagaatccagcagattactcgggatttcagtgttcaaattaaattcccagacagagaggagaacgcagttcacagtacagagccagttgtccaggagaatggggacgaagctggggaggggagagaggctaaagattgtgaccccggctctccaaggaggtgtgacatcatcatcatctctggccggaaagaaaagtgtgaggctgccaaggaagctctggaggcattggttcctgtcaccattgaagtagaggtgccctttgaccttcaccgttacgttattgggcagaaaggaagtgggatccgcaagatgatggatgagtttgaggtgaacatacatgtcccggcacctgagctgcagtctgacatcatcgccatcacgggcctcgctgcaaatttggaccgggccaaggctggactgctggagcgtgtgaaggagctacaggccgagcaggaggaccgggctttaaggagttttaaactgagtgtccactgtagacccaaaattacattccccaggattatcgggaagaaagggggcaagtaattcccaaataccggtttgaagcatgacgtgaacatccagtttccttgataaggacggatgcgaaccagcaccaggaccataattacattcacagggtacgaaaagaaccacagtagcctgccaggggatgctatactgagaattgtcgggtgaacttgagccagatggtttctgagggacgtccccgctgaaccaccgcgtttcacgccccgcatcatttggtgcccgcggcaaaagccattcnccaaaaatcatgtacgaatttcaaggttgcacattcgctttcccaacaagagcggagcccccaagaccccaaattgcgtcaactgttaacggggcttcccaagagaatgtggaggaaagccattcgacccaacatccttcaatcttggaggaggaaatacctaagctgacgtggtgggacagtgaggcgctgcaaggtatacatggaacccccaggcacacggaagaggccaaaggcaacttttccagaggctcttgatgtgcgggacgcacccttgaaccgcccagcagcagtgagaaggcttcttgacatgagcagctctgaggaattttcccagcttttggggctaaaggtggcttcccaagacccttcccttggggccccaaaacgataatgatcaaaaaagaacagaaccctctcccagcctgctgacccaaaacccaaccacacaatggtttgtctcaaatctgacccagcggctggaccctccgtaaattgttgagcgctcttcccccttcccgaggtcccgcagggagcctagcgcctggctgtgtgtgcggccgctccttccaggcctggccgtgcccgctcaggacctgctccactgtttaacactaaaccaaggtcatgagcattcgtgctaagataacagactccagctcctggtccacccggcatgtcagtcagcactctgggccttcatcacgagagcttcgcagccgtggcttaggatttccacttcctgtgtcatgacctcaggaaataaacgtccttgactttataaaagccaaacgtttgccctcttcctttcccacctccctcctgccagtttcccttggtccagacagtcctgtttgtggagtgcaatcagcctcctccagctgccagagcgcctcagcacaggtgtcagggtgcaaggaagacctggcaatggacagcaggaggcaggttcctggagctggggggtgacctgagaggcagagggtgacgggttctcaggcagtcctgattttacctgccgtggggtctgaaagcaccaagggtccctgcccctacctccactgccagaccctcagcctgaggtctggtgagtggagcctggaggcaaggtggtaggcaccatct

SEQ ID NO: 148851 - DNA, 481 bp, Homo sapiens
  misc_feature (1)...(481): n = a,t,c or g
ccacagctagttaactgatgagccaggatttgaatatggactgaattggagagagtttaatttgcccccccctatactttccactccccctggccaactttttaacctgtgccctcattttcccccccccaaaattccccataaacccgtttcaagctgtatacctctttctctttcgctcggatgtccttcaagaattggtatgttttgtccaacccctcagggttatattcccctgacaggtcctcaaaacgagggttccggggtacctttggaaagaagaaagagaattttaaacccaactgttcaatttcccttcccttaaaaaaagtgcttcctgttttttcctcatccttccnnnnnnnnnnnnnnnnnnnnnnnnnnnnnnnnnnnnnnnnnnnnnnnnnnnnnnnnnnnnnnnnnnnnnnnnnnnnnnnnnnnnnnnnnnnnnnnnnnntctacggaatctgctgaattctga

SEQ ID NO: 148852 - DNA, 877 bp, Homo sapiens
  misc_feature (1)...(877): n = a,t,c or g
cgggctcaggcaatcctctcgcttcagcctcccacgttgctgggattacaggcatgcaacaccacacccagcctgaaacccagatttttaatatgaaatcaaagtcttcagaccttgtaggtgtcataaaaagcacgctgaggaccactagtttgcaactgccaatctaaaatatcatagacattatatcacttcaaccacgaaaaaaaaagtatgtgaggcagaaaatggaagcaaccatgcctaatttattgttgaatactttttccgtataccaagagcttcctttgcactagcatctgaaactatatccagaatgacactggttttcataaaagtgttgatcctcacacctctttatagtcttgcacctagcccagtggagtgaaacactttaaatagcacttgttccttgagtatatatggaaaaaagtgaagtattgataagtgctcagctaatatgagcagcatctcaaggagtctccaattcttgaattaccagggagtatttttaccattttcccccagtgaaaggcctattttgagagacttaccctccaaaatgaatgtattaagtcatgttccnnnnnnnnnnnnnnnnngaaaaaaggccttttttttgttgcccgggctgggggctgaaaccagtaaatttcccggaagggggccccattttaacccccaaaaaggggcttttggattgtggcgaaaaaaaaatcaggggggggcccccgggggcaagggacacgcattttattaaaaaaggccgggttttgaggggagcccccccccacctgggctagggccccaggttggagtttttttgtgaacgctttcgggaacaggagcttgtacagtttccctatgcgagggtgcg

SEQ ID NO: 148853 - DNA, 471 bp, Homo sapiens
  misc_feature (1)...(471): n = a,t,c or g
gggtggtgaaaattgaacctannagctnagncagngcggcggaantcccaagagtccctcactagagtcactgagcagacccccgtctctgggctttggggacacaagactgctgagtgcttccacccgggcatggaaaccacaaagcaaactcagtgtggaaagaaaagaccctctggcggccttggcccgggaatacggtggttccaagcgcaatgctctactgaaatggtgccagaagaagacacaaggttatgcgaagaggaatctcttgttggcatttgaagcggctgaaagtgtaggcatcaaacccagcctggaactcagcgagatgctgtacacagaccggcccgactggcagagtgtgatgcagtacgtggcccaaatctacaagtactttgagacgtaaccctggagggcctggggcagccaccattgccacctactgcagcttttcctggaagcgcctgg

SEQ ID NO: 148854 - DNA, 438 bp, Homo sapiens
tgcagtaggtggcaatggtggctgccccaggccctccagggttacgtctcaaagtacttgtagatttgggccacgtactgcatcacactctgccagtcgggccggtctgtgtacagcatctcgctgagttccaggctgggtttgatgcctacactttcagccgcttcaaatgccaacaagagattcctctttttctcctgactattcagctcctggtaggggatgtgggcaggcaggtaggtgtggagcagagcacagaaggccaggccatcgctccagctgctgctgaaattggtgatgtcaatgttcgcataaccttgtgtcttcttctggcaccatttcagtagagcattgcgcttggaaccaccgtattcccgggccaaggctgccagagggtcttttctttccacactgagtttgctttgtggtttccatgcc

SEQ ID NO: 148855 - DNA, 953 bp, Homo sapiens
tttttttgttgggggaggggggaagggagggttcacaagggcaaagttttgggttttatcatttttttgagacagggtctggctctttcacacaggctggagtgcagtggtatgctcatagctcactgcagcctcgaactcctgggctcaaacgatcctactgccttggcttcctaaagtgctgggattacagccacgagctaccacacccagccaagggcaaaggtttcataaaggcaaagccgggatatttttaacaacagcaaccaaaagactgatttggagatgttctttgtctgaatttctgcagataatgtgttcgttcagccacccaatataatcagcaaaacaagcctgggtgtggggtcttggtctggaaggagggaggctgccctctttagaagcatcccacaagagatcaaagagtccccaatttacagtccagctgcatttgcatttcagacaggtacatcgtgggacccactctgtttcttatttgggtgttggtccacttggattgaagcctgtctttgaagtctaggcagctgggtggtgggccagagccagggtccagtggacagtaatccaggcgcttcccaggaaaagctgcagtaggtggcaatggtggctgccccaggccctcccagggttacgtctcaaagtacttgtagatttgggccacgtactgcactcacacttgtgccagtcgggccggtctgtgtacagcatctcgttgagttccagggaaactgctgtccacaagggacatggcatccagtgtacgctcacctcgtgaccaccacagactctgcaatcagcatctttgtgcagtattgtttccttcctgtcgaactagtccctcaagataaattactgagtgggattatcacaaaagccttgaaccaatttcaaatgcaaccatttattttaccagcattgttactacttaatgt

SEQ ID NO: 148856 - DNA, 466 bp, Homo sapiens; identical to SEQ ID NO: 117867
  misc_feature (1)...(466): n = a,t,c or g

SEQ ID NO: 148857 - DNA, 925 bp, Homo sapiens
ccgttaaaggagtaccgggcgtcaaagcagaacgctttgatataaagaatgacggcaaagcactgtgcattgtccctcgtgggagaaccaataatgtacccagagatcaacaggtttttgaagctactccaccagtgtaaaatttccagcttcctggtcacaaacgcacaatttcctgcggaaatcaggaacctcgagccggttactcagctgtatgtcagggtggatgccagtaccaaagacagcctgaagaaaatcgaccgcccactcttcaaggatttctggcagagattccttgacagtgtaaaagccttggcagtcaagcaacaacgaactgtctacagactgacgctcgtgaaagcatgggaacgtggacgagcctccaggcctacgcgcagctcgggtccctggggaatcctgacttcatcgaagtgaagggcgttacctactgcagagaaagttcagcaagcagtcttaccatggcccatgtgccctggcatgaggaagtggtacagtttgtccgcgagctggtggatctgatccccgaatatgaaattgcatgtgaacacgaacactctaattgcctcctgatagcacacagaaagtttaaaattggtggtgaatggtggacatggatcgattataaccgcttccaggagctcatccaggaatatgaagatagtggtggatcaaaaacgttcagcgcaaaggattatatggccagaactcctcactgggcattatttggtgccagtgaaagaggctttgatcccaaggacacaagacatcagagaaagaacaaatcaaaggctatttctggatgttgagattatctgatttcaaggtactgaaggacaaaaacttggatggcctcaaaaggttcttgaacaccactgtgattctccaaggacgaattacgtaaatt

SEQ ID NO: 148858 - DNA, 696 bp, Homo sapiens
  misc_feature (1)...(696): n = a,t,c or g
cagagattcattgacagtttaaaagctttggcagtcaagctacaacgaactgtctacagactgacgctcgtgaaagcatggaatgtgnacgagctccaggcctacgcgcagctcgtgtccctgggaaatcctgacttcatcgaagtgaagggcgttacctactgcgaagaaagttcagcaagcagtcttaccatggcccacgtgccttggcatgagaaagtggtacagtttgtccgcgagctggtggatctgatccccgaatatgaaattgcatgtgaacacgaacactctaattgcctcctgatagcacacagaaagaccgcagtacccggggcctggaagcggagtgaaagctgtcctgcctgtaaagaggagtggcccatgtgagggcatgggagtcattagtctcacaaacacacttgggactgaaagagggatcatttttttttggttccgtgaggtcactgtcccaggcctctcatatccatgacccagacggcgggtctccatcttctttcactcctgtggcccctggctgctttacacaatctgttctataaggttcaggtgttttcaagttggaaagatcataaatactaaaaattgttttcaagttagcaagttctaataacaaacttttatacaacaaattgaactacataaaataatcttttgtaaagacttgcataaaaaaaa

SEQ ID NO: 148859 - DNA, 1226 bp, Homo sapiens; identical to SEQ ID NO: 141484

SEQ ID NO: 148860 - DNA, 867 bp, Homo sapiens; identical to SEQ ID NO: 141728

SEQ ID NO: 148861 - DNA, 1459 bp, Homo sapiens
ggaaattccccaccttctgagctcaagtggaaggcaaagtctgaagaccttagacaccgaggcctgaaggcacaggcggagattaagggctcaacccagcagatcggcttcaccaccgaccctcggatggcccgctcctccccctaccccactgacgtggcccgagtggtgaatgcccccattttccacgtgaactcagatgaccccgaggctgtcatgtacgtgtgcaaagtggcggccgagtggaggagcaccttccacaaggacgtggttgtcgatttggtgtgttaccggcgcaacggccacaacgagatggatgagcccatgttcacgcagccgctcatgtacaagcagatccgcaagcagaagcctgtgttacagaagtacgctgagctgctggtgtcgcagggtgtggtcaaccagcctgagtatgagtgtgtctctatgcatggagtaagaaacaaaccatcctacaatagcaccaaatccagcatggatggactcatcctccaccctgctactggacttgtctttgtactctcaaagcagtgtgaggagattcatcaaccggtggtgtggacatgtgaacagcgtgaggcagagaacgccaccgccgaggaaaaccgtgtgctattagccatggtcaaccccaccgtgttcttcgacattgccgtcgacggcgatgcccttgggccgcgtctcctttgaggtcgggcgggcggcggcgtgcgggaatggggcccagaaagtgggccggggtcgggaaaattttcgttgctctgagccactggagagaaaaggatttgggttataaggggttccctgctttcacagattatttcccagggttttatgtgttcagggtggtgaacttcaacaacgccataaatggcaactggtgggcaagccccattctatggggaagaaaatttgaaagattgaagaacttccatccctaaaagccatacgggtcccctggcatcttgtccccatggcaaaatgctggaccccaaacacaaatggttccccagtttttcaatctgcactgcccaagactgcagtggttggaatggccaagccatgtgggtgtttggcacaagtgaaaggaaggccatgaatattgtggaggcccattggagccgctttggggtccaggaaatggcaagacccagcaaagaagatccccatttgctgactgtggacaactcttaataagtttgacttgtgtttttatctttaaccacccagatcattcccttctgtagcttcaaggagagcacccccttcaccccatttgctcgcaagtatcctagaatctttgtgctctcgcttgcagttcccttttgggttccatgttttccttggttcccttcccatgcctagctggattgcagcagttaaagtttatgattattgaaataaaaactaaataacaataaaaaaaaaaaaaaagggggcc

SEQ ID NO: 148862 - DNA, 363 bp, Homo sapiens
tgcagtggcacaatcttggctcactgcaacctctgcctcccgggttcaagcaattctcccgcctcagccccccgagcagccggaaccacaggcatgcaccaccacgcctgaccaatttttgcacctttagtagagacctggggtttcatcatgttggccaggctgctctcgaactcccgacctcaagcaatccgcccacctcagcctcccaaagtgcttggatttcaggagtgagcttttgcacctggcctgatatacaatttctgatgctatagaagcaatgtatagctcttgatctaatagtgactgctatgcgcttcattaacattatggacaagtcgatcccaaaaatcatatacaaat

SEQ ID NO: 148863 - DNA, 377 bp, Homo sapiens
cagcttttacagcctcccgcccccaccgctaccgcccacctcggatcccctcgagaccccagcgccctcccctagccccagccccagcccccaggccgtgtgctggcccagcggctggcattagctctacccgccctgccttctcttctcatatgcaatatcagtcattcacaggggcggccggtctccaaaatgcaaaatgcgcttcagccccccatctgccgttttcctttccaaacgaaaggaaacccacaaatccaacagaaaacacacacacacacacacacagaacaggcgattatttatttgtttttaatttattttgtcatatttttgtaaaacggcagaaatgcaataaaaactttatatcaacagtg

SEQ ID NO: 148864 - DNA, 1076 bp, Homo sapiens
  misc_feature (1)...(1076): n = a,t,c or g
aaaatgcgcttcagcccccgagggcccccagtattggtcggtgccccccatctgccgttttcctttccaaacgaaaggaaacccacaaatccaacagaaaacacacacacacacacacacacacacacacacacacacacagaacaggcgattatttatttgtttttaatttattttgtcatatttttgtaaaacggcagaaatgcaataaaaactatatttcaacagtgcccgaggtcagagcagtggaaaagggagtgggggtgggggagtcttggtgggctggggcctaggttgggaacccccctccccccatcctggttccggctggcttgaccccatgaggcccttctcccaaaaactgggtcttggccacagatggaaaactccaggctgcgccgccgtctgagacggcccaaatttggaggccaacttcagcccctggcttcagccacttaggacaaaggaaggaatctctaagtgctgaaaagaggcgacaatgtgtgcacaggccccagtcctgagtaagactccttctcaaagaggacagcgcggtggtttgcaaagacgttggcccccttctggcacacccgcttcctggaacatcgtctgggggagccagagacagtgggaagagcttgtggccatgaacatcagaaggccacctggcacctgagcctccttgcagtccccggactttgtgatactgagagaatggcacatttgggtgtccccaggacacggggtggcattgggatgcagcagggatgtcccactgtgggacagacatcagacccaagtcactgggactctgtcgtatgactcaggaacaggaacgtggcctctcagaccctcacatttttcaggaagaggacaaatgtgtccacatccaaaggcttaaggctcagagaccaacatggccatgctgcagggctgggccagtgtgagcaaggggcccttnnnnnnnnnnnnnnnnnnnnnnnnnnnnnnnnngctaataactttttatatatttatccaaatttcctgattattattatttaagacataaaataaaactatatgtaattttctcc

SEQ ID NO: 148865 - DNA, 2775 bp, Homo sapiens
gagatgaggaaaatagggggtcttatacagaggggcttcatgaaaatggggtgtgctgcagtgatcctctttctctcttggagtctcgaatggaggtggatgactatagtcagtatgaggaagaaagtacagatgattcctcctcttctgagggcgatgaagaggaggatgactatgatgatgactttgaagacgattttattcctcttcctccagctaagcgcttgaggttaatagttggaaaagactctatagatattgacatttcttcaaggagaagagaagatcagtctttaaggcttaatgcctaagctcttggtcttaacttgacctgggataactactttaaagaaataaaaaattccagtcaattattcctcaactgaaagtttagtggcagcacttctatttgtcccttcacttatcagcatactattgtagaaagtgtacagcatactgactcaattcttaagtctgatttgtgcaaatttttatcgtactttttaaaatagcccctccctaccgtgcaattcccgagttagagggtaaagccccctgttgtaaaataaaggcctcaagcaaaattgtaccagtgatagcaacctttccccacacaggaccgttgaaaacagtaatgtggcctacacagtttttttaactgtcagagccatcagctgggctctttaatataatgactaaacaataattttaaaacaattcatagtagcagcatattaagggtttcttagtatgcctcatatcaccagcaatgatctttggctttttgatttatttgctagatgtttcccccttggagttttgtcaagtttcacccctgtttgctggcccccaggtgtactgttgtggcccttggttaatatcgcaaaccattggttgggagtcagattggtttcttaaaaaaaaaaaaaaaaacgacatacgtgacagctcacttttcagttcattatatgtaccgagggtagcagtgtgtgggatgaggttcgatacagcgtatttattgcttgtcatgtaaattaaaaaccttgtatttaactctattcaatccttttagataaaattgttctatgcaagaatgattggtgcttattttttcaaaaattatgctgtgaacaacgtgatgacaacaagcaacatttatctaatgaacatacagctatcttaatttggttcttcaagttttctgttgcacttgtaaaatgctacaaggaatattaaaaaaatctattcactttaacttataatagtttatgaaataaaaacatgagtcacagcttttgttctgtggtaacctataaaaaaagtttgtcctttgagattcaatgtaaagaactgaaaacaatgtatatgttgtaaatatttgtgtgttgtgagaaatttttgtcataagaaattaaaagaacttaccaggaaggtttttaagtttagaaatattccatgccaataaaataggaaattataaatatatagttttaagcactgcatcagtgggagttcttggcttatgttagtttatgttagtttattatgaaaacatcgaagatttttttgactatattatcagttaaacaaaaaggagtcagatttaatttgttttttgaagcactttgagaaattaattttaattaacttaatgagcaaatttttattactactttatgttcaataccaggttcttttcatttctctggattattttgcaaatcattggacagagaatttgggaatataaatctgtaacaggtgtttgacaccagtaggtctctttatttctgggaaatgtgtacctgtactttctgatatacagtgttcctaagtaaaaatcaattcaggggatttgtatagtgtctataggtaaagtagcccatgtcttgaaatatgaaaaggaatctgaaggtcatgaaaagtccagtggagaaaatctcaatgcttactgttactactaattgattcctactagtttccaggtttggggggatattgtttcaatgacgctccttaagactgttgattgcccataggttccaaataggaaattaagactcatggaacatttttaggaaagtaggattgttttctcctggttctctaaggaactacttctgcagtcttacatagtctcatccttgtttgttgtggtgcagtcgaactcctcaggcgtttggaaagcatgtggtagaccttcttccacacccacccatacccccgttcactgcgtctggaggtcttcaacagtgaagtagggcagcccacacagcctctcaggagcacctgtccgaggcacccggagcactttgcagagcacgtccagccctcatggggtccctgcatagaaatgtgaacccctgccactgaggaagatgaaggtagaccctgtgtctggaggtgctggagggcagcgggtcacctccttgtattcccaccttagtttgggggtgttttgaagaggttcagagactaaatcttaaaccttatttgaataccaacgatagctattttgggaatttcgatcttaaaaagtgacaaaacacatttcccattttcatttttcagctgaattttagtaacttatttttgatgttttaattttatcatggcctcctctttggagcaaacccttcccatgggtctcaaagcagtgacatttggtagtaaatcactgcctctcaggagtcggtatgcacaagcactcagcagccactgttgatgccttctagggaaacctaatttccgttggtaaaggtaggggcctcggaa

SEQ ID NO: 148866 - DNA, 3048 bp, Homo sapiens; identical to SEQ ID NO: 146683

SEQ ID NO: 148867 - DNA, 2529 bp, Homo sapiens; identical to SEQ ID NO: 134039

SEQ ID NO: 148868 - DNA, 3114 bp, Homo sapiens
atggagctgaaaaccaaggctcgagaactacatgaagaatgcagaagcctcaggagccgatgcgatcaactggaagaaagggtatcagcaatggaagatgaaatgaatgaaatgaagcgagaagggaagtttagagaaaaaagaataaaaagaaatgagcaaagcctccaagaaatatgggactatgtgaaaagaccaaatctacatctgattggtgtacctgaaagtgatgcagagaatggaaccaagttggaaaacactctgcaggatattatccaggagaacttccccaatctagcaaggcaggccaacgttcagattcaggaaatacagagaacgccacaaagatactcctcgagaagagcaactccaagacacataattgtcagattcaccaaagttgaaatgaaggaaaaaatgttaagggcagccagagagaaaggtcgggttaccctcaaagggaagcccatcagactaacagcggatctctcggcagaaaccctacaagccagaagagagtgggggccaatattcaacattcttaaagaaaagaattttcaacccagaatttcatatccagccaaactaagcttcataagtgaaggagaaataaaatactttacagacaagcaaatgctgagagattttgtcaccaccaggcctgccctaaaagagctcttgaaggaagcgctaaacatggaaaggaacaaccagtaccagccgctgcaaaatcatgccaaaatgatcaacaaaattgatagaccgctagcaagactaataaagaaaaaaagagagaagaatcaaatagacacaataaaaaatgataaaggggatatcaccactgatcccacagaaatacaaactaccatcagagaatactacaaacacctctacgcaaataaactagaaaatctagaagaaatggatacattccttgacacatacactctcccaagactaaaccaggaagaagttgaatctctgaatagacaaataacaggagctgaaattgtggcaataatcaatagtttaccaaccaaaaagagtccaggaccagatggattcacagccgaattctaccagaggtacaaggaggaactggtaccattccttctgaaactattccaatcaatagaaaaagagggaatcctccctaactcattttatgaggccaccatcattctgataccaaagccaggcagagacacaaccaaaaaagagaattttagaccaatatccttgatgaacattgatgcaaaaatcctcaataaaatactagcaaaccaaatccagcagcacatcaaaaagcttatccaccatgatcaagtgggcttcatccctgggatgcaaggctggttcaatatatgcaaatcaataaatgtaatccagcatataaacagagccaaagacaaaaaccacatgattatctcaatagatgcagaaaaagcctttgacaaaattcaacaacccttcatgctaaaaactctcgataaattaggtattgatgggacgtatttcaaaataataagagctatctatgacaaacccacagccaatatcataccgaatgggcaaaaactggaagcattccctttgaaaactggcacaagacagggatgccctctctcaccactcctattcagcatagtgttggaagttctggccagggcaatcaggcaggagaaggaaataaagggtattcaattaggaaaagaggaagtcaaattgtccctgtttgcagacgacatgattgtatatctagaaaaccccatcgtctcagcccaaaatctccttaggctgataagcaacttcagcaaagtctcaggatacaaaatcaatgtacaaaaatcacaagcattcctatacaccaacaacagacaaacagagagccaaatcatgagtgaactcccattcacaattgcttcaaagagaataaaatacctaggaatccaacttacaagggatgtgaaggacctcttcaaggagaactacaaaccactgctcaaggaaataaaagaggatacaaacaaatggaagaacattccatgctcatgggtaggaagaatcaatatcgtgaaaatggccatactgcccaaggtaatttacagattcaatgccatccccctcaagctaccaatgactgtcttcacagaattggaaaaaactactttaaagttcatatggaaccaaaaaagagcctgcatcgccaagtcaatcctaagccaaaagaacaaagctggaggcatcacactacctgacttcaaactatactacaaggctacagtaaccaaaacagcatggtactggtaccaaaacagagatatagatcaatggaacagaacagagccctcagaaataacgccgcatacctacaactatctgatccttgacaaacctgagaaaaacaagcaatggggaaaggattccctatttaataaatggtgctgggaaaactgcctagccatatgtagaaagctgaaactggatcccttccttacaccttatacaaaaatcaattcaagatggattaaaaacgtaaatgttagacctcaagccattaaaaccctagaagaaaacttaggcaataccattcaggacataggcatgggcaaagacttcatgactaagatgccaaaagcaatggcaacaaaagccaaaacagacaaatgggatctaattaaagtaaagagcttctgcatggcaaaagaagctgtcatcagagtgaacaggcaacctacagaatgggagaaaatttttgcaatccacccatctgacaaagggctaatatccagaatctacaaagaatttaaacaaatttacaaggaaaaaacaaacaaccccatcgaaaagtgggcaaaggatatgaacagacacttctcaaaagaagacatttatgcagccaacagacacatgaaaaaatgctcatcaccactggtcatcagagaaatgcaaatgaaaaccacaatgagataccatctcatgccagttagaatggcgatcattaaaaagtcaggaaacaacagatgctggagaggatgtcgagaagtaggaaagtttttacactgttggtgggagtgtaaattagttcaaccactgtggaagacagtatggtga

SEQ ID NO: 148869 - DNA, 2502 bp, Homo sapiens
atgggagactttaacaccccactgtcaacattagacagatcaacgagacagaaagtcaacaaggatacccaggaattgaactcagctctgcaccaagcggacctaatagacatctacagaactctccaccccaaatcaacagaatatacatttttttcaacaccacaccacacctattccaaaactgaccacatagttggaagtaaagctctcctcagcaaatgtaaaagaacagaaattataacaaactatctctcagaccacagtgcaatcaaactggaactcaggattgagaatctcactcaaaaccgctcaactacatggaaactgaacaacctgctcctgaatgactgctgggtacataacgaaatgaaggcagaaataaagatgttctttgaaaccaatgagaacaaagacacaacataccagaatctctgggacgcattcaaagcagtgtgtagagggaaatttatagcactaaatgcccacaagagaaagcaggaaagatccaaaattgacaccctaacttcacaattaaaagaactagaaaagcaagagcaaacacattcaaaagaaatacaaactaccatcagagaatactacaaacacctctacgcaaataaactagaaagtctagaagaaatgaataaattcctcgacacatacactctcccaagactaaaccaggaagaagttgaatctctgaatagaccaataacaggagctgaaattgtgacaataatcaatagctcaccaaccaaaaagagtccaggaccagatgggttcacagccgaattctaccagaggtacaaggaggaactgcatataaacagagccaaagacaaaaaccacatgattatctcaatagatgcagaaaaagcctttgacaaaattcaacaacccttcatgctaaaaactctcaataaattaggtattgatgggacgttttgcaaaataataagagctatctatgacacactcacagccaatatcatactgaatgggcaaaaactggaagcattccctttgaaaactggcacaagacagggatgccctctctcaccactcctattcaacatagtgttggaagttctggccagggcaattaggcaggagaaggaaataaaaggtattcaattaggaaaagaggaagtcaaattgtccctgtttgcagatgacattattgtatatctagaaaaccccattgtctcagcccaaaatctcctcaagctgacaagcaacttcagcaaagtctcaggatacaaaatcaacgtacaaaaatcacaagcattcttatacaccaacaacagacaaacagagagccaaatcatgagtgaactcccattcacaattgcttcaaagagaataaaatacctaggaatccaacttacaagggatgtgaaggacctcttcaaggagaactacaaaccactgctcaaggaaataaaagaggatacaaataaatggaagaacattccatgctcatggctaggaagaatcaatatcgtgaaaatggccatactgcccaaggtaatttacagattcaatgccatccccatcaagctaccaatgcctttcttcacagaattggaaaaaactactttaaagttcatatggaaccaaaaaagagcccgcattgccaagtcaatcctaagccaagtcaacaaagctggaggcatcacgctacctgacttcaaactatactacaaggctacagtaaccaaaacagtatggtactggtaccaaaacagagatatagatcaatggaacagaacagagccctcagaaataatgccgcgtatctacaactatctgatctttgacaaacctgagaaaaacaagcaatggggaaaggattccctatttaataaatggtgctgggaaaactggctagccatatgtagaaagttgaaactggatcccttccttacacctcatacaaaaattaattcaagatggattaaagacttaaacgttagacctaaaaccataaaaaccctagaagaaaacctaggcattaccattcaggacataggcatggggaaggacttcatgtctaaaacaccaaaagcaatggcaacaaaagccaaaattgacaaatgggatctcattaaactaaagagcttctgcacagcaaaagaaactaccatcagagtgaacaggcaacctacaaaatgggagaaaattttcgcaacctactcatctgacaaagggctaatatccagaatctacaatgaactcaaacaaatttacaagaaaaaaacaaacaaccccatcaaaaagtgggcgaaggacatgaacagacacttctcaaaagaagacatttatgcagccaaaaaacacatgaaaaaatgctcatcatcactggccatcagagaaatgcaaaccaaaaccacaatgagataccatctcacaccagttagaatggcaatcattaaaaagtcaggaaacaacaggtgctggagaggatgtggagaaataggaacacttttacactgttga

SEQ ID NO: 148870 - DNA, 5517 bp, Homo sapiens
atgtatgacaaacccacagccaacataatagtgaatggggaaaaattgaaagcattccctctgagaactggaacaagacaaggatgcccactctcaccactcctcttcaacacagtactagaagttctagccagagcaatcagacaagagaaagaaataaaaagcatccaaataggtaaagaaaaagtcaaactgtcactgtttgctgatgatacaattatttacctcaaaaaccctgaagacttctctagaaagcttctagaactgataaaagaattcagcaaagtctcaggatacaagattagtgtacacaaatcgttagctcttctctacaccaacagcaaccaagcagagagccaaatcatgagtgaactcccattcacaattgcttcaaagagaataaaatacctaggaatccaacttacaagggatgtgaaggacctcttcaaggagaactacaaaccactgctcaaggaaataaaagaggatacaaacaaatggaagaacattccatgctcatgggtaggaagaatcaataccgtgaaaatggccatactgcccaaggtaatttacagattcaatgccatccccatcaagctaccaatgcctttcttcacagaattggaaaaaactactttaaagttcatatggaaccaaaaaagagcccgcatacccaagtcaatcctacgccaaaagaacaaagctggaggcatcacactacctgacttcaaactatactataaggctacagtaaccaaaacagcatggtactgttataaaaataggcacatagatcaatggaacagaacagagccctcagaaataacgccgcatatctacaactatctgatctttcacaaagcaaacaaaaacataaaatggattaaggacttaaatccaagacctgaaactataaaaatcctagaagataacattggaaaaaccattcaggacataggcatgggcaaggacttcatgaccaagaacccaaaagcaaatgcaacaaaagacaaaattgacaaatgggatctaattaaactaaagagcttctgcacagcaaaagaaactaccatcacagtgaacaggcaacctacaaaatgggagaaaatttttgcaacctactcatctgacaaagggctaatatccagaatctacaatgaactcaaacaaatttacaagaaaaaaacaaacaaccccatcaaaaagtgggcgaaggacatgaacagacacttctcaaaagaagacatttatgcagccaaacaacacatgaaaaaatgctcatcatcactggccatcagagaaatgcaaatcaaaaccacaatgagataccatctcacaccagttagaatggcaatcattaaaaagtcaggaaacaacagcccatggtcctatctggtccttgacactgccaagatcttcccacctcagggcctttgtcctgtctgggtcctcttcctggccattttcaagttcatccaggttaaaagatcagcattttctggatctgtgccaccttttcatagtcagcagatctctgtctgctctcaggggtatgccaaaggccactgggtcattgggacatggatgaagctggaaaccatcattcgcagcaaactatcgcaaggacaaaaaaccaaacaccgcatgttctcactcatagaaatgacagcagctgtcttttgtgggcacctaccaagtgccaggcttgtgttgcgacttgacacgtgtgaccctgttcatcctcccacaacaaccccgggtgtgaacaaggatgacaagacaggttcgctcaggacagggacttaccaggactaccttttagaaagcaacttggtgatctgtatgggaagccttggaagatgcccaggccctcaacctagacccctcacagccatgtttattgggctgaacatcctcaacagcagctccttctccttccctttgatgtgtgcacatgtctgtgcaagggcacacaaacacgcatgtggacacagcccgagcctccccgacgggagcaccaccccctactccacggcgcccagtcccatcgaccacccaagggatgaggaatgcgagcgcacggtgcaggactggcaggcagctccacctgcagccccagtgcgggatccactagaggagcaggacttacatgtttactcagggcacgaactgaccaaagaggaagcagcacatgctgttaaaggcaagactcggaacgggacagctctagttatctcccatcttcctcggaggcgatcaaaatccattacgaagaagaatttacctctgtggaatccccagtgctatgcctgtgcacagcaggtcctcaatgaacagtgtgctagtcattcttcagggagatggacttttaccaccaatgtcacctacactcaaagctctgactcaaacatgtttctctttgctgctttttggaatcccattgcaatgacaataaagaagagaaaagaaggaaaactaacaaacagaaaggacatccacaccaaaaacccatctgtacatcaccatcatcaaagaccaaaagtggataaaaccacaaagatagggaaaaaacagaacagaaaaaaaggaaactctaaaaagcagagcgcctctcctcctgcaaaggaacgcagctcctcaccagcaacagaacaaagctggacggagaatgactttgatgagctgagagaagaaggcttcagacgatcaaattactctgagctatgggaggaaattcaaaccaaaggcaaagaagttgaaagctttgaaaaaaatttagaagaatatataactagaataaccaatacagagaagtgcttaaaggagctgatggagctgaaaaccaaggctcgagaactacgtgaagaatgcagaagcctcaggagccgatgcaatcaactggaagaaagggtatcagtaatggaagatgaaacgaatgaaatgaagcgagaagggaagtttagagaaaaaagaataaaaagaaacgagcaaagcctccaagaaatatgggactatgtgaaaagacaaaatctacctctgattggtatacctgaaagtgatggggagaatggaaccaagttggaaaacactctgcaggatattatccaggagaatttcccaaatctcgcaaggcaggccaacgttcagattcaggaaatacagagaatgccacaaagatactcctcgagaagagcaactccaagacacataagtgtcagattcaccaaagttgaaatgaaggaaaaaatgttaagggcagccagagagaaagacagatcaacgagacagaaagtcaacaaggatacccaggaattgaactcagctctgcaccaagcagacctaatagacatctacagaactctccaccccaaatcaacagaatatacatttttttcagcaccacaccacacctattccaaaattgaccacatacttggaagtaaacctctcctcagcaaaggtaaaagaacagaaattataacaaactatctctcagaccacagtgcaatcaaactagaactcaggattaagaatctcactcaaaaccgctcacctacatggaaactgaacaacctgctcctgaatgactactgggtacgtaacgaaatgaaggcagaaataaagatgttctttgaaaccaacgagaacaaagacacaacataccagaatctctgggacacattcaaagcagtgtgtagagggaaatttatagcactaaatgcctacaagagaaaactaaaccaggaagaagttgaatctctgaatagaccaataacaggatctgaagttgtggcaataatcaatagcttaccaaccaaaaagagtccaggaccagatggattcacagccaaattctaccagaggtacaaggaggaactgaaaagtaatttggagagctgcaagatggaaggtgcaggctcccccgcctggctgttcatgcttcacactgctggagacagaggccatggatgggaagaagtcagtggctacgatgaaaacctgaacaccatccgcacctaccaggtgtgcaatgtcttcgagcccaaccagagcaattggctgctcaccaccttcatcaaccggcggggggcccatcgcatctacacagagatgcgcttcactgtgagagactgcagcagcctccctaatgtcccaggatcctgcaaggagaccttcaacttgtattactatgagactgactctgtcattgccaccaagaagtcagccttctggtctgaggccccctacctcaaagtagacaccattgctgcagatgagagcttctcccaggtggactttgggggaaggctgatgaaggattatggagcctgtatgtctcttctttctgtccgtgtcttcttcaaaaagtgtcccagcattgtgcaaaattttgcagtgtttccagagactatgacaggggcagagagcacatctctggtgattgctcggggcacatgcatccccaacgcagaggaagtggacgtgcccatcaaactctactgcaacggggatggggaatggatggtgcctattgggcgatgcacctgcaagcctggctatgagcctgagaacagcgtggcatgcaaggggcctgttaataatactgagaaggcaaagtctggggagatgtggtttagtccagaagagtatggctgggaatatgctgcattcttagctcttagaaagtgttcacaatgtccagaggatgctgtggctgcaagtggtgctgttgctctggagaacctgatggagcatggccacatccggctagataaagcctcgaaggacagcgagtcaagcacaccccatgaccccactttgctcttccacagtggtcctcagcctaattttagacacttccagggatggaacaccgttacttccgaaggaagcctgatacatcttcctaaatccaagactcagtcacagtgtccaggcctttttggaggatccttagacagcaggattgacattggaggagcctggtatttctgccacactcacacagcctcctctgcatccaccccctctgaggaagcagggagtcttgctgacccctccaatgagacagagtccctgttatttgcatgcacagctctctgctccccatgggaatgccagctcattttggaccttgcttccctgtttcaaggcatcatgcttatgcctcgagcagtgcagttcttcaaatgctgggataaagtaacagtgagaaaccagtggagaatgcacagccatggccctagttgtctaggtgtcagctttcagaaaggactgtgtcaagagatggtctacatcagcacacgaggcagcagctcaggtctgagacccctggtgctgtctttgcatggatgggcagtggacacagccattcacacctgtattccattccccacagatatcatatggatccaggacctcatagcaggactgaaagacgaatggtttgatactcaccccggacgcaggattggccgtccagcccagctctgcagtagccgttctggtgtccattaa

SEQ ID NO: 148871 - DNA, 2763 bp, Homo sapiens; identical to SEQ ID NO: 121561

SEQ ID NO: 148872 - DNA, 2991 bp, Homo sapiens
atgggagactttaacatcccactgtcaacattagacagatcaacgagacacaaagttaacaaggagacccagaaattgaactcaactctgcaccaagtggacctaatagacatctacagaactctccaccccaaatcaacagaatatacatttttttcagcaccacaccacacctattccaaaattgaccacatagttggaagtaaagctctcctcagcaaatgtaaaagtacagaaagtataacaaactgtctgtcagaccacagtgcaatcaaactagaactcaggattaagaaactcactaaaaaccgctcaactacatggaaactgaacaacctgctcctgaatgactactgggtacataacgaaatgaaggcagaaataaagatgttctttgaaaccaacgagaacaaagacacaacataccagaatctctgggacacattcaaagcagtgtacagtgggaaatttatagcactaaatgcccacaagagaaagcaggaaagatccaaaattgacaccctaacatcacaattaaaagaactagaaaagcaagagcaaacacattcaaaagctagcagaaggcaagaaataactaaaatcagagcagaactgaaggaaatagagacacaaaaaacccttcaaaaaattaatgaatccaggagccggttttttgaaaggatcaacaaaattgatagaccgctagcaagactaataaagaagaaaagagagaagaatcaaatagatgcaatacaaaatgataaagggggtatcaccaccaatcccacagaaatacaaactaccatcagagaatactacaaacacctctatgcaaataaactagaaaatctagaagaaatggataaattcctggacacatacaccctcccaagactaaaccaggaagaagttgaatctctgaatagaccaataacaggctctgaaattgtggcaataatcaatagcttaccaaccaaaaagagtccaggaccagatggattcacagtcgcattctaccagagaaaagagggaatcctccctaactcattttatgaggccagcatcatcctgataccaaagctgggcagagacacaaccaaaaaagagaattttagaccaatatccttagtgaacattgatgcaaaaatcctcaataaaatactggcaaaccgaatccagcagcacatcaaaaagcttatccaccatgatcaagtgggcttcatccctgggatgcaaggctggttcaatatacgcaaatcaataaatgtaatccagcttataaacagaaccaaagacaaaaaccacatgattatctcaatagatgcagaaaaggcctttgataaaattcaacaacccttcatgctaaaaactctcaataaattaggtattgatgggacgtatctcaaaataataagagctatctatgacaaacccacagccaatatcatactgaatgggcaaaaactggaagcattccctttgaaaactggcacaagacagggatgccctctctcaccactcctattcaacatagtgttggaagttctggccaggcccattaggcaggagaaggaaataaagggtattcaattaggaaaagaggaagtcaaaatgtccctgtttgcagacgacatgattgtatatctagaaaaccccattgtctcagcccaaaatctccttaagctgatcagcaacttcagcaaagtctcaggatacaaaatcaatgtacaaaaatcacaagcattcttatacaacaataacagacaaacagagagccaaatcatgagtgaattcccattcacaattgcttcaaagagaataaaatacctaggaatccaacttacaagggacgtgaaggacctcttcaaggagaactacaaatcactgctcaaggaaataaaagaggatacaaacaaatggaagaacattccatgctcatgggtaggaagaatcagtatcgttaaaatggccatactgcccgaggtaatttatagaatcagtgccatccccatcaagctcccaatgactttcttcactgaattggaaaaaactactttaaagttcatatggaaccaaaaaagagcccgcatcaccacatcaatcctaagccaaaagaacaaagctggaggcatcacactacctgacttcaaactatactacaaggctacagtaaccaaaacagcatggtactggtaccaaaacagagatatagaccaatggaacagaacagagccatcagaaataatgccacatatctacaactatctgatctttgacaaccctgagaaaaacaagcaacggggaaaggattccctatttaataaatggtgctgggaaaactggctagccatatgtagaacgctgcaactggatcccttccttacaccttatacaaaaattaattcaagatggattaaaggcttaaacgttagacctaaaaccataaaaaccctagaagaaaacctaggcattaccattcaggacataggcatgggcaaggacttcatgtctaaaacaccaaaagcaatggcaacaaaagccaaaattgacagatgggatctaattaagctaaagagcttctgcacagcaaaagaaactaccatcagagtgaacaggcaacctacaaaatgggagaaaattttcacaacctactcatctgacaaagggctaatatccagaatctacaaagaactcaaacaaatttacaagaaaaaaacaaacaaccccatcaaaaagtgggcaaaggatatcaacagacacttctcaaaagaagacatttatgcagccaaaaaacacatgaaaaaatgctcatcatcactggccatcagagaaatgcaaatcaaaaccacaatgagataccatcccacaccagttaggatggcaatcattaaaaagtcaggaaacaacagatgctggagaggatgtggagaaatagcaacacttttacactgttgggacatggatgaaattggaaatcatcattctcagtaa

SEQ ID NO: 148873 - DNA, 2515 bp, Homo sapiens
atgggagactttaacaccccactgtcaacattagacagatcaacaagacagaaagtcaacaaggatacccaggaattgaactcagctccacaccaggcagacctaatagacatctacagaactctgcaccccaaatcaacagaatatacatttttttcagcaccacaccacacctattccaaaactgaccacatacttggaagtaaagctctcctcagcgaatgtaaaagaacagaaattataacaaactatctctcagatgacagtgcaatcaaactagaactcaggattaagaatctcactcaaaaccgctcaactacatggaaactgaacaacctgctcctggatgactactgggtacataacgaaatgaaggcagaaataaagatgttctttgaaaccaatgagaacaaagacacaacataccagaatctctgggacgcattcaaagcagtgtgtagagggaaatttgtagcactaaatgcccacaagagaaagcagggaagatccaaaattgacaccctaacatcacaattaaaagaactagaaaagcaagagcaaacacattcaaaagctagcagaaggcaagaaataactaaaatcagagcagaactgaaggaaatagagacacaaaaaaccgttcaaaaaattaatgaatccaggagctggttttttgaaaggatcaacaaaattgatagacagctagcaagactaataaagaaaaaaagggagaagaatctaatagacgcaataaaaaatgataaaggggatatcaccaccgatcccacagaaatacaaactaccatcagagaatactacaaacacctctatgcaaataaactagaaaatctagaagaaatggataaattcctggacacatacactctcccaagactaaaccaggaagaagttgaatctctgaatagaccaataacaggatctgaaattgtggcaataatcaatagcttaacaaccaaaaagagtccaggaccagatggattcacagccgaattctaccagagggcaattaggcaggagaaggaaataaagggtattcaattaggaaaagaggaagtcaaattgtccctgtttgcagatgacatgattgtatatctagaaaaccccattgtctcagcccaaaagctgataagcaacttcagcaaagtctcaggatacaaaatcaatgtacaaaagtcacaagcattcttatacaccaacaacagacaaacagagagccaaatcatgagtgaactcccattcacaattgcttcaaagagaataaaatacctaggaatccaacttacaagggatgtgaaggacctcttcaaggagaactacaaaccactgctcaaggaaataaaagaggatacaaacaaatggaagaacattccatgctcatgggtaggaagaatcaatatcgtgaaaatggccatactgcccaaggtaatttacagattcaatgccatccccatcaagctaccaatgactttcttcacagaattaaaaaaaactactttaaatttcatatggaaccaaaaaaagagcccacatcgccaagtcagcctaagccaaaagaacaaagctggaggcatcacactacctgacttcaaactatactacaaggctacagtaaccaaaacagcatggtactggtaccaaaacagagatacagatcaatggaacagaacagagccctcagaaataatgccgcgtatctacaactatctgatctttgacaaacctgagaaaaacaagcaatggggaaaggattccctgtttaataaatggtgctggaaaaactggctagccatatgtagaaagctgaaactggatcctttccttacaccttatacaaaaattaattcaagatggattaaagacttaaacattagacctaaaaccataaaaaccctagaagaaaacctaggcattaccattcaggacataggcatgggcaaggacttcatgtctaaaacaccaaaagcaatggcaacaaaagccaaaattgacaaatgggatctaattaaactaaagagcttctgcacagcaaaagaaactaccaacagagtgaacaggcaacctacaaaatgggagaaaatttttgcaacctactcatctgacaaagggctaatatccagaatctacaatgaactcaaacaaatttacaagaaaaaaacaaacaaccccatcaaaaagtgggcgaaggacatgaacagacacttctcaaaagaagacatttatgcagccaaaaaacacatgaaaaaatgctcatcatcactggccatcagagaaatgcaaatcaaaaccacaatgagataccatctcacactagttagaatggcaatcattaaaaagtcaggaaacaacaggtgctggagaggacgtggagaaataggaacacttttacactgttggtgggactgtaaactagttcaatcattgtggaagtcagtgtggcaattcctcagggatctagaactggaaataccatttgacccagccatcccattactgg

SEQ ID NO: 148874 - DNA, 2634 bp, Homo sapiens
atgggagactttaacaccccactgtcaacattagacagatcaatgagacagaaagtcaacaaggatacccaggaattgaactcagctctgcaccaaggggacctaatagacatctacagaactctccaccccaaatcaacagaatatatatttttttcagcaccacaccacacctattccaaaattgaccacatacttggaagtaaagctctcctcagcaaatgtaaaagaacagaaattataacaaacgatctctcagaccacagtgcaatcaaactagaactcaggattaagaatctcactcaaaactgcgcaactacacagaaactgaacaacctgctcctgaatgactactgggtacataacgaaatgaaggcagaaataaagatgttctttgaaaccaacgagaacaaagacacaacataccagaatctctgggacgcattcaaagcagtgtgtagagggaaatttatagcactacatgcccacaagagaaagcaggaaagatccaaaattgacaccctaacatcacaattaaaagaactagaaaagcaagagcaaacacattcaaaagctagcagaaggcaagaaataactaaaatcagagcagaactgaaggaaatagagacacaaaaaacccttcaaaaaattaatgaatccaggagctggttttttgaaaggatcaacaaaattgatagactgctagcaagactaataaagaaaaaaagagagaagaatcaaatagatgcaataaaaaatgataaaggggatatcaccaccgatcccacagaaatacgaactaccgtcagagaatactacaaacacctctacgcaaataaactagaaaatctagaagaaatggatacattcctcgacacatacactctcccaagactaaaccaggaagaagttgaatctctgaatagaccaataacaggagctgaaattgtggcaataatcaatagcttaccaaccaaaaagagtccaggaccagatggattcacagccgaattttaccagagattcagaaaaggccttcgacaaaattcaacaaccttcatgccaaaaactctcaataaattaggtattgatgggacatatctcaaaataataagagctatctatgataaacccacagccaatatcatactgaatgggcaaaaactggaagcattccctttgaaaactggcacaagacagggatggcctctctcaccactcctattcaacatagtgttggaagttctggccagggcaatcaggcaggagaaggaaataaagggtattcaattaggaaaagaggaagtcaaattgtccctgtttgcagacgacatgattgtatatctagaaaaccccattgtctcagcccaaaatctccttaagctgataagcaacttcagcaaagtctcaggatacaaaatcaatgtacaaaaatcacaagcattcttatacaccaacaacagacaaacagagagccaaatcatgagtgaactcccattcacaattgcttcaaagagaataaaatacctaggaatccaacttacaagggatgtgaaggacctcttcaaggagaactacaaaccactgctcaagaaaataaaagaggatacaaacaaatggaagaacattccatgctcatgggtaggaagaatcaatatcgtgaaaatggccatactgcccaaggtaatttacagattccatgccatccccatcaagctaccaatgactttcttcacagaattggaaaaaactactttaaagttcatatggaaccaaaaaagagcctgcatcgccaagtcaatcctgaaccaaaagaacaaagctggaggcatcacactacctgacttcaaactatactacaaggctatagtaaccaaaacagcatggtactggtaccaaaacagagatatagatcaatggatcagaacagagccctcagaaataacgctgcatatctacaagtatctgatctttgacaaacctgagaaaaacaagcaatggggaaaggattccctatttaataaatggtactgggaaaactggctagccatatgtagaaagctgaaactggatcccttccttacaccttatacaaaaatcaattcaagatggattaaagacttaaacattagacctaaaactataaaaaccctagaagaaaacctaggctttaccattcaggacataggcatgggcaagaacttcatgtctaaaacaccaaaagcaatggcaacagaagccaaaattgacaaatgggatctaattaaactaaagagcttctgcacagcaaaagaaactaccatcagagtgaacaggcaacctacaaaatgggagaaaatttttgcaacctactcctctgacaaagggctaatatccagaatctacaatgaactcaaacaaatttacaagaaaaaaacaaacaaccccctcaaaaagtgggcaaaggacatgaacagacacttctcaaaagaagacatttatgcagccaaaaaacacatgaaaaaatgctcaccatcactggccatcagagaaatgcaaatcaaaaccactatgagataccatctcacaccagttagaatgacaatcattaaaagtcaggaaacaacaggtgctggagaggatgtggagaaatag

SEQ ID NO: 148875 - DNA, 2429 bp, Homo sapiens
taccacatcacacttattccaaaaattcaccacatagttggaagtaaagcactcctcagcaaatgtaaaagaacagaaatcacaacaaactgtctctcagaccacattgcaatcaaattagaactcaggattaagaaactcactcaaaaccgctcaactacatggaaactgaacaacctgctcctgaatgactactgggtacataacgaaatgaaggcagaaataaagatgttctttgaaaccaatgagaacaaagacacaacataccagaatctctgggacacatttaaagcagtgtgtagagggaaatttatactactaaatgcccacaagagaaagcaggaaatatctaaaatcaacaccctaatatcacaattaaaggaactagagaagcaagagaagacaaattcaaaagctagcagaaggcaagaaacagctaagatcaaagcagaactgaaggagatagagacacaaaaaacccttcaaaaaatcaatgaatccaggagctggctttttgaacagatcaccaaaattgatagaccactagcaagactaataaagaataaaagagagaagaatcaaatagacacaataaaaaatgataaaggggataccaccaccgatcccacagaaatacaaactaccatcagagaatactataaacacctctacacaaataaactagaaaatctagaagaaatggataaattcctggacacatacaccctcccaagactaaaacaagaagaagttgaatccctgaatagaccaataacaggctctgaaattgaggcaataattaatagcctaccaaccaaaaaaagtccaggaccagatggattcacagccgaattctaccagaggtataaagaggagctgataccattacttcttaaactattccaatcaatagaaaaagagggaatcctccctaactcattttatgaggccaacatcatcctgataccaaagcctggcagagacacaacaaaaaaagagaattttagaccaatatccctgatgaacatcgatgcgaaaatcctcaataaaatactggcaaaccgaatccagcagcacatcaaaaagcttatccaccacgatcaagtcagcttcatctctgggatgcaaggctggttcaacatacacaaatcaataaacctgataagcaacttcagcaaagtctcaagatacaaaaccaatgtgcaaaaatcacaagcattcctatacaccaataacagacaaacagagagccaaatcatgagtgaacttccattcacaattgctacaaacagaataaaatacctaggaatccaacttacaagggatgtgaaggacctctttaaggagaacttcaaaccactgctcaatgaaataaaagaggacacaaacaaatggaagaacattccatgctcatggataggaagaatgaatattgtgaaaatggccatactgcccaaggtaatttatagattcaatgccatccccatcaagctaccaatgactttcttcgcagaactggaaaaaactactttaaagttcatatggaaccaaaaaagagcccacattgccaagacaatactaagccaaaagaacaaagctggaggcatcacactacctgacttcaaactatactacaaggctacagtaaccaaaacagcatggtactggtaccaaaacagagatatagaccaatggaacagaacagagccctcagaaataacaccacatatctacaaccatctgatctttgacaaacctgacaaaaacaagaaatggggaaaggattccctattcaataaatggtgctgggaaaactggctagccatatgtagaaagctgaaactggattccttccttataccttatacaaaaattaattcaagattgattaaagactcaaatgttagatctaaaaccataaaaaccctagaagaaaacctaggcaataccatacaggacataggcatgggcaaggacttcatgactaaaacactaaaagcaatagcaacaaaagccaaaatggacaaatgggacctaattaaactaaagagcttctgcacagcaaaggaaactaccatcagagtgaacagacaacctacagaatgggagaaaatttttgcaatctacccatctgacaaagggctaatatctggaatctacaaagaacttaaacaaatttgcaagaaaaaatcaaacaaccccatcaaaaactgggcaaaggatatgaacagacacttctcaaaagaagatatttatgcagccaacagacatgtgaaaaaatgctcatcatcactggtcatcagagaaatgcaaatcaaaaccacaatgagataccatctcacaccagttagaatggtaatcattaatacatcaggaaacaacagctgctggagaggatgtggagaaataggaacacttttacactgttg

SEQ ID NO: 148876 - DNA, 2748 bp, Homo sapiens; identical to SEQ ID NO: 116383

SEQ ID NO: 148877 - DNA, 3213 bp, Homo sapiens; identical to SEQ ID NO: 116408

SEQ ID NO: 148878 - DNA, 3656 bp, Homo sapiens
catctgacggaaaaatccgtttattctacactgactattccggtaaacattacggcaaacaaagcctgacaacagcgcaggtaaatgtgtcaaaatctgatgacacactcaaaatcaacggagtggaagatcacaaaacgatttttgacggagacggaaaaacatatcagaacgttcagcagtttatcgatgaaggcaattatacatccggcgacaaccatacgctgagagaccctcactacgttgaagacaaaggccataaataccttgtattcgaagccaacacgggaacaaaaaacggataccaaggcgaagaatctttatttaacaaagcgtactacggcggcggcacgaacttcttccgtaaagaaagccagaagcttcagcagagcgctaaaaaacgcgatgctgagttagcgaacggcgccctcggtatcatagagttaaataatgattacacattgaaaaaagtaatgaagccgctggtcacttcaaacacggtaactgtgaggttcttcccagagtcattgctgaatcctgatccttccctcttcccctgccccaccttgcatgctctgatctacaacccacccagcagcagccaaggctatacagaacaagccttactacgttctccaattggagaaattaccttcagcttgcctagtggggtaacagaagcccacagtcccttctgcctgggaagacacatctccccttgcttccctgtggaaagcaagggagaaaccaactcaagtgtcagccatgcagggagacctggagtacctggcttaggccattggctgtgggctgatgggaaagtaagaaggccctcaaggttttctcaggaagagaaactcagtgcctcagcagccacctgctcctcgttaatgagaaagagagcaacaggaaacctgcaaagagcccagaatgcacactctgatcaaatgttgctcaaactagtagcagcgtttggaaggcgcttcatgacctgcagagttgctcccagtatgaggcactgccaagtgggagcaaacaatacttgtgtccatgctcaaggcattgacccagaggaccatctaggtaaacatcggcagaacacagaggaacaggctctgaagctcaagaaggggtggaaggtggagatgcagatttgtgggttatctgggtattggacagaggtacctgctaagggactaaaccaggaagaagtggaatctctgaatagaccaataacaggtcctgaaattgtggcaataatcaatagcctaccaaccaaaaagagtccaggaccagatggattcacagccgaattctaccagaggtacaaggaggaactggtaccattccttctgaaactattccaatcaatagaaaaagagggaatcctccctaactcattttatgaggccagcatcatcctgataccaaagccgggcagagacacaaccaaaaaagagaattttagaccaatatccttgatgaacattgatgcaaaaatcctcaataaaatactggcaatacgaatccagcagcacatcaaaaagcttatccaccatgatcaagtgagcttcatctctgggatgcaaggctggttcaatatatgcaaatcaataaatgtaatccagcatataaacagagccaaagacaaaaatcacatgattatctcaatagatgcagaaaaggcctttgacaaaattcaacaacccttcatgctaaaaactctcaagaaactaggtagtgatgggacgtatttaaaaataataagagctatttattacaaacccacagccaatatcatactgaatgggcaaaaactggaagcattccctttgaaaactgccacaagacagggatgccctctctcaccactcctattcaatatagtgttggaagttctggccagggcaatcaggcaggaaaaagaaataaagggtattcaattaggaaaagaggaagtcaaattgtccctgtttgcagatgacatgattgtatatctagaaaaccccattgtctcagcccaaaatctccttaagctgataagcaacttcagcaaagtctcaggatacaaaatcaatgtacagaaatcacaagcattcttatacaccaataacagacaaacagagagccaaatcatgagtgaactcccattcacaattgcttcaaagagaataaaatacctaggaatccaacttgcaagggatgcgaaggacctcttcaaggaaaactacaaaccactgctcaaggatataaaagagaatacaaacaaatggaagaacattccatgctcatgggtaggaagaatcaatatcgtgaaaatggccatactgcccaagctgataagcaacttcagcaaagtctcaggatacaaaatcaatgtgcaaaaatcacaaggattcctatacaccaataatagacaagcagagagccaaatcatgagtgaactcccattcacaatcactacaaagagaataaaatacctaggaatacagctaacaagggatgtgaaggacctcttcaaggagagctacaaaccactgctcaaggaaataagacaggatacaaacaaatggaagaacattccatgctcatggataggaagaatcaatatcatgaaaatggccatactgcccaaggtaatttatagattcaatgctattcccatcaagctaccattgactttcttcacagaattggaaaaaactactttaaatttcatatggaaccaaaaaagagcccacatagccaagacgaaagaacaaagccaaaagaacaaagctggaggcatcatgctacctgacttcaaactatactacaaggctacagtaaccaaaacagcatggtactggtaccaaaacagagatatagacgaatggaacagaacagagccctcagaaataacaccacacatctacaaccatctgatctttgacaaacctgacaaaaacaagaaatggggaaaggattccctatttaataaatggtgctgggaaaactggctagccatatgtagaaagctgaaactggatcccttccttacaccttatacaaaaatcaattcaagatggattaaagacttaaatgtaagacccaaaaccataaaaaccctagaagaaaacttaggcaataccattcaggaaataggcatgggcaaagacttcctgacaaaaacaccaaaagcaatggcaacagaagccaaaattgacaaatgggatctaattaaactaaagagcttctgcacagcaaaagaaactactatcagagtgaacaggcaacctacagaatgggagaaaattttcacaacctactcatctgacaaagggctaatatccagaatctacaagaaacttaaacaaatttacaagaaaaaaacaaacagccccatcaaaaagtgggcaaaggatatgaacagacacttctcagaagaagatatttatgcagccaacagacacatgaaaaaatgctcatcatcactggccatcagagaaatgcaaatcaaaagcacaatgagataccacctcacaccagttagaatggcaatcattaaaaagccaggaaacaacaggtgctggagaggatgtggagaaataggaacacttttacactgttggtgggactgtaaactagttcaaccattgtgcttagtgattctttag

SEQ ID NO: 148879 - DNA, 3618 bp, Homo sapiens
atgggagactttaacaccccactgtcaacattagacagatcaacgagacagaaagtcaacaaggatacccaggaattgaactcagctctgcaccaagcagacctaacagacatctacagaactctccaccccaaatcaacagaatatacatttttttcagcaccacaccacacctattccaaaattgaccacatagttggaagtaaagctctcctcagcaaatgtaaaagaacagaaattataacaaactatctctcagaccacagtgcaatcaaactagaactcaggattaagaatctcactcaaagccgctcaactacatggaaactgaacaacctgctcctgaatgactactgggtacataacgaaatgaaggcagaaataaagatgttctttgaaaccaacgaaaacaaagacacaacataccagaatctctgggacacattcaaagcagtgtgtagagggaaatttatagcactaaatgcccacaagagaaagcaggaaagatccaaaattgacaccctaacatcacaattaaaagaactagaaaagcaagagcaaacacattcaaaagctagcagaaggcaagaaacaactaaactcagagcagaactgaaggaaatagagacacaaaaaacccttcaaaaaatcaatgaatccaggagctggttttttgaaaggatcaacaaaattgatagaccgctagcaagactaataaagaaaaaaagagagaagaatcaaatagacacaataaaaaatgataaaggggatatcaccaccgatcccacagaaatacaaactaccatcagagaatactacaaacacctctacgcaaataaactagaaaatctagaagaaatggatacattcctcgacacatacactctcccaagactaaaccaggaagaagttgaatctctgaatagaccaataacaggctctgaaattgtggcaataatcaatagtttaccaaccaaaaagagtccaggaccagatggattcacagccgaattctaccagaggtacaaggaggaactggtaccattccttctgaaactattccaatcaatagaaaaagagggaatcctccctaactcattttatgaggccagcatcattctgataccaaagccgggcagagacacaaccaaaaaagagaattttagaccaatatccttgatgaacattgatgcaaaaatcctcaataaaatactggcaaaccgaatccagcagcacatcaaaaagcttatccaccatgatcaagtgggcttcatccctgggatgcaaggctggttcaatatacgcaaatcaataaatgtaatccagcatataaacagagccaaagacaaaaaccacatgattatctcaatagatgcagaaaaagcctttgacaaaattcaacaacccttcatgctaaaaactctcaataaattaggtattgatgggacgtatttcaaaataataagagctatctatgacaaacccacagccaatatcatactgaatgggcaaaaactggaagcattccctttgaaaactggcacaagacagggatgccctctcttaccactcctattcaacatagtgttggaagttctggccagggcaatcaggcaggagaaggaaataaagggtattcaattaggaaaagaggaagtcaaattgtccctgtttgcagacgacatgattgtttatctagaaaaccccatcgtctcagcccaaaatctccttaagctgataagcaacttcagcaaagtctcaggatacaaaatcaatgtacaaaaatcacaagcattcttatacaccaacaacagacaaacagagagccaaatcatgggtgaactcccattcacaattgcttcaaagagaataaaatacctaggaatccaacttacaagggatgtgaaggacctcttcaaggagaactacaaaccactgctcaaggaaataaaagaggacacaaacaaatggaagaacattccatgctcatgggtaggaagaatcaatatcgtgaaaatggccatactgcccaaggtaatttacagattcaatgccatccccatcaagctaccaatgactttcttcacagaattggaaaaaactactttaaagttcatatggaaccaaaaaagagcccgcattgccaagtcaatcctaagccaaaagaacaaagctggaggcatcacactacctgacttcaaactatactacaaggctacagtaaccaaaacagcatggtactggtaccaaaacagagatatagatcaatggaacagaacagagccctcagaaataatgccgcatatctacaactatctgatcttcgacaaacctgagaaaaacaagcaatggggaaaggattccctatttaataaatggtgctgggaaaactggctagccatatgtagaaagctcaaactggatcccttccttacaccttatacaaaaatcaattcaagatggattaaagatttaaacgttaaacctaaaaccataaaaaccctagaagaaaacctaggcattaccattcaggacataggcgtgggcaaggacttcatgtccaaaacaccaaaagcaatggcaacaaaagacaaaattgacaaatgggatctaattaaactaaagagcttctgcacagcaaaagaaactaccatcagagtgaacaggcaacctacaacatgggagaaaattttcgcaacctactcatctgacaaagggctaatatccagaatctacaatgaactcaaacaaatttacaagaaaaaaacaaacaaccccatcaaaaagtgggcgaaggacatgaacagacacttctcaaaagaagacatttatgcagccaaaaaacacatgaagaaatgctcatcatcactggccatcagagaaatgcaaatcaaaaccactatgagatatcatctcacaccagttagaatggcaatcattaaaaagtcaggaaacaacaggtgctggagaggatgcggagaaataggaacacttttacactgttggtgggactgtaaactagttcatccattgtggaagtcagtgtggcgattcctcagggatctagaactagaaataccatttgacccagccatcccattactgggtatatacccagatgagtataaatcatgctgctataaagacacatgcacactagtaacctccggaggacttggggcttgggctaataactggcagaggagggcaaattcttcctttgcccacgaatggggcaaaggaagaggggtggcttttgaagcagtttgtctgcctgcatggggccttaccctgccctttaagcatcccacctatttgcaaaagccaccaggaaacccagccctggggtgtaacaggaaggaaaagcatatagtaagtcataaggagctggcagagccggagttccaattagtgtttgtcccggcaatgtgtcagcagacagggttgaaagggttgaaagtcatccaagctggagggccattcatgcctcagatctactcggtgcagatgccacagtccttcccacccctggaagccatccatcagagtgaactgagaaatcagccaagaggagcagagtcacttatggctgaaggacttattctgggggttggttag

SEQ ID NO: 148880 - DNA, 4041 bp, Homo sapiens
atggtaaagggatcaattcaacaagaggagctaactattctacatatttatgcacccaatacaggagcacccagattcataaagcaagtcctcagtgacctacaaagagacttagactcccacacattaataatgggagactttaacaccccactgtcaacattagacagatcaacgagacagaaagtcaacaaggatacccaggaattgaactcagctctgcaccaagcagacctaatagacatctacagaactctccaccccaaatcaacagaatatacatttttttcagcaccacaccacacctattccaaaattgaccacatagttggaagtaaagctctcctcagcaaatgtaaaagaacagaaattataacaaactatctctcagaccacagtgcaatcaaactagaacgcaggattaagaatctcactcaaagccgctcaactacatggaaactgaacaacctgctcctgaatgactactgggtacataacgaaatgaaggcagaaataaagatgttctttgaaaccaacgagaacaaagacatcacataccagaatctctgggacgcattcaaagcagtgtgtagagggaaatttatagcactaaatgcctacaagagaaagcaggaaagatccaaaattgacaccctaacatcacaattaaaagaactagaaaagcaagagcaaacacattcaaaagctagcagaaggcaagaaataactaaaatcagagcagaactcaaggaaatagagacacaaaaaacccttcaaaaaatcaatgaatccaggagctggttttttgaaaagatcaacaaaattgatagaccgctagcaagactaataaagaaaaaaagagagaagaatcaaatagacacaataaaaaatgataaaggggatatcaccaccaatcccacagaaatacaaactaccatcagagaatactacaaacacctctacgcaaataaactagaaaatctagaagaaatggatacattcctcgacacatacactctcccaagactaaaccaggaagaagttgaatctctgaatagaccaataacaggctctgaaattgtggcaataatcaatagcttaccaaccgaaaagagtccaggaccagatggattcacagcagaattctaccagaggtacaaggaggaactggtaccattccttctgaaactattccaatcaatagaaaaagagggagtcctccctaactcattttatgaagccagcatcatcctgataccaaagccgggcagagacacaaccaaaaaagagaattttagaccaatatccttgatgaacattgatgcaaaaatcctcaataaaatactggcaaaccgaatccagcagcacatcaaaaagcttttccaccatgagcaagtgggcttcatccctgggatgcaaggctggttcaatatacacaaatcaataaatgtaatccagcatataaacagagccaaagacaaaaaccacatgattatctcaatagatgcagaaaaagcctttgacaaaattcaacaacccttcatgctaaaaactctcaataaattaggtattgatgggacgtatttcaaaataataagagctatctatgacaaacccacagccaatatcatactgaatgggcaaaaactggaagcattccctttgaaaactggcacaagacagggatgccctctctcaccgctcctattcaacatagtgttggaagttctggccagggcaatcaggcaggagaaggaaataaagggtattcaattaggaaaagaggaagtcaaattgtccctgtttgcagacgacatgattgtttatctagaaaaccccatcgtctcagcccaaaatctccttaagctgataagcaacttcagcaaagtctcaggatacaaaatcaatgtacaaaaatcacaagcattcttatacaccaacaacagacaaacagagagccaaatcatgggtgaactcccattcacaattgcttcaaagagaataaaatacctaggaatccaacttacaagggatgtgaaggacctcttcaaggagaactacaaaccaccgctcaaggaaataaaagaggacacaaacaaatggaagaacattccatgctcatgggtaggaagaatcaatatcgtgaaaatggccatactgcccaaggtaatttacagattcaatgccatccccatcaagctaccaatgactttcttcacagaattggaaaaaactactttaaagttcatatggaaccaaaaaagagcccgcattgccaagtcaatcctaagccaaaagaacaaagctggaggcatcacactacctgacttcaaactatactacaaggctacagtaaccaaaacagcatggtactggtaccaaaacagagatatagatcaatggaacagaacagagccctcagaaataatgccgcatatctacaactatctgatctttgacaaacctgagaaaaacaagcaatggggaaaggattccctatttaataaatggtgctgggaaaactggctagccatatgtagaaagctgaaactggatcccttccttacaccttatacaaaaatcaattcaagatggattaaagatttaaatgttagacctaaaaccataaaaaccctagaagaaaacctaggcattaccattcaggacataggcatgggcaaggacttcatgtccaaaacaccaaaagcaatggcaaccaaagccaaaattgacaaatgggatctaattcaactaaagagcttctgcacagcaaaagaaactaccatcagagtgaacaggcaacctacaacatgggagaaaattttcgcaacctactcatctgacaaagggctaatatccagaatctacaatgaactccaacaaatttacaagaaaaaaacaaacaaccccatcaaaaagtgggcaaaggacatgaacagacacttctcaaaagaagacatttatgcagccaaaaaacacatgaagaaatgctcatcatcactggccatcagagaaatgcaaatcaaaaccactatgagatatcatctcacaccagttagaatggcaatcattaaaaagtcaggaaacaacaggtgctggagaggatgtggagaaataggaacacttttacactgttggtgggactgtaaactagttcaaccattgtggaagtcagtgtggcgattcctcagggatctagaactagaaataccatttgacccagccatcccattactgggtatatacccaaagggctataaatcatgctgctataaagacacatgcacacggccagatggtcatgtgactaaatatgatttgaattggctggtgaaaaacagctatgaagggcagaaacaaaaagtcatccagcctagaatactatggaatgctgaaatctaccagcaagcccaagttccatcggtagattgccagagcttcttagaaaccaacgagggactgaagaagtttctgcaaaactttctgctctatggaattgcattcgtagaaaatgtccctcccactcaagagcacacagagaagttggcagaaaggatcagcttaatcagagaaaccatttatgggaggatgtggtatttcacttcagacttctccagaggtgacactgcgtacaccaagctagctctggatcggcacactgacactacctattttcaagagccctgtgggtttgttgaaaatgcaggagccagtgcttcccaaccttccctactccaaacgcctatgcacacgcacccacttgcatgcgtgcacgtacacgtgcatacatatacacccacactatcaagatatgtacctcatcggggagtaacccagctgagtgagccctttactggggagccttcagtaggtaactccacttccagagttaccttggtccagcctttgaagattcctggggctctcagccttcggactgccaaaaccccaagccaacttcctatccaggaaccctccggcctagaagttcagatgtcttgccaatatatctgtgcttcacaacttgcctactctctctga

SEQ ID NO: 148881 - DNA, 3319 bp, Homo sapiens
atgggagactttaacaccccactgtcaacattagacagatcaacgagacagaaagtcaacaaggatacccaggaattgaactcagctctgcaccaagcagacctaatagacatctacagaactctccaacccaaatcaacagaatatacatttttttcagcaccacaccacacctattccaaaattgaccacatagttggaagtaaagctctcctcagcaaatgtaaaagaacagaaattataacaaactatctctcagaccacagtgcaatcaaactagaactcaggattaagaatctcactcaaagccgctcaactacatggaaactgaacaacctgctcctgaatgactactgggtacataacgaaatgaaggcagaaataaagatgttctttgaaaccaacgagaacaaagacacaacataccagaatctctgggacgcattcaaagcagtgtgtagagggaaatttatagcactaaatgcccacaagagaaagcaggaaagatccaaaattgacaccctaacatcacaattaaaagaactagaaaagcaagagcaaacacattcaaaagctagcagaaggcaagaaataactaaaatcagagcagaactgaaggaaatagagacacaaaaaacccttcaaaaaatcaatgaatccaggagctggttttttgaaaggatcaacaaaattgatagaccactagcaagactaataaagaaaaaaagagagaagaatcaaatagacacaataaaaaatgataaaggggatatcaccactgatcccacagaaatacaaactaccatcagagaatactacaaacacctctacgcaaataaactagaaaatctagacgaaatggataaattcctccacacatacactctcccaagactaaaccaggaagaagttgaatctctgaatggaccaataacaggagctgaaattgtggcaataatcgatagtttaccaaccaaaaagagtccaggaccagatggattcacagctgaattctaccagaggtacaaggaggaactggtaccattccttctgaaactattccaatcaatagaaaaagagggaatcctccctaactcattttatgaggccagcatcattctgataccaaagctgggcagagacacaaccaaaaaagagaattttagaccactatccttgatgaacattgatgcaaaaatcctcaataaaatactggcaaaacgaatccagcagcacatcaaaaagcttatccaccatgatcaagtgggcttcatccctgggatgcaaggctggttcaatatacgcaaatcaataaatgtaatccagcatataaacagaggcaaagacaaaaaccacatgattatctcaatagatgcagaaaaagcctttgacaaaattcaacaacccttcatgctaaaaactctcaataaattaggtattgatgggacgtatttcaaaataataagagctatctatgacaaacccacagccaatatcatactgaatgggcaaaaactggaagcattccctttgaaaactggcacaagacagggatgccctctctcaccactcctattcaacatagtgttggaagttctggccagggcaattaggcaggagaaggaaataaaggcccaaaatctccttaagctcataagcaacttcagaaaagtctcagtatacaaaatcaatgtgcaaaaatcacaagcattcttatacaccaataacagacaaacagagagccaaatcatgagagaactcccattcacaattgcatcaaagagaataaaatacctaggaatccaacttacaagggatgtgaaggacctcttcaaggagaactacaaaccactgctcaacgaaataaaagaggacacaaacaaatggaagaacattccatgctcatggataggaagaatcaatattgtgaaaatggccatactgcccaaggtaatttatagattcaatgccatccccatcaagctaccaacgactttcttcacagaattggaaaaaactattttaaagttcatatggaaccaaaaaagagcccacattgccaagacaatcctaagccaaaagaacaaagctggaggcatcatgctacctgacttcaaactatactacaaggctacagtaaccaaaacagcctggtattggtaccaaaagagagatatagaccaatggaacagaatagagctctcagaaataataccacacatctacaaccatctgatctttgacaaacctgacaaaaacaagaaatggggaaaggattccgtatttaataaacggtgctgggaaaactggcttgccatatgtagaaagctgaaactggataccttccttacaccttatacaaaaattaattcaagatggattaaagacttacatgttagacctaaagccataaaaaccctagaagaaaacctaggcattaccattcaggacataggcatgggcaaggacttcacgtctaaaacaccaaaagcaatggcaacaaaagccaaaattgacaaatgggatctaattaaactaaagagcttctgcacagcaaaagaaactaccatcagagtgaacaggcaacctacaaaatgggagaaaatttttgcaatctactcatctgacaaagggctaatatccagaatctacaaagaactcaaacaaatttacaagaaaaaaacaaacaaccccatcaaaaagtgggcaaaggatatgaacagacacttctcaaaagaagacatttatgcagccaacagacacatgaaaaaatgctcatcatcactggccatcagagaaatgcaaatcaaaaccacaatgagataccatctcacaccagttagaaaggcgatcattaaaaagtcaggaaacaacaggtgctggagaggatgtggagaaataggaacacttttacactgttggtgggactgtaaactagttcaaccatttgtggaagacagtgtggcaattcctcagggatctagaactagaaataccattttacccagccatcccattactgggtatatacccaaaggactataaatcatgctgctataaagacacatgcacacgtatgtttattgcggcattattcacaatagcaaagacttggaaccaacccaaatgtccaacaatgatagactggattaagaaaatgtggcacatatacaccatggaatactatgcagccataaaaaatgatgagttcatgtcctttgtagggacatggatgaaattggaaatcatcattctcagtaaactatcacaagaacaaaaaaccaaacacggcatattctcactcataggtgggaattga

SEQ ID NO: 148882 - DNA, 2955 bp, Homo sapiens
atgggagactttaacatcccactgtcaacattagacagatcaacgagacacaaagttaacaaggagacccagaaattgaactcaactctgcaccaagtggacctaatagacatctacagaactctccaccccaaatcaacagaatatacatttttttcagcaccacaccacacctattccaaaattgaccacatagttggaagtaaagctctcctcagcaaatgtaaaagtacagaaagtataacaaactgtctgtcagaccacagtgcaatcaaactagaactcaggattaagaaactcactaaaaaccgctcaactacatggaaactgaacaacctgctcctgaatgactactgggtacataacgaaatgaaggcagaaataaagatgttctttgaaaccaacgagaacaaagacacaacataccagaatctctgggacacattcaaagcagtgtacagtgggaaatttatagcactaaatgcccacaagagaaagcaggaaagatccaaaattgacaccctaacatcacaattaaaagaactagaaaagcaagagcaaacacattcaaaagctagcagaaggcaagaaataactaaaatcagagcagaactgaaggaaatagagacacaaaaaacccttcaaaaaattaatgaatccaggagccggttttttgaaaggatcaacaaaattgatagaccgctagcaagactaataaagaagaaaagagagaagaatcaaatagatgcaatacaaaatgataaagggggtatcaccaccaatcccacagaaatacaaactaccatcagagaatactacaaacacctctatgcaaataaactagaaaatctagaagaaatggataaattcctggacacatacaccctcccaagactaaaccaggaagaagttgaatctctgaatagaccaataacaggctctgaaattgtggcaataatcaatagcttaccaaccaaaaagagtccaggaccagatggattcacagtcgcattctaccggagaaaaagggggaatcctccctaactcattttatgaggccagcatcatcctgataccaaagcctggtacagacacaacaaaaaaagagaattttagaccaatatccttgatgaacattgatgtaaaaatccttaataaaatactggcaaaccgaatccagcagcacatcaaaaagcttattcaccatgatcaagtgggcttcatccctgggatgcaaggctggttcaacatacgaaaatcaataaacatcatccagcatataaacagagccaaagacaaaaaccacatgattatctcaatagatgcagaaaaggcctttgacaaaattcaacaatgcttcatgctaaaaactctcaataaattaggtattgatgggacatatctcaaaataataagagctatctatgacaaacccacagccaatatcatactgaatggacaaaaactggaagtgttccctttgaaaactggcacaagacagggatgccctctctcaccactcctattcaacatagtgttggaagttctggccagggcaatcaggcaggagaaggaaataaagggcattcaattaggaaatgaggaagtcaaattgtccctgtttgcagatgacatgattgtatatctagaaaaccccatcatctcagccccaaatctccttaagctgataaacaacttcagcaaaggctcagcatataaaatcaaagtgcaaaaatcacaagcattcttatacactaataacagacaaacagaaagccaaatcatgagtgaactcccattcacaattgcttcaaagagaataaaatacctaggaatccaacttacaagggatgtgaaggacctcttcaaggagaactacaaaccactgctcaaggaaataaaagaggatacaaacaaatggaagaacattccatgctcatgggtaggaagaatcaatatcatgaaaatggccatactgcccaaggtaatttatagattcaatgccatcctcatcaagctaccaatgacttttttcacagaattggaaaaatctactttaaagttcatatggaaccaaaaaagagcccgcattgccaagtcaatcctaagtcaaaagaacaaagctggaggcatcacgctacctgacttcaaactatactacaaggctacagtaaccaaaacagcatggtactggtaccaaaacagagatatagaccaatggaatggaacagagccctcagaaataatgccacatatctacaactatctgatctttgacaaacctgagaaaaacaagcaatggggaaaggattccctatttaataaatggtgctgggaaaactggctagccatatgtagaaagctgaaactggatcccttccttacaccttacacaaaaattaattcaagatggattaaagacttacatgttagacctaaaaccataaaaaccctagaagaaaacctaggcattaccattcaggacataggcatgggcaaggacttcatgtctaaaacaccaaaagcaatggcaacaaaagccaaaattgacagatgggatctaattaagctaaagagcttctgcacagcaaaagaaactaccatcagagtgaacaggcaacctacaaaatgggagaaaattttcacaacctactcatctgacaaagggctaatatccagaatctacaaagaactcaaacaaatttacaagaaaaaaacaaacaaccccatcaaaaagtgggcaaaggatatcaacagacacttctcaaaagaagacatttatgcagccaaaaaacacatgaaaaaatgctcatcatcactggccatcagagaaatgcaaatcaaaaccacaatgagataccatcccacaccagttaggatggcaatcattaaaaagtcaggaaacaacagatgctggagaggatgtggagaaatagcaacacttttacactgttg

SEQ ID NO: 148883 - DNA, 2872 bp, Homo sapiens
atgaaggcagaaataaagatgttctttgacaccagtgagaacaaagacacaacatactggaatctctgggacgcattcaaagcagtgtgtagagggaaatttatagcactaaatgcccacaagagaaagcaggaaagatccaaaattgacaccctaacatcacaattaaaagaactagaaaagcaagagcaaacacattcaaaagctagcagaaggcaagaaataactaaaatcagagcagaactgaaggaaatagagacacaaaaaacccttcaaaaaattaatgaatccaggagctggttttttgaaaggatcaacaaaattgatagaccactagcaagactaataaagaaaaaaagagagaagaatcaaatagacgcaataaaaaatgataaaggggatatcaccaccgatcccacagaaatacaaactaccatcagagaatactacaaacacctctatgcaaataaactagaaaatctagaagaaatggataaattcctcgacacctacactctcccaagactaaaccaggaagaagttgaatctctgaatagaccaattacaggatctgaaattgtggcaataatcaatagcttaccaaccaaaaagagtccaggaccagatggattcacagccgaattctaccagagctgggcagagacacaaccaaaaaaagagaattttagaccaatatccttgatgaacattgatgcaaaaatcctcaataaaatactggcaaaacgaatccagcagcacatcaaaaagcttatccaccatgatcaagtgggcttcatccctgggatgcaaggctggttcaatatacgcaaatcaataaatgtaacacagcatataaacagagccaaagacaaaaaccacatgattatctcaatagatgcagaaaaagcctttgacaaaattcaacaacccttcatgctaaaaactctcaataaattaggtattgatgggacgtatttcaaaataataagagctatctatgacaaccccacagccaatatcatactgaatgggcaaaaactggaagcattccctttgaaaactggcacaagacagggatgccctctctcaccactcctattcaacatagtgttggaagttctggccagggcaattaggcaggagaaggaaataaagggtattcaattaggaaaagaggaagtcaaattgtccctgtttgcagacaacatgattgtatatctagaaaaccccattgtctcagcccaaaatctccttaagctgataagcaacttcagcaaagtctcaggatacaaaatcaatgtacaaaaatcacaagcattcttatacaccaacaacagacaaacagagagccaaatcatgagtcaactcccattcacaattgcttcaaagagaataaaatacctaggaatccaacttacaagggatgtgaaggacctcttcaaggagaactacaaaccactgctcaaggaaataaaagaggatacaaacaaatggaaaaacattccatgctcagggggaaggaagaatcaatatcgtgaaaatggccatactgcccaagaattggaaaaaaactactttaaagttcatatggaaccaaaaaagagcccgcatcgccaagtcaatcctaagccaaaagaacaaagctggaggcatcacgctacctgacttcaaactatactacaaggctacagcaaccaaaacagcatggtactggtaccaaaacagagatctagatcaatggaacagaacagagccctcagaaataacaccacatatctacaactatctgatctttgacaaacctgacaaaaataagcaatggggaaaggattccctatttaataaatggtgctgtgaaaactggctagccatatgtagaaagctgaaactggatcccttccttacaccttatacaaaaattaattcaagatggattaaagacttaaacattagacctaaaaccataaaaaccctagaagaaaacctaggcattaccattcaggacataggcatgggcaaggacttcatgtctaaaacaccaaaagcaatggcaacaaaagccaaaattgacaaatgggatctaattaaacaagagagcttctgcacagcaaaagaaactaccatcagagtgaacaggcaacctacaaaatgggagaaaattttcgcaacctactcatctgacaaagggctaatatccagaatctacagtgaactcaaacaaatttacaagaaaaaaacaaacaaccccatcaaaaagtgggcgaaggacatgaacagacacttctcaaaagaagacatttatgcagccaaaaaacacatgaaaaaatgcccatcatcactggccatcagagaaatgcaaatcaaaaccacaatgagataccatctcacaccagttagaatggccatcattaaaaagtcaggaaacaacaggtgctggagaggatgtggagaaataggaacacttttacactgttggtgggactgtaaactagttcaaccattgtggaagtcagtgtggcgattcctcagggatctagaactagaaataccatttgacccagccatcccattactgggcatacacccaaaggactataaatcatgctgctataacgacacatgcacacgtatgtttattgcggcattattcacaatagcaaagacttggaaccaacccaaatgtccaacaattatagactggattaagaaaatgtggcacatatacaccatggaatactatgcagccataaaaaatgatgagttcgtgtcctttgtagggacatggatgaaattggaaatcatcattctcagtaaactatcacaagaacaaaaaaccacacaccgcatattctcactcataggtgggaattga

SEQ ID NO: 148884 - DNA, 2985 bp, Homo sapiens; identical to SEQ ID NO: 121567

SEQ ID NO: 148885 - DNA, 4579 bp, Homo sapiens
agacacacataggctcaaaataaaaggatggaggaagatctaccaagcaaatggaaaacaaaaaaaggcaggggttgcaatcctagtctctgataaaacagactttaaaccaacaaagatcaaaagagacaaagaaggccattacatgatggtaaagggatcaattcaacaagaggagctaactatcctaaatatgtatgcacccaatacaggagcacccagattcataaagcaagtcctgagtgacctacaaagagacttagactcccacacattaataatgggagactttaacaccccactgtcaacattagacagatcaacgagacagaaagtcaacaaggatacccaggaattgaactcagctctgcaccaagcagacctaatagacatctacagaactctccaccccaaatcaacagaatatacatttttttcagcaccacaccacagctattccaaaattgaccacatacttggaagtgaagctctcctcagcaaatgtaaaagaacagaaattataacaaactatctctcagaccacagtgcaatcaaactagaactcaggattaagaatctcactcaaagccgctcaactacatggaaactgaacaacctgctcctgaatgactactgggtacataacgaaatgaaggcagaaataaagatgttctttgaaaccaacgagaacaaagacacaacataccagaatctctgggacgcattcaaagcagtgtgtagagggaaatttatagcactaaatgcccacaagagaaagcaggaaagatccaaaattgacaccctaacatcacaattaaaagaactagaaaagcaagagcaaacacattcaaaagctagcagaaggcaagaaataactaaaatcagagcagaactgaaggaaatagagacacaaaaaacccttcaaaaaatcaatgaatccaggagctggttttttgaaaggatcaacaaaattgatagaccgctagcaagactaataaagaaaaaaagagagaagaatcaaatagacacaataaaaaatgataaaggggatatcaccaccgatcccacagaaatacaaactaccatcagagaatactacaaacacctctacgcaaataaactagaaaatctagaagaaatggatacattccttgacacatacactctcccaagactaaaccaggaagaagttgaatctctgaatagaccaataacaggagctgaaattgtggcaataatcaatagtttatcaaccaaaaagagtccaggaccagatggattcacagccgaattctaccagaggtacaaggaggaactggtaccattctttctgaaactattccaatcaatagaaaaagagggaatcctccctaactcattttatgaggccagcatcattctgataccaaagccgggcagagacacaaccaaaaaagagaattttagaccaatatccttgatgaacattgatgcaaaaatcctcaataaaatactggcaaaccgaatccagcagcacatcaaaaagcttatccaccatgatcaagtgggcttcatccctgggatgcaaggctggttcaatatacgcaaatcaataaatgtaatccagcatataaacagagccaaagacaaaaaccacatgattgtctcaatagatgcagaaaaagcctttgacaaaattcagcaacccttcatgctaaaaactctcaataaattagtgttggaagttctggccagggcaattaggcaggagaaggaaataaagggtattcaattaggaaaagaggaagtcaaattgtccctgtttgcagacgacatgattgtatatctggaaaaccccattgtctcagcccaaaatctccttaagctgataagcaacttcagcaaagtctcaggatacaaaatcaatgtacaaaagtcacaagcattcttatacaccaacaacagacaaacagagagccaaatcatgagtgaactcccattcacaactgcttcaaagagaataaaatacctaggaatccaacttacaagggatgtgaaggacctcttcaaggagaactacaaacaactgctcaaggaaataaaagaggatacaagcaaatggaagaacattccatgctcatgggtaggaagaatcaatatcgtgaaaatggccatactgcccaaggtaatttacagattcaatgccatccccattaagctaccaatgcctttcttcacagaattggaaaaaactactttaaagttcatatggaaccaaaaaagagcctgcattgccaagtcaatcctaagccaaaagaacaaagctggaggcatcacactacctgacttcaaactatactacaaggctacagtaaccaaaacagcatggtattggtaccaaaacagagatatagatcaatggaacagaacagagccctcagaaataacgccgcatatctacaactatctgatctttgacaaacctgagaaaaacaagcaatggggaaaggattccctatttaataaatggtgctgggaaaactggctagccatatgtagaaagctgaaactggatcccttccttacaccttatacaaaaatcaattcaagatggattaaagatttaaacgttagacctaaaaccataaaaaccctagaagaaaacctaggcattatcattcaggacataggcatgggcaaggacttcatgtctaaaacaccaaaagcaatggcaacaaaagccaaaattgacaaatgggatctaattaaactaaagagcttctgcacagcaaaagaaactaccatcagagtgaacaggcaacctagaaaatgggagaaaatttttgcaacctactcatctgacaaagggctaatatccagaatctacaatgaactcaaacaaatttacaagaaaaaaacaaacaaccccatcaaaaagtgggcgaaggacatgaacagacacttctcaaaagaagacatttatgcagcaaaaaaacacatgaaaaaatgctcaccatcactggccatcagagaaatgcaaatcaaaaccacaatgagataccatctcacaccagttagaatggcaatcattaaaaagtcaggaaacaacaggtgctggagaggatgtggagaaataggaacacttttacactgttggtgggactgtaaactagttcaaccattgtggaattcagtgtggcgattcctcagggatctagaactagaaataccatttgacccagccatcccattactgggtatatacccaaatgactataaatcatgctgctataaagacacatgcacacggatgacaataacatcggttgaagaaaaatctcaatcagagaagttatcttacatcttcctcaaggaaaagatctgtttgatgtatgttggcttactcaatattttggtctctctcagtgggaaagttcctttctggctgtatctgggcagccgtcttgccactcccccaacaagttctcagttatttttcattggtggcaaagagaggagtccagatgaacaaggtgtggatattcttatagtgctcatatttcgatacccatctactgatagtgctgaacaaatcaagaaaaaaattgaaaaggctttatatcaaagtttgaagaccaaacaattgtctttgaccataaacaaaccatcatttagactcacacgctgtggaataaggatgacatcttcaaacatgccattaccagcatcctcttctactcaaagaattgtccaaggaagggaaacagctatggaaggggaatggccatggcaggccagcctccagctcatagggtcaggccatcagtgtggagccagcctcatcagtaacacatggctgctcacagcagctcactgcttttggaaaaataaagacccaactcaatggattgctacttttggtgcaactataacaccacccgcagtgaaacgaaatgtgaggaaaattattcttcatgagaattaccatagagaaacaaatgaaaatgacattgctttggttcagctctctactggagttgagttttcaaatatagtccagagagtttgcctcccagactcatctataaagttgccacctaaaacaagtgtgttcgtcacaggatttggatccattgtagatgatggacctatacaaaatacacttcggcaagccagagtggaaaccataagcactgatgtgtgtaacagaaaggatgtgtatgatggcctgataactccaggaatgttatgtgctggattcatggaaggaaaaatagatgcatgtaagtgctggcttgtaggggctgtggctgttgtgactctttacggcaccctccttggtgtctgtgagtggcccggtcccctagccatgggcccaggcaaaaaatctgtgtctgcgtacattttcttatccatcactcggcctgggtctgcaggcagctcctccttaagaacagacacaaatgaattgccaggccagatatcatcagcacaagtatcattgcctgaagaaaagcaaatcaagggccatagaatgttttatgaaaacctctggtgtgttaaaagcttgcctctgaaagagatgaatatcagggcctga

SEQ ID NO: 148886 - DNA, 4134 bp, Homo sapiens
atggaggaagatctaccaagcaaatggaaaacaaaaaaaggcaggggttgcaatcctagtctcgataaaacagactttaaaccaacaaagatcaaaagagacaaagaaggccattacataatggtaaagggatcaattcaacaagaggagctaactatcctaaatatttatgcacccaatacaggagcacccagattcataaagcaagtcctgagtgacctacaaagagacttagactcccacacattaataatgggagactttaacaccccactgtcaacattagacagattaatgagacagaaagtcaacaaggatacccaggaattgaactcagctctgcaccaagtggacctaatagacatctacagaactctccaccccaaatcaacagaatatacatttttttcagcaccacaccacacctattccaaaattgaccacatacttggaagtaaagctctcctcagcaaatgtaaaagaacagaaattataacaaactatctctcagaccacagtgcaatcaaactagaactcaggattaagaatctcactcaaagccgctcaactacatggaaactgaacaacctgctcctgaatgactactgggtacataacgaaatgaaggcagaaataaagatgttctttgaaaccaacgagaacaaagacaccacataccagaatctctgggacgcattcaaagcagtgtgtagagggaaatttatagcactaaatgcctacaagagaaagcaggaaagatccaaaattgacaccctaacatcacaattaaaagaactagaaaagcaagagcaaacacgttcaaaagctagcagaaggcaagaaataactaaaatcagagcagaactgaaggaaatagagacacaaaagacccttcaaaaaatcaatgaatccaggagctggttttttgaaaggatcaacaaaattgatagaccgttagcaagactaataaagaaaaaaagagagaagaatcaaatagacacaataaaaaatgataaaggggatatcaccactgatcccacagaaatacaaactaccatcagagaatactacaaacacctctacgcaaataaactagaaaatctagaagaaatggatacattcctcgacacatacactctcccaagactaaaccaggaagaagttgaatctctgaatagaccaataacaggatctgaaattgtggcaataatcaatagtttaccaaccaaaaagagtccaggaccagatggattcacagccgaattctaccagaggtacaaggaggaactgcatataaacagagccaaagacaaaaaccacatgattatctcaatagatgcagaaaaagcctttgacaaaattcaacaacccttcatgctaaaaactctcaataaattaggtattgatgggacgtatttcaaaataataagagctatttatgacaaacccacagccaatatcatactgaatgggcaaaaactggaagcattccctttgaaaactggcacaagacagggatgccctctctcaccgctcctattcaacatagtgttggaagttctggccagggcaatcaggcaggagaaggaaataaagggtattcaattaggaaaagaggaagtcaaattgtccctgtttgcagacgacatgattgtttatctagaaaaccccatcgtctcagcccaaaatctccttaagctgataagcaacttcagcaaagtctcaggatacaaaatcaatgtacaaaaatcacaagcattcttatacaacaacaacagacaaacagagagccaaatcatgagtgaactcccattcacaattgcttcaaagagaataaaatacctaggaatccaacttacaagggatgtgaaggacctcttcaaggagaactacaaaccactgctcaaggaaataaaagaggacacaaacaaatggaagaacattccgtgctcatgggtaggaagaatcaatatcgtgaaaatggccatactgcccaaggtaatttacagattcaatgccatccccatcaagctaccaatgactttcttcacagaattggaaaaaactactttaaagttcatatggaaccaaaaaagagcccgcatcgccaagtcaatcctaagccaaaagaacaaagctggaggcatcacactacctgacttcaaactatactacaaggctacagtaaccaaaacagcatggtactggtaccaaaacagagatatagatcaatggaacagaacagagccctcagaaataatgccgcatatctacaactatctgatctttgacaaacctgagaaaaacaagcaatggggaaaggattccctatttaataaatggtgctgggaaaactggctagccatatgtagaaagctgaaactggatcccttccttacgccttatacaaaaatcaattcaagatggattaaagatttaaacattagacctaaaaccataaaaaccctagaagaaaacctaggcattaccattcaggacataggcgtgggcaaggacttcatgtccaaaacaccaaaagcaatggcaacaaaagccaaaattgacaaatgggatctaattaaactaaagagcttctgcacagcaaaagaaactaccatcagagtgaacaggcaacctacaacatgggagaaaattttcgcaacctactcatctgacaaagggctaatatccagaatctacaatgaactcaaacaaatttacaagaaaaaaacaaacaaccccatcaaaaagtgggcaaaggacatgagcagacacttctcaaaagaagacatttatgcagccaaaaaacacatgaaaaaatgctcatcatcactggccatcagagaaatgcaaatcaaaaccactatgagatatcatctcacaccagttagaacggcaatcattaaaaagtcaggaaacaacaggtgctggagaggatgtggagaaataggaacacttttacactgttggtgggaccgtaaactagttcaaccattgtggaagtcagtgtggcgattcctcagggatctagaactagaaataccatttgacccagccatcccattactgggtatatacccaaatgactataaatcatgctgctataaagacacatgcacacgaaaaatacgaacaaatgggagaaattgtgccagcaaaaaaggaaacatcaacaaagaagctagaagcctatttaaccactggcccctgcaaaggccaaggcgagtgtatagcctgcacgttctctgtggagacaccgcgttcaggcacggtttgagacctgcccaccatcatccatcattggactgcctgtcctcaacccaccatggagaacaagcttttctaagggaaggacatctgcaggataaaatgggaaaagaggaagagcatcactcttgtctggtgagtccagcgtggttcatcattgcatctggacttcagccagcagcaagtgggaacagatgtccaacagagggacgaagagtcaaaattctctgcattataagaggaattcaggagaagcaccttccaggagggaaggctctagcaacaccagaggaagctgcagctgggaaggaggcagccagggaacagttcttgtctgggcaacaaagtgagatcctgtctcaaaaaaaggaagaggaggagaagaagaagaagaagaagaagaagaagaagaagaaggaggaggaggaggaggaggaggaggaggaggaggaggaggaagagagaagaggaggaggaaaagaaagagtaaggaaagaaggaaggaaggaaagaatgaatgaaggcaggcaggcaggcagggagggaggggagaggaagagagaagaaagaaggagaagaaaagaagaagaagaaggaagaggaggaggaggaaggggagaggaggaggaaaaagaagaagacatgcttagagaactaaggaaggagctgcccttgggacctctccagctaggaaaggatggagggatgggatgtgctttaggggagctgtgctcgggacttctccacctgggcgaggacggaagggtgggatgcgctttagggggccactccatagaacaccatgcagatggtgcccccccgcacgacccccagcatcagagttgtgcactgatggcctgcagatga

SEQ ID NO: 148887 - DNA, 20503 bp, Homo sapiens
tcagaaacagataatccgcttctcatcttcatagactttggcctcctctggttttatcaggtttccatttaggctgttgaaaaggaggaagacaaaagtacacaggtaaaatgttaaggatcctcgcacactccttcccaaggtgtgttcatagcacacactcgtgtatcacacaatacacatgtatccctgaaattaaggaacataccctttgcagatagttccttcatattagcatggatcctctccagctgccatccctctgttcactgggtctcactaaggtcacctgtagcctccataagcctgaatttaatgacattttccaggtcttgtctttcttggccctcaggattttggctgtcctgacctctcctctccctccttcttgaggcactccctccccttggcttggttatatgcgctgatttttctcctgcatctgagcactctacttcaatttcctttcctatattctcctccatgtgacctctacatctgagatttcctccaggtttggggctaagcccttttccccacccgatctcatcaatgccacggccttgtttgtatgtccgtggaggcagttacctgcttggcatcctcacttggacctctcccccacacctcaaagtagccacacctcctagggtcccctggcttagtgaatggaccactctcatcctgctgagcaggttagtaacctgggggtcaacctggacaccttccttctcatccccatgttccttgtatcacaaagttctcccctaattcctaagaatctagaatgcctccctggaacctctatgtctttggccggccatcttggtctgagcacccatcatctcttccctgcatcagtacaatgtcctactgacaggtcatttccacgtactctggccttctccaattcagtttcctagaagagccaagaattggtctttttgcattgcagatctgatcacatgcctctcctgcttcaaactgttcactgactttccatcacttttaggataaagaccaaaatgcacatcatgacccacagatcttttatggtccagtccctgcctatctcctcagcctcctgtagtcccctcttccacactgtctgaaccctggggcacagcagcttctggcagttcttccaggacaccacactccctcctgccccagaccctttgcacatgctgttccctacgcagaatactcacctcagctgactagctcctattcatccttcatggcttagtgtaagtgctgcttcctcagagaggccttccctgcaacctcatctaaatcaggttccctcttggccttcccctttgtgatagtacccatcacagttgtaattaaataattacgcaaatgattttttctttaatgtgcttctccctttctagacagtgaacccatgaagccatgttgttcaccactggatttttggtgctagcacagtccctgatgctcaagcgtttcgttattcaaggaataaatgaagacacagcactagtccctaggaccttgactcaggccccaccctcccagagccacagtctggaggagatagcctcacagaaagctgttatactggagtgggatacatttctgtaatttacagtgttcattgttcacctctaatttctgttcttaaagacagaactcatcaagggacttcagacttccaagttattttcagaaaggaatgaggtagaaataagtgtcagtacagttaacaagtccaaggagaaggcttactctgtaagtgttggctccaagcagagctgctccctgaacgtggctccccggccagctcaaccacaaccctgtggcctggtgtggcagtccctggcagggccaacaaagccacagccttctcagagcccagtcccatgaagtcacacacagaggagcatgctctggaggctcccagaacaagccagggacctaagtgaagacactcccaagaccagcacccatgccgcctgtcctgccctctctgaattggtggccagttcccctctccaccctgacacaagtgcaggccttgaagctgaagtctcctggccctactaaaatggttccttgtgtaggaatggtgaccctcaagagggaagcaatgcagattttgaaacttgacagaattaaagcaactgtaggtctttactacccgcctgaccagctacagagaaaagtggaagccaactgtgctctgcaaactgttctgtagtctggcagtctccttcctctccccctctgcctgctgtcctcaaaacttaagaatcagcagaaacggagtggcctgagggcaaacacccatgcaaacagttccagtgccctccagtgcttcccaggctgctgggcaggctgggcttcgcaggcacacaggccacaggtgtctgtttagatctgggctctattctctatgatggtgtttttctttttttcttttttgttttttgagacagggtctctggcacccaggctggattgcagtggcatgatcctggctcactgcagccttgatctcccatgcatccatcctcccacatcagcttcctgagtagctgggactacaggcacatagcaccatgtcgggctaatttttgtagtgacggggtttcgcatgttgcccaggctggtctcaaactcctgtgctcaagagatctgcccatcttggcctcccaaagtgctggtattacaggcatgagccaccatgcctagccaacagtgttttttttaaaaaaaaaccttttgtctacaaccctaaataagaattacattttatgttgtgaaccaacacttatgcaaacacacacccactcacatgcaagcatgaactaagatgaatgaaatgatactttcataccatgcacattgcatcctgatattttgttctgttctgttttctttttaaatattgttggttgcaattcaccaaactgatcgattttatgacaagttccaaacaagttctaaagcaaagtttaaaaaacactgtatgaggagcctgtgttggccaaggagctgttttttgtttttttttaattggctatgaaattctccccagtcatgaaaggaggacatagttaataaggcccctctcccagcatccacccagtcccacgtcacccaggcaattaagttgttaagggagctgctgagtggggagtgtctgtgccttatgggaggcaagaaagaagtggcatggcgctcaatgtcacagtaaagcaaactttttttcttctattagcataaggaagttctcaaagcagaaaaaagaagtagacaaagagcacaggtcagttcaagtcagcctggaaatgtcttacggaacccagaaaaggggaagaatgagctccaaactcctggccaacacagtcatctctcaattgctgagtcccagggggatttacttccactaggaaatcatttcactggccacttcccccatcccacccaatgaaggtagatgagggcgggggcccagggcaggagagcacagaatatggaatcaggcattctgggctgaattctagcttctctcgtagtgaccttgggcaaccttatttcactggtctgggcctctgtctacctctgtaaaacagaggtaataccattactgtgcagggttgctggaggaataaacagaaaccaccctgcgttgtgccttgcacagtcagtggtggtgagtaaacagtcactggtgttattactgtgacaaacgctgggatcttaccaaatctctgttatgccagtgttgctctgtaacgcatctgccagctgggcagtccccttagctgtgatctgattctggataagcctgaaagaagaacataacttgtataaaatccataatactggatcaaatttgaccccttcgtaagggagttgcaagggtgttttgggataagagacaagttggtcaggggaagaactgagtccatgtgactttgtatctggctaaaagtgtccaggtaagatccactagagtaaaggatagcttgatattttttaaattttctgtttgtttttatagtgaacataatgtaatacatgaactgatgtgtgtgtttgcatttttcactgcagaggtgcataatcaaaatatttggggccgggtgcagtggctcacacctgtaatcccagcactttgggaggccgaggtgggtggatcacgagctcaggagatcgataccatcctggccaacctgtctctattaaaaatacaaaaaaattagctgggcatggtggtgtgcacctgtactcccagctactcgggagactgaggtaggagaattgcttgaactgggaggtggaggttgcagtgagccaagatcgtgccactgcactccagcctgggtgacagagtgagactccatttatatttttatatatatttgggagaccaccaatctgaacaacaaattgtaagaaacacaccatgggacaggaagtctgacgtctccttccaggtagctagggaaaggcaaggcaggttttaaagttaagaggctaccaacatgcaagagggagggaggagaaacagttatgctgccatgaaatagttctcatgaatagttctcatggggctcagtggaaaagctttaataatggggactctgagaatgcaccccattgttctgggtagcagtgattcaaatgaaacaaagttttcagctatcgctaggaagccaggcctctcctgaaatgctcccttgggcagctacgcttctaacccaaccaggaaataaatgcatcaagaggctgtagtgtctccgcttcatcacagagtcattccctgctcctggctgtttgtagaataggctcctgctaaacatgacccttagaaatcctggcactgacccaagaaggaagcccttaccaggaagacgagggccctatgctgtcatgaatgaagaggactccctcgtgagaggcagtattgcagagcgggtgcagctcctcttaaaccctccctccccactgttcagctacagaaccttgaagaaataaacgcatctgtctgtgcctcagttgtgtcatctgtaaactgagaataactataagagtgccccccatccactgggtgtgtgagatttcaagaggagggtattaggcacagtgtccagggggaagggagctcttgtcactgttactgcccaagcacacaggaccactggtggctgggctgcagccaggatctggtgctcccagccataccccacaagggctagggcccctgggttcaatggcagaggtaatgaccttccctttcaaaagggacaaaaatagaaccaggaagtgggcaccaagttctgtattcagttacactctgctgttttctagtcaccacttaggcttttttgaaggcagggaaggcagcctccaaccaagatgtggcaggaggccaggaaggagagcacctaatgcccctaaaaagcctgcagtgtccaggcacatccacccactcgggctgccttcactagggccagtgcaggttgggaatgcacaaagcagccaagactctctttctgaccctgtcctagctctgctctccctggagaggctggcctgcacttagggaatgggatcaaataattctgcaggctaaaaaggaaagaaaaaacaatatgtagcagagtctagtctttttgcagaaattgacaaggtgagtctgaattcataagaaatgcaaagaacccagaatggtctaaacaatcttgagaaagaagaacaaagtagaactcacacctcctgatttcaaaatgtactacacaaagctacagcaatggtcctggcataggagagacatataaatcaatggaccagaacagagaattcagaaataaacccatacatttatggtcaattgatttttgacaagggtgtcaaggccattcaataggaaaagataatctgttcaacacgtggtgctgccgggacagctggatatccacgtgcaagagaatgaggttaaccctcactttacactatacaaaaattaactcaaaatggattgcagacctatatgtgaggggaaacaactataacgcttaacagaaaacttaggtggagttctttgtgatcttggattaggcaatcatttcttagataagacactgaaagcacaagcaaccaaagaaaaaaatagataaattggacttcatcaaaattaaaaactattggccaggtgcagtggcttttcgcctgtaatcccagcactttgggaggctgaggcaggtggatcacctgaggtcaggagttcaagaccagcctgggcctaaatggtgaaaccccatctctattaaaaatacaaaatgagacaggcatggtggctgatgcctgtaatcccaactactcaggaggctgaggcagaagaatcgcttgaacccaggaggtggaggttgcagagagctgagatcatgccactgcactcctgtctgggtgacaagagcaagactccatctcaaaaaaaacaaaaattaaaaactgttgtcctttaaaggtcactatcaagaaagaggaaaaactccacagaaagaaagaaaatacttgcaaaacctgtatctagtaaaggtctagcacccagaatatatagagaacccctataactcagcattagaagacaaacccaattttaaaatgggcaaaggatatggagacatttctccaaagaagctatacagactcccagtaggcacataaaaagacattcaacattgttgtcatcagggaaatgcaaatcaaaaccacaatattacttcacatccactagtataactagattttaaaagatggacaataataagtgttggtgaggatgtggagaaattggaatccacatacattgctggcgagaatgtaaaatagtacatccactttagaaaacagtttggtggctcctcaaaaagttacagaattgccatatgacccagaaattctattcccaggtatattcccaaaagagatgaaaacatatgttcacccaaaagcatgaacaggagtgttcacagtagcattacgcataatagtcaaaaagtagaaacaacccaaatgtcccatcaactgattaataaactgcaaaatttccttagagtgaattatcatttagccataaaaaggaatgaaacatgctagaacacagagacaaaaggtcacatattgcttgattccatttatatgaaatgcccagagtaggcaaatccatagagacagaaagcggattagtggttgccagggtctggggaggaggacagggagtgactgcttaatggataccagggctttttggagtggggaggaggagtgaaaatgttctagaattaggtggtgatggttgcactaaaaacctctgaattgtatactttaagagagtgaattttacagtatgtaaattttatctcaaaaaatacttttgaaaagtagcacagtctgaaattgtaaggctctctgagttaccataaatgctttaacgtctggttgactttcaacatttctgccaaactctctgccacttcatcgttgagttcattttgggtcagcctaaggaaaaaaaaggaagtatttactcaagagagcctacttggcagacattgttttagagttcacaggagcgggagctcagcccaaggctctccagctatgcagatgatcacttgctgagaacccagaaaacagccaggctccaagcccagcctgtcagccccacagaaggtcaatgggactcatttttaatgcaaatcctgtacctgggctcctatttcttagcccagctacctgtagaggagcccaccctccctccccacctttgctgagccctcagatttcatggaagatgggggcccacggaaaacaaagggccaatgcctgcttctcagttctcctctagtcccagggtcccttgaacaccactgacagtgtgttatccaagttagtttgaagacctgaaacagtcactgactgcacattaaaatgtgttcagtactttgctctcagttaacttgtgagggacccaagttaagtgactgaaagttcaggaagtctctcaatggtccttagaaccagaagtggtctggataaagcaccaaagctccttggtgtaaacagggtaggacccacttgtgccagtggacgaaagaatcattaggaagaagaatagaacagaaagaacatttaaaaaaaaaaattccttgaagggcagtttggatgtgcctgcccaaatttttaatgtgcttcattttaagacaatcagacttctagaaatttaccctacagtgtgcaaggatatacacacaaagctttatacattgcagcatgcattgtggtattatcctaatgtaaaatctgaacaaatttagatcagaaacaactgatgaaatatattgtgatatctattcgagatgttgtgcagcttgtagggagaatgaggtagaatgaggagggagaagaacacagcattgacatctactccggactcagcctgggcaggtttgtatcacccaccagcagggtgacctcgggcaacaggcttaagttctttgggtctgagttttctcactggtgaacgttaacagtagagatcgtatagagtggttgtgaggctgagtgagttaacacagggaaaaagtgtagaataacacatggcatgcagtcagcacttgagggcttctaggtgttgacattactactatccatgtgatttcactctccatggggcacctggccatgtccggaggcatttttgatcctcaccactgggaggtacagggcagagatgcggctaaaccgtctatgatgcacaggacagccctaccataataaagaatcacttggaccaaaatgtcaacagcatcaagatggagaaaccctaaaggagacatgtaaagtatgtgattacaatatttttagagccactgcttgaatgctattctgttttgcatatctttgaacatacatagaacaaaaggctagaaaggaaaggttattttggaaaacacaaagggaggtactttcacttcctccttttagcaggaactttaggaggtactttcatgtcctcctttagtgtcttacattttttccaaaaaacataaactacttttcaaaatgttaaatgatttgttgaggggaaagaatttaaaatgcacttactggacagcaggcctaatgtcaaaactctctcatgaagaggatattgtcattattctcagtaactaatttagcaagatcaaatgagcactgggctctgagtagatgatagggagggttgtaatacaactccctcacttaacctgtaaggaatgttttttttttttgtagatagagggtctcgctatattgcccaggctagtctcgaactcttggcctcaagcgatcctcccacctcagccttccaaagtactgggattacagatgtgagtcactgctcccagccacctgtatggaatttatgatacagagatgtaaatacaaataaagcaaaataaaacattaagtggccataaaaaagggaacaccaacaaaaaacactctcaggaggccacatccacttagtaagtgccctagagtgcagagagggagcgaggactgtgggcttcaggtgacaagtgacagatgagctggatggagcataaaggccaaaccctgatgtgaagacctggggaaggaggaggctgcctgggggaaggcagatgaagaggaggaagggagaaaattttgagccaagtgtgtggaagttggcctctgctaagcacatctgaaggtatccaaggatacctggatagcttgcatggccagcgttctagttctcctggggcctagaaggccaaggcctcagatccaggctcccggagcccacttcctcctcctgtacctgtttatgcttgtagaagtggctattctcttctctaggaggaaattatcaacttaactgaaaggcctagagcctttccaattgggagacaccttttctgttaagattccaggccatgtgcagcccctgggataattcctgggacctaaaccctccaaaatgactctgtgccaggtgcagtggctcacacctgcaatcccagggctttgagaagccagggcaggagaactgcttgagcccaggagttcaagaccagcctgggtaacatagcaaaaccccatctctacaaaaaattttaaaattaactgggtgtggtggtgcatgcctatagtctcaggactcggaaggccaaggcgggaggttcgaatgagcctgggaggtggaggctgcagtgagctgagatcacaccaatgcactcaagcctggacgacaaagcaagaccctatcacagaaaaacaaacaaacaaatgaaatgactcgagctattaccacagtatttctagagacgtgttctgctgcagggccctcgcaaggctctttcctccttctgtggagatgccgttggacgcaagactaggaaggaacacacttggggtgaattattaaagacacatctacattcaatcttagcttcaacatcagaacagctgggaagcctctgcctggctgtggccccagcccaggctcactcggggcaggatgcagaagtgttcagctgcagcagtagtgcccaggcgctgctgccccagagcccacacacagagcacaagggcaggctggacgggaaatgggtcatcagcacagcctgctcacacaacagtgggctggggtcggcacctcaggtttctgcacatgggcaggaggctggcgaggcctggcaagctgtccttctaaaggctggccccatcaaggtaccccatctgcaagacctggcaaagtctcttctgctactgtccccaccttcttggactctttttcagtggtaggaagaacagcagcagagccgtggacataccaaggtcccaagatttggccagcagcctaagcgggggctgggtaggtgcatccccatttatagagaggaagagtccctcttttccagcatcatcctgaggacaaggaaggggcaggaatctgctggccagcatcttattaagtttcatctgcacttaggaaaccctccctctaccagcaagggacatgcagggatggctgaggggctggaaatgtcctctgtcttgatgggggtggtggttggctggtgtgggacacatgcagaattcactgagctgaataaacacttaaggtgattcctcagggatctagaaccagaaataccatttgacccagcaatcccattactgggtatttacccaaaggattataaatcattctgctataaagacacaagcacatgtatgtttattgtagcactatttacaatagcaaagacttggaaccaacccaaatgcccatcagtgatagactggataaagaaaatgtggcacatacacactatggaatactatgcaaccataaaaaaaaatgagatcatgtcctttgctggcacatggatgaagctggaaaccatcattctcagcaaactaacacaggaacaaaaaaccaaacactgcatgttctcactcgtaagtgggagttgaacaatgagaacacatggacacatggaggggaacaacacacaccagggcctgttgggggtggggggcaaggggagggcaagcattaggacaaatacctaatgcatgcagggcttaaaacctagatgacaggttgataggtgcagcaaatcaccatggcatgcatttgcctatgtaacaaacctgcacatcttctacatgtatcccagaacttaaagttaaaaaaagagaagaatgtgctttactagatggcctcttatgcatcaaagaaaggtttgacaagagtaaggaaaatcacacatgcaaattcctcttctattaggagcacgaatcacccttccccagcaaacctagagcagctgggagggaccaggttggcccctggagacagcagggccacagttacctcagggtggtcaagctggggtggttccgcagagcctctgcgaaggcttttgctccttcatccccaacttgattgccccacatcctgagggaggagacaagatagtgaatgttagctccccaagaaacagccatgctcacccctccttttttgccaatggccacagctcagttcctactcaacaggcagatgtttgtgcccagtccctggatctgtggcctggacactaattcctcacactggtctctgagtgggctgctctggatttcaaattcaaggggtgatgcaagatcgaagagcaggggaagccttgtgaacagaggccatcggcaagtggcacagttagagaccgagcctcaccacgagcttcggagagctgtcagcccaggagcctgagctcatgagagaaagcacctgcatgtctcctgtggagcacagaggtgcgcagagtcctggagggaaggccgtgtgcaggtgctgggttcccagcatccgttcaactctgggcagggtcagagacattcctgaagacacagtcttccaggagacaaagagcaggaagtaccttcagaaaccccatcagcaacgttcctgtcacataaagaggacgttacccaaccaagctctgtggctacggccatcttggtggacaggtgcggcgataaagctgtattctgtcccctacagcagatccggagagtctctggctaaaacagtctgcgtggtaagatggtggactcctgacccggctctgccatctgctacctgtgtgaacttcgggaaattatgtagtctcttggacctcagttgccccatctataaaatggggataattagagcattccgtcatggagttgtgaggattcactgagttaacagaagcaaagcacttagaaccgtgtgtggctcacacaaagcgttggctgttcctaataggatcagcacacactgtctacacacaacagaacaagttcgtgtggcccactcacaacacaatggcagctgcctcaacaacacgttcacaccaagcaaactacctgcttacaccattccaggtatggcttgctggaacccagaataagagttttcagtgttttgcttacatatatgtatttactatacaattgaatggcatcacatttttaataaagtggaaagctactcaaggcatgagattaagtgaaaaaggaaggatacatatagtctcacccctactatagtatagatacatatagtctcacccctactatattttttaaaagttgtacaaagagagagaagggagagaaagtgagagagcttaactgagcttaaatgttaacaagaatcattttctgagaagataatttttattatttttcatagtttccaaataaaattacctgtgttccttttgtaatccaataaaaattataatgaaacaaaaagctttaaaaagcctcaagaatcaaaaccacaatgagacaggacctcacactcattaggatgggtactgtcaaaaagagaaaatagcaagtgttggcaaggatgtggagaaactagaatgaactgttggtgggaacataaaatggtgctgctgccgtggaaaacagtatgatgattcttcaaaaaattaaaaattaccatgtgatccagcaatcccactgctggatatatacccaaaagaattggagggaggagccaagatggccgaataggaacagctccggtctacagctcccagcgtgagcgacgcagaagacgggtgatttctgcatttccatctgaggtaccgggttcatctcactagggagcgccagacagtgggcgcaggccagtgtgtgcgcgcaccgtgcgcgagccgaagcagggcgaggcattgcctcacctgggaagcgcaagggatcagggagttccctttccgagtcaaagaaaggggtgacggacgcacctggaaaatcgggtcactcccacccgaatattgcgcttttcagaccggcttaagaaacggcgcaccacgagactatatcccacacctggccttcggagggtcctacgcccacggaatctcgctgattgctagcacagcggtctgagatcaaactgcaaggccgcagcaaggctgggggaggggcgcccgccattgcccaggcttgcttaggtaaacaaagcagccggggaagctcgaactgggtgcagcccaccacagctcaaggaggcctgcctgcctctgtaggctccacctctgggggcagggcacagacaaacaaaaagacagcagtaacctctgcagacttaaatgtccctgtctgacagctttgaagagagcagtggttctcccagcacgcagctggagatctgagaacgggcagactgcctcctcaagtgggtccctgacccctgacccccgagcagcctaactgggaggcaccccccagcaggggcacactgacacctcacacggcagggtattccaacagacctgcagctgagggtcctgtctgttagaaggaaaactaacaaacagaaaggacatccacaccgaaaacgcatctgtacatcaccatcatcaaagaccaaaagtagataaaaccacaaagatggggaaaaaacagaacagaaaaactggaaactctaaaacgcagagcacctctcctcctccaaaggaacgcagttcctcaccagcaacggaccaaagctggatggagaatgattttgacgagctgagagaagaaggcttcagacgctcaaattactctgagctacgggaggacattcaaaccaaaggcaaagaagttgaaaactttgaaaaaaatttagaagaatgtataactagaataaccaatacagagaagtgcttaaaggagctgatggagctgaaaaccaaggctcgagaactacgtgaagaatgcagaagcctcaggagccaatgcgatcaactggaagaaagggtatcagcaatggaagatgaaatgaatgaaatgaagcaagaagggaagtttagagaaaaaagaataaaaagaaacgagcaaagcctccaagaaatatgggactatgtgaaaagaccaaatctacgtctgattggtgtacctgaaagtgatgcggagaatggaaccaagttggaaaacactctgcaggatattatccaggagactttccccaatctagcaaggcaggccaacgttcagattcaggaaatacagagaacgccacaaagatactcctcgagaagagcaactccaagacacataattgtcagattcaccaaagttgaaatgaaggaaaaaatgttaagggcagccagagagaaaggtcgagttaccctcaaagggaagcccatcagactaacagcggatctctcggcagaaaccctacaagccagaagagagtgggggccaatattgaacattcttaaagaaaagaattttcaacccagaatttcatatccagccaaactaagcttcataagtgaaggagaaataaaatactttacagacaagcaaatgctgaccgattttgtcaccagcaggcctgccctaaaagagctcctgaaggaagcgctaaacatggaaaggaacaaccggtaccagccactgcaaaatcatgccaaaatgtaaagaccatcgagactaggaagaaactgcatcaactaacgagcaaaatcaccagctaacatcataatgacaggatcaaattcacacataacaatattaactttaaatgtaaatggactaaattctccaattaaaagacacagactggcaagttggataaagagtcaagacccatcagtgtgctgtattcaggaaacccatctcatgtgcagagacacacataggctcaaaataaaaggatggaggaagatctaccaagcaaatggaaaacaaaaaaaggcaggggttgcaatcctagtctctgataaaacagactttaaaccaacaaagatcaaaagagacaaagaaggccattacatgatggtaaagggatcaattcaacaagaggagctaactatcctaaatatgtatgcacccaatacaggagcacccagattcataaagcaagtcctgagtgacctacaaagagacttagactcccacacattaataatgggagactttaacaccccactgtcaacattagacagatcaacgagacagaaagtcaacaaggatacccaggaattgaactcagctctgcaccaagcagacctaatagacatctacagaactctccaccccaaatcaacagaatatacatttttttcagcaccacaccacagctattccaaaattgaccacatacttggaagtgaagctctcctcagcaaatgtaaaagaacagaaattataacaaactatctctcagaccacagtgcaatcaaactagaactcaggattaagaatctcactcaaagccgctcaactacatggaaactgaacaacctgctcctgaatgactactgggtacataacgaaatgaaggcagaaataaagatgttctttgaaaccaacgagaacaaagacacaacataccagaatctctaggacgcattcaaagcagtgtgtagagggaaatttatagcactaaatgcccacaagagaaagcaggaaagatccaaaattgacaccctaacatcacaattaaaagaactagaaaagcaagagcaaacacattcaaaagctagcagaaggcaagaaataactaaaatcagagcagaactgaaggaaatagagacacaaaaaacccttcaaaaaatcaatgaatccaggagctggttttttgaaaggatcaacaaaattgatagaccgctagcaagactaataaagaaaaaaagagagaagaatcaaatagacacaataaaaaatgataaaggggatatccaccaccgatctcacagaaatacaaactaccatcagggaatactacaaacacctctacgcaaataaactagaaaatctagaagaaatggataaattcctcgacacatacactctcccaagactaaaccaggaagaagttgaatctctgaatagaccgataacaggagctgaaattgtggcaataatcaatagcttaccaaccaaaaaaaagcccgggaccagacagattcacagccaaattctaccagaggtacaaggaggagctggtaccattccttctgaaactattccaatcaatagaaaaagagggaatcctccctaactcattttatgaggccagcatcattctgataccaaagccgggcagagacacaacaaaaaaagagaattttagaccaatatccttgatgaacattgatgcaaaaatcctcaataaaatactggcaaaccgaatccagcagcacatcaaaaagcttatccaccatgatcaagtgggcttcatccctgggatgcaaggctggttcaatatacgcaaatcaataaatgtaatccagcatataaacagaaccaaagacaaaaaccacatgattatctcaatagatgcagaaaaagcctttgacaaaattcaacaacccttcatgctaaaaactctcaataaattaggtattgatgggacgtatttcaaaataataagagctatctatgacaaacccatagccaatatcatactgaatgggcaaaaactggaagcattccctttgaaaactggcacaagacagggatgccctctctcaccactcctattcaacatagtgttggaagttctggccagggcaattaggcaggagaaggaaataaagggtattcaattaggaaaagaggaagtcaaattgtccctgtttgcagatgacatgattgtatatctagaaaaccccattgtctcagcccaaaatctccttaagctgataagcaacttcagcaaagtctcaggatacaaaatcaatgtacaaaaatcacaagcattcttatacaccaacaacagacaaacagagagccaaatcatgagtgaactcccattcacaattgcttcaaagagaataaaatacctaggaatccaacttacaagggatgtgaaggacctcttcaaggagaactacaaaccactgctcaaggaaataaaagaggatacaaacaaatggaagaacattccatgctcatgggtaggaagaatcaatattgtgaaaatggccatactgcccaaggtaatttacagattcaatgccatccccatcaagctaccaatgactttcttcacagaattggaaaaaactactttaaagttcatatggaaccaaaaaagagcccacatcgccaagtcaatcctaagccaaaagaacaaagcaagaataaagctggaggcatcactattcaaactatactacaaggctacagtaaccgaaacagcatggtactggtaccaaaacagagatatagatcaatggaacagaacagagccctcagaaataatgccgcatatctacaactatctgatctttgacaaacctgagaaaaacaagcaatggggaaaggattccctatttaataaatggtgctgggaaaactggctagccatatgtagaaagctgaaactggatcccttccttacaccttatacaaaaatcaattcaagatggattaaagacttaaatgttagacctaaagccataaaagtcctagaagaaaacctaggcaataccattcaggacataggcatgggcaaggacttcatgactaaaacaccaaaagcaatggcaacaaaagccaaaattgacaaatgggatataattaacctaaagagcttctgcacagcagaagaaactaccatcagagtgaacaggcaacctacagaatgggagaaaaattttgcaatctacccatctgacaaaggactaatatccagattctacaaagaactcaaacaaatttacaagaaaaaatcaaacaactccatcaataagtgggcaaaggatatgaacagacacttctcgaaagaagacatttatgcaaccaaaagacacatgaaagaatgttcatcatcactggccatcagagaaatgcaaatcaaaaccaccatgagatactatctcacaccagttagaatggcaatcattaaaaagtcaggaaacaacaggtgctggaaaggatatggagaaataggaacacttttacactgttggtgggactgtaaactagttcaaccattgtggaagacagtgtggcgattcctcaaggatctagaactagaaataccatttgatccagcgatcccattactgggtatatacccaaaggattataaatcatgctgctataaagacacatgtacacagctacgcggcggcggcggagcgcaggcctcgtgccgttacggccatcacggcggccgcagtggcgtcctggagccctcctcaggtagctcttcaacaagcaggcataaacacttctctgatgagggacgcgatggggaaaggctttgttctctgaaaactccctgtaggaactgcctttcttctgagtgtccacttgtgtccggaattggtgggttcttgatctcactgacttcaagaatgaagccgcagaccctcgcggtgagtgttacagctcttaaggtggcgcgtctggagtctgtcccttctgatgttcggatgtgttcagagtttcttccttctggagtgaagctgcagatcttcacggtgagtgttacagctcttaaggcggcgcgtctggagttgttcgttcctcctggtgggctcgtggtctcgctggcttcaggagtgaagctgcagaccttcgcgggctgccggtggagctgcgtgccagtcctgcgccctgcgtccgcactcctcagcccttgggtggtcgatgggattgggcgccctggagcagagggtggtccttgttggggaggctcgggccgcacaggagcccatggaggggctgagggagccggctccagtcttggccagcccagaaaggggctcccgcagtgcagcggtgggctgaagggctcctcaagtgcggccaaagtgggagcccaggcagaggacgcgcccagagtgagcgagggctgtgaggactgccagcatgctgtcacctctcacactgaccccagggaaggcagatttagcccagaacatgccccacccctttccaatccaagaccagtgatcagggtggcccttctggtcctgcagtatctgggtctgaaaggcaagtataactccatcaccagtaaccagggtgtagagactatctgtgtgggcccttctgttcttgggaaatcaaccctgtctggggctggctttgactctcctgttgtcttgccaacagccatccttacccgacctgggatggagatcaccaaagatggcttccacctggttattgagctggaggacctggggccccagtttgagttccttgtggcctactggaggagggagcctggtgccgaggtgagactccagccttggcctttgggtcaggcttcgggaaagaaggcacagatttctgaggctctcggtattcagtttcccaagaccaaatcctcagaagaagaatccaattggtcttgctcgtcttatcaggccaagcttcaggggttgctggtagccagctcgcctctgattggacccttctcaggccaagg

SEQ ID NO: 148888 - DNA, 484 bp, Homo sapiens
gtgttttgtcacaatgacctgctctgcaagaatatcatctatgacagcatcaaaggtcacgtgcggttcattgactatgaatatgctggctacaactaccaagcttttgacattggcaaccatttcaatgagtttgcaggcgtgaatgaggtggattactgcctgtacccggcgcgggagacccagctgcagtggctgcactactacctgcaggcacaaaaggggatggccgtgacccccagggaggtgcaaaggctctacgtgcaagtcaacaagtttgccctggcgtctcacttcttctgggctctctgggccctcatccagaaccagtactccaccatcgactttgatttcctcaggtacgcagtgatccgattcaaccagtacttcaagctcctggggccttcctggctctggcccagaaagtgattcatttgtaaattatcatggttttctttctgcattaaaatgctcatttccgaaa

SEQ ID NO: 148889 - DNA, 2094 bp, Homo sapiens
gcggccgcattggaaacccgagcaagttcggaccaagcgcttcatggatggcatcaccaacaagctggtggcctgctatgtggaggaggacatgcaggactgcgtgctggtccgggtgtatggggagcggacggagctgctggtggaccgggagaatgaggtcagaaacttccagctgctgcgagcacacagctgtgcccccaaactctactgcaccttccagaatgggctgtgctatgagtacacgcagggtgtggccctggagcctgagcacatccgtgagccccggcttttcaggttaatcgccttagaaatggcaaagattcatactatccacgccaacggcagcctgcccaagcccatcctctggcacaagatgcacaattatttcacgcttgtgaagaacgagatcaaccccagcctttctgcagatgtccctaaggtagaggtgttggaacgggagctggcctggctgaaggagcatctgtcccagctggagtcccctgtggtgttttgtcacaatgacctgctctgcaagaatatcatctatgacagcatcaaaggtcacgtgcggttcattgactatgaatatgctggctacaactaccaagcttttgacattggcaaccatttcaatgagtttgcaggcgtgaatgaggtggattactgcctgtacccggcgcgggagacccagctgcagtggctgcactactacctgcaggcacaaaaggggatggccgtgacccccagggaggtgcaaaggctctacgtgcaagtcaacaagtttgccctggcgtctcacttcttctgggctctctgggccctcatccagaaccagtactccaccatcgactttgatttcctcaggtacgcagtgatccgattcaaccagtacttcaaggtgaagcctcaagcgttcagcttgggagatgccaaagtgaccagccaccccatccctcccctacccatctgtctggccagacctgttctccagagctcaattcttgcactctgggatccacacccttgggacagggtggggagaggggacacatgggtgttcaggggagaaaggctctgttccctgccgccagaccccagtggttgccactgaagacctcattctcctgtctggaggggctgataggacccccttccgggggtccccttcaccctaccaggcttgggaggaagtgcctgcagccaggtcctgaaccataaccacccctgggaaacacatcattcccagcctcaggccctgctggaattggggctgccttatatgtgtgtttaccccttcctggcctggggaaggaggcggggagggctcctttctacctccagtgccctgagcctccagtccgtctccccctgcatgccccatgtgggaaatgctcagatctacaacccagttttaccccatctgtgacacatggatgtacctatcttggtgatgggtgggggccaagaattgagcatgacatcttccccagcagccacctcctctgagatccctcaccttctccaaaccagatccaatcaaacctcagcccgaggaaacatgctccccaacgtgctctcctgtgcttctgttttgtccccctgctggggggacaggagagggagtggtgaggccctgggcctccagagcctggctctgctttgtgctgtggcttagccggaggggacgtggccaagggtgaggtggccaaaacccagaaccagcggtctcctggcttgatcgctccctggccctcaggccctccttcccagggatgtctctccagctctactttatgtcctgaagctgacccgaggtcttcctatctggaatgactagaggggagcaagagggatggggtgggggccaggggccccccagggcctatcgtgggagagcctgggcaggatcccatcagaaaggtgctgactaaactggttgcccggacactcaacagcctccacctccctttctaccctcacagctcctggggccttcctggctctggcccagaaagtgattcatttgtaaattatccatggttttctttccgccttaaaatgctcatttccggaaaaaaaaaaaaaaaaaaa

SEQ ID NO: 148890 - DNA, 741 bp, Homo sapiens
atgaaggagaataaagaaaattcaagcccttcagtaacttcagcaaacctggaccacacaaagccatgttggtactgggataagaaagacttggctcatacaccctcacaacttgaaggacttgatccagccaccgaggcccggtaccgccgagagggcgctcggttcatctttgatgtgacaggagcctgttgcctctttctggctgggaaagtagaagaaacaccaaaaaaatgtaaagatatcatcaaaacagctcgtagtttattaaatgatgtacaatttggccagtttggagatgacccaaaggaggaagtaatggttctggagagaatcttactgcagaccatcaagtttgatttacaggtagaacatccataccagttcctactaaaatatgcaaagcaactcaaagacatctgccaccaaatcctggatctttactcacaaggaaaacaacagatgcctcatcacaccccccatcagctgcaacagcccccatctcttcagcctacaccacaagtgccgcaagtacagcagtcacagccgtctcaaagctccgaaccatcccagccccagcagaaggacccccagcaaccagcccagcagcagcagccagcccaacagcccaagaaaccctctccgcagcccagttctccccgacaggttaagcgagccgtggtgagtgggctaaagcaggccctgggtagagcaggctttccaggtggcggcaacacctga

SEQ ID NO: 148891 - DNA, 950 bp, Homo sapiens
gatggccgcagtcggcaaggagagacgtcgctgaggggcttgcctgaagcgaggggattctaacattttcagagaaccttttggaaagaacaagcctacttcaataaatgaaggagaataaagaaaattcaagcccttcagtaacttcagcaaacctggaccacacaaagccatgttggtactgggataagaaagacttggctcatacaccctcacaacttgaaggacttgatccagccaccgaggcccggtaccgccgagagggcgctcggttcatctttgatgtgggcacacgtttggggctacactatgataccctggcaactggaataatttattttcatcgcttctatatgtttcattccttcaagcaattcccaagatatgtgacaggagcctgttgcctctttctggctgggaaagtagaagaaacaccaaaaaaatgtaaagatatcatcaaaacagctcgtagtttattaaatgatgtacaatttggccaggttggagatgacccacaggaggaagtaatggttctggagagaatcttactgcagaccatcaagtttgatttacaggtagaacatccataccagttcctactaaaatatgcaaagcaactcaaagacatctgccaccaaatcctggatctttactcacaaggaaaacaacagatgcctcatcacaccccccatcagctgcaacagcccccatctcttcagcctacaccacaagtgccgcaagtacagcagtcacagccgtctcaaagctccgaaccatcccagccccagcagaaggacccccagcaaccagcccagcagcagcagccagcccaacagcccaagaaaccctctccgcagcccagttctccccgacaggttaagcgagccgtggtgagtgggctaaagcaggccctgggtagagcaggctttccaggtggcggcaacacctga

SEQ ID NO: 148892 - DNA, 1397 bp, Homo sapiens
gcggccgcggcaccctcgtcaggcgccgccgctgagggcaggcagcccggcagccactacacacggacccgtgacgtcgggcgtagcgcggcgcacgtcacggccgctcgctcgtgcgcgcgcacccctccgcccggcggtagcggaacccgccgcgggcgcgcgcccggcccaggggagtgggtcggcgcctgcgcagaggcccgccacgcccacacacaggccaccgcccccaccggccggacggcgcgggggattcccagtcctggctccgccccggcctcggccccgcccccgcccctgccccggggcagcctgtgctgttcccgtgtgcgcggcgcatacgcacctgggttgtctcgagcctgcggtagtggccagatcccagacatccgagtagatcccgtgaaaaggtctcccacgtgggctgtggacagggcccaagggtagcagagctagcagaggcagtgacggactgtgtggcaggtcatttgcaaggagaaaagccgtctgcctcttaatttgtggctcaagtttcagaatttttttcctgagggactttagaaattacttcaggcttgccacctaaccttaaaccacccccttggagactggctaagtgttatttgtgttttctgtttagttcttatcaccatcgatacttggttatgactggttgtgtacattggttagcccagcaagtattacttctccagcttaacagatgtggaaacttaagcccagagacatgagttgacaccccacccccagagctagagtctaaaaccctttctttcgctcctcatctcccacaggataaaatgcaaattaatcagactagtggtgaggccctccgtggtgtgactaacctgcatcccgacgttttcaccctactttgatccagaaagcacctttccgccccatctcttctcctttccttaaataccccttacaacttcctgtaccattcttccctgttcagcttcaattgggttttttcggacatttcggatcccacccctttcatgcatattccagacccacatttccactggagcagttgaaatgagagagatgggaatgggactcacccgaaccagaggaatttttattacagacccattaacagaggtgtcaaagtcacaggaacaaggatgtgcacctcagaaacacagagctcagtggaaaatcagtttgcttctatttgtttaaaaaatgggggacttatgcataaatctaagaccttcttgaatctaacattctaagacctgtatgccacagaaaggagggtctcagaacgccggaggatagtatttaaatcttaaatatctatattgttctccacagttactgggtcaccacatagcaggcattcaataaaaacgtgtttgtttact

SEQ ID NO: 148893 - DNA, 418 bp, Homo sapiens
tttttttttagatggagtctcactcaggctggagcgagactctgacacacacacacacacacacacacacacacacacacacacacacacacgagtagtagattgggcaaggtggctcacgcctgtaatcccagcactttgggaggctgaggtgaggatcatacttccttcccagttctagattagtctgggcaacacagcaagaattatttctataaaaaagtaaaaaaagaagtagatcaaaataataatgtaacatctactgaatacatagtatgcattaagcactcttcagggaatatctcattttataacaaggtaggtactaccatttgtcttatcttaaagatgaataaattgagacagagagcgactaagtaattaatctaaggttaagatgaaaagccaagccagaatc

SEQ ID NO: 148894 - DNA, 535 bp, Homo sapiens
cacagctggcagctccacatgtatacaaatacacacatacacacactccctttggagagcctatttatacatataaactcatttatatatgtgtgtatgtgtgtgtgtatatatatttaaggcaaaaggaagagcacttaaatcccgagtctggcaagtctcatgcttggccgcgtgtggtggctcatgcctgtaatcccagctgatttctttctttgtaaacagactgccttgattaattgcgtataccatctaaaatacatattttattgaatgctcctgtttgtccggtattgtgtcagttattttcatttattagcttatttaatcttcaatcaagccttaagatattttacagagcagataatgaagctcagaaaacataatttgtctaaagttagactatgaaacaacaaagctagaaatcaagctattttgattctatggtttcaatcaataaaaattcactgattgcctaatatgttccaggtattcttttaggtgtttcactaataaacaggacagatatggttct

SEQ ID NO: 148895 - DNA, 1112 bp, Homo sapiens
tcgatacgactttttttttttttttttttttttttgctttttttgagtcaggggtctcattctgtcacccaggctggagtgcagtggtgcgatcatggctcactgcagcctcaacctcctcgggcgcaagccatcctcccctctctgcctcctgagtagctgggacaaccatgcccggctaattttttttacaagaccactgttaaaagcccggaagaatcctgcagctcgctgtggtgggctgttttgcgtgtgctagagtctattcagcatttcagacagaaaagcctcagcattcctcttctgtgggtctccaccgtagctcctttgaaatctctgctttctcacactttcccatctgagtctttgtgccatggccgtcccctcctctccaatacgaagagcccacactcagtttccctccctcctcctccatcccacactgcccgagcacctcacctcccaatgactgactcgtccccggtcttgcacacacctggggagtgtagctggcctgtcctgcacaccagccttgcaggctcagtgagtagaccatccttgtctgctcttgccgggtgcagctgtgtgtagtggcccaagggggggtccatctgggagggccacccaggaagccataagtgacatgcacccatgaggaagcgtaagtgatgtccaccacaagaggtgtggggagcggcagcagcgcgttcatccactgtgcttgactttgtttatttccccgatgaccttttcccggacttcctagctggatctccgtgagtgccagggctgggtctgggaagggtttgggacccagcacatcacctggcacagtcagtgtttgctcaatatttgctgagagaaaaccccagccatgtcaccgacttacaataggagcttctcgtacggagcagaaatgtgttgttgcctgtggctttgcaggagctccgagcagtggcgagaggaagtcatgggtgaccatggtaggcattaccgcctgatggggttgctggctggtcctgagctcatcaccgtccatctcctgcatccacagtgatttctattaagtgcagcttttcgtcaggcaaccaccaacggcactgggaccactt

SEQ ID NO: 148896 - DNA, 551 bp, Homo sapiens
cgatcctggaggagcgccatagtatccacttcatcattaagaggatgtttgatgagcgaattttcacagggaacaagtttaccaaagacatccaccggctggagaagatcctgaaggcccgagagcatgtccgcatggtcatcattaaccagctccaaccctttgcagaaatctgcaatgatgccaaggtgccagccaaagacagcagcattcccaagcgcaagagaaagcgggtctcggaaggaaattccgtctcctcttcctcctcgtcttcctcttcctcgtcctctaacccggattcagtggcatcggccaaccagatctcactcgtgcaatggccaatgtacatggtggactatgccggcctgaacgtgcagctcccgggacctcttaattactagacctcagtactgaatcaggacctcactcagaaagactaaaggaaatgtaatttatgtacaaaatgtatattcggatatgtatcgatgccttttagtttttccaatgatttttacactatattcctgccaccaaggcctttttaaataagt

SEQ ID NO: 148897 - DNA, 390 bp, Homo sapiens
ccaaagacagcagcattcccaagcgcaagagaaagcgggtctcggaaggaaataccgtctcctcttcctcctcgtcttcctcttcctcgtcctctaacccggattcagtggcatcggccaaccagatctcactcgtggtaaagttgcaccgatttggactccggcactcatctctgtggccctcacccctctgtctggcagggccgtctactctgggatgtgggcccaggggacggggaggcactgggctttgagtggggaccttccggcctcgggggatatagatgcatccacctgtctcacccaagaggtagcccatccttcttcgtggcgtactcactggcactcaggcaggaattcacatcctcgctgggcagatgggccggctgg

SEQ ID NO: 148898 - DNA, 3023 bp, Homo sapiens
atggccttgctgggtaagcgctgtgacgtccccaccaacggctgcggacccgaccgctggaactccgcgttcacccgcaaagacgagatcatcaccagcctcgtgtctgccttagactccatgtgctcagcgctgtccaaactgaacgccgaggtggcctgtgtcgccgtgcacgatgagagcgcctttgtggtgggcacagagaaggggagaatgttcctgaatgcccggaaggagctacagtcagacttcctcaggttctgccgagggcccccgtggaaggatccggaggcagagcaccccaagaaggtgcagcggggcgagggtggaagccgtagcctccctcggtcctccctggaacatggctcagatgtgtaccttctgcggaagatggtagaggaggtgtttgatgttctttatagcgaggccctgggaagggccagtgtggtgccactgccctatgagaggctgctcagggagccagggctgctggccgtgcaggggctgcccgaaggcctggccttccgaaggccagccgagtatgaccccaaggccctcatggccatcctggaacacagccaccgcatccgcttcaagctcaagaggccacttgaggatggcgggcgggactcgaaggccctggtggagctgaacggtgtctccctgattcccaaggggtcacgggactgtggcctgcatggccaggcccccaaggtgccaccccaggacctgcccccaaccgccacctcctcctccatggccagcttcctgtacagcacggcgctccccaaccacgccatccgagagctcaagcaggaagcaccttcctgcccccttgcccccagcgacctgggcctgagtcggcccatgccagagcccaaggccaccggtgcccaagacttctccgactgttgtggacagaagcccactgggcctggtgggcctctcatccagaacgtccatgcctccaagcgcattctcttctccatcgtccatgacaagtcagagaagtgggacgccttcataaaggaaaccgaggacatcaacacgctccgggagtgtgtgcagatcctgtttaacagcagatatgcggaagccctgggcctggaccacatggtccccgtgccctaccggaagattgcctgtgacccggaggctgtggagatcgtgggcatcccggacaagatccccttcaagcgcccctgcacttatggagtccccaagctgaagcgtatcctggaggagcgccatagtatccacttcatcattaagaggatgtttgatgagcgaattttcacagggaacaagtttaccaaagacaccacgaagctggagccagccagcccgccagaggacacctctgcagaggtctctagggccaccgtccttgaccttgctgggaatgctcggtcagacaagggcagcatgtctgaagactgtgggccaggaacctccggggagctgggcgggctgaggccgatcaaaattgagccagaggatctggacatcattcaggtcaccgtcccagacccctcgccaacctctgaggaaatgacagactcgatgcctgggcacctgccatcggaggattctggttatgggatggagatgctgacagacaaaggtctgagtgaggacgcgcggcccgaggagaggcccgtggaggacagccacggtgacgtgatccggcccctgcggaagcaggtggagctgctcttcaacacacgatacgccaaggccattggcatctcggagcccgtcaaggtgccgtactccaagtttctgatgcacccggaggagctgtttgtggtgggactgcctgaaggcatctccctccgcaggcccaactgcttcgggatcgccaagctccggaagattctggaggccagcaacagcatccagtttgtcatcaagaggcccgagctgctcactgagggagtcaaagagcccatcatggatagtcaagagagggattccggggaccctctggtggacgagagcctgaagagacagggctttcaagaaaattatgacgcgaggctctcacggatcgacatcgccaacacactaagggagcaggtccaggaccttttcaataagaaatacggggaagccttgggcatcaagtacccggtccaggtcccctacaagcggatcaagagtaaccccggctccgtgatcatcgaggggctgcccccaggaatcccgttccgaaagccctgtaccttcggctcccagaacctggagaggattcttgctgtggctgacaagatcaagttcacagtcaccaggcctttccaaggactcatcccaaagcctgatgaagatgacgccaacagactcggggagaaggtgatcctgcgggagcaggtgaaggaactcttcaacgagaaatacggtgaggccctgggcctgaaccggccggtgctggtcccttataaactaatccgggacagcccagacgccgtggaggtcacgggtctgcctgatgacatccccttccggaaccccaacacgtacgacatccaccggctggagaaagatcctgaaggcccgagagcatgtccgcatggtcatcattaaccagctccaaccctttgcagaaatctgcaatgatgccaaggtgccagccaaagacagcagcattccccaagcgcaagagaaagcgggtttcggaaggaaattccgtctcctcttcctcctcggtcttcctcttcctcgtcctctaacccggattcagtggcatcggccaaccagatctcactcgtgcaatggccaatgtacatggtggactatgccggcctgaacgtgcagctcccgggacctcttaattactagacctcagtactgaatcaggacctcactcagaaagactaaaggaaatgtaatttatgtacaaaatgtatattcggatatgtatcgatgccttttggtttatccaaatgatttatacacaatattcatgccaccaaggcctttttaaataagtaaaaaaagaaaaaaaaaaaaaaagggcggccgct

SEQ ID NO: 148899 - DNA, 2014 bp, Homo sapiens
atggcgttctcgaagctcttggagcaagccggaggcgtgggcctcttccagaccctgcaggtgctcaccttcatcctcccctgcctcatgataccttcccagatgctcctggagaacttctcagccgccatcccaggccaccgatgctggacacacatgctggacaatggctctgcggtttccacaaacatgacccccaaggcccttctgaccatctccatcccgccaggccccaaccaggggccccaccagtgccgccgcttccgccagccacagtggcagctcttggaccccaatgccacggccaccagctggagcgaagctgacacggagccgtgtgtggacggctgggtctatgaccgcagcgtcttcacctccaccatcgtggccaagtgggacctggtgtgcagctcccagggcttgaagcccctaagccagtccatcttcatgtccgggatcctggtgggctcctttatctggggcctcctctcctaccggtttgggaggaagccgatgctgagctggtgctgcctgcagttggccgtggcgggcaccagcaccatcttcgccccaacattcgtcatctactgcggcctgcggttcgtggccgcttttgggatggccggcatctttctgagttcactgacactgatggtggagtggaccacgaccagcaggagggcggtcaccatgacggtggtgggatgtgccttcagcgcaggccaggcggcgctgggcggcctggcctttgccctgcgggactggaggactctccagctggcagcatcagtgcccttctttgccatctccctgatatcctggtggctgccagaatccgcccggtggctgattattaagggcaaaccagaccaagcacttcaggagctcagaaaggtggccaggataaatggccacaaggaggccaagaacctgaccatagagacaccaccaccaccaccaccaatcccgataccatcaccaacagcaccaccactgtccacacccaccatcaccttcactgccatcactccatcaccaccagcaccaccaataccatcactaaccccacagccaccatctctgcaaaacatctccaccaccttcaccaccatcgtcaccatcggtaacagcaccatcattatcaacagcacccacaccgtcacctccatcacccaccacctccacctgcatgtagcacgcacccacctcatgggggttctcgatgtgtctggggaaacagaatgtgtttatttgaaggtgctgatgtccagcgtgaaggaggaggtggcctctgcaaaggagccgcggtcggtgctggacctgttctgcgtgcccgtgctccgctggaggagctgcgccatgctggtggtgaagtacgccgtcctgggcagggacctgacttccagccttgcccgcagtttctctctattgatctcctactatgggctggtcttcgacctgcagagcctgggccgtgacatcttcctcctccaggccctcttcggggccgtggacttcctgggccgggccaccactgccctcttgctcagtttccttggccgccgcaccatccaggcgggttcccaggccatggccggcctcgccattctagccaacatgctggtgccgcaagatttgcagaccctgcgtgtggtctttgctgtgctgggaaagggatgttttgggataagcctaacctgcctcaccatctacaaggctgaactctttccaacgccagtgcggatgacagcagatggcattctgcatacagtgggccggctgggggctatgatgggtcccctgatcctgatgagccgccaagccctgcccctgctgcctcctctcctctatggcgttatctccattgcttccagcctggttgtgctgttcttcctcccggaaactccagggacttccgctccctgacactatccaggacctggagagccagaaatcaacagcagcccagggcaaccggcaagaggccgtcactgtggaaagtacctcgctctag

SEQ ID NO: 148900 - DNA, 4305 bp, Homo sapiens
agaggaggagccggcgatgtgcaccagccaacaaaaggcaaggaggagtttgtggcgaccttcaaaggcaatgagttcttctgctacgacctgtcacacaaccccatccagagcagcactgatgagatcacactggccttccgcaccctgcaacgcaacggcctgatgctgcatacaggcaagtcggccgactacgtcaacctgtccctcaagtctggggctgtctggctggtcatcaacctaggctcaggtgccttcgaggcccttgtggaacccgtcaatggcaagttcaacgacaacgcctggcacgacgtccgggtcacccgaaacctgcgccagcacgcagggattggacacgctatggtgaccatctcggtggacgggatcctgaccaccacaggctacacgcaggaggattacaccatgctgggctctgatgacttcttctacattgggggcagccccaacacagctgacctgccgggctcgcccgtcagcaacaacttcatgggctgcctcaaggacgtggtctataagaacaatgacttcaaattggaactatcccgcctggcaaaggaaggggaccccaagatgaagctgcagggggacttgtcattccgctgtgaggatgtggctgccctggaccctgtgacctttgagagtcccgaggcctttgtggcgctgccccgctggagcgctaagcgcactggctccatctccctagacttccgcaccaccgagcccaatgggctgctgctcttcagccagggccggcgggctgggggtggagctggcagccacagctctgctcagcgggccgactactttgccatggagctattggacggccacctctatcttctgctggacatgggatctgggggcatcaagctgcgggcatccagccgcaaggtcaatgatggcgagtggtgtcacgtggacttccagagggatgggcgaaaaggctccatctcagtgaatagtcgcagcacgccgttcttggccactggagacagcgagattctggacctggagagtgagctgtacctgggcggtctccctgaggggggccgggtggacctgcccctgcccccagaggtgtggacagcagcactccgggcaggctacgtgggctgtgtgcgggacctcttcatagatgggcgtagccgagacctccggggcctggctgaggctcagggggctgtgggcgttgcccccttttgctcccgggagacgctgaagcagtgtgcatctgccccctgtcgcaatgggggcgtctgtcgagaaggctggaaccgcttcatctgtgactgcatcgggaccggctttcttgggcgggtctgtgagagagaggccacggtcctgagctacgatggctccatgtacatgaagatcatgctgcctaacgccatgcacacggaggcagaggatgtgtccctgcgtttcatgtcccagcgggcctacggactcatgatggccaccacttccagggagtctgccgacaccctacgcctggagctggatggggggcagatgaagctcactgtcaacctcgactgcctgcgcgtcggctgcgcacccagtaaaggccccgaaacgctgtttgcggggcacaagctcaatgacaatgagtggcacacggtgagggtggtccggcgtggcaagagcctgcagctgtctgtggacaacgtgactgtggagggacagatggcaggagcccatatgcggctggagttccacaacattgagacgggcatcatgacggagcggcggtttatctccgtggtgccctccaacttcatcgggcatctgagtgggctcgtgttcaatggccagccctacatggaccagtgcaaggatggtgacatcacctactgtgagctcaatgctcgctttggcctgcgtgccattgtggccgatcccgtcaccttcaagagtcgcagcagctacctggcactcgccacgctccaagcctatgcttccatgcacctcttcttccagttcaagaccacggcccctgatgggcttcttctgttcaactcgggcaacggcaatgacttcattgtcatcgagctggtcaaggggtacatccactacgtgtttgacctggggaatggcccgtccttgatgaaggggaactcagacaaaccagtcaatgacaaccagtggcacaacgtggtggtgtccagggacccaggcaacgtgcacacgctcaagattgactcccgcactgtcacgcagcactccaatggcgcccgaaacctcgatctcaaaggggagttgtacattggcggtctgagcaagaatatgttcagcaacctgcccaagctggtggcctcccgggatggctttcagggctgcctggcctcagtggacctcaacggacgtctcccagacctcatcgccgacgccctgcaccgcattgggcaggtggagaggggctgtgatggccccagcaccacctgcactgaagagtcctgtgccaaccagggcgtctgcttgcagcagtgggatggcttcacctgcgactgcaccatgacttcctatggaggccctgtctgcaatgatcccgggaccacatacatctttgggaaggggggagcgctcatcacctacacgtggccccccaatgacaggcccagcacgaggatggatcgcctggccgtgggcttcagcacccaccagcggagcgctgtgctggtgcgggtggacagcgcctccggccttggagactacctgcagctgcacatcgaccagggcaccgtgggggtgatctttaacgtgggcacggacgacattaccatcgacgagcccaacgccatagtaagcgacggcaaataccacgtggtgcgcttcactcgaagcggcggcaacgccaccctgcaggtggacagctggccggtcaacgagcggtacccggcaggaaactttgataacgagcgcctggcgattgctagacagagaatcccctaccggcttggtcgagtagtagatgagtggctgctcgacaaaggccgccagctgaccatcttcaacagccaggctgccatcaagatcgggggccgggatcagggccgccccttccagggccaggtgtccggcctctactacaatgggctcaaggtgctggcgctggccgccgagagcgaccccaatgtgcggactgagggtcacctgcgcctggtgggggaggggccgtccgtgctgctcagtgcggagaccacggccaccaccctgctggctgacatggccaccaccatcatggagactaccaccaccatggccactaccaccacgcgccggggccgctcccccacactgagggacagcaccacccagaacacagatgacctgctggtggcctctgctgagtgtccaagcgatgatgaggacctggaggagtgtgagcccagtactggaggagagttaatattgcccattatcacggaggactccttagacccccctcccgtggccacccgatcccccttcgtgcccccgccccctaccttctaccccttcctcacgggagtgggcgccacccaagacacgctgcccccgcccgccgcgcgccgcccgccctctgggggcccgtgccaggccgagcgggacgacagcgactgcgaggagcccatcgaggcctcgggcttcgcctccggggaggtctttgactccagcctcccccccacggacgacgaggacttttacaccacctttcccctggtcacggaccgcaccaccctcctgtcaccccgcaaacccgctccccggcccaacctcaggacagatggggccacgggcgcccctggggtgctgtttgccccctccgccccggcccccaacctgccggcgggaaaaatgaaccaccgagacccgcttcagcccttgctggagaacccgcccttggggcccggggcccccacgtcctttgagccgcggaggccccctcccctgcgccccggcgtgacctcagcccccggcttcccccatctgcccacagccaaccccacagggcctggggagcggggcccgccgggcgcagtggaggtgatccgggagtccagcagcaccacgggcatggtggtgggcattgtggcggcggcggcgctctgcatcctcatcctcctctacgccatgtataagtaccgcaatcgtgatgagggctcctaccaggtggaccagagccgaaactacatcagtaactcggcccagagcaatggggcggtggtgaaagagaaggccccggctgcccccaagacgcccagcaaggccaagaagaacaaagacaaggagtattatgtctga

SEQ ID NO: 148901 - DNA, 4060 bp, Homo sapiens
atggcgtccgggagccggtggcggccgacaccgccgccgctgctgttgctgctgctgctggcgctggcggcgcgcgcggacggcctggagttcggcggcggccccgggcagtgggctcgctacgcgcgctgggcgggcgcggcgagcagcggcgagctcagcttcagcctgcgcaccaacgccacgcgcgcgctgctgctctacctggacgacggcggcgactgcgacttcctggagctgctgctggtggacggccgcctgcggctgcgcttcacgctttcgtgcgccgagccggccacgctgcagctggacacgccggtggccgacgaccgctggcacatggtgctgctgacccgcgacgcgcgccgcacggcgctggcggtggacggcgaggcccgcgccgccgaggtgcgctccaagcggcgcgagatgcaggtggccagcgacctgttcgtgggcggcatcccgcccgacgtgcgcctctcggcgcttacgctgagcaccgtcaagtacgagccgcccttccgcggtctcttggccaacctgaagctgggcgagcggccccccgcgctgctgggcagccagggcctgcgcggcgccaccgccgacccgctgtgcgcgcccgcgcgcaacccctgcgccaacggcggcctctgcaccgtgctggcccccggcgaggtgggctgcgactgcagccacacgggcttcggcggcaagttctgcagcgaaggtgagccccggggagcggccgcccggtgcctgggcgcggggagtcagaggcttttgagggagcgtgtgcatgtgcacgtgtgcgctggcaacatgaatgtggcccggcactgctttggggataggtgtcctgtggctgtgtgcctgtggacagccatgggagggcccagcctgcaggcccatgacattagtagggtccttactgttctccgaggggggggccgggagaggaggagccggcgatgtgcaccagccaacaaaagacggggaagctgggacttagagcccagctttgtgaccagcgaaggtcacaaagctggtggtggagccagcactagcgcccaggtcttctttctcacatcacatttcctctccagggagcagtacaagatgttattaggcagcaaggaggagtttgtggcgaccttcaaaggcaatgagttcttctgctacgacctgtcacacaaccccatccagagcagcactgatgagatcacactggccttccgcaccctgcaacgcaacggcctgatgctgcatacaggcaagtcggccgactacgtcaacctgtccctcaagtctggggctgtctggctggtcatcaacctaggctcaggtgccttcgaggcccttgtggaacccgtcaatggcaagttcaacgacaacgcctggcacgacgtccgggtcacccgaaacctgcgccaggtgaccatctcggtggacgggatcctgaccaccacaggctacacgcaggaggattacaccatgctgggctctgatgacttcttctacattgggggcagccccaacacagctgacctgccgggctcgcccgtcagcaacaacttcatgggctgcctcaaggacgtggtctataagaacaatgacttcaaattggaactatcccgcctggcaaaggaaggggaccccaagatgaagctgcagggggacttgtcattccgctgtgaggatgtggctgccctggaccctgtgacctttgagagtcccgaggcctttgtggcgctgccccgctggagcgctaagcgcactggctccatctccctagacttccgcaccaccgagcccaatgggctgctgctcttcagccagggccggcgggctgggggtggagctggcagccacagctctgctcagcgggccgactactttgccatggagctattggacggccacctctatcttctgctggacatgggatctgggggcatcaagctgcgggcatccagccgcaaggtcaatgatggcgagtggtgtcacgtggacttccagagggatgggcgaaaagcgggtctcttctacaccatttcctatattcttccctgccgcttctcctccacccccctcacgtcttcccaattgtcctttctgtcatcggacattggcagaaagagcacagcatttggcatcagtcagacctggattacacctcagctcccctacttgctgcatgaagtgctcctgttagctcaacaccgatctctggagccagagtctggaccaggctccatctcagtgaatagtcgcagcacgccgttcttggccactggagacagcgagattctggacctggagagtgagctgtacctgggcggtctccctgaggggggccgggtggacctgcccctgcccccagaggtgtggacagcagcactccgggcaggctacgtgggctgtgtgcgggacctcttcatagatgggcgtagccgagacctccggggcctggctgaggctcagggggctgtgggcgttgcccccttttgctcccgggagacgctgaagcagtgtgcatctgccccctgtcgcaatgggggcgtctgtcgagaaggctggaaccgcttcatctgtgactgcatcgggaccggctttcttgggcgggtctgtgagagagaggccacggtcctgagctacgatggctccatgtacatgaagatcatgctgcctaacgccatgcacacggaggcagaggatgtgtccctgcgtttcatgtcccagcgggcctacggactcatgatggccaccacttccagggagtctgccgacaccctacgcctggagctggatggggggcagatgaagctcactgtcaacctcggtaaccaccctgccctgtgcttcctgacccctcacctggccttgtctctgacccacacctgcctctgtctggagaagctggtggtggcaccagcaagaggtgccctcagcagagtttggaggcactgtggacacgcaggtggcccctacccagccaccaagccttgggttgggatgggaagagttctgggctccgggccagaagacctggggcctaactttggtatcttttactgttgggacttgcagggcctcacagaccggcagcaacaccaaggccccaggcctgggctggactcactactggggaagagagagaagcctgactgcctgcgcgtcggctgcgcacccagtaaaggccccgaaacgctgtttgcggggcacaagctcaatgacaatgagtggcacacggtgagggtggtccggcgtggcaagagcctgcagctgtctgtggacaacgtgactgtggagggacagatggcaggagcccatatgcggctggagttccacaacattgagacgggcatcatgacggagcggcggtttatctccgtggtgccctccaacttcatcgggcatctgagtgggctcgtgttcaatggccagccctacatggaccagtgcaaggatggtgacatcacctactgtgagctcaatgctcgctttggcctgcgtgccattgtggccgatcccgtcaccttcaagagtcgcagcagctacctggcactcgccacgctccaagcctatgcttccatgcacctcttcttccagttcaagaccacggcccctgatgggcttcttctgttcaactcgggcaacggcaatgacttcattgtcatcgagctggtcaaggggtacatccactacgtgtttgacctggggaatggcccgtccttgatgaaggggaactcagacaaaccagtcaatgacaaccagtggcacaacgtggtggtgtccagggacccaggcaacgtgcacacgctcaagattgactcccgcactgtcacgcagcactccaatggcgcccgaaacctcgatctcaaaggggagttgtacattggcggtctgagcaagaatatgttcagcaacctgcccaagctggtggcctcccgggatggctttcagggctgcctggcctcagtggacctcaacggacgtctcccagacctcatcgccgacgccctgcaccgcattgggcaggtggagaggggctgtgatg

SEQ ID NO: 148902 - DNA, 928 bp, Homo sapiens
atgaagaggccaactagtcagaacaaggaacaattagcttcaggccagctaaacaaccaggcccagaacggcactgtggacacgcaggtggcccctacccagccaccaagccttgggttgggatgggaagagttctgggctccgggccagaagacctggggcctaactttggtatcttttactgttgggacttgcagggcctcacagaccggcagcaacaccaaggccccaggcctgggctggactcactactggggaagagagagaagcctgggcagggacctgacttccagccttgcccgcagtttctctctattgatctcctactatgggctggtcttcgacctgcagagcctgggccgtgacatcttcctcctccaggccctcttcggggccgtggacttcctgggccgggccaccactgccctcttgctcagtttccttggccgccgcaccatccaggcgggttcccaggccatggccggcctcgccattctagccaacatgctggtgccgcaagagcgtggaggcgagttgggcgacttcaagggcctggcatggcagaggcccaggcaggccgtggccgaggtggacagcgtggccgtctgctgtggctgaaggcagcttccacagctcactcctctttctccctgccctggataagattcccccaccttaccccgggcctaccaggagccttttgcagatggccattgcccaaccaataacgagacggttcccctccctttccctgccagggttcatgtctttacaccttcactcagccacgccaaccagagactggggttccaatcttcaccccaccacatacagagccctcatcttgttgaaatgaggaaaaagcattttctgttttcccaccagggcccccaagtgtggtctttttctttcctcctaatgttgaaga

SEQ ID NO: 148903 - DNA, 502 bp, Homo sapiens
ttttttttttttttttttgagattttgtttgcaatttttaattaaagcaatctgggcaaactttttttttttttttttctcttcaacattaggaggaaagaaaaagaccacacttgggggcctggtgggaaaacagaaaatgctttttctcatttcaaccagatttcaaagcagcagagtgcagagagacagtagccaggccctccctcagtattcctcaggattgcttgagtgtaagtctcgcagatacgaatcaattatgtttggaggtacgccttgcaagaggagtctgcagaaggagagcccacctttcacctccagtttgcattcaatctccactgtcccaaggtcattgactgctttgcagcaagtgaagtgcctccatcataggggctgggcttgcgaatttccagggtacagactccctggttgctgaacatcctgtatcttggatcatccacaatagcaactttgtttttcatccaggttattttaggcttag

SEQ ID NO: 148904 - DNA, 3870 bp, Homo sapiens
tggccccccatgagaattttttttccaatttttaattaagcaatctgggccaaactttttttttttttttttctcttcaaacattaggagggaaagaaaaagaccacacttgggggcctggtgggaaaacagaaaatgctttttctcatttcaaccagatttcaagcagccagagtgcagcagagcacagtagccaggccctccctcagtattcctcaggattgcttgagtgtaagtctcgcagatacgaatcaattatgtttggaggtacgccttgcaagaggagtctgcagcaaggagagcccaccttagatgatattatacattccaaaaatccttattgtgcaatgcactttcacctcccagtttgcattcaatctcccactggtcccaagggtcatttgactgcctttgcagcagtaaagtgcctcccatcatagggggctgggctttgcgaatttccaggggtacagactcccctgggttgctgaacatcctggtatcctggaatcatccacaatagcaactttggtttttcatccaggttaattttaggctggaggatttcctctcacactggcagtttagggtggccatgtaaccgctatggcataggcggttaaccaaaggctgagtaaacatgggtgcctctgagaaatcaaagtcttcatacactggatttttgtagattttaccatccctggcgatcactgcactctctttagtcatggtggcatcctcactgaggccacacatgttttcagaaaagacccggaagtaatattcattccctatgaccaattcagtatgtggcactggttcgatgatatgctcaatgacacgtaaccattccatgctcttcttgtcagccttctgaatggtatagcctgtgatagcagcatttccatcatcctttggtggagtccatgtgagagcgacatttctcccccagacatcctcaatcttcacaatttggggtggacctggacggtcaatgattctgatgtcaattgatgcggtctccacgaatttgtccactttgacttgcagatcatatttcccagagtggctcctctctgcttttctaataaatatgattgtatcagtctcagagttgcgaatgtttatttgattcttatcaatttctgcaccatccttcttccaagttaattctggtcttggttttccctggaaagggataacaagaatgacacggtctcctactcggcggatatatgtttgcttcaggtgcttgggactgtgtatctttggaggttctatgatttccttcacgagaatgggctgagaatagtacttgggctcgctggcaccagctgcattaacagccttcacacgcacaaagatctttgcatctgttggcagacctgtgatggtgaacttcgtcttgtcaatcagatctttgtttgcaactatccagtcctcagctggcagatcataggcagcctccccattttcatcagactgttttgctgatgtacttccttcaaagcaatactctagcacatagccatctaaacctgctgcaccaatgtggtctggggggcgccacctcatcgtgacagtcgtgtcagtgacagagtccacagtcagaagagtaggagggcttgttacggccaaaggaacaaaaggcctggagggcatactgggcttggagatgccaatggcattgactgcaaagatgcggacctcataggccacaccttcaatcatcttcttgggctcaaaagttgtttctttgcagagatcaaaattcagcctcatccacctggagctttgtttcttcttcctctcaataaaatatcctaggattggagagcctccgtcgtaggcaggaggctcccagttcatgatacaccagtcatctcccacctctgtcacagtcggtgccactggaggatcagggaagtccacaactttaaccttgatgcttgcatgtgcctctccagcttcgtttttcagattgatgtggtaaacaccagagtcatctctttcagctatatcaatgaccagagtgctgctatcagggtaagattctgttcttatccggccactgccttccataatagccttatctccccggctccacatggctttaggaggtggttctccgctgatggggatctcaagacgaagcttgtttcctgcaatcactgtcactgtgttgtcagcatcaagaccatccaggatgatcttaggaggatcaataacatgaactttggcaggcagagtaacattgtaggcatcaggtgcaaatacataatcaccttcatcttcagtgagggcatgatctatcactaacttgtggatccttcccttgtgaaccacctttagacggtcactctcctgaacaggtaggccatttttagtccattttcctggtatgttttcagagatttcacacttcaggcagatttcttttccaagatttacagtctgatcagtcagaggtgtcaaaatcttcagaggtttcaagtcaacactaagtttagcagatgattgtcctcctgttgtcattactgaataatctgcagcatcagcctttgttgctccctctatgatcaagatgtgttttttaccctcaactctaattcggtatcttgtttggaccaggataatctcttcaccattcttaaaccattttacttgggcatcatcttcagacacctcacattctaattccactctctccccacaataatcagttgtatcttccagctgtttggtcaccataattggaggctctcttactaagagctcagtagaacatttctcatcaccggctgtcacataatactctgaatcatctgtcatctgacagttatcgatattcaggatgctctggcatcttgtgtcttcaaagatgtatttggtactgggtcgaagttcttgaccatttttattccatttcacctccaactttggatctgccagctccacaacaaacctcactctgcctcctttgtcaacctgatatacaggatcaagaatttttgcaaaagcggcgctcttcttctcctctctgatgctgcgcttgagtcgcttcagcatgccgctgcaggtcggtgattcatactggaaggcgatcttctcgtactcactgggtttggtgttcttcagcaactcccatacgtccacctggggttcttcctcctgctgcttcacctccctacgtttcaggagaccactaaagtcaagttctcctgcatcctcttgaccttctccacttctcttgaaagcagatctgatgtcaatgtttggagtagtcccagtagattcgtgcacttcaagatcaaatgaacagctgtcaaacttatccttataggtgacctcgcatctgtaatttcctgcaaagttatctttggccttgatgatctgcatctcaaatgtgtacacccgactgtgcctctcaaaggtttccttcagctgaaggtgcttcccggctttgctggccaggtccatccatttccttgaaccattgatagtgggtttctcagaaagatcttcagccttgactttggctatgaaggtgatatcttcaccaactttcactgttcctccttgaggtttttcaatgaacaagatggacagctgggagttggcattctgcttggcttgttcctccccaggaggagtttcgacaagggtccagtcttttgctggtgtagttccggcctccttctctttacttggttcttccgggggtggggctggggctggcacttcattttcctctttcttagtgggttctggcatggccacaataagatgttattctttaaagagtctccttccctccacgactagttgacagaaaccccacaggcaggagagagatggtgcggaattcac

SEQ ID NO: 148905 - DNA, 1901 bp, Homo sapiens
atggaggcgccggccgagctactggccgcgctgcctgcgctggccaccgcgctggcccttctgctcgcctggctactggtgcggcgtggggcggccgcgagcccggagcctgcccgcgcgcccccggaacccgcgcccccggccgaggccaccggggccccggcgccgtcccgcccctgcgcccccgagccggcggcctcgcccgcggggccggaggagcctggagagcccgcggggctgggggagctcggggagcctgcgggaccgggggagcccgaagggccaggggatcccgcggcggcgccagcggaggcggaggagcaggcggtggaggcgaggcaggtacgcaccggggccctcgcggccccctccccacccccggggctccggctgccgctgccgttccccgccgagccagggagcggggccgcggcctccagcccaggctgcccccaggaagcgcagaacccgcggcccgcaggaaatgcaggtaagctgggcctggatggagtgaagatgcaggataaagccctcctggagcaccagtgtgggctctggaagctacagagaccccagccttcccagaatgacccaggagcaggtgaacttccccatcatctctcctgcctttgtgatggcagtgtggtcctttttgatggcagtgtggtcctttttgatggcagtgtggtcctttttgatggcagtgtggtcctttgtgatggcagtgtgggcctctgtgacggcagcgtgggcctctgtgacggcagcgtgggcctctgtgatggcagagtgggcctctgtgatggcagcgtggtcctttgtgatggcagcgtgggcctctgtgacggcagcgtgggcctctgtgacggcagcgtgggcctctgtgatggcagagtgggcctctgtgacggcagagtgggcctttgtgatggcagcgtgggcctctgtgatggcagcgtgggcctctgtgacggcagcgtgggcctctgtgacggcagtgtggtcctttgtgatggcagcgtgggcctttgtgatggcagcgtgggcctttgtgatggcagtgtggtcctctgtgatggcagtgtggtcctttgtgatagcagagtgggccttcgtgatggcagtgtggtcctctgtgatggcagtgtgggcctttgtgatggcagtgtggaaatgatcctggtcgcacccaccatggcacagctgcctgatggtggggaggactcagaccatgagaccctggagagattgcctttggctggccgcaccttcacggattcattcaacgctgagctgaaggccaggtgtgagccactgtgcctggcccagaatctaaatgtgtaccagcctctctgtgctcaggagggcttgggcacgtcagctgatactgggtcctttggggatacggatctgccctggctcatggactcctcgccctggagtgcaattatttgtttgtctttcctactggaccacgagctcctctgtgccaagggcactgaccctgtccttgtcttgcaggaagaggagcaggacttggatggtgagaaggggccatcatcggaagggcctgaggaggaggacggagaaggcttctccttcaaatacagccccgggaagctgaggggaaaccagtacaagaagatgatgaccaaagaggagctggaggaggagcagagagttcagaaggaacagctggctgccatcttcaagctcatgaaagacaacaaggagacgtttggcgagatgtccgacggcgacgtgcaggagcagctccggctctacgacatgtagactgcgcccacgggatgcacagcggccatgcctgatgctgtccccacccttgccccatgcccttgttctttccagacttctgtaggcctaattttcccttataaaca

SEQ ID NO: 148906 - DNA, 1851 bp, Homo sapiens
  misc_feature (1)...(1851): n = a,t,c or g
gcggccgcgagcccggagcctgcccgcgcgcccccggaacccgcgcccccggccgaggccaccggggcccgcggcgccgtcccgcccctgcgcccccgagccggcggcctcgcccgcggggccggaggagcctggagagcccgcggggctgggggagctcggggagcctgcgggaccgggggagcccgaagggccaggggatcccgcggcggcgccagcggaggcggaggagcaggcggtggaggcgaggcaggaagaggagcaggacttggatggtgagaaggggccatcatcggaagggcctgaggaggaggacggagaaggcttctccttcaaatacagccccgggaagctgaggggaaaccagtacaagaagatgatgaccaaagaggagctggacgaggattcttataactgaacaataacgaaattatccttagcgtactcctaaaggcttttccttttggcatcttaaaagcttgagagatacaacggaaaccccagagaggagtctgggcaggctcccagggtgcatgctgcctccataaatctgctgagctctagaccctcaatcacgacttgtcccttggctagcaggatcctgggaacacctttggccctgccctgtgtagagaagtgcatgtctgtacctgtgggtcactttgttaagctgaatagttttaagaggtacagctcagaccctggactgggatttttcttaccactcaaacttgctatccacacaccctggcacacctttagattaaaaagaacattttaaaagcagagtttcactttcactccagttttcccctttttttggccctcactggaagccaaaccacagaaggactttggagggaattgaggagacaaattgaggtaggagcttcacctgtgctcaccagcttccgtcagggtgggtcagccgacccctttccctggggaaccccacttctctctgtggctggcttgggttgtcgggggtgagatgccatattggattacagggcagcaaagaaccagtaccagggaatttacttggaccatttccccttatttttttcatcttaggagggaatctcgggtttcagccctttcattggttaaggacacctttttcactgaggttcttaccagcttcagccaaatctccactctggctatagcagaaggcaataatgtttggctttaaaaagatttcttgacctatggcccttttcttaggaaagttttgataggattggttagggaactttcaggntccatccagatccagtcttcaaattggggtttcttgggaattttatattttggacaatattttattactattacccaaacttcattttggcagtttcttaggggttgttgggttaaaacatttttttttaaaggcagtaagtttttaggaaaatggttttcaatttaaatggaaaggctggggggaatgtccaggcattcaacccccaatgggcatggcattccccagtgggcccttctcatctggggcctgggaacccttgggttcaagggcttagggggagaacagggccacatgggcaacagcccacacagttcattgcctttcaacacaggagccacgttgttccccaaacaggcaatagttcatggcccttgttccagggttggggttctaattggatacaataggtcgttgactccctcctagtaggagctatctagggtttgtctgggaagttttccgaccctggcttataggcaccacacctcatggtactcctcatgggcttggatctctgttatttcagccttttgtttcagtccaataaactttgagtagatgatctcaaaaaaaaaaaaaaaaaa

SEQ ID NO: 148907 - DNA, 15972 bp, Homo sapiens
  misc_feature (1)...(15972): n = a,t,c or g
ttataacataaaatcctcttctaatccatgttgacccaagtcctggctgtctgagggcagattcctgtcaagagacctaaggttgtcatggaaagcatcactttcgtctactagttggtaatcctgttccatttccgttaggaagccactcccagatcctgatccagagccggagccggagccgaagcctgatccagagtagtcctcagaaagtgggaagatacgattcaagtcctggattctcgtctttctgaagtatgaaagaaaaatgggaaaaaaaccagtggagtttgatatgtgggaaagataattataatagtttttttaatataaggagataaatacagccatctagttgctcaaattaagagatttaaaagcttcccaattattcaatgttttaaaatcaacaaaaaaacaggtcaaatgttcctatgtgtttgcctatacttattgcacctatcaacttcacatctacctattgcagacttgcataaacagtgttaattttgttatcactagcatatacattctatatttgaaatttacttaagaaatcattttaatttttatttttggaggcagagtcttgctctgttgcccaggctggagtgcagtggtgccatctcggctcactgcaacctccacctcccaggttcaagtgattctcctgcctcagcctcccgagtagctgggacaacaggggtgcgccaccatgcctggctaatttttgtatttttagtagagatggagtttcaccatattggccaggctgatctcaaactcctgaccttgtgaaccacccacctcagcctcccaaagtgctgggattacaggtgtgagccactgcacccggcccaagaaatcatttttaaaagaagtcctcttggccgggtgtggtggctcatgtctgtaatccaagcactttgggaggccaaggtgggtgatcacttgaggtcaggagttcgaaaccagcctgaccaacatagtgaaacccggtctctacttaaaatacaaaaattagccaagtgtggtggtgcatgcctgtaatcccagctactcggaaggctgaggtgagagaatcgcttgaacccaggaggcggaggttgcagtgagccgagatcgcgccactgcactccagcctgggttacaagagcaaaactccataccctccaccaaaaaaaagaaaggacaaacaactaacaactaagtcagcccaaacagatgacattttttcctaaattaaaatttccataaaagttctaacaatttacagggcttcaacaaagctcacttttgagaaattctttgtaaaaagctaagctttatatttaccagcatataaacattcaatttcctatcaaaaaatgaccctgcctccaacttgcactcattcagctgaagagtgctgaaaggtaaggctgccttctgggttgagtgtgatgattagaaattcaaagagcacaaaatggccagagcaatgacgacagccctcggtgacagaacagggcaacaaagcatcagagacaaaagctgagtgtcacagcctacaagtcatttcctccatgaaaataataaaccaccagcatacaaccaattagagttttaattcatgtacgcattcaataaatatttgttgaatatctggtccttgttttgagggcctgggatagaacagaggcagatcgatgaagccccttctcaagaagtttttattttagtggggaagacagacaatgaaaagtgaataaataaatcaggaaaatcataggtggcacagagaaatgaaattgaccaatgtaatagggagtgaccaggtggctactttagcctggggtgtcggagctagaatcacagatttggtagttaaacccatgcaaccgatggaggtcgtcgagagaaagcacgtagatagagaagggggcccaggccagagccagggtcacaccaacatgttaaatactgagcagaggaaaaagcacaaccagagaagtaggaagaaacaggataaggcagggcatggaagcctcaagaaaaaagcatttcaaggaaggagtggtcaaccatttttttttttacagaaagggcctccttctgttgtgcaggctggagtgcagtggcgtgatcatggctcactgcagcctcaccctcccggactcaagccatcctcccacctcagcttcctttgtagctgggaccacaagcatgagtcacaacgcccggctaatttttctattttttgtagatagggtctcactatgttgcccaggcaggctggtcctgaactcctgggctcaagtgatcctcctgccttggcctcccgaagtgctgggattacatgcatggcccagttagctgtttttgaaggcaattaaggatcaagtaagctgaaaatagagaagtaatcagtgactttgtcaaccagggtggagtgtaggaacagaagtccagccacagagggggtgaggaaaggagggggcaggcatgggtggccctttcaggaggtgttattgtgaagaggagcagagaagggcaaccactggagaagacgcagagtcaaaggagagatgttgcctaaacataggagatactaaagtccacccctatactgatgggaagaagacactgagttcagagagataactgcagaatggaagtcctggagaagatgcatgggaaaaggataccagccacaaagagaggtggccttggaagctgcaacagccagggtccaatcaggaaacttctccagatatttaacacagagggaattcctcatacaggtgatggaggagaagtgaagctaaatgggggatagcgaggtaacccagagattagcaatagcaagaaaatatttccttcggccaggcacagtggctcatgcctgtaatcccagcactttgggaggacgaggcaggcagatcatttggggtcagaagttcaagaccagcctggtcaacatggcaaaaccccgtctctaccaaaaatacaaaaattagctgggcatagtggcacaccctggaggctgaggcaggagaatcacttgaacccgggaggcagaggtggcagtgagctgagatcgcaccactgcactccagcctgggcaacaagagtgagactctgtaaaaaaaaaaaaggaaagaaagaaagaaagaaaaaaaatacttccctccttgggctacagcgatagtggaaggaggttgtctatttcctgagcccagggactagaggcatctggtgggagctgaggccatgggcaaaacagagtcctgcccaaggtgccaccccaggcagggagtaaggagaagaaacatacctctctcccttcctcccaagctctcagtctcccgtccttgcctcccattggccaaagtcagccacagccctgggagcctgagaaatgcagaccccaggggtcagttccaccgccacccccaccccacagccaatacagagcagggccagggaaggacaggaggatctgagggcaaaagggtttgggatcagcacagaagcaaggaccattctttcgcaatgacgggaaagaaagcacagggtcagggtgagaagcagttactggctttggggaaggaaaatagagatttgagaagaggaggaatggtgtgcaagagttcttttggagaatttgagctattctcttaacattttattttattttttaattttagttttaattgtatttatttattttaaatgtgtttatttattttgagacaaggttttagtctgtcaccctggctggagtgcagtgccacaccatggctcacttcagccttgacctctcaggatcaagcaatcctcccatctcagcctttcgagtagctggaccacaggcatgcatggctagtttttgtgtctttctatagagacgaggtttctccatgcttggctaatttttgtatttttctgtagagacaggatttctccatgttacccaggcaggtctcaaagcaatctgcctgccttggcctcccagtctgcctgcctcggcctctcaatagctgggattacaggcgtgccaccatgcccagctaatttttgtatttttagtagaaatgggtttccgccatgttggccaggctgatcttgaactcctgacctcaagctatccgcctcggcctcccaaagtgttgggattacaggcgtgaggcacaggcgccgggccactaatttttagagatggggtcttgccgtgttgcccaggctggtctcaaattcttggcctcaagtgattctcccacctcagtctcccaaactggggggattacaggcatgagccactgcagcctaacattttagatttaaatgaattactattgaaaccaatgatttaaagtaatgaaggatgctgtaatattacattcaaacttaatgctgaggctttaaagtaagaatgcaagagtaggactacaaagttgcatattgaagattgtaatgatgtcatcactaatgcagtgaataccagtgatggagaaagtcaccagtgatggagaaagtcaccagcgctgggaatggtggctcatgactgtaattccggcactttgggaggctgaggtgggaggactgcttgagcttaggagtacatgaccagcctgggaaatgtacagagacccctgtctctacaaaaaaaaatttttttaattagatgggcatggtgctgtgtgcctgtggtcccgctacttgggaggctgaggcaggaagatcacttgaggagttgcaggctgcagtgagctatgatcacaccactgcactccatcctgggtgacagaggagaccctgtctcaaaaaaaaaaaaaaaacaaaagagaaagttgccaggatcccaaagtgatgtgaaatgtacctggtttggagcatgatgattaaccctggctttgaggagagtgattttctaggtttgagcctggagattaaaacttttatgataatccttttcttaatatgtatattttgctacatcctacatagctttagtattcattgaattaatggtttctaatataattcaattttttgttacttatgaatttatatcaggtcttttttgcaagtttaaagcaagttttatgtgatcaaaagaagagatttgatttttgttttacaagtcttggctaattattcttcctttccctaattttttttttctttttttgagacagagtcttactctgttgcctaggctggagtgcaatggcataaatagggttcactgcaggctcaacataggctcaagagattctcctacctcagcctcccgagtagctgggaccacaggtgcacatcactatgcctagctaatttttgtattttttgtagagacagggtcttgctgtatggcccaggctggtcccaaacctcctgggctcaagggatcctcccacctcagcctcccaaggtgctgggattacaggcatgagcctctgcacctggccatttttaaaaataattaccaactacttgaagaacatttttttaatataaaaaatgtatttgaaatagagatagggtctcactatgttgcccaggctggcctcaaactcctgggctcaaacaatcctcccgcctcggcctcccaaagtgctgggattacaggcatgagccaccacacctggcagaagaacattttaatcacctcctccaaaaaaaaccctcatacccattagcagtcactccttattcctccctttccccagcccctgtaacccactaatctactttctgcctctagggatttgcctattctggacatttcatctaaatggaatcatacaatatgtggcttttggtgtctggccttccttcgctctgcataatgtttccaaggtttatctatgttgtagcatgtatcagtacttcattctttttatgacccaataatattcctttgtatgcttataccacattttgcttatccattcagttaattattggatttttatatatagtgtgttctgtttacacaaataaaacaatgttcaatcattttcaatacctgttgatgaaaagtcctcaatgctcctctctaccatccacaaaaaaaatttcaaaaacataggtgaatcatgtatactcgcacatgtcatatgccagtatatacagtacacttttaccatgtactgcagagtaagagccaaactaccaaagcaagagctcgaagcaaaacactctggacagcttgaagaaaaacactcccacatctgtgccaagaggttgtgaaattacagacactttaaaattagagaaaaggccgggtacagtggctcatgcttgtaatcccaacactttgggaggccaaggtgggtggatcacctgaggtcaggagtttgagaccagcctggccaagatgatgaaagcccgtctctactaataatacaaaaaattaggccaggcgcagtggctcacgcctgtaatcccagcattttgggaggtcaaggcgggcggatcactaggtcaggagatcgagaccatcctggctaataaggtgaaaccccgtctctactaaaaatacaaaaaaattagccgggcgtggtggcgggtgcctgtagtcccagctactcgggaggctgaggcgggagaatggcgtgaatccaggaggtggagcttgcagtgagccgagattgcgccactgcactccagcctgagcaacagagtgagactccgtctcaaaaaaaaaaaaaaaaaaaaattagctgggcatggtggcaggcgcctgaaatcccagctgctccagaggctgaagcaggagaatcgcttgaacccaggaggcggaggttgcagtgagctaagattgcgccattgcactccagcctgggcaagaaaagtgaaactccgtctcaaataaataagtaattaattaattaattagagaaaagtccacttacggaaaaaggtcagtcctcagacgggggatcttgttggattcacctggaagtagttcgaacattggtcctttttcttcaaggcagtttgcagaattactgtctggattgcagcgcacccattggtacctggctctctgcgtaggataacctgcccgaggaacccacattgttactaagtatctactagagagcttctaatcactctgtcctaagaagtttttatttttatttttttttcgagacagggtctcagtcggctgcccaagctggagtgcagtactgtgatcatagctcactgcaaccttgaactcctgggctcaagccattctcccaccccagcctcttgagtagctgggaatacaggggcaccacaacgcccagctagttttgttttgtttttgtttgtttgtttgttttttggagagatgggggtctcactatgtgcccaggctggtctcaaacacctgggctcaagcaatcctcctgccttggcctcccagtgtgctgagattacaggaatgagcaactgcactccacccgccctaagaaggttttaactaaatagattctaaatttggtaaaaggcaaaatgtagacagattttgtgcccattcatataacagcagcacccactatgtgccaacattttatataaattgtccttcttacaacactccaaaaagtagcagtttaaagttagaataggctttggaatcagctgcctggagtgaagtcccaggtctgctgactagttatggaaccttaacttctctgaaccctcactgtaatatgaagatactaatagtgtcataagcctatcacaaaaattaaatgagaaaatacacttagagaatttaacacagtgccaggcacacagtaagcacttgataatattaactgttgttacttttgtactattatctcaattttacacaaaagaaaattgcagccacacaggcgctaggattccaacccacatctgaccccaaagcccacatcttttcatagagatgagacaaatcaggttcagaaaggggaaggaacacactgtggagtacccgtggtatcacagaattctagttcttgtgttttagggccatacagtatccttaggaatgaaaagtagataacaatttgtcctgtgtctttgcactcagatttcacaagaacaagtctcctctattcacagagcaccaggcagcttggaatatctgagtctcagcttcttctgaatttcatttctatggaaaaggctccaaatctgatattatgaggttatataggagatttatttatgtatttattttattttattttattttattttattgagagagagtcttgctgtgtcgcccaggctggagtgcactgtcacgatctcggctcatggcaacctccacctcccgggttcaagcaattttctgcctcaccctctggagtaactgggattacaggcactcaccaccacgcccagctaatttttagtatttttagtagagatggggttttgccatgttgcccaagctggtctcaaactcctgagctcaggcaatccacccaccttggcctctgaaaatgtgaggattacaggcgtgagccaccatgcccggcctatataggaggttctttgttagctaatgaaataaaatcttccttcctcagtttagcaaagacaaaggcctggtggtgagaaatacttcaccgcccttcaaaaagttcatctcctccccactccaagcatatactttattctaatgagtgcaactaataattacctagcaacaaggagcatgtctaggattcttgaaagtcaggaagggtagttttaaagctcaccacaaaataatggaaaacattcagataaattacaaggcatcaactcataagagaatactaaccaaatgaagaaaagtactttttttttttttttttgagatgaagtctcgctctgttgccctggctgggatgcagtggcacaatctcggctcactgcaacctctgcctcccaggttcaagcgattctcctgcctcagcctcccgagtagctgggatgacaggtgcccacaatcatatccagctaatttttgtatttttagtagggatggggtttcaccatgttggccaggctggtctcgaactcctgacctcaggtgatccacccgcctcagtctcccaaagtgctgggattacaggtgtgagccaccacacccggccgaaagtactttttatggaaaagacaatgtggcattgtagaaaaacctatacttaaaaatgagtgagagggtgagaggcgggtaggcaaaaacttttttttttaataaaataaaaataaaaattaggttgggtgtggtagctcatgcctgaaatcccagcactttgggagactgaggtgggaggatcacttgagcccaggagttcaatacaggctgggcaacatagagagactcccatttctaccaaaaaagagaaaaaagattttaaaaattagctggatgtggtagcacacatctgcagtcccagctacttaggaggctgaggcaggaagattgcttgagactgggaggtcacagtgagccaagattgcacggctgcacttcagcctgggtgacacagcgagactgtctcagaagaaaaaagtttatttacaaaattaaaaataaataaaaataactgagaaaatcagaatacctctttgcatgaataatagtttcaattatataaacagacatggggggaaaaatggaaggaaatacacaaaaataactggaggtagaatctttggtgattttttttctcattttgttttctaaattgctataataaacaatattcctctaaaaacataaacattaaacactttaatatagaaaacagtaaatattctcccattggattttctttcttttctttgtaactatatattattctatcataatctttcctatgattcctgagtatagcttacaatgtctggtctgggagagctgtttgtccaaaatgagctaactctgccactgcctggaggctggggataaggcaggcaaaatgacctttcaatgtctgccccttactggctgtgtgatcttggccaacttaaacttcctgtgcctcaattttctcatctgtaggatggggcagtaatagagttaataaggagatacaaatgttaggttctcagagtagtacctagcacatagtcagagctcttcattgctagttcctgtcatgaaaaggaggaggacaacaatgacctatgatctccgagagtgaacatcttataaatttaaattcaaattcccattctaccatttagtatctctaggagtctcaatttatggactttctttcttttcttttttatttttccttattttgagatagagtctggctctgttgcccaggctggagtgctgtggcacatctcagctcactgcaccctccgccacctgggtttaagctattctcctgcctcagcctcccgactagctggaattacaggcacgtgccaccatgcccggctaattttttgtagttttaatagagacggggttagccaggaaggtctcgatctcctgacctcgtgatcccctcgccttggcctcccaaagtngctgagattataggcgtgagccaccgcgcccggcctggtttcactctttctcttttgattctttcctgaggcagcattagtttagcatctaattgctacttagacgtctcttcctgtaggtgaaataaaaatccagcatcttctccagcagagggcggtgtcttcacaccttgtactgtctagaccaactttgtccaatagaaacacaaagcaaaccacatagggagttttaaatgttccagcggccatatttttaaaagtaaaaagaaacaggtgaaattaattttatttaacctaacatattcaaatattgtcctttaacatatcatcaatgtaaaagttattactgggatattttgcattcttttcttcatactaagggttccaaatcttgtatattttgcattcacagcctgtcccaatttgccttggccacatttcaagtgttcagtagccacaagtgacttgtggctaccgtactggacagagcaggcctaggcagtctcttctgcaagccgctgatgcactgagtatcaagctgagaaaatgtttgctcacacaggaagctaaacagaaaaataatgcttaatgagaaagcatccaggtgaaagaccacatcttttcaccagcatgacaaatacaactgtagcatattagtaaaaaatatttctagaatacaaaattcccccagagttcagaatctcagctaattaaaattcgtaacgaaggctttcttttgggggatgatgaaaatgttctagaagcaattatagtgatggttgcatgactctgtgaatatactaaaaaacattgaacactttttttttttttttttttggagacagagtcttgctccgtcatccaggctggagtgcagtggtgcaatctcagctcactgcaacctccacctcccaggttcaagtgattctcctgcctcagcctcccaagtagctggaattacaggtgcacaccaccatgcccagttaatttttgtatttttagtagagacaagttctcaccatgttggccaggctagtctcaaactcttgacctcaagtgatccacttgccttggcctcccaaaatgctgggattacaggcatgagccaccacacctggcctaatcactgaattgaacacttttaatgggtgaactgtatggtatgtgaacactatctcaacaaagctattttaaaattttataaagaaatcaaaagtagaagggatcccactccaaaagcctatctaatttggggccgatgatgttaaatgtactttaaaataaagaacaagttacagacactaaattcttgacatagctattcaagggtgttggcaggatgtgaaaatttacagttccagcccctgaggttgtgagagtatcttgactctatcttgcttgagataaatgtcttgtgattatagtggctatgctcatggatagaaatgttatcttcctaaaaggtccacttatgggatttgttggttaattgtgtagtggattccaagggaaagaatggtttttatttgaatcctatccctcactgcccacctcccccaccaccctgagtcctgctttaccaaaatactttctatgagtaaatgttaccaaagcaaacaactttctccaatagtccatacctttttatattatggtactaacttttccctcaacataatcacaatatactaatttcttttttttttcttttcttttttcttttttttttttttttttttgagacagagtctcagtctatcgcccaggctggagtgcagtggcatgatcttggctcactgcaacctccatctccctggttcaagtgattctcctgcctcagcctctcgagtagctgggattacaggtgcatgccactatgcctggctaatttttgtatttttagtagagatgggggtttcaccatgttggccaggctggtcttgaactcctgacctcaagtgatccacactcctcggtctcccaaagtgctaagactacagacgtgagccactgtaccgagcctaatttcctattcttaatggaaacttactgcaggcatgttagagaaacttaagcagcaactaccatgaaggggaaaagaagaccatttgatttattcaaaatggtagcattatctaagccggagttacttcctcctggtctatcaattccacaagatggataagcttcccccactcttgcatggtttgacaagctataaaaagctcctaagtttactttcaatttctccctcaactcagtgggaaatgttatagcaagggctacggtcaaaggattttttgtttgtttgtttaaataaagaaaacctctgatccatgagctgcagtagaaagttaattctggccttgaaatcagacgaccagttcagccgttaattagttgtaatgggtcttgggcaagactcacaaattttttgcaagaggttaatgtatagagcaaatgagatgagaaatgtcagatccagttttctcctctataattggtgctaattcctcatcacagggaatgtgatgatgattaccagagaatggatgtgaaatcactttacaaagagcagcacaaggagtggatcagtatcattcctgtgagctaggagacagtatacagtggacacatggcgggcctggcctccttggctgcacctgttcatggatattccattttttttctttatgggtgtcattggaaaagagaggcaataaaagtggaagattcacaggcctcatcaaatcccctggagccctacattaaatagattagtcatctgtgctctccagagttacacatccccaaatttccatttctttgtgcttggtaaacacaatcttaccccacatctttacttgggtttgacttataataaaaatataccaccaccaaattcatatgttccagttctaacccacagaatctcacaatgtgaaattgttcagaaatagggtcattgcagatataggtagttaagatgaggccattagggtggccctgatccaatgcctggtgaccctctaagaagatggtattaagacacggatgcatggaggaaaggccatgtgcagacaagggagaaggcgccatctataagccaaggagagaggcctcagaatgcgatcgaccctgccagcaccttgatcttggactcccatctccagaactgtcaggaaatacatttctgttatttaagccactcagtccgtggtactttgttatggcaacccgagcaaaccactatagtgacctgaaatggttttgaatatgctcagtaaaagcaagccaaaagcctagttgatttcatctgccaaaccaacgggctagataaacacttttataagacaggaagaatgttgtcgaatcatatctggcattgcgtggaggtgtgaggaaatggtgtcatgactcttcacatcacagccttgtgccgcagtcactcacatgtgcagccagtgggggacatctatttccctgcatgctcagatgtgggcacaagcccttgagcccgatactgagagccttttttcggaaacaccctagtttgtcagtttctcccttgtctctttctatggtttccttttctaacaaagagctaaacctacgaggtcatgacataaatgctagtattctatacaatttcatgatgaattattttctttccttctctttctttctttcctttctttctctctctctctctttctttctttctgacagagtcttgcactgtcacctaggctgtagtacagtggtgcaatctcagctcactgcaacctccacctcccaggttcaagcaattctcctgcctcagcctcctgagtagctgggatgacaggtgtgtgccaccatgcccggctaatttttttgtatttttggtagagacgggatttcactatgttggccaggctggtctcaaactcctgacctcatgatctgcctaccttggcctctcaaagtgctgggattacaggcgtgagccaccatgcccggccttcttcatttctttctaatgaatattatacaaggaacgtttttgttttcattctagttttccttaatgaatcttagtgggaaattcatgtttctgggaaattttgacaacataaagacttacatatctctggttggggtatgcccagcaccatctggccattcaagactgtactaaagtatgggcctcattactctcgatcttgtcagaccacttggctattcgggaattatttcatcaagctgaagatattccctaaaagatcccagtgaagcctgttccctacaattgacaatgttttatattttaaaaatacataaattaataacgttccagaaacattacttgctcttttttcagcattagcataactagaagaaaatgattttataaatttccaacataaaatgaatgtctctgcgatcatctgtaagatttcatctccaccggaagtaagatcatgacaaccaaaagtcgctttgacgaaacaaatctaggacatgtgtgtcattgtgactcaacatttcccttaccatttggcggaacctagtgtttttctactataggttcagccatctctctatcaagccatgacctccgtcttatttagacatgattccttatttgccaaagaataacaaattgtatttttcttacaagcctatcattttcattgtcttagtcattacaggttttaagttgtttcagtctgactaaacaacactaaatggtagataaacctaggaagatatttccgaatatgatgcttctctgagcaagagcacaaataccaaattatttggccttctctttaaaatctgagaggttttacatgaactatgtctaaccataattgagttttcagtaagaaccaagtttatctttaaaaaaaaaaaaaagaaaagaaaatacacacagtcagattcaccccaattggaatataacgtctcccagtgttaaaataacaatgacaccgtcacagcgcactaaaacttggggctgatgtagacacttaggggtaggcagacaccccccaacagtcaaaggtgccatctcctccatgcaacaggcacaggagtcattttctagattccttttttgagcttttaaaatttataaacctcacattttcatcccaaaatagcacatttcaatcattgtaagagtttacaagactgcacacgccacagagtttaatttttcttggtaccaaacttaacagaactcatattaaagggttcagcgaccccaaatccttcttctttgcctcctttctcacaatattatacattctatgccttaaaatgaatataatgacttgcatggaccacagggcttacagagaagatggctggggaacaagactcctgagtcttaccttgaactgaggattccagaaccaggatgagggcaagagccaggacaagccgactgcatttgagtagcttctgcatcat

SEQ ID NO: 148908 - DNA, 399 bp, Homo sapiens
ttttttttgagacggagtctcactctgttgccaggctggagtacagtggtgcgatctcggctcactgcactccagtgataaaactgtatttatatacataactccaatgtagattctttacattcatgccactcagtgtaggtccagtactgtcagcatcagtgtaggtgggcagttgtaagaaatgcaagttctagggactcaccttcagaccttttggaataagaatttgcaatttaacaaagtgatttgcatatattcaagcttgagaagcaatgctttgatgcccaattattattctcctagcccaaactgctgcaaatcttaatatccacaaagctgttttcttatactgctgggattaatagacattattttaccttctgggttcttaccccc

SEQ ID NO: 148909 - DNA, 6878 bp, Homo sapiens
gagcggctggccgggtgcggtggctcacgcctgtaatcccagcactttgggaggccgaggcggcaggatgacctgaggtcaggagttcaagaccagcctggccaacatggagaaaccccatctttactaaaaatacaaaaattagccgggcgtggtggtggagcgcacgcctgtagtcccagctactcaggaggctgaggcaggagaattgcttgaacccaggaggcggaggttgcagtgagccaagatcgcaccactgcactccagcctgggcaacagagtgagactccgtctcaaaagtaaataaaaataatcacctggagtttgttaaaccatatggattctcaggctcctctcttgaagattctgattcagtaggtctgggagtggcgccctggattttgatcaaaattgtagagcattttaaggtgagtacctgagggagaacttaaagacatcttagttggggagtagtccttttgaattttacagctagatataatcttcagtcagataaaatttatgggagctggtgtcttatgcctgactcttagtaatttcataccggtttgaagtacgtgtgcccatgcctaaagccttgactttcagaatgttgtcttttgattcttctgtcttgatttgattaggggtgaaatttagaagtcttagtaatgtaacttgaagatgttaaacaaaaatctcaagtaaaatgaaaagcaaatatgggctactgaattaagaaactggcattctagtattaaatcctcacttcaggagcttttaaaaatactgagacccccccataaccagagattcagattcaaagactgaggataggaccttagcattgtagctatttaaagtttctaatgtgcacccagggttgggaatcaccaatgtgggtgtgaaaatgcctacaaagggttttagtgccttagaagtcctaagaagcccaatctgtatcaaagcagatccattttgcaaggatctttcttttagaactttctcagttctcttagtaagaactttagaagtaatcttgataataagcacagacagcctaacagcagaggcaacttaaataactcctgagcagttggcactagaacagaatacttggaatgacaccaaagttaaccaagtccagcatatgtccaaagagttaagtgtttcatttactgtagcattctgggtgagaaattggttgctgaaatcttaagacagtggtctcaaccttggctgcacattggaatcacctgtagggttttaaagcatccaaatggtaattaacaggcagcaaaacttcagaactagttctgcatctactgtgcaaagatcatgattaactgtcaagacactggtagaacagaacaagcaaaagattaagagttcaaaagtaaatgcaaccaatttaacatgtagtgttattaaaaaattacaaaggcctagaccagcctgggcaacatggtgaaaccccatctctacaaaaaatttttaaaaagttggccaggcatggtaatgcgcgcctgtggtcccagctgctcgggaggctgaggtgggaggatcacttgagccttggaggtcaaggctgcagtgaatcatgatcatgccactgtactccagcctgggcaacagagaccatcttaaaaaaaaaaaatccttccattgaatagaaacttcaaagtccttcatcagatcatggcattagctactttagcaaaatagtgtaaactttggttctgagtaaaaatgacttccctaccacagttgtgaatgttaatatgctgataaaactgccaagatatatttgataggtaggggattaaactcatggtttgtcaaaagagtgtttttttctagttttattcttaacagatatgttgaggtattcatatttgtttccttttgtggttttaatgaagacaatttgtaaagtaatactgttatgtatatgctaaatgttggtaaatactaattaatttccatcatttgtagacttgttttgcaatgggatatatttttacttataataccaatttaggctgggcgcagtggctcacgcctgtaatcccagcactttgggaggccaaggcaaacggatcacgaggtcaggagatcaagaccatcctggccaacatggtgaaaccccatctctactgaattacacaaaaattggctggacatggtggcgcatgtctgtaatcccagctactgtaatctcagctactcgggaggctgaggcaggagaatcacttgaatccaggagggggaggttgcagtgagccaagatcgcaccactgcactccagcctggcaacagagcgagactctgtctcagaaaaaaaaaaacaaaaaccagtttaggctgggtatggtggctcaccagcacttatgggaggctgaggcaggtggatctcttggaggtcgggagtttgagaccagcctggccaacatggcaaaacccagtctctactacaagtacaaaaattagccaggcatggtggcacacgcctgtaaccccagctactcaggaggctggggcacaagaatctcttgaaccctgaggggcgcaggcttgtagtgagccgagatcgcaccactgcactccagcctgggcaacagagcgagagtccgtctcaaaaaaaaagaaaaagaaatacaccacttagctggaagtggtggctcacgccctgtaatcccagcactttgggaggccgaggtaggtggatcaccctgaggtcaggagttttgagaccatcctgactaacacggtgaaaccacgttctctactaaaaatacagaaaaattagccaggcatggcggtggcagacgcctgtagtcccagctacttgggaggctgaggcaggacaatcacttgaactcgggaggtgagtggcgtgaacctgggaggcagaggctgcagtgagccgagatcgcaccactgcactccagcctgggcgacagagcaagactccgtctcaaaaaaaaaaaataataataataatagctaaatactggaaacaaccaatattccatcaacaggagaatgaataaacaaattgtggtatagctatacaatccaatactatgcagcaataaaaattgaatcaatcactgatacacataacatgcaaggatgaagctcaaaaacattacactgaacaaaagaggccagacacaacagtatgtctgagtccatttacatgaaattctaggaaaggtagaatatcctacagtgtagagaacacaataataagaaaacaaacaacctgatttaaaaataggcaaaccaagagtagtagtgtgtgcctgtagtcccaactacttgggaggctgaggcgggaggatcccctaagcccaggagctcaagacctgcctgggcaacatagcaagactctgtctcaaaaaaaaaaaaaaataaatgggcaaaagatataaacagaaaactaaccaaagaggtatacagatggcaaataagcacatgaaaatcatttgttgcctgtggctggggtagggataggtactgaaggtaaatgggtacaaggggactttttagttgacgaaaattcactatattttgcttacagtggaagttaaacaggtttatacattagtcaaaattcatagaactggactttaagttgtgtgcatttgtttgtgtatgcattctaactcaatatacttaactataaaaaaagaatgaaaacaaaatttactcaagaaagaaagtaacaggccaagataacttccctagtgaattctaataaatatttaaggacgacataagttttaaaaaaaatcaatcttactcaaactaaagcataaaaaagaggaaatacttcacagttcattttataaagtcaacataactttgaggcctaaacctgacaaggacattacaaaaaagtaaaattacaggccgatctgtctcatgaacatagatgcaaaattcctaaacaaaatattagcaaactgaattcagcacgaaatagaatgaataaaacatcacaaccaaaccgaaattatttcaggaatgtaagattattttttcattcaaaaattaagcaacataatttagcacattaacaaaagaatggagaaaaatcaagtgatcatcaaaatcaatgcaggaaagcatttgacaaaattcaacaccaatttaggattttaaaaatttaggcaattttggccaggcgcagtggctcatacctgtaatcccagcactctgggggaggctgaggcgggcagatcacatgaggccaggagtttgagaccagcctggccaatgtggcaaaaccctgtctctactaaaaatacaaaaattagccatgcttggtggtgcacgtctataatcccagttacttgggaggctgaggcataagaatcgcttgaacctgggaggtgcaggtaggagtgagctgagatcctgccactaaatctcagaaagctattttgtaaatactgacaaggtgattccaaaatttacagtcatgtgctacataacaatgtttgggtcaagagaccactcacatatgaagatggtcccataagattataatgaagctgaaaaatcctgcaacctagggatgtcatagctgacagaaggtcaagtgcaaagcattactcacatgtttgtggaggtgctggtataaataaacctactgtgctgccagctgtataaaagtctagcatatacaattatgtacagtacatacttgataataaacaactacgttactggcttatttattttattgtactacattttatattgttattttagagtactcctacttacatataaaaaaaaagttaactgttaaatagcctcaggcaggtctttcaggaggtattccagaagaaggcatgttaggagataacagctccatgtccgttactgccccgaagaccttccagtgggacatgatgtggaggcggaagggattgatactgataatcctggctctgtgtaggcctagtaagtaatgtgtttgcttctgtctcaatttttaacaaaagtttaaaaacttaaaaatattttttaacagaaaaaagcgtataggccaggcgcggtggctcacacctgtaatcctagcacttttgaaggccgaggcgggtggatcacttgagatcaggagttcaagttagagatggtgaaaccccatctccactaaaatacaaaaaattagccgggcgtggtggtgcatgcctgcaatcccagctactcgagaggctgaggcaggcgaattgcttgaacccaggaggtagaggttgcagcgagccaagatagcgccattgcactccagcctgggcaatagagtgagactccgtctcaaaaaaaaaaaaaaaaaaaaaaaaagaaaagggccgggtgcagtggctcacgcctgtaatccctcgggcagatcatgaagtcgggaaatcgagatcacggtgaaaccccatctctactaaaaatacaaaaaaaattcggtgacgggcacctgtagtcccagctactcgggatgctgaggcaggagaacggcgtgaacccggaaggcggagcttgcagtgagccgagatcgcgccactgcactccagcctgggcaacagagcgagactccgtctcaaaaaaaaaaaagaaaaaagaaaagaaaagagcttatagaataaggatacaaagtaaaaagccagatgtggcagctcacacctgcaatcctagcacttggggagattgaggcaggaggactgtttgagcccaggcgtgtgaaactggcctggccagcgcaggaagaacttgtctctacaaaaaatacaaaaattagctgggtgtggtggcgtgcacctgtggtcccagctactcaagaggctgaggtgggaggatcactggagctagagaggtcaaggctgcagtgacccatgatcgcgtcactgtactccagcctggatgacagagcaagaccctgtctcaaaaaaaaaaaaaaagaaaaaaagaaaaaaatttgtacagctatacatgtttgtgattaagctaagtgtgattacaaaagagtaaaaagtttcaaaaaattaaaaagtttataaaatgaaaagttacaataagccaaggttaattattgaagatagttttttaaaataaatttcgtgtgtatccttagtatttataaagtctacagtagtgtacagtaatgaactgagccttcacattcacccaccactcactcaatgactcaccgaaagcaacttccagtcctgcaagttctattcacagtaagtgccccatgtagataggtgtatcgtttgtcttttataccagatatatctttcagtgccagaaagtaagaaaatgctcaacacacacacacacacagacacacacacactgagggagtaaaagggacacaagagccacctgaaagagctcccacagctaaagttgtaacaaatagagcaaaaaaaaaaaaaaaaagaaagaaagaaaagccaaattataagctaaagtacaaaataagtatctatgagtctacactgatatatgtaagtgattgaataaattaatatgtagaggagaagaggtaagttttttgtgcagaagaattccaaataatttatgtggataatacccctggttcaaggaggtagaacattactttctatcacttaaatatgggctacacacagtgacttccttccagagagcagagtctggaaatgggaagtgaggagaggagtaacttatagtggagaaaccagatgaaaacaaggtcatcatcaaggttaacataaacagtgatgtcatgttgatcacatgtacctttaatatgatataatgaaaatggccctttatctttgtggtcttcctgtcccaaacccataatccatgaaattgtgagaaaaaca

SEQ ID NO: 148910 - DNA, 571 bp, Homo sapiens
caccaggccaaattttttaatttttttgcagagatggggtttcatcatattggccaggctgctctcgaactcctgacctcaagtgatccacctgcctcggcctcccaaagtgctgggattacaggtgtaagccaccactcccggcctacaagctatttccctgtaatatgtctgatcactgttaggacctggttatacagaattttcattccaggaagcacaaatgtgatatacttacagtaataatggtcagcagcaaatcttttctttggggaggaaagggtaagaaaagaaaaaagaaggaaaggaatctaccatataggctgtgataatcttaaatgctctaagtaagccatgtaataagtcttcaaatgcattagagatacattaaaacatatttgaaatgaaatttccagcatctaagagtgcttggaacgtgaattttaaaaaatagtagcaataattattattgctattaattcttatcatactattttagaataataaaggaagtcatagatgctgtatcgaattccaccgcactgaagtagtgatcatcgattcccctcct

SEQ ID NO: 148911 - DNA, 417 bp, Homo sapiens
  misc_feature (1)...(417): n = a,t,c or g
gcatatagattttaaagtgatttattgtattttataatactcacttttctcttttagtctgatgacagtaaaacttctgtgagggatcgctttaatgcaagacaattcatgtcttggttacaagatgtggatgataaatttgacaaattaaaggtatgtatgtttggaagtcagtttaaatgaatgcttcccccttcttnnnnnnnnnnnnnnctttacagctgtattagggagaaataattaggaggggaaatactggttagtcatgaatcctcacactgggccacaattggaaagataaagaccacaagtccattttaaggactagttgtagtatgaaagaggaaactgccacagaaaatgcagtttctagtgtgggtcttcatgcttactatccaatgtacctgtctggttatt

SEQ ID NO: 148912 - DNA, 830 bp, Homo sapiens
tttttttttttttttttttttttttttttttgagacagagtctctctctgtcactcaggctggagaaccgggacacgatcttggctcactggaacctccacctcccaggttcaagcaattctcctgcctcagcctcccaagtagctaggatttacaggcatgtgccaccatgcccagctaatttttttttttttttagtagaaacggggtttcaccatgttggccaggctggtctcaaactcctgacctcaaatgatccgcctgcctcagcctcccaaagttctgggattagaggcgtgagccatctcacccggctggtatcatagattttcatatagctacctgctgggaattagggttcccagcagacaatgaatgtattttacttgtctttgggtttctagcacctagcacagttcctcgctcacagtagatatataacatgaatgcatgaatgccattccagcaagtgaagtgtctcctatgtgtatagccagagagagaatgaaggagtgggaggtatggtgtctgtcttcatggagcacctcatttatatgaggagaaagaatgtgaatgtcaaaacacaccattaaccaaataaattgatctttgggtgcatcaaaagaagcacagattccagaaggccggaattccactccagtctgcattggtatggctcagcctagagaactgcatccaactttgaaaacaacactttaaggtggatattgaccttgcaaaattatgtcatgcaagggaccactaaaggaagtgggaagactaacttggtaaatgaggattctctaaatactggaaacactcggatgtag

SEQ ID NO: 148913 - DNA, 394 bp, Homo sapiens
atctgttatttgagacatttcaatctggttaggatccattgctagagaggtagtactgttctttggaggtgtcaaaacactctgcctttttctactgcttgaattcttctgctgattccttctcatctgaggtattgtcgcttcttatttttgtatttgctgttgttttggggctttttacttttttaattcttttattccttgagggtattactgtagtgtatatatgctgagatccggcggcgcattctggacaacttggacccagtcatgttcttcaaatgcccttccccatagcctgccaacctggacgagctcccagaggtctacccataatgacccagatccttaccagccttcatttctctgccagcaggaactctcatgaaccacc

SEQ ID NO: 148914 - DNA, 1957 bp, Homo sapiens
ttttttttttttgtttacttttcatttattcacatttcatggattgttacacttcctcgatgggagcattcaaaaactaatacaagctgagattatattgtctgacaattcaagtattttagttttagaaaacaatttcctatttaaagtaaaaagcaaacaatttatccatctgattgctaagaagttttacatctccattacaattgtgtctgcatcaaacggagagtccttcgtcctcagtatgattgttactggctgagaacatacggtgtgacctgtgttctgagtgcctgcttgggaaaagacctccctgtcatctgccatactactgggacaaatccagtatcttactcaaattcccacttccagaattgagaggactcatcaggggtttaggagtttgcaaagccttcaaaatgtatcgtgcttgaattttgactctttctgaaatagaataactgacaaatgctcaaaaaaacaaacttgtttaacttttactgaaaaggctctcagtgaaaacattgttttgaactctactagtaaggtagaatattagtttttcttcccctccacaccagaaaaggcagttttctcttttttttttttttggcatgcagcatatataaaatgtgatctagaattgaaattgtaaaacagaataatcctcttaaagaaaatcagcctatgaacagtcagacttgtccttccatggaaaacataatctaaacttctttaaaaactggccatattttttcagtctgtaattccgaataatgaagatgggcataacaaatttttttgcttactagggaatgcgcaaaagggatgagatgggatacacaggttttaaaaaaaaaaaaaaaaaaggccactggggatatttaggtatttgtccagatggcaaaacaatttcaggattacccaaattacacaccttgctttaggccacgtatatgatacacttcatagattctcaaacaaaagatgaaaatttcagtcccacatttaaacattttaaaagccataacttcctaatattttgttaaaaataagtcaaactaaaggcataaatcagaattacctgttaacatagtggggaaagtagggaaagccctcccagggccccgtgccccaagtaaaagacaaggagttaaattttacaatgaaatccacgtatactcaggcccctttaacactaataatccaaagtggagacccaacccagtcccctaaagcataaaagagtgattttaagaaaatatccacattttggagttacgggtatattcatcacatttttcccctgtaattttcactttaacagtgatagtcttagcagcaaaaatttgctgggaatgttaggaaaaaaggaagccacacatacctactaatttaaaaatatataaactattttttacaggaagggcaggtttaaaagaaaatccaatcatgatcttttcatgccattttttgtcaactttccatacacacgcagacgctaacaaagtactgtgtcatatacactgaagtgtcctgaagatgcctgtgagctgctgattccagctggtaccagggaagcatgtgtggcttaagttgcaacaaacttaaatttgttccccttagttcttcatctttttaaaagctgaataaacttaatgtcaatcgggtggggccggtattaacagcatcaaccgcttgcttactatgaatcatccgcaacagaaacccacgtgcattctccattcttaaaaagtcagtgtaaaactaacggccacttcctccctaggtgcctactatcgctatgtctgacagcatctgtaacaggacaagctcacctctctctacacggattcatccaaagccacacactaggccaaattctcccagtggaatcaaaacactggaagtagagcaagaacctcatgccaacattggccctcgtgccgctcgtgcc

SEQ ID NO: 148915 - DNA, 604 bp, Homo sapiens
gtagagatggggttttgccatgttgcctagatctcgaactcctgagctcaagcaatctgcccacctcagcctcccaaagtgcagtgattacaggcataagccaccatacccagccaaattttttttccttgagatgggtctcactgtgttgcccagactggtcttgaattcttggcctcaagcaatcctcctgccttggcctccgaaagtgtttggattagaggcatgagccaccatgcttggctgtctcatgaaattctaagcacaggaatatgcacttaaaatgtatgttcactggtcaaacaacaaactattgtcaggaaaaaaactgaattaaaaaaaagaattacacatgggtagtggcttattgtattgaacagcatagatacagaacatgttcctcactgtataaatttccaatgggtaatgctgctctagagacttgattcaggaatctatacattacctggaggattgagctgggctggatgttcaacaagatttgtgattccaaaataatcttctctcttgggattttcctctgtactaaaattgtaggaagaaaagaaaacacgatatgcgggtagagatgattctaagagag

SEQ ID NO: 148916 - DNA, 2055 bp, Homo sapiens
tcaatcagtggactctaacacagattcactcagcgcaaggtcccagtagtgttcagccccatgctttttgaaatgctcacgagccatgttctctgtaggacactgtttaaacttcatctctccaaagctccggtctttggctgtaccctcccagactagtacacatttgttggttttcttcacagcttcctcatcagactcctcatcatcatctccctttgtgttagatgtctgttcatcccactttatccgatgcagcataagacgcttaaatttcttctgggccttggggcccccttccactactaccacgttgacatccttgtgcagtaccaccacccctgtcaggtacagttgcccagcattggcttcaatcttgaacttcttggctgggttgctcaaatttcgaactctatatacagatatgtgtaccccctgtgaaatgtcttctttaagctttttaattttcttgacctttctctgttctgctgtgagttttcgggcagcgttggcctcttcatgcgctttctgtctttttgccatctgagctctgacgtgggcttctaccttcgtggggtcttgaacagcttctgttcctaatactcgcatcaaattagaaattctcactttgggttctggaggaggcatcaggcccagcctgactttttcttgtagttccttctgtgcttccctccttgtttgtctccgaagttttttctgttccttcttggtaagatatactcccagagtaactggtgtgtcattgtcaactggaggattgagctgggctggatgttcaacaagatttgcgattccaaaataatcttctctcttgggagtttcctctgtaagatcaaagcccattggggattatggaagagtcccaccacctcatttcaggaaagatctcctttctttagctccctttttagagcaatgagggccaagcctagtcgaagtatggatgcctgtttttcgagctgcttgtgaaatctctgcctgtagcttctccagttgagcctttgtccgtaatcgctgagcaatcttctcaaatttgcccttgtcatggaatttaaaagtgcgtctctggcgctgggaaggggcaatggagactcgggggtcaaaaaaggtattggattccatgtcttctgatggcttttcctttagttgttgcttgaattgttccctcttcacagcacgaatattggctttcagagtaggcatgcggtgtgtcagctcaatctccttgcctgttgcatctacagtgcgcccttgctcatccaggatcagtggtgtaggtttcgtttggtcttttaactccaccttcgggggagcaatgcccatggcatggagattagccaggcccaccatgttggcattgccgatgagtcctggcttcagtgccagctgggcttggattcgagcttgcagttcagctgctttccttgccttctcaatggcatcattcatgaaagtggcagcctgggagggctgaatagtgttgccaataggaagtcgttctggttgggaggaagaaggagtctttggctgaggtgtaggggggctaatgaagctcagctgttttttcctctcctcgatttgtcgtgttgctgcctccatcatctgtttgatctggagcttagtcagcatgccagggctctctgatggaggcccagggatcacctctggctcttcttccacctcctcaaaacggggtattcgtcgcttctttactcctgatgattctttagagatctcagagtcatcaccaaacacctcctttagctctcgttttctgctcctgtcactgctagacttggaatgcctagagcttcggccttcctccacagcctcaaacagtttgtccacaaatcggagagtagaatcatcaagaaaaggtttcagatgatcggctgccttcttcttgtccatgcccttccccacacagttcaatgctgctgtgaccaccgtaggctctgagaaacccaggaccctcttcactgtcttctctatccatggtttcagctcatccagctccctctttgacagtgccat

SEQ ID NO: 148917 - DNA, 422 bp, Homo sapiens
cttggtcacaagaacttcgaccagaggccaagaattttaaaacgttctttgtccacacggtgagtctgttcccagggatttctgtgtgcagggtaatgggagggctttgcaccacgtgggaagcagccacaggccttggccagagggagcagcggggatcggggcagctgcctcgccctttccgacatcccagacgcccacactagtggctcagtcctgagggggcaggggacaccctgtgcttgtttttcagtttggtggtgactgacggtggtggtcatcagactgtgtcgtaggtcactgcttgcgtgactaaccggcacatcctcgtgcttacaggacttgagaatggctggtccttatgcgtttcaccaatttggggttgacgtatccttggagaaggggttattccttcccttttc

SEQ ID NO: 148918 - DNA, 952 bp, Homo sapiens
ggcggcaaactaatggttttgtccaaaggcatgcaccatggaagctgaactggaagagcccagtggatgctccctggctgggtactgtgcttcatgtggccttggaatgtttgcgagtctttgggactttgctgcagcctgtcaccccaagcctagctgacaagctgctgtctaggctgggggtctctgcctcagagaggagtcttggagagctctatttcttgcctcgattctatggacatccatgcccttttgaagggaggaggctgggacctgaaactgggcttttgtttccaagactagaccagtccaggacttggctggtgaaagcccaccggacctagaaactcagttcttaccggcttgtggtaaaaaagcaaatgtgctatctttttattttttattttcaggaaagttatactaggtattttcttaagtgtggaaatcaaatgagcacataagctgtgtccctgtgaaaagaggtttgtagcctttcaggtgcctgctcctattcttccatttctctgtgaccattgatcactgtcctttgtgcattgtgtgtctaagatgtcttcaggggaaagatgggtaagagacagtgttgctaatgctgttccttctttgtgcctccttccaaaccacagttatttgcccaaactacctctcgtggctggtttttcattggcctggcctctgcttctcaggctaattagtgactcctttctttgagggtcagggttggaggccccttactggtggttttacagggggatcctactttgttacacatgttgggtttcctgataaaaagagagtattttattaaacccttgaaccagtgtcctagaccagatgatttttgcccatgtgtatccccatttaaattcctacaactaagtctccctgctttgttaatagtccaacagttgggttgtgtaacatcacacttcaa

SEQ ID NO: 148919 - DNA, 8001 bp, Homo sapiens
tgtcgattgtgtatggctgatgggattctaggaccaagcaagaggttttttttttttcccccacatacttaacgtttctatatttctatttgaattcgactggacagttccatttgaattatttctctctctctctctctctctctgacacattttatcttgccaggttctaaacctttaggaaaaatggagcaatttccaaaggaaaccgttgtggagagcagtgggccaaaggttttggaaacagcagaagagatccaggagaggcgtcaggaagtgttgactcggtatcaaagtttcaaggagcgggttgctgagaggggtcagaagcttgaggattcctatcacttacaagttttcaagcgagatgcagatgatctggggaagtggatcatggagaaagtcaatatcttaaccgataagagctatgaagacccaactaatatacaggggaaatatcagaagcatcaatcccttgaagcagaggtgcaaacgaaatcaagactcatgtctgaactggaaaaaacaagggaagaacgatttaccatgggtcattctgcccacgaagaaacgaaggcccatatagaggagctacgccacctgtgggacctgctgttagagctgaccctggagaagggtgaccagttgctgcgggccctgaagttccagcagtatgtacaggagtgtgctgacatcttagagtggattggagacaaggaggctatagcgacatcagtggagctaggtgaagactgggagcgcaccgaagttctgcataagaaatttgaagacttccaagtggagctggtagctaaagaagggagagttgttgaagtgaaccaatatgccaatgagtgtgccgaggaaaaccatcctgacctacccttaattcagtctaagcaaaatgaggtgaatgctgcctgggagcgccttcgtggtttggctctccagagacagaaagctctgtccaatgctgcaaacttacaacgattcaaaagggatgtgactgaagccatccagtggatcaaggagaaggaacctgtactcacctctgaggactatggcaaagaccttgttgcctctgaaggactgtttcacagccacaagggacttgagagaaatcttgcagtcatgagtgacaaggtgaaggagttatgtgctaaagcagagaagctgacactttcccatccttcagatgcacctcagatccaggagatgaaagaagatctggtctccagctgggagcatattcgtgccctggccaccagcagatatgaaaaactgcaggctacttattggtaccatcgattttcatctgactttgatgaactctcaggctggatgaacgagaagactgctgcgatcaatgctgatgagctgccaacagatgtggctggtggagaagttctgctggacaggcatcagcagcataagcatgagattgactcttacgatgaccgatttcaatctgctgatgagactggtcaagacctcgtgaatgccaatcatgaagcctctgatgaagttcgggaaaagatggaaatacttgacaacaactggactgccctgctggaactgtgggacgagcgtcatcgtcagtatgagcagtgcttggactttcatctcttctacagagacagtgagcaagtggacagttggatgagtagacaagaggccttcctggaaaacgaggatctgggaaactcactgggcagtgcagaagcccttcttcagaagcatgaagactttgaggaagcctttactgcccaggaagagaagatcataactgtagacaagactgcaaccaaattgattggtgatgaccattatgattcagagaacatcaaggctatccgtgacggcctgttagcccggcgggatgccctacgtgaaaaggctgccactagacgtagattgctgaaggagtcattgcttctgcaaaaactgtatgaggactcagatgacctaaagaactggatcaacaagaagaaaaagttggcagatgatgaagattacaaggacatacagaacttgaagagcagggttcaaaagcagcaagtctttgaaaaggagttggcagttaataagacccagctggaaaacatacagaaaactggccaagagatgattgagggtggtcactatgcctctgacaatgtgaccactcgtctgagtgaagttgccagcctctgggaggagttgctggaggctacaaaacagaaagggacccagttgcatgaggccaaccagcagctgcaatttgaaaataatgcagaagatttgcagcgctggctggaggatgttgagtggcaagtcacctctgaggattatgggaaaggcctggccgaggtacagaatcgactcaggaaacacggcctcctggagtcggctgtggctgctcgtcaggatcaggtggatatccttacagacctggctgcatattttgaagaaataggccatcctgattctaaggatataagggcaaggcaagagtccttggtatgccgatttgaagctctgaaagagccactggccacccgaaagaagaagctcttagaccttctccatctgcagctgatttgtagagacacagaggatgaggaggcctggatccaagagactgaaccctcagctacttccacctaccttggaaaggacctgattgcttccaaaaagcttctgaataggcatagagtcatcctggagaacattgccagccatgaaccacgcattcaagagataacagaaaggggaaacaaaatggtagaggaaggacactttgctgcagaagatgtggcctctagggtcaagagtttgaaccagaatatggagtctctccgtgctcgagctgctaggcgacaaaatgatcttgaagccaatgtccagttccagcagtacctggctgacctgcatgaagcagaaacatggatcagagagaaggaacctattgtagataatactaactatggtgctgatgaagaagcagctggggctcttctaaagaagcatgaggcctttctattagatctcaattcatttggagacagtatgaaagctctgcggaatcaggcaaacgcctgccagcaacaacaggctgcaccagtggagggagttgctggagaacaaagggtcatggctttatatgacttccaggcccgcagcccccgagaagtcaccatgaagaaaggtgatgtcttaacgctgctcagttccatcaataaggactggtggaaggtggaagctgctgatcatcagggcattgtcccagctgtctatgtcagaagactggcccacgatgagttcccgatgctcccacagcggcgacgagaagagccaggaaacatcacccagcgccaggagcagattgagaaccaataccgctccctcttggatcgggcagaagaacgcagacgtcgtctattgcaacgttataatgaatttttattggcctatgaggcaggagacatgctggaatggattcaagagaaaaaggcagaaaacactggagtggaactagatgatgtttgggagctgcagaaaaagtttgatgagttccaaaaggatttgaataccaatgagcctcggctaagggatatcaacaaggtagctgatgatctactatttgaaggacttctaacaccagaaggagctcaaatccggcaggaattgaatgcccgctggggttctttgcagaggcttgcagatgaacagcggcagctgctgggcagtgcccatgctgttgaagtgtttcacagagaagcagatgacacgaaggagcagattgagaagaaatgccaggccctcagtgctgcagaccctggctcagatctgttcagtgttcaggctcttcagcgacggcatgagggctttgaaagggacctcgtacccctgggagataaggtgaccatactgggggagacagcagagcggctcagtgagtcccatccagatgccactgaggacctgcagagacagaaaatggagctgaatgaggcctgggaagacctgcaggggcgtacaaaggatcgtaaggagagcctaaatgaggcccagaaattctacctgttcctcagcaaggccagggatctgcagaactggatcagtagcattggtggcatggtatcatcacaggagctggccgaagacttaactggcatagagatcttgctggagagacatcaggagcaccgtgctgacatggaggcagaggctcccaccttccaggccttagaggacttcagtgcagaacttatcgacagtgggcaccatgctagccctgaaattgaaaaaaagcttcaagctgtcaagctagagagagatgatttggagaaggcttgggaaaaacgcaagaagatcctagaccagtgcctggagttgcagatgttccaggggaactgtgatcaagttgagagccggatggtggcacgtgagaattccctgaggtcagatgacaaaagttccttagacagtctggaggctttgatgaagaaacgggacgatttggacaaagcaatcactgcccaggaagggaagatcactgacctagaacattttgctgagagcctcattgctgatgaacactatgccaaagaagagattgctacgcggctccaacgtgtactagacaggtggaaggctctcaaagcacaactgattgatgagcggacaaagcttggagactatgccaacctaaaacaattctaccgagaccttgaggagctggaagaatggatcagtgagatgctgcccacagcctgtgatgaatcctacaaagacgccactaacattcagaggaaatacctgaaacaccagacctttgcacatgaagtcgatggccgatctgagcaggtgcatggcgtcatcaacctggggaactccctgattgagcgtagttgtgatggcaatgaagaggccatgaaggagcaactggaacagctgaaggaacattgggatcatctgcttgagagaacaaatgacaaagggaagaagctcaatgaggccagtcgtcaacagaggttcaacacaagcatccgggactttgagttctggctctcagaggcagagacattgctggccatgaaagatcaggccagggacttggcttcagcaggaaacctactcaagaagcatcagctattggagagagagatgttggctcgagaggatgcactcaaggacctgaatacattggctgaagatttgctctccagcgggactttcaacgttgatcagattgtgaagaaaaaagataatgtcaacaagcgtttcctgaatgtccaagaattggcagctgcacaccacgaaaaattgaaagaggcctatgccttgttccagttcttccaggatctagatgatgaggaatcctggatagaggagaagttgatacgagtgagctcccaggactatgggagagatcttcagggggttcagaacttgctgaagaagcacaaacgcctagagggggagctggtggcccatgagcctgccatccagaatgtgctggatatggcagagaagctgaaagacaaggctgctgtggggcaagaggagatccagttgcggctggctcagtttgttgaacactgggagaagctcaaagagttggccaaggcccgaggacttaagttggaagaatccctagaatacttgcaattcatgcagaatgctgaggaagaggaagcttggatcaatgaaaagaatgctttggctgtccgaggagattgtggagatacattagctgctactcagagcttgctaatgaagcatgaagctttggaaaatgactttgctgtccatgagacccgagtacaaaatgtgtgtgcacaaggagaagacatcctaaataaggtgttgcatgaggaaagtcagaacaaagagatttcttccaagatagaggctctgaatgaaaagaccccttctctggctaaggcaatagctgcttggaagttgcaattggaagacgattatgcctttcaggaattcaactggaaggctgatgtggtagaggcttggatagctgataaggaaacaagcctaaagaccaatggcaatggtgcagaccttggtgacttcctcactcttctggcaaaacaggacactctggatgccagtctgcagagtttccagcaagagagacttcccgagatcactgacctgaaggacaaactgatttctgctcaacacaaccagtctaaagccattgaagagcgttatgccgctctgctgaagcgctgggaacagttgctggaagcctcggcagtccacagacagaaattgctggagaaacagctgcctctacagaaggctgaggacctgttcgtggaatttgcacataaggcttcagctttgaacaactggtgtgaaaagatggaagaaaacttgtcagagcctgtgcactgtgtctccctgaatgaaattcggcagctgcagaaagaccatgaggacttcttggcctccctggctagggctcaagcagactttaaatgtttgctggagctagaccagcagattaaggccttaggtgtgccttccagcccttatacctggttaacagtggaggtgctggaaaggacctggaagcacctatctgacatcattgaggaacgggagcaggagctgcaaaaggaagaggcaagacaggtcaagaactttgagatgtgtcaggagtttgaacagaatgccagtaccttccttcaatggatcctggaaaccagggcttactttctggatggatcattgctcaaagaaacaggaactctggaatctcagctggaagcaaataaaagaaaacagaaggagatccaggcgatgaagcgtcaactaaccaagattgtggacctgggggacaacttggaagacgctctgatccttgatatcaaatacagcaccattggattggctcagcagtgggaccagctctaccagcttgggttgcggatgcaacacaacctggagcaacagatccaggccaaggacatcaaaggtgtgagtgaagagactctaaaggaatttagcacaatctataaacactttgatgagaatttgacagggcgcctgactcacaaagagttccggtcctgcctgagaggactcaattactacttgcccatggtggaggaggatgaacatgagcccaagtttgagaagttcctggatgctgtggatccagggaggaagggctatgtctcactggaggactatactgctttcctgattgacaaggagtcagaaaacatcaagtccagtgatgaaatagagaatgccttccaagccctggcagagggcaagtcatatattaccaaagaagacatgaagcaggcccttaccccagagcaagtgtcattctgtgccacacatatgcagcaatatatggacccacgggtcgaagccatctctctggctatgactacgttggcttcaccaattcctactttggcaactaataagcagctcctcgtggatcgtagaaaatcttagtgtcgtgggaaatttactggggggcaaagagtacaggcaaatgtggaagataaagatggcctcgtgtgtgtgtgtgtgtgtgtgtgtgtgtgtgtgtgcttgtgtttgtgtgcatattacatttattgtaggatctttaaaaaatctcaagggtgggagatagaaaggttaatagagttggaggagtggaagctattttgtatgcaactagtcactgctgaggggtgtcaaagtttctatttttatttgttctgttttgcacgtctttatcattttcctttattccgattatagaataaagtaattctttttaaaaatattttttggggcaaagttaagtaaaatgttgagcttctatatttctgggaactgtactcatataagagtgggcagctaattttactgtaaagaagggccatggtatagtagataaataaaatccaaggcaattttcaaacaatttttttaaactttggaatgtgtttaaatttaaatttgaaaataaagatatttgattttctgggg

SEQ ID NO: 148920 - DNA, 936 bp, Homo sapiens
ggcacgaggacctgtgatgtgatgcataatgatttccttcgaggcttaactagatcattgctcaaagaaacaggaactctggaatctcagctggaagcaaataaaagaaaacagaaggagatccaggcgatgaagcgtcaactaaccaagattgtggacctgggggacaacttggaagacgctctgatccttgatatcaaatacagcaccattggattggctcagcagtgggaccagctctaccagcttgggttgcggatgcaacacaacctggagcaacagatccaggccaagtattgagggcgtgtggccagagcagggagggatgcaggtggtgttaggtgttaggaccttaactagagggctaaagtttggtgcaccatataaaagagttgcttcagagaaccaatattccgggtctttactgccccacggaatgactattcctctttatactgaaatccatcatggaataaaagacagggctctccatccacctgagcctactcatcacccacttgggacaacaactgacttttatacccccaatttcctcagagttcctttccacccatccttatggtgatcctccttagggaaacccattcccctttccatagaattttatcctaaaatgtaatgtctagattaaaagaaacatttaaagtgtggccaaatagagcagaagggcagaaactcattttctagataaattcactatatcaaagcagctctaggtctcaatagcattttggcaacatttttatctagattaggattggcaaactttttctgtaaatggtctgataataaataatttaactttgtaaggcacatatattttctgctgtaactccttgattctgctgttgtagtgaaaaaagcagctatgataagtgaatgaccgtggccatgttccaataaagctttatatat

SEQ ID NO: 148921 - DNA, 664 bp, Homo sapiens
gttgagcgttcaaagttagagcaaaacagactttacagcgtgagaaaaaaggggaaagagtaggagttactgattacatgcaatcaatatttggtgtaaaatgaatatgagtagtgagtataacttccccaattaataagtcaaaatctaaatgcagctatttttctacttaactatgaagcccatggtcaggtatctcaggtgtttttcaagcagcagcaaagtttcaggcaatcagaatataagaaattagaaccaagataaatcagacagaatctgtgggcaagtatagtcattaaatatgaagacaaatggtcttaaccattcaagtaggcacctgggaaggatttacttgcttcacatgaggatgtttttggctccttttcaaggacaagcactggggaaaagtattcagcgtgattgcttcgtttgaagatgatgtggaaataacattatacaaacatggaggattattacactttgtggcacgagaattctcatagtatctacttaccatagatacctttcataactggtaactgcaaagccttttgtgctggacccacgaatccttaccatggagcagcacatagtcccagtatactcacttatctcatccatggatgtaaatgatgaagaatcaacataataactgaaatgaaac

SEQ ID NO: 148922 - DNA, 3290 bp, Homo sapiens
atggacgccccaaaagcaggatacgcctttgagtaccttattgaaacattaaatgacagttcacataagaagttcttcgatgtatctaaacttggcaccaagtatgatgttctgccttactcaatacgggtcttgttggaagctgctgtacgaaattgtgatggctttttaatgaagaaggaagatgttatgaacattttagactggaaaaccaaacaaagcaatgttgaagtgccctttttccctgcccgtgttcttcttcaagattttactggaataccagcaatggtggattttgctgctatgagggaggcagtgaaaactcttggaggtgatcctgagaaagtccatcctgcttgtccgacagatcttacagttgaccattctttacaaattgacttcagtaaatgtgcaatacagaatgcaccaaatcctggaggtggtgacctgcagaaagcaggaaagctctctccacttaaagtgcagcctaagaagcttccctgcagaggccagactacctgccgaggatcttgtgattctggagaactaggccgaaactcaggaacattttcttcgcagattgagaatacacccatcctgtgtccttttcatttgcaaccagtgcctgaacctgaaacagtgttaaaaaatcaagaagtagaattcggcagaaatcgagagaggcttcagttttttaagtggagttcaagagttttaaagaatgtggcagtgatccctcctggaactggaatggctcatcaaataaacttagaatatttgtcaagagtggtttttgaagaaaaagacctcctcttcccagacagtgtagtcggcacagattcacacataacgatggtgaatggtttagggattctggggtggggggttggaggcattgaaacagaagcagttatgcttggtctgccagtttctcttactttaccagaggtggttggatgtgagttaactgggtcatcaaacccttttgttacatccatagatgttgttcttggtattacaaagcacctcaggcaagtaggagtggctggaaagtttgttgagttttttggaagtggagtttcacaattatctatagttgatcgaactacaatagcaaacatgtgtccggaatatggtgctatcctcagctttttccctgttgacaatgtgacattaaaacatttagaacatacaggttttagcaaagccaaactcgaatcaatggaaacataccttaaagctgtgaaattgtttcgaaatgaccagaattcttcaggagaacctgaatactcccaggtgatccagattaatctgaattcaatagttccatctgttagtggtccaaaaagacctcaggatagagttgctgtgacagatatgaaaagcgatttccaggcttgcttaaatgaaaaggttggatttaaaggcttccaaattgcagctgaaaaacaaaaggatattgtctccattcattatgaaggaagtgaatataagctgtctcatggatcagtggtcattgctgcagttatcagttgtaccaataattgcaatccatctgtcatgcttgctgcaggtcttttggctaaaaaggctgttgaagctggtctgcgtgttaaaccttatataagaacaagtttatctccaggcagtgggatggttacacattacctcagttcaagtggagtattaccatatctaagtaagcttggatttgaaatcgttggctatggatgttcaacttgtgtgggaaatacagcacccttatcagacgcagttttaaatgcagtaaaacagggtgatttggttacctgtggtaattttatctggaaacaaaaattttgaaggtcgtctttgtgattgtgttcgtgccaattatcttgcctctccacccttagtggtagcttatgccatagcaggcacagtgaatatagatttccagacagaacctttaggtactgaccccaccggcaagaacatttacctgcatgatatttggcctagtcgagaagaagttcatcgagtagaggaagaacatgttatactatccatgtttaaagcattaaaagataaaatagaaatggggaataaacggtggaattccttagaagcaccggattcagttttgtttccatgggacttaaagtctacttatatcagatgcccttcattttttgataaacttaccaaagagccaattgcactccaggctattgaaaatgcccatgtcttattatatttgggagactctgtcacaacagatcatatatcacctgcaggaagtatcgctaggaatagtgctgccgctaagtatttgacaaacagaggccttacccctcgtgaattcaactcttacggagctcgaagaggtaatgatgctgtaatgacaagaggcacttttgcaaatatcaagctttttaataagtttattggaaaaccagctcctaaaacaattcattttccatcaggacagacgctagatgtatttgaggctgcagagctgtaccagaaagaaggtatcccactgattattttagcaggaaagaaatatggttcaggaaactccagagactggcgctgccaaaggaccgtatttactgggtgtgaaagctgttttggctgaaagttatgaaaaaatacacaaagatcatttgattggaattggcatagctccacttcagttccttccaggagaaaatgcagattccttggggcctctccggtagagaaacattttctttaacatttcctgaagaactgtctcctgggaattacattgaatatacagacaagcactggaaaagtattcagcgtgattgcttcgtttgaagatgatgtgggaaataacattactacaaacatgggaggattattaaactttgtgggcacgaaaattctcatagtatctactttaccatagatacctttcataactggtaactgcaaagccttttgtgctggacccaggaattccttaccgatggagcagcagaatagtcccaggatactcacttatctcatccatggatgtaaatgatgatgaatcaacatagtaactgaaatgaaatcttcttgattttaaataatatacgaatggtgctattaatattgctaaaatcaacgtgtgaagtgtgttgtggaagagacctgtaagtatgggggggggcgatattttatcagaccattttgtaaataaaggcagaatttgtgttgaagattcttatatgaatgaaccttccggggtttgtttagttttggcaccaatcaaaactgtgtaactactgttaaaaaaa

SEQ ID NO: 148923 - DNA, 721 bp, Homo sapiens
tttttttttgagatggagtctcactctgttgcccaggctggagtacagtggcacaatctcagcctgggtgtcagagtaagaccccgtttcaaaaaaaaaaactttctctgtcagacctttaaaagcatgagatcttttgtttccttttcctgtgagttaatcttacctggatccagataaagcagataagaaggtctcagagaaagccatttgcagttgatgtttacttcctctacacatgctaatctccctgacaaaaggacagcttttcataggtatttctgtgactgtgttgcctattgcactgcctacatgacttacctggaaccctacccagatgttgttggccattgcagtgcctatgtgacatggctgaattcttactcacctttaactctgcttatttttaagaaacaggatgtctgtggtcagaagtttcttcttgggactaaaccagctgaagctggtgaaatccttgatggcagcttacgcaacctctgacaaacatctagctttattataatccaatttccatgctaaatagcactcccatcagtgcatgacagttgacaatcactgtgacaatgaacggaagagaccaagaaaggacagaaatgaggtgactccttgattctaggaaaatctccatcccttcctaagaaaagcatgaatattcctcaccttgctcattcccttcattaaagatcctctatctcgtgcc

SEQ ID NO: 148924 - DNA, 464 bp, Homo sapiens
agagtaaaaaattcgaagaccctgatgaacactgcggagagtcgtggaatttcttcgacccgtgctgagctggatggaccgcgagacgcgcgccctcaccgacagccactttcgaggcctgggggtcgaggtccccggcgtcggccaggctccgggccgggtagccttcgtctcggagccgggcgccttctcctacgccgactttgtgcggggcttcttgctgcccaacctgccctgcgtgttttccagcgccttcacgcagggctggggcagccggcggcgctgggtgacgcccgcggggaggcccgacttcgaccacctgctacggacctacggagacgtggttgtaccagttgcaaactgtggggtccaggaatacaactcgaaccccaaagagcacatgactctcagagactacatcacctactggaaagagtacatacaggcgggctactcctctccca

SEQ ID NO: 148925 - DNA, 549 bp, Homo sapiens
gcggccgcagaccccgggcggggaggaaaggccggcgggacccaggcccgggaggcccccgcctagagaggggcaccagggagggtgagggaggccaggcgcgtggcccctggagagttcctctgcagacggtttggagtgaggacggggcccagggagatggcatggaccgtgcctttcatttcaggagacgtggttgtaccagttgcaaactgtggggtccaggaatacaactcgaaccccaaagagcacatgactctcagagactacatcacctactggaaagagtacatacaggcgggctactcctctcccaggggctgtctctacctcaaagactggcacttgtgcaggtaatggggcttgggacgcaccgaggcgctgccttccctagcgctgcgtgaaccccagagcctttctgatgaaggtggcccctgggtgcacaacggagctatttttccccgtgaggcactttaatcagtttaaaagaaactggattgtcttccgcatggctgcaagtgttgttctttgggaggtcatatggttttt

SEQ ID NO: 148926 - DNA, 1187 bp, Homo sapiens
tgggtttttgccatgttggccaggcaggtcttgaactcttgacctcaggtgatccgcctgcctcagtgtcccaaagtgttgggattacaggcacgagccaccgcgctcagccaaatttttcctcaactctctctttcctggacgggctgcgttggggggaggcgcagggaaagaacacctctttgcttagacattggtgtcgacagtggggatactaagttcatctcctgatcctgctaggcctggaagcaggaaagaaatgtcctggttagagataaaattgttctatccttttagaaaagcctgttaaggaatatgatgcaaagccaccttcgacgaaatctgaaatgataccccacagccttgtccaccccaattattcagtgacagggctccagttgcttaagccataggagaaggcccctttgcagtggggagtcacttgaagacagaaaggggaagcccaggggtgaacccagtcctaagggcttcttgggggccaccaaataagactgttttagccctggacacagagggagacacagtcatcccagatccttacaaagaatacattgccaaggaccccgaaggaaatctgcttgtcttaagagacggaagacccacgaccagctctctgggactacctgtcaactcagcaggtgcagccagggagcagccatgcttcttctgccctcccagtaggctgggctatcagttcctgggaggggtcctgtccccatgtaaggggatatgtacattgctgagtacgctgatatctttttcatgggtatgattttttaacaagaaagctaaatggttctcgtgtaaacgtaactgatatagtttgggctgtgtccccccaccccaaatccttatccttgaaactgcagctccccataatccccccaggtgttgtgggagggaccccagtgggaggtaattgaatcatgggggtggttaacgcccatgctgttctcgtgatagcgagtgagttctcacgagatctgatggttttataaggggctttccccctcctttcgctctgcacttctccttgctgccatgcgaagaaggatgtgtttgtttccccttctgccatgattgtaagtttcctgaggcctccccagccatgttaaactttgagttaattaaacctctttcctttataaattaaaaaaaaaaaaaaa

SEQ ID NO: 148927 - DNA, 423 bp, Homo sapiens
tttcgttcttcatccacaggaccaagggcaagggccccctcatgtcctcctccttcaagaagctctacttctccctcactaccgaggccctcagcttcgcgaagacgcccagctccaaggtcagggctgcgataagacccggtcacgggtgaccctgcaggagtggaatgaccctcttgaccatgaccttgaggcccagctcatctaccggcacctgctgggcgtggaggccatgctgtgggagaggcaccgggagctgagcgggggtgcagaggcaggcacgatgcccacgagccctggcaaagtccccgaggactcattggcccggctgctccgggtgctgcaggacctccgcgaggcccatagctccagcccggccggctccccaccctcagagcccaactgcctcctggagctgcagac

SEQ ID NO: 148928 - DNA, 6169 bp, Homo sapiens
ggaccccggtgtctggcttcccccgagccgggaccccgcgatggccaagcgcagctcgctgtacatccgcatcgtggaggggaagaaccttcccgccaaggacatcactggcagcagcgacccctactgcatcgtgaaggtggacaatgagcccatcatcaggacagccacagtgtggaagaccctgtgccccttctggggtgaggagtaccaagtgcacctgccgcccaccttccacgctgtggctttctatgtcatggatgaggatgccctcagccgggacgacgttatcggaaaggtctgccttacaagggacaccatagcctctcaccctaagggtttcagcgggtgggcccacctgacggaggtcgaccccgacgaggaggtgcagggcgagatccacctgcggctggaagtgtggccaggggcccgggcctgccggctacgctgctctgtgctggaggccagggatctggccccaaaggaccgcaatggcacatctgaccccttcgtccgagtgcgctacaagggccggacacgggagacctcgatcgtgaagaagtcatgctacccacgctggaatgagacgtttgaatttgagctgcaggagggggccatggaggcactgtgcgtggaggcctgggactgggaccttgtcagccgaaacgacttcctgggcaaagtggtgattgatgtccagagactgcgggtggtgcagcaggaggagggctggttccggctgcagcccgaccagtccaagagccggcggcatgacgagggcaacctgggctccttgcagctggaggtgcggctgcgggacgagacggtgctgccctccagctactaccagccactggtgcacctgctgtgccacgaggtcaagctgggcatgcagggcccagggcagctgatcccactcatcgaggagacaaccagcaccgagtgtcgccaggacgtggccacgaacctgctcaagctcttcctggggcaggggctggccaaggacttcctggacctgctcttccagctggagctgagtcgcaccagtgagaccaacaccctgttccggagcaactctctggcctcaaagtccatggagtcttttctgaaggtggccgggatgcagtacctgcacggcgtcctgggccccatcatcaacaaggtgtttgaggagaagaagtacgtggagctggaccccagcaaagtggaagttaaggatgtagggtgctccgggctgcaccgcccgcagaccgaggccgaggtgctggagcagagcgcgcagacgctgcgcgcccacctgggggccctgctgagcgcgctcagccgctcggttcgcgcgtgccccgccgtggtgcgcgccaccttccgccagctcttccggcgcgtgcgcgagcgcttccccggcgcccagcacgagaatgtaccgttcatcgccgtcaccagcttcctgtgcctgcgcttcttctctcccgccatcatgtcgcccaagctcttccacctgcgggagcgccacgcggacgcccgcaccagccgcaccctgctcctgttggccaaggcagtccagaacgtgggcaacatggacacgccggcttccagggccaaggaggcttggatggagccgctgcagcccaccgtgcgccagggcgtggcgcagctgaaggacttcatcaccaagctcgtggacatcgaggagaaggacgagctggacctgcagcggacgctgagtttgtaggcgccacctgtgaaggaggggccactcttcatccacaggaccaagggcaagggccccctcatgtcctcctccttcaagaagctctacttctccctcactaccgaggccctcagcttcgcgaagatgcccagctccaagaaaagcgccctcatcaagttagccaacatccgggcagcggaaaaggttgaggaaaagagctttggcggctcgcacgtcatgcaggtcatctacacggacgacgccggcaggccccagactgcctacctgcagtgcaaggagttcccttttgtgtcagggtccagagccactgggaaaagtagtgatatcagggccaccaaatatatttggcgggttctggaatacctacgagcgtggccaaggggccagcggcggctgaaatccagcccacaccagcctcctgggctcctaccatcccggtgccttccgtggggacaagtggagctgctgccaccaaaaagacgagacagtgtgtgaatgagcttaaccagtggctgtctgcgctgcggaaggtgagcatcaacaacaccggactgctgggctcctaccaccctggcgtcttccgtggggacaagtggagctgctgccaccaaaaagagaagacagacacagactttcgctctgtcccccagactggagtgcaatggcgcgatctcggctcgctgcaatctccgcctcccagggtcaagcagttctcctgcctcaacctccccagtagctgggatgaccggcactcgccaccaagcctggctaatttttttgtattttgactagagatggggtttcaccatgttagtcaagctgctcttgttttgttgttgttgttgttgttgttgttgtttgatactgagtctcgctctatcatccaggctggagtgcagtggtgcaatctcggctcactgcaatctccgtttcccaggctcgggtgattctcctgcctcagcctcccaagtactacaggcgcaagccactgcacccagctaagtcagggctgcgataagacccggtcacgggtgaccctgcaggagtggaatgaccctcttgaccatgaccttgaggcccagctcatctaccggcacctgctgggcgtggaggccatgctgtgggagaggcaccgggagctgagcgggggcacagaggcaggcacggtgcccacgagccctggcaaagtccccgaggactcattggcccggctgctccgggtgctgcaggacctccgcgaggcccatagctccagcccggccggctccccaccctcagagcccaactgcctcctggagctgcagacgtgaggcccgccctacgctccccttgctgagtcccctgccaagcgctcggagcccccccaggacactctgcaccccctcaccccggtcctcctcattagggtgcagggcctaggtctcttccaggtgggggaggggggagagtcaggaataaggggatccccagaagtgcagagctgagcaggcttgggcctgtcatggctggccggaagtgtccccagctccctacagacgctgtagccatcactgcctctccagggaccctcctctcctgcccaggacagacccagccagaaccactgctaggatgggccgcacccaggggtctggcctccagggacctagagaatgggagggagaacggggccccaggagacccggccgccaccccacccgctacccttgggtgccacagggctgtgctgttgccaacagtaaacctgctcttactgtccaggctctggggtcttgtgatgagggtctggggagaaagtgggcccggggggaccccggaggctgtcggtggatgtgccgatgatggggctgacagtatgggctctgggcatccctgttcccccccctttcttccccccactcttctggggtcgggggttcctttcccttcccagttgctgtccctgggtcccctctttcatgtcccacaggccacagagcccagtgtgtccaaccagctgttctctcctcaaagcagcccccaagcaagtcccttctctagggtgtccctgaggacagcacagaggcgggactcagagaccccattcctcttcacgcagcccttaccccaagccctctagctgtgtggctggcagtgttggccacgtaggggctcccatccccccaccattgtgtcacatgggctgccaggctcagctcccagctgcgtccacagtgacctggatcagggtggggacaaggactggaccctccttctccagaaggccttcagctcttgccttgccatgcagtcacctccttccccctctgaccccagatcccaaaggtgcaccgttgccccagcccctttctggccccatggggtttctctgatgccttcatcatagaggcccggggctggtccgatggttggcaaaacttgactccggcccagtccccactcttggggacttagaacccctgctgtcctgggatctggcctgcctttctttggtcagtccctgtggtcccccaccagctccccctcccatagggctgcccaccaagccctgcccccagcccaagaggagcccccactgcctgcggggcagtgatgtctggccaccggctcacaccaatgacttggtcctggggtggcagaagcagcaggtgacaggagcagggcccctgtccctctcttctggccctgtggtacccaggccacacgttgtgcccgctcttggggctgaccggctgtagggaccaccagccgctgctactgtgggccgccccggggcagggtgggcagggcttttgtgggttatgaggacacagaagtccctgaggcccccagacctggctcagccaacctccttcctcccccggttgccccccactctaaagcctcctccctcccagcgtccactggctccaggctcctcacaacagcagctcatagacacggggcgtctccaggtggtcccagccctccagatgtttctagctctccaggtgggcgctgttttcacgtctgcctgcatccattcattccttcattcctcacctttatcctgttatctctatttttttaagctaccaggaaggaaagggaagaagagatcacgaaactgggacccccagaagggaggagtgggctttgaacttagacatctacctcagagctcaaataggttgtttaaaatcacattcaattttcagatgaaggggaactttatagttttttttttttttttttttttttttggggcggagtctcactgtgttgcccaggctggagtgcaaatggcttgatcttggttcactgcaacctctgcctcccaggttcaagcaattctcttgcctcggcctcccgagtagctgggactggaggcgtgtgccaccatgcccagctaattcttgtatttttagtagagacggagtttctccatgttggccagactggtctcgaactcctgacctcaggtgatctgaccgccttggcctccgaaagtgctgagattacagttgcgagccactgtgcgtggccagaactttataataagagacttgaagctgggtgtgacggtgcacgcctctggtcccagctgctcgggaggccgggacagaaggatcaccttgaggccaggagtttaaggccagcctgggcaacatagcaaaacctagtccctaaaattaaaaaaaaaaaaaaaaaaaaaggaaaataaaggagacttgaaatttttgaactaaatagtggtgatggctacacattgtgaatgtaattaacaccactgagttaaacacttaaaatggttaaaatggcaaattgtatgttatacctattttactacaataaaaagtataaaaaagagaagatatttaggtgacttacagcaaccaattgcaacaaaacaaaatgttaagaaatgatctttttatgaggcaattggaaatttgaacactgatcaactataggatgattggaattattaatttttaaaggtgtgataagatgctgcacttggctgggcacagtggcacatgcctgtaatcccagctacttggcaggctgaggtgggagaatcgcttgagctcaggagttcgagaccagcctgggcaacgtggcgaaatccccgtctttacaaaaacaaacaaacaaacaaaaaagatattgcagttgtgttgtaagcgtccttatctttcagagctacatagtggaatgtttatggaatatttaggataaatgatataggcatttgggatttgctgcaaaatgacccagaggcaggggtcagggggagaggtagagatgagacaagaggtagaggggagaggtagaggtagccacgagctgataattacagacaagagatgcggagtatgtgggggctcattatcctgcatagtctatctttgtatatctttgaacttttcaagaataaaaaagcttaaaaagtat

SEQ ID NO: 148929 - DNA, 690 bp, Homo sapiens
cgcgccactgcactgcagcctgcacgacagagcgagactccgtctcaaaaaaaaccaaaagttacccagcaacccaagtcatatcctgatgatatccatactcctcagtcatgcatcccgtggtgcgggggctgaccccaagaggagctgctgcccccagagggtggggagccgaggcagggccttggtcagacttaccaggctatgctcccagcccagccctcactaggggacccccgagtggcatctctctcctctccaggcctctgtttctccatctgtgcaaccacagtgttggacatggtagtcccaagtgtctgcttgtaactttgccctctctgtgcccccaggtcagggctgcgataagacccggtcacgggtgaccctgcaggagtggaatgaccctcttgaccatgaccttgaggcccagctcatctaccggcacctgctgggcgtggaggccatgctgtgggagaggcaccgggagctgagcgggggtgcagaggcaggcacggtgcccacgagccctggcaaagtccccgaggactcattggcccggctgctccgggtgctgcaggacctccgcgaggcccatagctccagcccggccggctccccaccctcagagcccaactgccttctggagctgcagacgtgaggcccgccctacgctcccttgctgagatccct

SEQ ID NO: 148930 - DNA, 3087 bp, Homo sapiens
  misc_feature (1)...(3087): n = a,t,c or g
atggccaagcgcagctcgctgtacatccgcatcgtggaggggaagaaccttcccgccaaggacatcactggcagcagcgacccctactgcatcgtgaaggtggacaatgagcccatcatcaggtaccgcccccacccccaggaccgaggggcgctcagcctctcatcggcccgcgctctccccgcaaaggggacagccacagtgtggaagaccctgtgccccttctggggtgaggagtaccaagtgcacctgccgcccaccttccacgctgtggctttctatgtcatggatgaggatgccctcagccgggacgacgttatcggaaaggtctgccttacaagggacaccatagcctctcaccctaagggtttcagcgggtgggcccacctgacggaggtcgaccccgatgaggaggtgcagggcgagatccacctgcggctggaagtgtggccaggggcccgggcctgccggctacgctgctctgtgctggaggccagggatctggccccaaaggaccgcaatggcacatctgaccccttcgtccgagtgcgctacaagggccggacacgggagacctcgatcgtgaagaagtcatgctacccacgctggaatgagacgtttgaatttgagctgcaggagggggccatggaggcgctgtgcgtggaggcctgggactgggacctcgtcagccgaaacgacttcctgggcaaagtggtgattgatgtccagagactgcgggtggtgcagcaggaggagggctggttccggctgcagcccgaccagtccaagagccggcggcatgacgagggcaacctgggctccttgcagctggaggtgcggctgcgggacgagacggtgctgccctccagctactaccagccactggtgcacctgctgtgccacgaggtcaagctgggcatgcagggcccagggcagctgatcccactcatcgaggagacaaccagcaccgagtgtcgccaggacgtggccacgaacctgctcaagctcttcctggggcaggggctggccaaggacttcctggacctgctcttccagctggagctgagtcgcaccagtgagaccaacaccctgttccggagcaactctctggcctcaaagtccatggagtcttttctgaagtttgccctgcatgtgtacctggccccctcctgggcggatacggcaggcaaacggtgcaagggcggctgccgggagaaggtgggcagctggagtgggactgggggagacaggatcaatgtgacctgcggtggtccccaggtggccgggatgcagtacctgcacggcgtcctgggccccatcatcaacaaggtgtttgaggagaagaagtacgtggagctggaccccagcaaagtggaagttaaggatgtagggtgctccgggctgcaccgcccgcagaccgaggccgaggtgctggagcagagcgcgcagacgctgcgcgcccacctgggggccctgctgagcgcgctcagccgctcggttcgcgcgtgccccgccgtggtgcgcgccaccttccgccagctcttccggcgcgtgcgcgagcgcttccccggcgcccagcacgagaatgtaccgttcatcgccgtcaccagcttcctgtgcctgcgcttcttctctcccgccatcatgtcgcccaagctcttccacctgcgggagcgccacgcggacgcccgcaccagccgcaccctgctcctgttggccaaggcagtccagaacgtgggcaacatggacacgccggcttccagggccaaggaggcttggatggagccgctgcagcccaccgtgcgccagggcgtggcgcagctgaaggacttcatcaccaagctcgtggacatcgaggagaaggacgagctggacctgcagcggacgctgagtttgcaggcgccacctgtgaaggaggggccactcttcatccacaggaccaagggcaagggccccctcatgtcctcctccttcaagaagctctacttctccctcactaccgaggccctcagcttcgcgaagacgcccagctccaagaaaagcgccctcatcaagttagccaacatccgggcagcggaaaaggttgaggaaaagagctttggcggctcgcacgtcatgcaggtcatctacacggacgacgccggcaggccccagactgcctacctgcagtgcaagtgtgtgaatgagcttaaccagtggctgtctgcgctgcggaaggtgagcatcaacaacaccggactgctgggctcctaccaccctggcgtcttccgtggggacaagtggagctgctgccaccaaatttagattatctggtcagggcctgcgataagacccgggtcacggggtgaccctgcagggagtggaatgacctcttggaccgtgaccttgagggcncagctcatctaccggcacctgctgggcgtggaggccatgctgtgggagaggcaccgggagctgagcgggggcgcagaggcaggcacggtgcccacgaagcccttggcaaaagtccccgaggactcattggcccggcttgctccgggttgcttgcaggacctccgcgaagcccataagctccagcccggccggctccccaccctcagagcccaacttggcctccttggaagctgcagacgtgaggcccgccctacgctccccttgctgagtcccctgccaagcgctcggagcccccccaggacactctgcaccccctcaccccggtcctcctcattagggtgcagggcctaggtctcttccaggtgggggaggggggagagtcaggaataaggggatccccagaagtgcagagctgagcaggcttgggcctgtcatggctggccggaagtgtccccagctccctacagacgctgtagccatcactgcctctccagggaccctcctctcctgcccaggacagacccagccagaaccactgctaggatgggccgcacccaggggtctggcctccagggacctagagaatgggagggagaacggggccccaggagacccggccgccaccccacccgctacccttgggtgccacagggctgtgctgttgccaacagtaaacctgctcttactgtccag

SEQ ID NO: 148931 - DNA, 402 bp, Homo sapiens
tttttgcagtacatgaatgttttattcttcataaagtgcttaaaacatgaagaacaagctctttataaagagccttaactaggaagacaaacagcaaagcagaaccatgcctgctccctgcccaacccacctgcaactttcctccaagtgtggcgaggagaagaaacatcaacttggccagaccaagagattaactttaggggaggggaacagcccacagcagtgctgtccattcccattcccagggccctgagagagccatccctatgtattcaacaggtgggagggggacgccacacagcgggagaggtcgacatccaggggctcttgacccgcccaccaaaggcacattttaattggtttccaaaagttcaaaccctgcagcaacacagagttttggca

SEQ ID NO: 148932 - DNA, 4386 bp, Homo sapiens
aatcttttttttttttttttttgcagtacatgaatgttttattcttcataaagtgcttaaaacatgaagaagaagctctttataaagagccttaactaggaagacaaacagcaaagcagaaccatgcctgctccctgcccaacccacctgcaactttcctccaagtcgtggctcggagaagaaacatcaacaagggaccctgggcttcgattcaaaaacttcctctgaagccattccatgccctgggatttacgggaggcccacaaaggtcatgggccagggctgggagtgaattaaagcccaggaggaatccccagtaggggggggtgactccccctctcttcagaaaagatacttactttctctaattacccaatggacccccaaaagcatggactggaaaccctggggggaccagtgggatacttttctcagatttgatgagtggagtttaaggtaggtaacgttacaggggctttcctccatgtgtggcgctcctctgctccatcctggcagcagacagacatcacccagagggcacgtgtctgcctgaggccttccaaaagcaagcccacaggccctctcctgaagaagtggtggtcccagaggagctcttgcctcctcactaagctgttaagtatccttcttcagcacctcatcaccccccatttttgctaattcagggtgccccaagctgccaaagttccctgcagatgccttggggaagcctaccatgttttctacaagcaaaccaggggctgggccaaaggacagatacttcatttcaaagtgcactgcagccaagccaggcaagcccctggggcagaagggacaggctgagatagcagcttaatggatggatgggaggacaacaaaggctttttcctaagtataggtgtctcccaaaggcatagtgggacctccctcttccaggcaagctgactggtctagtatggctaagtcctgaggccagacaatgagagtgagcagggcagccccaggcctgcctgcccgcctgcccagcagtgtttatcctgggatcctcctattggggttgagggaggggaagacagcaggaaggttgagggagcagcaacttggccagaccaagagattaactttaggggaagggaacagcccacagcagtgctgtccattcccattcccagggccctgagagagccatccctatgtattcaacaggtgggagggggacgccacacagcgggagaggtcgacatccaggggctcttgaccccgcccaccaaaggcacattttaattggtttccaaaagttcaaaccctgcagcaacacagagttttggcatctggacaggcaacaagaatagacatggaggcttgatccccaaatcataagcagtcccaagccccagcctggagggacctacacattggaggtggtcaagagctcgaaaagcaaaaaggtgctctctccgcacccgcccctgcgccccacacattcccatgtgacactcgtggaaaggtcagaggggtcagggagcagcctgaagcacacacatcatccaccactgtccacatggcactcgccccacaaacagctccagactgaagcagactcaggacatggcagagactggcccagaccacacaggcttcttgctctcaggggaatgggtgtgaggctgaagaggctggttgcccgtaactcacagacaaacaggcagcgtggtcattgtcccagtaatactagaagcccctccagggactggagggaaatgaaggggatggggctttggctgtgggaagaaatggctgaccatccttgggggataataaagtatgtgctagcaaccagtcttgtcccagattactgcatcaagctacagttcacccctgctctgtcttgggggaagagttccaattccctggggcccccaaagctgagggatatgaaaacaggcaggtgggaaagacccagggctcccaaagacacacaagttgtgcacagaacctgatgcctccaaagggaatccagagggcccccttccagcagccccagttgaggcaggagggagaggagcaaggagtgacaaggcaagacagacgatgccccactgcagatgagagagttcaggaggagagagggcaggcagcaataggtccatgccaaccctcctgggggtagggtgaggaaggctatttgggggggcccggggggatctgcagcagcgtgggtgaggtctccatgatccgcaccagcagccggtcgatgtagctctccagctcctgcacatgctcgtcccgctggctcagctcccgctcccgctgcaggagcaggctgatgagctcatcgtgggtcaggtggtagtacttggccgactggtccagcacagctgagtccttcagccttttggtgtccaccatctggccagcctggggggcctgggtcacaggctgaatgctcccagatgtgactgttttgagcttctccagcccactgctcagggctatgctcagactggagcgggactgcttcctgtcggggctgccctccacaggggcggcactgaggggcttcacggggtggggactgggtttctgagtcgggtccttggcttctctcaagccaaaccagctactcttggccttttcctccccactggatgagtgatgtggggaggccccccaggatgggacccccccttttccccccagagagcttcggcgacccaactcgctccgacttaggccttggtggtggtggtggaagagacccatccggggcttgcgttcctccttccgggctccctccttctctgccacagcctcagaggaggccactatgggtgtggcaacctggactggcttgccctctggtagccgggcccccctcctcctctcccagggtggctggccccaggggccaggactttagcctgagcactcagctcctcctgtccaagcactgcctctgagctgctgttgctacgactgcctctgggccaggtgtcatctgtggaacgaggcccctcctcggagaaccgggaagagacagcttgcaaggagccagaggatggaagcgagcccgagatggagctgcggtgccgcacagggccctggggctcctcattgtaaatgtggctcccattgacacagagcgaagagcgggaggcagcatccaggtggccctgaaggtccagaagggcccgaggaggagccactcgcatctggttggcctcatcgctgtaggtcctcttatgggtgaacagcttgggggactgtgcagagtccctgcccccttcagtggacagccagctgctacggcttggtgagcgggtgaggagttcggcgccaggtccctggtaggccaagctcccgctggctgaggacagggtgctgtccgagcccagcgaggtgttggactgggtcagggacgacttgcgcagcttgttgcggaggaagaagcctttggctttgcccatcttgcccaggctgcccaggtcaggatcctctatggcgctgcttgggaggatggcagaggcagattccagatcatacttcttcttgcccttcatcttgtccctgatcttgctgaagggagaccttggcttgtccttcatggacaggtcaaacatactggcgctcaggttgttgcgcgtgaactggatggtgacttcaatctcgccgcgttccttctccttcttgcctggcttggagtgcagcttgtaccactgcgtgtgctgggcgcggcctgcgccgaagacctcgtccagcgccaccgtggcctggcccaggaacttgtcgacgccgatgagcgagcggtgcatggtggtgagcaccagctcgcaggcggcggcggagctcgcggcccagggcgccgggcccgcgtcggcctcctgcgcccgcagcaggccatccagggcccccggcggcagctcgaaggagcactcctcacgccactcgggacagccgtgcgtcttctccaccaccgacgtactgtacttctcgcggcccacctggatcaccgtgtacgcgtcgctggtgctgcccgctcccgagctcttgccccgcagcccgcgggcccgcagcaccgtcacctggacgtgcgtgggcagccagcgggaaggccccgccgccggctccgcgccccgcaccagggccatggcggagaagcggggggcgaggtctggccgagccggtgcagaccccaggacctggtgacaaacccggccgcggcagaaggcggtcaggaaccaactctgagcgccgccgcagctgcgggctgggctgggccgggccgaccggccgccgcctccccgcctcaccgggccgctggccgcgggccgcgccgcgacgtcagcgccccgccccctgccccgccccgcgcccgccgccccaaccggc

SEQ ID NO: 148933 - DNA, 2965 bp, Homo sapiens
  misc_feature (1)...(2965): n = a,t,c or g
ccgagatcctcccagcctctcatctgcatccccgccagggtcgagggaatcttctattcattctggtccagaagagctgcccactcccccagagcctgactttccaccgccccctctcccgccttgggccagccaccaccgtggggggcccagccctccatgctctcccctgtctgaagcctggcccctgactacctcctctgcaccaccaggggagccagccttactccctggcccccatgagccctccccacctgggggctcccctgccctacttagggaggacctcgctgcagccaccccagcctccccgcttgtgcttctgcccttggagacacgaccagctgaggagccacagcccagtgccagtccccaccccgtgaagcccctcagtgccgcccctgtggagggcagccccgacaggaagcagtcccgctccagtctgagcatagccctgagcagtgggctggagaagctcaaaacagtcacatctgggagcattcagcctgtgacccaggccccccaggctggccagatggtggacaccaaaaggctgaaggactcagctgtgctggaccagtcggccaagtactaccacctgacccacgatgagctcatcagcctgctcctgcagcgggagcgggagctgagccagcgggacgagcatgtgcaggagctggagagctacatcgaccggctgctggtgcggatcatggagacctcacccacgctgctgcagatccccccgggcccccccaaatagccttcctcaccctacccccaggagggttggcatggacctattgctgcctgccctctctcctcctgaactctctcatctgcagtggggcatcgtctgtcttgccttgtcactccttgctcctctccctcctgcctcaactggggctgctggaagggggccctctggattccctttggaggcatcaggttctgtgcacaacttgtgtgtctttgggagccctgggtctttcccacctgcctgttttcatatccctcagctttgggggccccagggaattggaactcttcccccaagacagagcaggggtgaactgtagcttgatgcagtaatctgggacaagactggttgctagcacatactttattatcccccaaggatggtcagccatttcttcccacagccaaagccccatccccttcattttccctccagtccctggggggggcttcttagtattactgggattttgtctcacgctgcctgtttgtctgtgagttacgggcaaccagcctcttcagcctcacacccattcccctgagagcaagaagccctgtgtggtctgggccagtctctgccatgtcctgagtttgctttaatcctgaaccggttggtggggcaagtgccttgtggacagtggtggatgatgtgtgtgcttcaggctgctccctgacccctctgacctttccacgagtgtcacatgggaatgtgtggggcgcaggggcgggtgcggagagagcacctttttgcttttcgagctcttgaccacctccaatgtgtaggtccctccaaggctggggcttgggactgcttatgatttgggggatcaagcctccatgtctaatnccttgttgcctgtccagatgccaaaactctgtgttgctgcaagggtttgaaactttttggaaaccaattaaaatgtgcctttggtgggcggggtcaagagcccctggatgttcgacctcttcccgctgtgtgggcgttccccctcccacctgtttgaatacatagggatggctctctcagggccctgggaatgggaatggacagagctgctgtgggctgttcccctcccctaaagttaatctcttggtctggccaagttgctggctccctcaaccttcctgctgtcttcccctccctcaaccccaataggaggatcccaggataaacactgctgggcaggcgggcaggcaggcctggggctgccctgctcactctcattgtctggcctcaggacttagccatactagaccagtcagcttgcctgggaagagggaggtcccactatgcctttgggagacacctatacttaggaaaaagcctttgttgtcctcccatccatccattaagctgctatctcagcctgtcccttctgccccaggggtttggctgggcttggctgcagtgcactttgaaatgaagtatctgtcctttgggcccagcccctgttttggcttgtaggaaaacatgggtaggcttccccaagggcatctgcagggaactttgggcagcttgggggcacctggaatttagcaaaaatggggggtgatgaggtgctgaagaaggatacttaacagcttaagtgaggaggcaagagctcctctgggaccaccacttcttcaggaagagggcctgtgggctttgcttttggaaggcctcaggcagacacgtgccctctgggtcgatgtctgtctgctgccaggatggaagcagaggagcgccacacatggaggaaagcccctgtaacgttacctaccttaaactccactcatcaaatcttgagaaaagtatccactggtcccccagggtttcagtcatgctttttggggggtcattgggtatttagagaagtaagtatcttaatctgaagaagaggggaagtcaaccccccctactggggattccctcttgggctttattcacttcccagcccctggcccctgaccctttgtgggcctcccctaaatgcccaggggcatgggatggctttcagaggagtttttgaatcgaagccccaggggtccttgttgatgtttcttctcctagccacacttggaggaaagttgcaggtgggttgggcagggagcaggcatggttctgctttgctgtttgtcttcctagttaaggctctttataaagagcttgttcttcatgttttaagcactttatgaagaataaaacattcatgtactgcaaaaaaaa

SEQ ID NO: 148934 - DNA, 466 bp, Homo sapiens; identical to SEQ ID NO: 66865

SEQ ID NO: 148935 - DNA, 966 bp, Homo sapiens
tcaacgcctgcggatcatcaaggcccaggttgggactaatctgtccgctagctcttcctggcttagcccgcgattttctgcgaccacctgaagaaattccgccgcgttatcacgtaaggggcgggatttagcccgttgcgatatatgatgcagctgtatcagcgccatatcattattcatcagggtaaggatgttcaggccgctgacagcacgggcagatttgccttcttgtggccaggcgaggatctgtgtcgtcagatcccgtgccgtgctttcgtcaccaaagagacttaacgccagaaatgcccagttgtcttttgcgggggcaccagcttgttgccacgcagtgaagagatcccaggcaaaagctgccagcgtttgtggctggcagaacgttttcagttgttccagcccgctataaaaacgtcccccctgggtaaagcgcagcatttcgccgataatttccagagcgtcattggtaacagtttgattattagtgataaggcgcggcctggaccacatttgcggatgccagaaatcaggggcttttggaatgcgtgccgggtaaatgtccattggaccctgtttaagcaactgctccagggcagaccatacatcttctccagtaaccagtctgacaacgggctggacagtgatgatgaccagcccgttgagggggtcataaccaatggcagcaaggtagaggtggaagtagacatccactgcggtcaccatatcgaggaactcggtcgcggttgggacgcccagctcatttacctgtaaaagtaatttgcgcgccagctccagaccgtgatttacccgatagctgccgtttaaatctggatcggagattagtcctttccagccgacaacagttcgtggtttttcaaaataggtgcgcattacgatttccagccgtgactggtactggttgcgcagcgactgcagacgggtggcgtactccat

SEQ ID NO: 148936 - DNA, 6238 bp, Homo sapiens
ttctccaaggccttaaatctcagatacttgaatgcatctgcaaatagtctggagtctttaccatccgcctgcactggagaggagagtttgagtatgctgcagctgctttatctgaccaacaatctcctgacggatcagtgcatacctgtcctggtagggcacctgcacctgcgaatcttgcaccttgcaaacaatcagttacagacctttcctgcaagcaaactaaataaattggagcaattggaggaactgaacctaagtggcaacaagcttaaaaccattcccacaaccatagcaaactgtaaaaggctgcacacccttgttgcacactccaacaacatcagcattttcccagaaatactgcagttgcctcagatccagtttgtagacctaagttgcaacgacttgacagaaatcctgattccagaggctttgcctgctacattacaagaccttgacctgactggaaatacaaatctggttctggaacacaagacactggacatatttagccatatcacaaccctgaaaattgatcagaaacctttgccaaccacagattctacagttacgtcaaccttctggagccatggactggctgagatggcagggcagagaaataagctgtgtgtctcagcacttgctatggatagctttgcagagggggtgggagctgtgtatggcatgtttgatggagaccgaaatgaggagctcccgcgcctgctgcagtgtacgatggcagatgtgcttttagaagaggtacagcagtcaactaatgacacagttttcatggctaacaccttcttggtatctcacaggaaattaggaatggctggccagaagttgggctcctccgctctcctgtgctacatccgccctgacactgccgatccagcaagtagctttagcttgactgtagccaatgttggcacgtgccaagcagtcctgtgccgaggtgggaagccagtgcccctctctaaagtcttcagcctggagcaggacccagaggaggctcaaagggtgaaggaccaaaaagccatcatcacagaggacaacaaagtgaatggggtaacctgctgtacccggatgctgggctgtacatacctctacccttggatcctccccaagccccacatatcttccactccgctgaccattcaagatgagttgctgattctgggaaacaaagcattgtgggaacacttgtcctacacagaagctgtcaatgctgtacgtcacgtacaagacccattagcagctgctaagaagctgtgcacattagcgcagagctatggctgtcaggacaatgtaggggcgatggtagtttatttgaatattggtgaagaaggctgcacttgtgaaatgaatgggctcaccctcccaggtcctgtgggatttgcttcaaccaccactatcaaggatgcccctaagccagccactccatcctctagcagtgggattgcctctgagttcagcagtgagatgtccacctcagaggtgagcagtgaagtggggtccactgcttctgatgagcataatgctgggggcctggacactgccttgcttccgaggccagagcggcgctgcagcctccacccaacacccacctctgggctgtttcagcgccagccttcttctgctaccttctccagtaaccagtctgacaacggcctggacagtgatgatgaccagcccgttgagggggtcataaccaatggcagcaaggtagaggtggaagtagacatccactgctgcagggggagggatctggagaactcaccccctctcatagagagttctcctaccctgtgttctgaggaacatgctagagggtcgtgttttgggatccgaagacagaacagtgtgaatagtggcatgctcctgccaatgagcaaggacaggatggagttacagaagtctccctccacctcctgcctctatgggaagaaactctccaatggctctattgtgcccctagaggacagcctgaacctcattgaagtggccacagaagtgcccaagaggaaaactggctattttgctgcccccactcagatggaaccagaggaccagtttgttgtgcctcatgacctggaagaagaagtgaaggaacaaatgaaacagcaccaggacagccggctcgagcctgagccccatgaagaggatcggaccgagcccccggaggagttcgacacagcactatgactgccccactgggcacagtgtgggaggaggctgtgcagggttggggtagggacttgctagaggcattctgcctctacatttctttttgtttgttcgttttttttttgtttgtttgttttgagacggagtcttgctcagtcgctcaggctggagtgcaatggtggggtctcgggtcactgcagcctctgtccctgggttcaagccattctcctgtctcagcctcccgagtagctgggattacaggcacctgccacttatgcccggctaagttttattttttttttttagagacggggtttcaccatgttggccaggctggtgttgaactcttgacctcaggtgatccaccctcctctgcctcccaaagtgctgtgattacaggcctcagccaccatgcccagccctgcgtctacatttctaaaccatagctgtgtggggttgaactcggagccaaaaagtgtgagagccatcaggggctggctctggataaactgggtaagccactatcagtgttaagtttcacatttaacctgcattggaattccaaggggtaactggaaagaaagcagctgttctgtatcagtcctaccacctgccattaaccctttctctcctaggatcattttgagaatttgccctgcctgggcaggaaaagggactatttctgtggaggaaaaaagtgaagattgattctctttactagttgctgctgatggatctctgtgacagagaaatcaccttatctcagactaatggggtgtgatgtgactagtcacatggcttttcattcttctctacgagaatacagcctatcaaaatgatgtctgttggaaatgtagaaccaatcaaacagataatttatgtatgtaatgtaatgagagcacttttcattgactgtgaactttttatttttgaatctgcactcgagccaatcttcttagaggcagcccggcaccttcatccataggcagagagagaactgggtgttggagacttattcgagggtataggaagggccctgtgaagttgatttaacttttggatgtcagactgtgaaagctcctgagaaacttggggtaataggatcttcttttggggatgaaaatggggaaggcgtgaggacctagactacttctccctagatcagaaaaagagaattaccccttgacaaatatgataccctgctagggtatttcccaggggaattttagggggattggcctctttccctagcatgtggaggaattggcagacagcttcctaagggcggggagcgggggcccaaggccgacactgcttgcatccacgtgaccttaagttatggcagatgactctgaaacggactgaggccaatgagaacagatggatggagcactcaggttagacttgttccttctcctatgctggaggagagggatggttctctagaatgttggaggtgagttgagagctcgcctcttgaatgttgaacagtgtactcttctgaaaactgcatattcactttatgtggtttcagaatactgggctcaatactaacataagaaagacacttcattgagaaattcttaagcttacagaaaacctatactctttgcacattccacataaccctagcaaaatgcagtttcttcatacttcttgcacttttttccattggaagatttgcttaggaaaattaattcctatttattcccacaaaatgttggcattgcttgattttacccaatggggaatgtgctttgaatttttggaacacttttacaattaaaaataaagtagggccatttttaatttgtttcatcagaaactatgttaaaagagagggttaaataataaatatattttcgtgtgtatttttgggaaagatttttgttccaaagcaatagtccaaaatcagatgaccctgtcccataataattatgtgtccttcatccttcctcagaggcccccatgcctcatatgcacgtgtcattgggatacactcttgggggatttggtacactctaatggatgtctaatgttcaacccctcgagaatctgaacttgagtccccagattgtcaaactactggtcagctaattgagaattttagaactcaggtctttgatttgaagtagggaacatagtggctcacaccaggagtttaggtgctgttagaaagatgggaacaagaggttttttgccaccttatttttatatgggaaattttttttaatgaagaaaaaatgaaaatgaaataacaggatgatagtgatgagtgatgtaaaacatcttacttagatggcagaaccttcgggttgtagaatagtgatgtctaaaaattaaagttattttgggaatacaccactttaatagtatagtcttataaaaattattcattatggtgaacccttcttgtctgcttattcgtttcccaacctacttattggaaccacctcaaaacccagttctgaaatgaccttaccaaaagtaaatgtatttattttttagtcagcagaactctgtaattccaaatgttgttctgtgtggtagaattttttttcaggaaccattaggttgtattgaaaatctttgttataggcgataccaaaactgattattcttttttgcagtctgctttaattcatgtccttctgcagttgctctgtattaaaacagggtaaaaaggccatagcccattatgaaaaatataatacaaaactctttgacctatgaggtaacttacagacattggtgttttcttaaccaggctgtcagtgaaagcccgtatctgtctccaggtgaatgtaatttacttccgagtactttacccagaggatgtatctccccaggtggggcagagtacagtctgatctctagcacagacagagattctggcctctgcatattctcaggtctctgtgtgtacctcccattgagtagagaagcttaagataatttctgaggagaaggaacactgctgattgtggggagcagtttagggagtccatgggaaggaaaggaaaaatacatgtgtcttggcagccatggtggtattttggtcccaatgggatgggaaggatttttgaatatttgaatgttgggatgacataaagctgcagtgcactatagagtcaagtcattgaattaccactcctgatacagggctttattgtactactgtgaagtgtatgtgtgcaatacattggtgagttcatttactggtgtacggaagagccagcaggagcagcgtggtcattgctgggtgctattacagttgcttgtagtgagtgctgttttccaggagatgggagccagttggggtgtggccagatctacttgaatatccaaattgatgctcttcttcccctgtagaccttccagccaaaagccggtacttggaagccacaggctcaccttctctatctatccaataattattaatgaagagacctccataagggagcagctggctgttatcgataaatgtaccaattattaaataattagtctccaagccattcagtgatgtcttcagcatcactataggactgtctaggtgtcactttttacctccttctggggtggaggctttccgactcccaatcatgaaggcaagttaatctttcccagttagtgacttttgcccccatagttggggtaaacacttccctagattgagaaaaagcagcttacagtcaatcctgcttctgtttgcctcaatttggtgatccagtcagtcacacataagttcccttgtattcctaaatttcatgcacttctccccagatgcctatagggttttctctcactgttgcccaatggatgtcatcccagacagtgggctcatatcttacggttttgtgcaatcattgtcgtattgtagtcttaagactcattatagtgtatttttgatatttttgaaatgtgttaaattttttaattcagtaatatgagccagagcatgttgcagcaaatctattgtttgtaaaaataacaataacaataataaataaaataaagtggaatctttttcatggctttgttttaaaaa

SEQ ID NO: 148937 - DNA, 446 bp, Homo sapiens
cgtttcatcatgttggtcaggctggtcttcaactcctgacctcaggtgatccacccgcctcagcctcccaaagtgctgggattacaggcatgagccaccgcgcccggcctgaactctcagttctaacgcagggattcaggaattgggctttcagactccttctgcagtgtcacagtccagactttttttaaatgaaggacaccccgcagtggctcacagtgggtcccagggctagcaggagcgtgctgggggagccggctctgtctttgttcgcagtgggtcccggtgctggcaggagtgtgctggtgaaccggctctgtctttgtaaatccttcaggggtcctacggctgactccaccggacagcccgtcctgggccgtgttaagcaccttttgtagaaatcgtatttttattaaaacatcaaatctgtgttcctgtaaaaaaaa

SEQ ID NO: 148938 - DNA, 733 bp, Homo sapiens
ttttttttgcagattatctaatctttttatttattttattttattttttgagacagagtctcactctatcgcccaggctggagtgcagtggtacgatctcagctcactgcaacctctgcctcccgggttcaagaggttcttctgcttcagcctccccagtagctgggattacaggtggctactattacacccagctaattgctgtatttttagtagagacgagttttcaccacgttggccaggctggtctcaaactcctgacctcaggtgatccacacgcctcagcctcccaaagtgctgggactacaggcatgcgccaccgcacctggccatattttccacactcttgaagcgcctgttccaatcacattttcaggttaagagatgaaaactttcaaatgtacatgttcacagaaatgtgctactaccctccttttacactttaactcgaattatccgatggaatcggctttgactgtttagcagaaccttggggttacatgacacggtcaagggagtattcaggaagcagaagaaatctgcgggtcctggagaatggaaccagagagagagagagagagagataaggccagagaaagcagaaaggcaggaggccaacctggggtctgcagggagacccagagaggacggcaagtcagaaagaaagttggaccacacccagggagcaaacctagtctgcagacacgatgaccaccatctccctgaaaactgg

SEQ ID NO: 148939 - DNA, 239 bp, Homo sapiens
  misc_feature (1)...(239): n = a,t,c or g
gggattttgagccaagccttcagcattgctcctcaaagctctgcaggaatattctcagagcttcatcgtgtcactcgtcctggggaaggatgtgattcccaggctcagtgtgaccaacttggaagatctgaagagaagaatcttgcgagtggtcgcgcactgcaataaaccccaagtacaagatcttgctgcacgggtttgtggtacgaactgtttggaggaanccccaanaacttncc

SEQ ID NO: 148940 - DNA, 479 bp, Homo sapiens
accatgctcagagccgcctacccgcaggtcaggtgctacgccttctccccaccccgggggctgtggagcaaagctctgcaggaatattctcagagcttcatcgtgtcactcgtcctggggaaggatgtgattcccaggctcagtgtgaccaacttggaagatctgaagagaagaatcttgcgagtggtcgtgcactgcaataaacccaagtacaagatcttgctgcacggtttgtggtacgaactgtttggaggaaaccccaacaacttgtcccagcacaaggggtctccagtgtggacgtggcctgaccagggccactggaaactgtcccaggaacgatggactcacgcttttgtccttaaactgacttaccatccgaggagttcccatgacgccaaaacagcgaatgtccatcaacaggaatcggatgggaacagaattccatggtctcaatgacttaagtttatgggaagtcattg

SEQ ID NO: 148941 - DNA, 765 bp, Homo sapiens
agaatagagacagggtcttgttgtgtcgcccaggttggcctcaagggatcctcccgccttggcctcctgaggtgctgggattccaggcatacaccactgctcccagcccagatcctgtttcctccctgtgacatttcccgcacttgctgcagccatttgctttcttagacatcacagagtcctagcccagaatctgatcagatggtggaaggagaacttcccagcaacagcatagagtgccctgcactgacgggtgcaattcctcccggctctccacaggatctcaggggacaggccccgtgtccctgcttgaccctctcaacaagggcacccgctttaccttggggtttatttgcagttcggcgacccacttcgcaaagatttcttctcttcagatcttcccaagttgggtcacactgagcctggggaatcacatccttcccccaggacgagtgacacgatgaagctctgagaatattcctgcagagctttgctgaaattccaaacagagagaggatgttagctttacgatgacactgcccacaagggcttccatgaaagaaatcagtaacactgaggggttaggttcccaggcctcagctctgttctctcttctctaaagggagggtaggggaaacagtcagttatggcaactcactggccagatcctactaaagccacaatatgtgttcaacagagacgccccgcagctaaaaccgcaaactggacaccaaggcggaccaagcacatggatctgtcctttgc

SEQ ID NO: 148942 - DNA, 1979 bp, Homo sapiens
atgaggtttcaccatgttggccaggctggtctcgaactcctgacctcaggaacgatttgtaaccctggaccgcggaagtctatgtctaagctgctttacatccgcctggcgctgttttttccagagatggtctgggcctctctgggggctgcctgggtggcagatggtgttcagtgcgacaggacagttgtaaacggcatcatcgcaaccgtcgtggtcagttggatcatcatcgctgccacagtggtttccattatcattgtctttgaccctcttggggggaaaatggctccatattcctctgccggccccagccacctggatagtcatgattcaagccagttacttaatggcctcaagacagcagctacaagcgtgtgggaaaccagaatcaagctcttgtgctgttgcattgggaaagacgaccatactcgggttgctttttcgagtacggcagagcttttctcaacctacttttcagacacagatctggtgcccagcgacattgcggcgggcctcgccctgcttcatcagcaacaggacaatatcaggaacaaccaagagcctgcccaggtggtctgccatgccccagggagctcccaggaagctgatctggatgcagaattagaaaactgccatcattacatgcagtttgcagcagcggcctatgggtggcccctctacatctacagaaaccccctcacggggctgtgcaggattggtggtgactgctgcagaagcagaaccacagactatgacttggtcggaggcgatcagctcaactgtcacttcggctccatcctgcacaccacagggctgcagtacagggacttcatccacgtcagcttccatgacaaggtttacgagctgccgtttttagtggctctggatcacaggaaagagtctgttgtggtcgctgtgagggggaccatgtctctgcaggccctcgtggcctgccgttctccaggtgaggtcaggactgccgacatccatccccagcccatggcccctcttctgtcttcctcagtccatactcctgggccccttggagatgccaggctgacggccgcttctgcaacgccctttttacaggatgtccttacggacctgtcagcggagagtgaggtgctggacgtggagtgtgaggtgcaggaccgcctggcacacaagggtatttctcaagctgccagatacgtttaccaacgactcatcaacgacgggattttgagccaagccttcagcattgctcctgagtaccggctggtcatagtgggccacagcctcgggggcggggcggccgccctgctggccaccatgctcagagccgcctacccagcaggtcaggtgctacgccttctccccagtccgccagctcctggagcaaagctctgcaggaatattctcagagcttcatcgtgtcactcgtcctggggaaggatgtgattcccaggctcagtgtgaccaacttggaagatcttgaagagaagaatcttgcgagtggtcgcgcactgcaataaacccaagtacaagatcttgctgcacggtttgtggtacgaactgtttggagggaaaccccaacaacttgcccacggagctgggacgggggcgaccagggaagtcctgacacagcctcttctgggggagcagagcctacttgacgcgctgggtccccggcctacagcttctccagcgactccccactggactcttctcccaagtacccccctctctaccctcccggcaagatcatccacctgcaggaggagggcgcctcggggcggtttggctgctgctctgctgctcactatagcgccaagtggtcacacgaagcggaattcagcaaaatactcataggtccgaagatgctcaccgaccacatgccagacatcctgatgcgggccttggacagcgtggtctccgacagagcggcctgcgtctcctgtccagcacaaggggtctccagtgtggacgtggcctga

SEQ ID NO: 148943 - DNA, 719 bp, Homo sapiens
ttttgccatgttggccagtctggtcttgaacccctgacctcaggtgttccgcctgcctcagtctcccaaaatgctaggattacatacgtgagccaccgcacccggccaaaatgtattattaatgtaaagctacaataatcaaaagaatgttcttctgactcctgaaagcacaggaagtccaaaaaccaatgcaaggttttataaggagggggttttcagatcaataaggaaagggctattcaataaatgtttcggcatgtggataatgactcagaaaaagcacttcgatccctttcttgcataatcaacaaacataaattccagatggctcagacattactataaaaagaaatgaaaacaaaaaggtcttaagaaagtaaaagtgaatacctatgtagtcctgattagccgaaggtcctcccccaaatatgaatcctaaaggtagtatccaaggaaaagaccagttttcactctgtgacacttctctgcaacacatgaccctgggtgacctcagtacccctaaagtcctcttaggaatcgccaagaaaaatgtaaccactccaacagaaaccccaacaaaacaaaaacgtagcaacaccccgaacaggcacttcacagaggaagagaatggcattatacacacacaaaaaaatggttagaactcacaataattttaaagaaaatatttctataaattgtgggattacttttctcgtgcc

SEQ ID NO: 148944 - DNA, 1019 bp, Homo sapiens
aggacatagttgaatccataagaagaaatgacagcagataaatcagttaacaaaagttcaagagctggagatcagatctttatcgacctgagaatatggaacaccagtgcctatgtggaaggaaaccaggaagcaagttcatttaatccagtgagtctggaagagtctgggagttggcagcattagcctcctgtctgagagctgtggggctgaaagcaggagcatttagaggaaaaggttgccttccacatttcgtttctcccccacatgttcaggggaatagctcactttcatcaccgtggagcactagagaaaggccattccaggggacttgaacaggagggttctggatttcaggacaccaagcatagctcagattggggatgcagtaataaagatgggattatacagagttcacataaggaagagtaggacctctaacccctttcctccagatagccacaagaatgttggccactaggctcattccctgctcagctaccaccaccatccttcccccaatgccctgacaagaactaaaggattcctctgtgtggaaactgaccagcccaggagaaaatatttttttttaatgtattttttacgcctgacctcaagtaatccgcctgcctcggcctcaaaaagtgctaggattacaggcgtgagccgctgcacccagccctatttttattttttattttatttatttatttttttgagacagagtgaaacaatgtctcaaaaaaataaaaataaactgaatggttccacagaaatactgagacttctgcttaaacaggctttcttgaacctgtacgcttccagttgggtctgctgcttccaggtcatttactaaaaatgataggaagatttaaaaaataaaaataaaaggaaggccgggcgtggtagtcacgcctgtaatcccagtactttgggaggccgaggtgagcggatcacgaggtcaggagctcgagaccatcctggctaacacggtgaaaacccgtctctactaataatac

SEQ ID NO: 148945 - DNA, 2729 bp, Homo sapiens
caaaaggcatgtttctcatttgaggaaatgattacattgagccatggaaaagttcctgggaggaaaaaaaaaaaacaaaaaacaaattgaaagtcagcagccatcagacgatcagagtgtttatttcacaaatgatcagctatttaaaaagtactctcggccgggcgcgggtggctcacgcctgtaatcccagcactttgggaggccgaggcgggcggatcacgaggtcaggagatcgagaccatcctggctaacacggtgaaaccccgtctctactaaaaatacaaaaaaaattagccgggcgtcggtagcgggcgcctgtagttcccagctacttgggaggctgaggcaggagaaacgcttgaacccgggaggcggaggttgtagtgagccaagatcgcgccagtacactccagcctgggcaacagagcaagactccatctcaaaaaaaaaaaacagtttcctgaaatattgagaagttatttttattttacttggttccaaaactagtgtgaataaggttgcttctgcaactttagtttatatgtgattcttaattttttacggtttgtagactctgagaatttgatgaaagccacagattctcttcctctagtacccatacacatctaattgcatgtaattttgggcttttgttagcctccctggagcccgggtcccagccatgtgtctaaggccaacataatggtaatagttaaaggacttcatgtagcaagccagaactgaactaaatacatggacatctcaaacatgagtgtcatttaggactgaaggcaaattaatgtcatggggtggagatcaataagaaggtaaggagccactggcagtatgagtccaaacagggtataccatggaaatcacctgtggaagaggaaggtggattccagaagaaagaaaacttgtgggagtgagcatttcaaggatggagagatcttgaagatactcacagggaagatagtggtggggcatgccatccacaacgacttcaaagcccttcagtactttcaccccaagtccctcacccgtgacacctcccatatcccccccctcaaccggaaggctgactgcccggagaatgccaccatgtctctgaagcatctcaccaagaagctgctaaaccgggatatccaggttgggaagagcggacattcctctgtggaagatgcccaggccaccatggagctatataagttggttgaagtcgagtgggaagagcacctagcccggaatccccctacagactagtggcagtggggacgctggtgatatgaggaggcagaggcagcacccaggagaaacagggcagtggaccaatggacagctccaccagctccacatctttggaagctagatttggggagagagaagctctaccccagacttaatacccattgaaatttcacctcaggtgttgtgtcctgtgtctggttaagtgtcccatggaaggggaaagccttcacgtcagaacccaaccctataccttttacttcttaaatggtgctaaccacaggtgtcccagggtgctctgtgccagttaagatttttaactttcaaggggcagggcatactgggaaatgtagtttcccaaactgccttatcacttgggtggacatatgtctccttttatgccttttggtcttgagtaattaacagcatcctcttccacgctcagaagtgttctggttggggccaggcatggtggctcacgcctgtagtcccaacacttagggaggccgaggcgggcggatcacctgagatcaggagttcaagaccagcctggccaacatggcgaattcccgttctctactaaaaatacaaaaaatgtgtggggtgtggtggcaggagcctgtaatcctagctactcaggaggctgaggcaggagaatcgcttgagcccaggaggcggagattgcagtgagccgagatcgtgtcactgcactccagcctgggttgaccaagagtgagactccgtctccaaaaaaaaaaaaaagaatttattaacctggttggttaataaattgtgtggtccctgccgggcgtggtggctcacgcctgtaatcccagcacttttgggaggccgaggcgggcagatcacgaggtcaggagatcgagaccatcctggctaacacggtgaaaccccgtctctactaaaaatacaaaaaattagccaggcgtggttggcgggcacctgtagttccagctacttgggaggctgaggcaggagaatggcgtgaacccaggaggcggagcttgcagtgagccgagattgtgccactgcactccagcctgggccacggccacagagcgagactctgtctcaaaaaaaaaaaaaaattaaaattgtgtggtccctttccatgtcacagagtctgcttttggctcagagtctgtatctagcctgtgtcaggatattgcctgttcttcccaccttgacttccagagcagccatcgctggtgagctttagttctccttagggttccaaggcattagaagtaagagtgtagcttggaaaccaacttctgtgatttaggaaagctgtctctttcctaaggtaatagggggtttatttcatttaggccccagttggtaggttttaaaataatttataaagtgttttaataatttggttgtcttttttaccttgctaaaccaagcctctaaaaactcaaattattcccttgataaatttttataatggaaaaaaaaaa

SEQ ID NO: 148946 - DNA, 888 bp, Homo sapiens
atgacaatggtagaagttacgatattaatgatcatgggactctatagaatctatggtttcgctgttgcagtggtgtccatgatcctatcttacaatgtctgctctgaaggtgaagtggtctctgtaatgttctccttcgtcgttacatcatcaagttgtggaatgcatcgtagcaccctgctctcgagtgtatatagtcacctgatatttgattctgcctacgtgattaacaatgtagctgatgcgctgtcacgaggctttagcatgcactgcatgcattgtgacaatctaaaaacttgtcacacttcacatggatctgtcatggcggaaacagcggttatcaatcacaagaaacgtaaaaatagcccgcgaatcgtccagtcaaacgacctcactgaggcggcatatagtctctcccgggatcaaaaacgtatgctgtatctgttcgttgaccagatcagaaaatctgatggcaccctacaggaacatgacggtatctgcgagatccatgttgctaaatatgctgaaatattcggattgacctctgcggaagccagtaaggatatacggcaggcattgaagagtttcgcggggaaggaagtggttttttatcgccctgaagaggatgccggcgatgaaaaaggctatgaatcttttccttggtttatcaaacgtgcgcacagtccatccagagggctttacagtgtacatatcaacccatatctcattcccttctttatcgggttacagaaccggtttacgcagtttcggcttattgaaacaaaagaaatcagggttcctctagagtcggcacacacctgtaatcccagctacttggaggctgagacaggagaatcacttgaacccggaaggcagaggttgcagtga

SEQ ID NO: 148947 - DNA, 6009 bp, Homo sapiens
  misc_feature (1)...(6009): n = a,t,c or g
ttataacacagaacccttctcaatgttcagatatacctgctttacagtggacacatgccatttcttgacagtcaaggcaggctgacgaaagacagaattttatttccttagtttattaaagatgacaatgaactgccaggctgcacaagcaccacagcaggtggaaacgcagttcagagcacgggcggcacacacggaacatcttctactaagaacatcgcactccttttatgttagttcaacgaaagctctaaatccttggcagagaacgtcaaaaacagcctccatttaagtggaaaatatttgtcttccactcttctgctatgtcttgaatcttgtctccaccttggtaagcaaactatgttttttttttctttccctttacctacaagaaagaccactatcacctgrcrttcatttagaaggaattctcttcagtgcattcaaagcttctccccngcaacagcagggggatttttcagaatagtggtaacttgcaaagtgcttccaaaacatcccatcctctacccactttcccccctcttggaataaataactgggtatttggaaggtgaggacggcatcgtgtcagagtcactaaaacagacgcacgatctaaagggatggggtgcggttgagggagctagggaaaaataagtgacaagtgaggagcctatgagactgttgagttcggcttcagaagctgtcagcattgtcatcctttgatcctatgctgatgtgaaacaggcaggacaagacggcacatctgtcctccagcgcagtgacctggagaaagagctggatgtgtcacctttttgttttttgagacggagtctcactctgtcacccaggctggagtgcggtggcgcaatctcggctcactgcaacctctgcctcccaggttcaagcgattctcctgcctcagcctcccaagtagctgggattacaggcgtgtgccaccacgcccagctaatttttgtatttttggaagagacagggtttcaccacattggccaggctggtctcaaactcctgacctcatgatccgcccgcactggcctcccaaagtgctgggattacaggtgtgagccactgtgcctggcctggatgtgtaatttaaaccaaaactggaagtagagctcatttttataaactcctgggtctgaatctgggacctaacccctagttaaacttgagttctgtggggtcattcttaaagctccctgaaggacctgggcacttctagtcacagcccttcagaacttctgggacttggctttttgagtctcactatgaacagaagggagaacagcctcagggtcttctagccctacatggctttcagatcccaactttgaggcagagaaatcaagggcaggggccagttcccacatgttccctctcacgctggtggagcctcagccctggccatcaccttaatgcctctcccacttccctgggagactccttcttaccgccagctcaagctctcatcagcttccaccaaccacaggcaactttccgctcagcttccagggcagcacccacgcccatttctttcttaccagcaagcaactatgagaagacatgcccatgggcagaattcaatcccagaacaaaaatgatgcaggctttagttcacagagctgccagctcttggagaagccactctgccaggtgttttcacagaggttagaagctgcatcaacttaaggaacatcacaaacacacgcatggccccacccaaggacttcactgtcaacacacacattaacgggggggaagggggaggcagcacaccaaaatcagcattatcaaaaggtcttcaccatcaacacacattaacggggggaggggggcaacacactaaaatcagcattatcaaatgaacagataaacattaccaggctacacagagttcagtgcataattggcataaaggctcttgttatcccaagaacacagggacattcacactcacatccacaaaccgacaagttctgtaacagcactaatagcaggaagcttttcaccaactttgaccaaagaagctaaggcaagagagactcggccaccagggaaggacccagctctgctgcaggaaggggagagaacggagtcgggttgtacttttactcagaagcacaacgaccatctaacagaggacagagtcatcagggacacgctaagaagatggtgggtgaggttcctgtcctcaccttaggatggcatcagggacctgcctgagcttcaaagatcacacctgcaccaaaaagccaggttaactaagagaccttaacaccaagagggggccgaccgctcctctgagtaagcgctccttcagcgacagagctggcgcctcacgtatgcttgcggcgtaaggctacaggtgagcctggcctgagcatcagttctgttctttgcttcaagatcaccaaggtagatgaagaaagtcagcttgtggcatcctctatgcttcaaatatttcaaacaagaactcccggcaacattaggacattcccagcttgcctctgaggtctctgaggagtctaggatagtcaggattgttctgtggcccccaaaatacccaaataagtggacgaaatgcccatgacgtagtcctattctctgctgcttctcctcggggcacagtctgaccccagtccaggacagggagagggaaaacgccatccccgtttcagcagcaggagaggtggttgagaaaggcctggctcagaagctccagaactgaaacaaaggaaaattggaaatgatacctgacatgcaggtgaaacctagaggagaaggccacagacgctggaagaacttggtcttgctgtctcttccactgacagaggcactagaagcttcactgaaggacccgcatgtcagttctgatggaaacacctggtgtttacaaattatctgtcaccacagactctggacccatcaacctgccgacggctgactgcacacagacgtcagacaagtcagtaaaaaaaaaaaaaaagatgatgataattaaaaaaaaaaaaaaaaaagaagccccaggtggggcgagtccttcaaagagtggctcagttctgcaacaggtgtgacccggcccggagggagggctgcacgtgctttcttcaggtggcctccaggacggcggcttccagggccagcgcttccgcgggctcctcctcgtagtctgacaggtaagactccaggctctgcctggccagtgcctcccgccgggcctgcagccgctcgcagcgcggacagcttccagacttgaagcaggctttatggtaacacgctttacactcttcacaggtccggcacttatggagctcaaagggaaagatgatgtcatcctcattctgacagaactcacagatgaagcctttggcttggcagagcatgcatctctccacatgggtagcccctgccctggtgagctcagcaagccggggccccagctcccccttcctggtcgcagtcaggtcattcagtgagtacaggtggaggtcctctgtcaggtggcctgggactgtgtcaaaggaatccagaagctccttggccagtcggcaagtcttgaacatgttcttcatgtgacacagctggacccgcagcagccggacttgattgagcagcttgaccttcctatagagggcactgtttatgtcctgcacgttgaagagaggatcattccagatcttaatgagcaggtccttggagaagttgctgacgtagtacttgctgaagtcccacttgcgcagaacccggctggggatggccatctgggcattctcgtggcagcactggcagaagtacttgcccaggtactcacagtaccgcagtcgcttgatgtaatcagggtcagtccggatgccacatcctgcacagcggtaattctgcttggccacggcaattttcctcgttggggctggatgaacattaaaaattatctgaggccggggcggggcccactccaagttgccacgaacacgaatccgcagcttgtagatgtcagcgtgctgcccgtcatccggtgagatgggcagtgagtcaggaatgggcaggagcttctgaggggcatcatgctccgggacaagccactccagctccgaggcggctggaagctgcatcccctcaaactgcttcaggagccccatggccaccgcctcagcagacgtggagtgcaggaagcagtgggagaaggactgggaggaaacgaaggatttgctgcttgaggctgtgttccttctgatgtcagcatcttggatttcaaattcatcaacctcatcagcagagccagagtcagagagctgtgccgaatcacgtgagctgaactgggagctgctggaggtgacccgaaagcttccgtgctcagcctcctggtacatggggagcaggttcttggtgcggatttgctggcgccgaaggcggatcttctgcttcagctcctggatctctctatcactgtcttcctcttccacttcctcctcctctaggcactggctcatcatgttgcacttcattagctcgatggcagcaattaaggactctgagatgctgaagtgggcattctccttttccaggtcggcacagctgccgaagtcttgctcagagaggtagctgatgagggactgtccttctgatggtcttcggaacatgccttcccctgagcacaggtaccgaccaccttcatattccatgtacagagagctgggtgtgctgacttcactgctttgaccagagtagggcaaagggcctctcaacttcgccttatcattgcaggattctggagctcccctggaggcaatgctggtatccgaatgggagcgaatgtggcttttctttgccccactggtgacagtgagtgtctgcccctctgagaagctggacctgcggaggacactggacagctggctctccccacctccttcctggtcccctaaggaagaggcagcagaatctggcttctgggagctgctggaggagaacaaattggaactgctgctctcggcattgctgctgtgactctgacagctggcagtccggcctcgggggtccaagttgccaatggccaggtactcaggcccctcactggcatcacctggggaatcattctggctgctgacccaggatgcctctatggggctggtcagagtactggagctcatttcatttggggtcaaaggggaatccctggctagtgcagagactgaaactgggggggcttggatggtttgatcctctgctggtgagacgtgccctctgctttcttgaggtttccggggagggccagagagtggaaaggaagtagatcttctctgagccattgttgggcacggattggtggaggctagagaaggacccaaagtaggaatgctgagcatagctgtttggaggggtgtatgtggaactgggcagggctgtcaggctctggctctttgtcaccaggagcgggctctcgtgctttctggcaaacatggacgcatcgatctgagccaggaggcgggggttgttctgttccactgcttccaggcactgcagcatggccgtgacatgagcgtcacttagcaggaaggcagcatctgtgtagaattttctgatatactgtctatccccgagcaggggccggagctgggctgagaggcagtggtactgcaggctgtgctgcagccacagctcggcaacagcacgttcactggcaccatcagcactgctctggtcgttctcgtgcacgctgatgaacttctccacgtgaagggctgagtggggactgagccaccggatgtctttcacgaactgccagtaatccgtctggcggcggcacgcctgctctcctcaggcaggcgctcctcgccgcctccgagctccattcccgcgccctccggccgcatccggggcggtgaggccgcctcttcgcccaagagaggcgtccctgccgcttcgcccttcagggctcccggggccccctggggccggaggaggcacctgcggccggtgggctccggg

SEQ ID NO: 148948 - DNA, 1867 bp, Homo sapiens
  misc_feature (1)...(1867): n = a,t,c or g
ccttcctcaccccgtcccctgagtcccctgaccagtggtccagctcgtccccgcattccaacgtctccgactggtccgagggcgtctccagccctcccaccagcatgcagtcccagatcgcccgcattccggaggccttcaagtaaacggcgcgccccacgagaccccggcttcctttcccaagccttcgggcgtctgtgtgcgctctgtggatgccagggccgaccagaggagcctttttaaaacacatgtttttatacaaaataagaacaaggattttaattttttttagtatttatttatggacttttattttaacccagaaacactgcctttttatttatatgtactgttttatctggccccaggtagaaacttttatctattctgagaaaacaagcaagttctgagagccagggttttcctacgtaggatgaaaagattcttctgtgtttataaaatataaacaaagattcatgatttataaatgccatttatttattgattcctcttttcaaaatccaaaaagaaatgatgttgggagaagggaagttgaacgagcatagtccaaaaagctcctgggggcgtccngggccgcgcccttttcccccgacgcccaccccaacccccagcccagccccggcccgcttccaccagcatcaacctgccctgtttagggagaagctggcattccagagggcaaacgggagggcaaagctggcttcacctttccggcacggcggatttaattttgcatctgaaaattagggaaacaagttgaagcatatggggttagatgttgccatgtgttttagatgggttctttgcaagcatgcttgtggaaaatgtgtttttcggagtgttgttattgccaagagttgcacccatgggtaccaatcatggaatcttttgtttttcaggtttcagtatttatgtagttgttcgttgggttatacaagttcttggtccctccagaaccaccccggccccctgtccgttcttgaaatgtaggcatcatgcatgtcaaacatgagatgtgtggactgtggcacttgcctgggtcacacacggaggcatcctacccttttctggggaaagacactgcctgggctgaccccggtggcggccccagcacctcagcctgcacagtgtcccccaggttccgaagaagatgctccagcaacacagcctgggccccagctcgcgggacccgaccccccgtggggctcccgtgttttgtaggagacttgccagagccgggcacattgagctgtgcaacgcccggggctgcgtcctttggtccttgtccccgcagccctggcagggggcatgcggtcgggcaggggctggagggaggcgggggctgcccttgggcccaccccctcctagtttgggaggagcagatttttgccaataccaagtattagcctatggcagaaaaaatgtctgtaaatatgtctttaaaaagtggcattttgtttaaaaaatcttaatgaatggagtctgttgtgtgtcatgccagtgagggacgtccagacttggctcagctcggggagccttagccggcccatgcactggggaacgctccgctgccgtgccgcctgcactcctcagggcagcctccccccggtctctacgggggtccgccgtggtgcccatccccagggggcatgacccagatgcgtccccaagatgttgatttttactgtgttttataaaatagagtgtagtttacagaaaaagactttaaaagtgatctacatgaaggaactgtagatgatagtaatataatcatctttttttgttaactgatttgcaataaaaatgatactgatggtgatctggcttccaaaaaaaaaaaaaaaaa

SEQ ID NO: 148949 - DNA, 331 bp, Homo sapiens
  misc_feature (1)...(331): n = a,t,c or g
tatgtatgtatgtatgtatgtatgtatgtatgtatgtatgtatgtatgtatgtatatatttaatnnnnnnnnnnnnnnnnnnnnnnnnnnnnnnnnnnnnnnnnnnnnnnnnnnnnnnnnnnnnnnnnnnnnnnnnnnnnnnnnnnnnnnnnnnnnnnnnnnnnnnnnnnnnnnnngtaatttttaaatgatctaacaggcacacattaaaaaataaaaagaaatgagtgaaatttattttaatgtaatatttcaaaatgtaataaagatgaaaaatactaagatattttaccttttttttcattctaaatctttgaaatccagtatattt

SEQ ID NO: 148950 - DNA, 352 bp, Homo sapiens
gaagctgctggcatctgacctcctggacaacaaccgcatcatcgaacggctaaatagagtcccagcacctcctgatgtctgagctccatggggcacatgaggcatcctgaagcattagaatgattccaacactgctcttctgcaccatgagaccaacccagggcaagatcccatcccatcacatcagcctacctccctcctggctgctggccaggatgtcgccagcattaccttccactgcctttctccctgggaagcagcacagctgagactgggcaccaggccacctctgttgggacccacaggaaagagtgtggcagcaactgcctggctgacctttctatcttctctg

SEQ ID NO: 148951 - DNA, 449 bp, Homo sapiens
  misc_feature (1)...(449): n = a,t,c or g
gccgggnactacagccacgtgccactacgcctggctagttttatttatattttcagtagagatggggtttcaccatgttggccaggctggtctcgaactgctgacttcaggtgatctacccacctcagcctcccaaagtgctgggattacaggtgtgagccactgggcccaccaccctgtcacatatttttatcatatccatctcagacaattgaagtttttcttttcctcaaaaatccaagatgagaggttacaataaatacagtggagcatatttatttgtattctaaactggtcaaatagtcatgtagatggaatcttagaggaaaaattatgaaagattttaaaattaaaaatgcttactcatctagcatacttctactgagttttcttagctttttattgtctttgagcccaatataatttattatgtaaattatattgagctg

SEQ ID NO: 148952 - DNA, 383 bp, Homo sapiens
atgaattgaggcaccagggcccattaacttctccatgttgctcgccatgtttggtaagaagttaaatggcacagatcctgaagacgtcatcagaaatgcttttgcttgctttgatgaagaagcaacaggcaccattcaggaagattacctgagagagctgctgacaaccgtgggggatcagtttacggatgaggaagtggatgagctgtacacagaagcactggtggtgaaggggagacacaactcccagcccgttgtttgttttacaagtggactcttgcatggagaggaagctcaggaatggggtggctgggcaggagggctgctgtgttccacgttccagcagacttgcagacctgcccagggcaaaaggaagaactggt

SEQ ID NO: 148953 - DNA, 895 bp, Homo sapiens
tcgcgtccgctctgcgtagcagggtggtgtgatagcggcagtttaggggcttcggattatggtgctccggattctcgctagctgtgcgcgggacgtgaaccaccaccatgtcgagcaaaagaacaaagaccaagaccaccaagaagcgccctcagcgtgcaacatccaatgtgtttgccatgtttgaccagtcacagattcaggagttcaaagaggccttcaacatgattgatcagaacagagatggcttcatcgacaaggaagatttgcatgatatgcttgcttctctagggaaagaatcccactgatgcataccttgatgccatgatgaatgaggccccagggcccatcaatttcaccatgttcctgaccatgtttggtgagaagttaaatggcacagatcctgaagatgtcatcagaaacgcctttgcttgctttgatgaagaagccaacaggcaccattcaggaagattacctaagagaagctgctgacaaccatgggggatcggtttacagatgaggaaagtggatgagctgtacagagaagcaccttattgacaaaaagggggaatttcaaattacatcgagttcacacgcatcctaactggaaggcccccaaagcacaaagatgactgaaagaactttagctaaaatcttccagttacattgtcttactctcttttacttctcagacacttcccccaccctcatagaacctgttgcatgcaacttagtttcacgagctttgcctcttctttttgatgtatttattccagacctttctgccacttagcacttgtataatcagactggaaatggggatgagggtgtaaattgtattgaaaaagatcgcgaataaaaatcaacaaatgtgaaagcccaaaaaaaaaaaaaa

SEQ ID NO: 148954 - DNA, 969 bp, Homo sapiens
atgtcagtaggaaacttggaagagatcatcgatgacaatcatgccattgtgtctacatctgtgggctcagaacactatgacagcattatttcatttgtagagaaggatctgctggaacctggctgctcgattctgctcagacacaaggtacatgcggtgataggggtgctgatggatgatacgggtcccctggtcacaatgatgaaggtggagaaggccccccaggagacctatgtcaatactggggggttggacaaccaaattcaggaaattaaggaatctatggagcttcctctcccccatcctgaatattatgaagagatgggtacaaagcctcctaaaggggtcattctctgtggtccacctggcacagccactttcttgagagtggttggctctgaacttattcagaagtacctaggtgatgggcccaaactcgtacggcaagtatttcaagttgctgaagaacatgcaccatccatcatgtttactgatgaaattgaagccattgggacaaaaagatatgactccaattctggtggtgagagagaaattcagcaaacaatgttggaattggaactgttgaaccaattgggtggatttgattctagggaagatgtgaaagttatcatggccacaaaacaagtagaaactttggatccagtacttatcagaccaggccgcattgacaagaagatcgagttccacctgcctgatgaaaagactaagaagcacatctttcagattcacacaagcaggatgacactggccaatgatgtaaccctggacgacttgatcatggctaaagatgacttctctggtgctgacatcaaggcaatctgtacagaagctggtctgatggccttaagagaacatagaatgaaagcaacaaatgaagacttcaaaaaatctatagaaagtgttctttataagaaacacgaaggcatccctgaggggctttatctctag

SEQ ID NO: 148955 - DNA, 1338 bp, Homo sapiens
  misc_feature (1)...(1338): n = a,t,c or g
tatctttttcatccaaaataggtaaaaccttgttagccaaaggagtagcaaaccaaacctcagccactttcttgagagtggttggctctgaacttattcagaagtacctaggtgatgggcccaaactcgtacgggaattgttccgagttgctgaagaacatgcaccgtccatcgtgtttattgatgaaattgacgccattgggacaaaaaggtagactttctcatacttattttgccttgtttagtaggggaacaccgcatagctcttctcttgaggaatgaggcaatctccagggggctctccctatgggccacagttcttgctgtgcgtgggccttccatggcatgctttaggctctgctctcccaggagcccagcttaacaaattgcccagtaaactgtggaacggtctggaagaaactggtcagttatgaataaccatgtcttgagcacccgccctgatccaggaccatctggactctagggacacagttgtgagcacaagtctctgccctggaggagctcacaggttgtagggatcagataccaaacatggaaacagaataaatgatacaatttcagacacagaaactgctatgaaaaaatatgatctgtaacttggctgatgggagcnnnnnnnnnnnnnnnnnnnnnnnnnnnnnnnnnnnnnnnnnnnnnnnnnnnnnnnnnnnnnnnnnnnnnnnnnnnnnnnnnnnnnnnnnnnnnnnnnnnnnnnnnnnnnnnnnnnnnttgatgtctagtgagggctgctctctgcttccgagatggcacctattctgcagaggagacaaatgctcaggggacaaacaaaagagcaaaaagggcctacactagttccctgcagcattttttataaggaatacatgctgtataaggcctttttctctttttagaaggaactcatgctgtattaagctctgcctcatgcctttagccctttccaaaaggcctcatcttttagccacacagtagggattaagtttcaacacataaatttggggaaatacattcagaccatggcaaggggtgctgaatttattttttccgagcataattgagggagtgccatgtgagttgaaacaggaatgtttgttaaggtgttttgtcacaatgaggtctttgctgtaattccccttgagcaggcgatcagttgggttttcattccttcccttttttttttttccaaagatatgactccaattctggtggtgagagagaaattcagcgaacaatgttggaactgctgaaccagttggatggatttgattctaggggagatgtgaaagtaatctatagaaccacacacacgctcgtgcc

SEQ ID NO: 148956 - DNA, 1638 bp, Homo sapiens
aattccggcggaagtggtggaggaacttccggcagcggcagctcaagtggccaaggcaagatgggtcaaagtcagagtggtggtcatggtcctggaggtggcaagaaggatgacgaggacaagaaaaagaaatatgaacctcctgtaccaactagagtggggaaaaagaagaagaaaacaaagggaccagatgctgccagcaaactgccactggtgacacctcacactcagtgccggttaaaattactgaagttagagagaattaaagactatcttctcatggaggaagaattcattagaaatcaggaacaaatgaaaccattagaagaaaagcaagaggaggaaagatcaaaagtggatgatctgagggggaccccgatgtcagtaggaaccttggaagagattattgatgacaatcatgccatcgtgtctacatctgtgggctcagaacactacgtcagcattctttcatttgtagacaaggatctgctggaacctggctgctcggtcctgctcaaccacaaggtgcatgccgtgataggggtgctgatggatgacacggatcccctggtcacagtgatgaaggtagaaaaggccccccaggagacctatgcagatattggggggttggacaaccaaattcaggaaattaaggaatctgtggagcttcctctcacccatcctgaatattatgaagagatgggtataaagcctcctaagggggtccatccttttggtcccacctggccacgggtaaaaaccttgttagccaaagcagtagcaaaccaaacctcaagcctctttcttgaggagtggttggctatgaacttattcagaagtacctaggtgatgggcccaaactcgtacgggaattgttccgagttgcatgaagaacatgcaccgtccatcgtgtttattgatgaaattgacgccattgggacacaaaagatattgactccaattctggtggtgaggagagaatttcatcgaacaaatgttgggaactagctggaaccagttgggatgggatttgattctagggggagatgttgaaagtttttccatgggccacaaaccgaataggaaactttgggatccagcacttattcagaccaggccgcatttgacagggaagaatgagttccccctgcctgatgaaaagacgaagaagcgcatctttcagattcacacaagcaggatgacgctggctgatgatgtaaccctgggacgacctgatccatgggctaaagattgacctctctggtgcttgacattcaaggcaatctgttacagaagctggtcttgatgggcctttaaggagaacgtagaatgaaagtaacaaatgaagacttcaaaaaatctaaagaaaatgttctttataagaaacaggaaggcacccctgagggcttgtatctctaatgaaccatggctgtcatcaggaaaatggttgggagatttctcaatccctgaaagggatgaggttggggggagttgcccagaggaatccctgttcccactgattttttattagcaaaacatcctgtgtcttttggagtacgatgtgtaagtgcccattgggtggcctgttggtcactgtgcagcagtctgctttcccaataaagcgtgctctttcacaag

SEQ ID NO: 148957 - DNA, 408 bp, Homo sapiens
cctggatttgaatcagggacctcttgatttgcagtcaaatgctctacccctgagctatacccccatgtaattgcctgtctccaataagaactataaacctgtatggccacaccctgactgtcaccattatgagatatgtacttgcttcgtcacgatatacccccttcctactccacacctgcctgccagctctacttacaaccagcatccttccttctccagtgtgtgactgaaggcagggacattaaaatcactgcggtttgcagccagaacatccttcagactcgcctagaacagagggactcaaagaactggttgctcaacagaccctttaaaggtgaggctgggctgggcagagctgggtacaagcaaaagttcttgagccccacttgaggactcctaagccac

SEQ ID NO: 148958 - DNA, 1608 bp, Homo sapiens
tatcgaattccgggtggagggacctggcaaagcgccaggccccgcgtgggctcccggcgagcggttgatggcgagggggcgcggcgcgggctctgtagcccgagttcccgacgctggaggcccggcccgcctcagccgcattgtcccgggccgcgcgcaccggccctgagctgcgccgccgcagcacccgcccgccgcccgcggggccatgcggagagccgccgggatggaggacttggctccgcggaggaagaggagtcctggtacgaccagcaggacctggagcaggacttgcacctagctgcggagctggggaagactctgctggagaggaacaaggagctggaggggtccctgcagcagatgtactccaccaatgaggaacaggtgcaggagatcgagtacctaaccaagcagctggacacgctgcggcacgtgaacgagcagcacgccaaagtctatgagcagctggacctgacagcccgggacctggagctgaccaaccacaggctggtgctggagagtaaggctgcccagcagaagatccatgggctgacggagaccattgagcgcctccaggctcaggtggaggagctgcaggcccaggtggagcaactgagaggcctggaacagctgcgagtgctccgggagaagcgggaacgcaggcgtaccatccacaccttcccctgcctcaaggagctgtgcaccagcccccggtgcaaggatgctttccgcctacacagttcctccctggagctgcccgcggcccctggagcaggagaacgagcggctgcagaccctggtgggggcgctgcgctcccaggtgagccaggagcggcagcgcaaggagcgggcggagcgcgagtacaccgcggtgctgcaggagtactcggagctggagcgccagctgtgcgagatggaggcctgtcgcctgcgtgtgcaggagctggaggccgagctgctggagctgcagcagatgaagcaggccaagacctacctactgggtccggtacgaccacctggccgaggccctgctcgcacccctcacgcaggcccctgaggccgacgatccccagcccggccgcggggacgacttgggcgcccaggacggggtctcctcaccggcagcctctccaggccacgtggtgcgcaagagctgcagcgacactgcgctcaacgccatcgtggccaaagacccagccagccggcacgcgggcaacctcacactgcacgccaacagcgctgcgcaagcggggcatgtccatcctgcgggaggtggacgagcagtaccacgcgctgctggagaagtacgaggagctgctgagcaagtgccggcagcacggggccggagtgcgcgacgccggcgtgcagacctcgcgccccatctcccgggacagctcgtggagggacctgcgcgggggtgaggagggccagggtgaggtcaaggcaggagagaagagcctgagccagcacgtggaggccgtggacaagcggctggaacagagccagcccgagtacaaggcgctcttcaaagagatcttctccaggatccagaagaccaaggctgacatcaacgccaccaaagtcaagacgcacagcagcaagtga

SEQ ID NO: 148959 - DNA, 545 bp, Homo sapiens
aaattgagacagaggtcttgctatattgcccaagctggtctcaaatttctggccttaagacatcctcttgtctcagcctcctgagtagctgggaccacaggcacgtgccaccacacccagccaaaactggattgacatgttctacaataacacctaaaggctactttcatttcaaatatattatgcaatattaaccagattaccaattatgtaataattgttcgtaaatacctgaaacaaaaagactgagggcaaaaacttacttctgtccctacccaaagaagcaatattagatgagagcacacaaactaagaataaaatcacattctgagaccctgccaagaacctaatagaaacattcttttatcaagcagtacaagtcaaattttaaaccattaattcactcatgcacaatgactacatggatcagatcacctgttacacatatgctgcttagcaaagtctcatttccagtttaacaaagctttagattagcatcacaaatgttaagacttatctttacttgaaccatcaaaacaagctag

SEQ ID NO: 148960 - DNA, 461 bp, Homo sapiens
ctctcttccatccttgccaagacagccagcaacatcattgatgtgtctgctgcagactcacagggcatggagcagcatgagtacatggaccgtgccaggcagtacagacatacagggcatcacactgaaaaggagctgtgatctgagggtcaggagtgtgggcctgggtaccagcactgccactgacttgcctctctctcagccttagttgccccttcactgaagacctttccagctttggtgatctacgattctatcacagcaagcaacaggaagacagagcatcatgctaggcacataagaagcttttaaaatactggttaaattgagatcaccacaccaggggaatagtgtccaagtcatgctccagctcctttcccctcttagggatcttggactagaaaaggccaaactttgtttatttcttaaaacttgaatctgagttcacagaaaaaaaaaaa

SEQ ID NO: 148961 - DNA, 904 bp, Homo sapiens
gggggtgggggcgggtggttgcctgcgggaggccgccgcgggtcatgtgaccggaagggctcctcacggacgccgtccctcctcggcgcggcctgagcgcccggcccgaccccggccatggggtgctgctacagcagcgaggaacgaggactcggaccaggaccgcagaggagcggaagctgtctgtctggaccctagtcagcccccccctaccaaagctctcaatggagccgagcccaactaccacagcctgccttccgctcgcactgatgagcaggccctgctcttcttccatccttgccaagacagccagcaacatcattgatgtgtctgcttgcagactcacaggggcatggtgcagcatcgagtacatgggaccgcgccaggggagtacagcacccgctttgggtgttgcttgagcagcagccttgacccatttggaagaagcttgccaccgctgccgtctctttaccagccagccccaccaagtgctggccagttgagcccattcccgttctctgatttttgcagcaggtcttcaaggatagcctggttatgcctacagttgcacttttttcagatccgtggtggacgcaaaagaggagttggttgtaaagtttggggatcccatgaagagagggggtccttggacagctcttctcctctcttcatcccatctctaccccacccccttggccccccagccttcacttgcggcttatacagtaccctaacctgcttactaatcacagagaaaaatgtgaagaaggaggaagaagaggaaggctagaaagctgaggcaagttagggtagaaaccttttgggactgggctttgaagttcttgccaggataagtgttggggccaaaagaaagaagctcgtatgtcttcgtatgattgggaaa

SEQ ID NO: 148962 - DNA, 389 bp, Homo sapiens
  misc_feature (1)...(389): n = a,t,c or g
ctggaccagaggtgatgcattttcccctgttcaacatagatgcctgtggaggtaggtgcaggggaggagcaggtgagaagccaccnnnnnnnnnnnnnnnnnnnnnnnnnnnnnnnnnnnnnnnnnnnnnnnnnnnnnnnnnnnnnnnnnnnnnnnnnnnnnnnnnnnnnnnnnnnnnnnnnnnnnnnnnnnnnggaaacttacagtcatggtggaaagcgaaggccaagcaagtcaccttcttcacaaggcggcaggaaggagaagtgagtgccagcagggcaattgccagatgcttataaaatcatcatatcnnnnnnnnnnnnnnnnnnnnnnnnnnnnnnnnnnnnnnnnnnnnnnnnnnnnnnnnnnnnnnnnnnnnnnnnnnn

SEQ ID NO: 148963 - DNA, 413 bp, Homo sapiens
tctcaagagtgttgttgccacagagtcacatcagtatgttgttggtgataccattacgatgcagctgatgaagagggagaaaggggtgttggtggctttgccatctccatttctcctctcagcagaagtccaggttcccatgcagactttctgctgacccctctgtcacccactgccagtcagggcagtccctcattctgcgttgggagtctggaagaagactctcccttcccttcctttgcccagatgctgagggttggaaaagcaaaagcagatgtgtggcccaaaactgctccaaagaaagatgagaacagcttagttcctcctgcccctgtggacagcgacggggagagtgataattcagaccgtgttcctgtgcccagttttcaaaattccttcagccaagctattga

SEQ ID NO: 148964 - DNA, 564 bp, Homo sapiens
gacaccgagacagccagccctctcccctgcctcgcggcgggagagcgtgtccggccggccggccggcggggctcgcgcaacctccctcgcctccaaagaaagatgagaacagcttagttcctcctgcccctgtggacagcgacggggagagtgataattcagaccgtgttcctgtgcccagttttcaaaattccttcagccaagctattgaagcagccttcatgaaactggacacaccagctacttcagatcccctctctgaagagaaaggaggaaagaaaagaaaaaaacaggacggaaagctcctgttcagcacctcagtcgtccacaccaagtgacactactggcccaggctaccttctccatctggtttttgtttttgtttttttttcccccatgcttttgtttggctgctgtaatttttaagtatttgagtttgaacagattagctctggggggagggggtttccacaatgtgagggggaaccaagaaaattttaaatacagtgtattttccagcttcctgtctttacaccaaaataaagtattgaaacaagagaaaaa

SEQ ID NO: 148965 - DNA, 3738 bp, Homo sapiens
atgagcgggtctaacccgaaggctgcggccgcggcgtcggcggctgggcccggggggctggtggctggcaaggaggagaagaagaaggcgggcggcggcgtcctgaaccgcctgaaggcgcggcggcaggcgccccaccacgcggccgacgacggcgtcggggcagcggtcacggagcaggagctgctggcgatggacaccatccggcccgagcacgtcctgcgcctcagccgggtcaccgagaattatttatgtaaacccgaagacaacatctacagtattgatttcacccgcttcaaaattcgagatttggagacagggacagtactttttgagattgccaaaccttgcgtttcagaccaggaggaggatgaggaggagggaggtggagacgtggacatcagcgcaggacgttttgtccgctatcagttcacaccggcatttctccgcctccggacagtcggggctacggtggagttcacagtgggagacaaacctgtttcaaacttccggatgatcgaacggcactatttccgggaacacttgctgaaaaactttgactttgattttggcttctgcatccccagcagtaggaacacttgtgaacatatctatgagtttccccagctttcggaggatgtcattcgtctaatgattgaaaatccttacgagacccgctctgacagcttctactttgttgacaacaagctgataatgcacaacaaggctgattatgcctataatggaggccaggcctggcggcagttacacaccatctaccagtctgtggaactgcccgagacacaccagatgttgctccagacatgccgggactttgccgagaaggagttgtttcccattgcagcccaggtggataaggaacatctcttcccagcggctcaggtgaagaagatgggcgggcttgggcttctggccatggacgtgcccgaggagcttggcggtgctggcctcgattacctggcctacgccatcgccatggaggagatcagccgtggctgcgcctccaccggagtcatcatgagtgtcaacaactctctctacctggggcccatcttgaagtttggctccaaggagcagaagcaggcgtgggtcacgcctttcaccagtggtgacaaaattggctgctttgccctcagcgaaccagggaacggcagtgatgcaggagctgcgtccaccaccgcccgggccgagggcgactcatgggttctgaatggaaccaaagcctggatcaccaatgcctgggaggcttcggctgccgtggtctttgccagcacggacagagccctgcaaaacaagggcatcagtgccttcctggtccccatgccaacgcctgggctcacgttggggaagaaagaagacaagctgggcatccggggctcatccacggccaacctcatctttgaggactgtcgcatccccaaggacagcatcctgggggagccagggatgggcttcaagatagccatgcaaaccctggacatgggccgcatcggcatcgcctcccaggccctgggcattgcccagaccgccctcgattgtgctgtgaactacgctgagaatcgcatggccttcggggcgcccctcaccaagctccaggtcatccagttcaagttggcagacatggccctggccctggagagtgcccggctgctgacctggcgcgctgccatgctgaaggataacaagaagcctttcatcaaggaggcagccatggccaagctggccgcctcggaggcgccgaccgccatcagccaccaggccatccagatcctgggcggcatgggctacgtgacagagatgccggcagagcggcactaccgcgacgcccgcatcactgagatctacgagggcaccagcgaaatccagcggctggaccagcctccaggcaggaggaaggaaggccccagattgccagagtcggggagcaaagctgtggaggcctcgagccccaggtgggagaacacagaacctcgagaagcagccattgtgctcactagcgcgctcgggggcggcctggccagccagtgcgggggcttgccctggtcctggtgcctgcagggctttctctgggcaaaggtgcccctgaagccaaggtccaagctcttaaccctctggccagtgtcgatctcagcagctggaagagaaaacagtaagtgccgcctgcagaagtttgggtccctgggctttcctcctggctccaggacaaggacgttcacttacagaacaacaggaccgtttcccaccctggtcaactttcacatctgcacactccactcggattgtgccagctggcacggtgtctgcgaagtcagctcttctcaagatgaacagcacagccagtactccaagttgctgctggcctctaaggagcaggtgctgcaccgggtagttctggaggagaaagtagcactagagcagcagctggcagaggagaagcacactcccgagtcctgctttattgaggcagctatccaggagctcaagggtgtgctggagtatctgtctgccttcgatgaagaaaccacggaagtttgttctctggacactccttctagacctcttgctctccctctggtagaagaggaggaagcagtgtctgaaccagagcctgaggggttgccagaggcctgtgatgacttggagttagcagatgacaatcttaaagaggggaccatttgcactgagtccagccagcaggaacccatcaccaagtcaggcttcacacgcctcagcagctctccttgttactacttttaccaagcggaagatggacagcatatgttcctgcaccctgtgaatgtgcgctgcctcgtgcgggagtacggcagcctggagaggagccccgagaagatctcagcaactgtggtggagattgctggctactccatgtctgaggatgttcgacagcgtcacagatatctctctcacttgccactcacctgtgagttcagcatctgtgaactggctttgcaacctcctgtggtctctaaggaaaccctagagatgttctcagatgacattgagaagaggaaacgtcagcgccaaaagaaggctcgggaggaacgccgccgagagcgcaggattgagatagaggagaacaagaaacagggcaagtacccagaagtccacattcccctcgagaatctacagcagtttcctgccttcaattcttatacctgctcctctgattctgctttgggtcccaccagcaccgagggccatggggccctctccatttctcctctcagcagaagtccaggttcccatgcaggacaccccttggaacgtgacgaatataatcaggtctctggttccctttcagactttctgctgacccctctgtcacccactgccagtcagggcagtccctcattctgcgttgggagtctggaagaagactctcccttcccttcctttgcccagatgctgagggttggaaaagcaaaagcagatgtgtggcccaaaactgctccaaagaaagatgagaacagcttagttcctcctgcccctgtggacagcgacggggagagtgataattcagaccgtgttcctgtgcccagttttcaaaattccttcagccaagctattgaagcagccttcatgaaactggacacaccagctacttcagatcccctctctgaagagaaaggaggaaagaaaagaaaaaaacagaaacagaagctcctgttcagcacctcagtcgtccacaccaagtga

SEQ ID NO: 148966 - DNA, 871 bp, Homo sapiens
ggttggaaaagcaaaagcagatgtgtggcccaaaactgctccaaagaaagatgagaacagcttagttcctcctgcccctgtggacagcgacggggagagtgataattcagaccgtgttcctgtgcccagttttcaaaattccttcagccaagctattgaagcagccttcatgaaactggacacaccagctacttcagatcccctctctggtaagggcagaggctggagtgcccagggttgtcaaacatactacacatgtactgccattcccgcctggattcagtggcagacatcactaattaggctctttcccttctgaacccttcagcacactctagtgtcatttaaataatactccatttggtatgtcagataggacctatttgccaccccagagaaattgatgacgcctgagagtgaaattctgaggaactcttccaagatacagtggggtgtacaacctgtatcctttagaatcttgagttggtacagggtggctaattagatggagaagtcagtctcgaagcctgttgcacttctgtcaagaactagacaggaaccacatatgtatggcgtgctatgtgcctagcactgtgctaattctcccaacaaccacgttaaatgggtgtacctcacgttacagatggggaaactgaggtccagggaggtaaaagtgatttgcccaaagacacccccttgttgtataccaagactggtattggcatctaggcagtctaattccagagcctccactcttagctcccactctgtgactctcagtaatgaaaactggccaggggacaagggatggcattttaagttaagctgtctttctgtgtctccctttagaagagaaaggaggaaaaaaaaa

SEQ ID NO: 148967 - DNA, 3277 bp, Homo sapiens
aattttttttttttttttttttttcttgtcatcaatactttattttggtgtaaagacaggaagctggaaaatacactgtatttaaaattttcttggttcccccctccacattgtggaaaaccccctcccccccccaaacctaatctgttccaaactccaaatacttaaaaaatttacagccacccaaacaaaagcatgggggaaaaaaaaaccaaaaacaaaaaccagatggagaaggtaagcctgggcccagtagtgtcacttggtgtggaccaactaaggttcctgaacaggagcttctgtttctgtttttttcttttctttcctcctttctcttcagagaaggggatcttgaagtagctgggtgtgtccaagtttcatgaaaggctgctttcaataagcttgggctggaaggaattttgaaaacttggggcaccagggaacacggtcttgaattatccactctccccggtcgctgtccacagggggcaggaggaacctaagctgttccccatctttctttggggagcagttttgggccacacatctgcttttgcctttccaaaccctcagcatctggggcaaaggaagggaagggagagtcttctttccagactccccaacgcagaaatgaggggactgcccctgacttggcagtgggtgacaagaggggtcagcagaaagtctgcatgggaaccctggacttctgctgagaggaaaaaatttggagggcccattggccctcggtgcttgtgggacccaaagcagaatcagaggagcaggtataagaatttgaaggcaggaaactgctgtagattctcgaggggaatgtgcacttctgggcacttgccctgtttcttattctcctctatctcaatcctgcgctctcggcggcgttcctcccgagccttcttttggcgctgacgtttcctcttctcaatgtcatctgagaacatctctagggtttccttagagaccacaggaggttgcaaagccagttcacagatgctgaactcacaggtgagtggcaagtgagagagatatctgtgacgctgtcgaacatcctcagacatggagtagccagcaatctccaccacagttgctgagatcttctcggggctcctctccaggctgccgtactcccgcacgaggcagcgcacattcacagggtgcaggaacatatgctgtccatcttccgcttggtaaaagtagtaacaaggagagctgctgaggcgtgtgaagcctgacttggtgatgggttcctgctggctggactcagtgcaaatggtcccctctttaagattgtcatctgctaactccaagtcatcacaggcctctggcaacccctcaggctctggttcagacactgcttcctcctcttctaccagagggagagcaagaggtctagaaggagtgtccagagaacaaacttccgtggtttcttcatcgaaggcagacagatactccagcacacccttcctgggttgaaaaacagactccttcgccaagggagccatcagcaccagttgttccagagcagccacaacaccagtgacctcccttctgcttccggccaatcccgacagagcctcttcccgagtcttgagctcctggatagctgcctcaataaagcaggactcgggagtgtgcttctcctctgccagctgctgctctagtgctactttctcctccagaactacccggtgcagcacctgctccttagaggccagcagcaacttggagtactggctgtgctgttcatctcctagatgaatgggatggtctacattcatccatttggatttgggcaaagccaccaacacccctttctccctcttcatcagctgcatcgtaatggtatcaccaacaacatactgatgtgactctgtggcaacaacactcttgagatccttcttatgcacagaactgtaacagatgggacatttactccacgtcttctcactcagtgaaagatagtgcaggatgcatgcccagcagaagatgtgtccacaacgggttatcttggctgcagtaggtggatagaggcatattgggcaagatggcacttcatggctacaaatgcgcacttgttccacaaagtcccagttaactaatgtatcaggatcagcaaaatgagctgtgtagtcttggtcttcagacaccacaaattggcagttggcctgtaaaaagagttccttgttaaaaggcttatgtccccacttgttcctctttccccagctaccatgtccactgccttcaaagtgacccgtctggccacggggttcaaaagtgaaattcaacaagtggttcaggttgatcttcttaggaccagagaactgggcagggctaaactctgcccgttgagcctctgctacctcatctcgtcttccaccattaaaagaagagctaaagagtttgctgctgccgccgcccctttgaggaggcatcttgttaaaagtcttgcttttctgtgaactggagcgacgggactggttgttaaaactttcatttttggggtaggaaagttcacgtttgcgattataacgcttggatccactggagttctttccatccatcatccagagtagttgacaagcacctccagaggggcaacatatggccttactacagaatcaactgacaacaaattgaatccagctgaaattagtaattcgctcttgggtttagactcgccggctggccccgccgaggcggagcggggcggctgttgccctttgctgctgcccgaagaggcggaggagctgttggagccgctgttcttgtccatgtcggaggcggtggcggcggcgttgggggagctcagcggcatcaacgggggcctcggcggcgacggcagtcggagcggagcgggcgcggcggggacccaggctcatggcgttcagggccggcgggggtcggcggcggcagcggttctcggccttcatggcgacatttttccctgtttccttccttggcttctcaaactaggaagagaagcggcggacggggctgttaagcccggcggcagcggcgaccgaggacgaggaggccggggctcgggagtccgggccgggcctggcggggcggaggctgcgggggaaggggaggcgagggaggttgcgcgagccccgccggccggccggccggacacgctctcccgccgcgaggcaggggagagggctggctgtctcggtgtcggggactagtgtctccgacacagcaacggatactcgcccctgggccgaggccgacctgctccgggaatggcgacgagtcg

SEQ ID NO: 148968 - DNA, 349 bp, Homo sapiens
gcggattctctggttttggatcaggcacaggagggttcagctttgggtcaaataactcgtctgtccagggttttggtggctggcgaagctgagggcgtgtcagcaggcctttcgatccctgggaccaaccgcatcctcagcttcttccccgagaaatgctggagcaggctgttcagaccgacgttgccatcaaaacacatacacccagaaagaaacaacagaaaccaaaactcacaaggcgcatgattacttgttttatatttcatgttgggttttccctcccactattaaacagtctgtttccgtacagaacgtatgtgggttttttcagatcacagccaagaagatt

SEQ ID NO: 148969 - DNA, 488 bp, Homo sapiens
gttggcaatccacagcaggaagtgcagaacatcttcaaagcaaagcacccaatggacacagaagtcaccaaagccaagatcattggatttggttctgcacttcttgaagaagttgatcctaatcctgcgaatttcgtgggagctggaatcatccacacgaaaaccacccagattggatgcctcgtgcgcttggagccgaacctgcaagcccagatgtaccggctcacgtgcgcacaagtaaggaagccgtttctcagagattatgtgaattgctctcagcgcagttttagtcctgaggatggaagaccaggctcgtgtgtcttgtgttgtcttcgtctgtgccgtttgtcttcgtggccatcctgtggctcaggaggaaaagctcagcctggactgtggcagccacggcagaaggtggatcttgggatcaatttttataaaaatcgagacagttctgtggttaaatctacaaattaaagggaaattag

SEQ ID NO: 148970 - DNA, 539 bp, Homo sapiens
cagaacatcttcaaagcaaagcacccaatggacacagaagtcaccaaagccaagatcattggatttggttctgcacttcttgaagaagttgatcctaatcctgcgaatttcgtgggagctggaatcatccacacgaaaaccacccagattggatgcctgctgcgcttggagccgaacctgcaagcccaggtcaggccctcaggaaatggtggaacacacttgagttgctttttattctggcacaatgtaaacgtggtgagatgtgtagctctttagtgcagttcagtcagttttgacagatgttgtttaaccaccaccctgtcaatacatggttgcctcccagcctccccgcagctggccaccgtggagcatcatccctagtgcagttcagtcagttgtgacagatgttgtgtgcctgtttaaccaccaccctgtcaatacatggttgcatcccagcctccccacagctggccaccgtggagcatcgtcccaccatgaagtaacctggccctgggcggtggctctcccagctgtgtatt

SEQ ID NO: 148971 - DNA, 4426 bp, Homo sapiens
gcggggcctggcggtcttcatctcggatatccgcaactgtaaaagtaaagaagcagaaataaaaaggataaacaaggaactggcaaatatcagatcaaaatttaaaggtgacaaggctcttgatggctatagtaaaaaaaagtacgtctgcaagttgctcttcatctttctccttggtcatgacattgactttggacacatggaggctgtgaacctgctgagttcaaacagatacacggaaaagcagatcggctaccttttcatctctgtgttggtgaactcaaacagtgagctgatccgcctgatcaacaacgccatcaagaatgacctggccagccgcaaccccaccttcatgggcctggccctgcactgcatcgccagcgtgggcagccgggagatggccgaggccttcgccggggagatccctaaggtcctcgtagccggagacactatggacagcgtgaagcagagcgcggccctgtgcttgctgcgcctgtacaggacgtcccccgatcttgtccccatgggcgactggacatcccgagtggtgcacctgctcaatgaccagcacttgggtgtggtaactgcagccacaagtctgatcaccactttagcacagaagaacccagaagagtttaaaacctccgtgtctctggctgtctctaggctaagcagaatcgtgacgtctgcatccacagatctccaggattacacttactattttgtcccggctccctggctgtctgtcaaactgctgagactgctgcagtgctacccacccccagaccctgcagtgcgaggccgcctgactgagtgcctggagaccatcctgaacaaagcccaagaaccgcccaagtcgaagaaggtccagcactccaacgcgaagaatgccgtgcttttcgaggccatcagcttaatcattcaccatgacagtgagccgaacctgctcgtccgtgcctgcaaccagttgggccagtttctgcagcaccgcgagaccaacctgcgctacctggccctggagagcatgtgcacgctggccagctctgagttctcccatgaggctgtcaagacgcacatcgagacggtcatcaacgccctgaagactgagcgggacgtgagcgtgcggcagcgggccgtggacctcctctacgccatgtgcgaccgcagcaacgccccacagatcgtggccgagatgctgagctatctggagacagctgactactccatccgagaagagattgtgctgaaggtcgccatcctggctgagaagtacgcggtggactacacctggtatgtggataccatcttgaacttgatccgaattgctggtgattacgtgagtgaagaggtgtggtaccgagtcattcagatcgtcatcaaccgggacgacgtgcagggctacgcggccaagactgtgttcgaggctcttcaggctcccgcgtgccacgagaacctggtcaaagtgggcggctacatcctgggggagtttggaaacttgatagctggagacccgagatccagcccgctgatccagttccacctgctgcactccaagttccacctgtgcagcgtccccacccgcgcgctgctcctgtccacctacatcaagttcgtgaacctcttcccggaggtgaagcccaccatccaggacgtgctgcgcagcgacagccagctcaggaacgcagacgtggagctgcagcagcgtgctgtggagtacctgcggctcagcaccgtggccagcaccgacattctggcgaccgtgctggaggagatgcccccattcccggagcgggagtcctccatcttggcaaagctcaagaagaagaagggccccagcacggtgacagacctggaggacaccaagcgggacaggagtgtggacgtgaacgggggtcctgagcctgccccagccagtaccagcgccgtgtctacgccttctccgtcggcagacctgctgggtctcggggctgccccccctgcccccgcgggccccccaccctcctccggcggcagcgggctgctcgtggacgtgttctcagactcggcctctgtggtcgcgcctctcgctcctggctccgaagacaactttgccaggtttgtttgtaaaaacaatggtgtgttgtttgaaaaccagctgcttcaaattggacttaagtctgaatttcggcagaatttaggtcggatgtttatcttttatggtaataagacctccacgcagttcctaaactttaccccaacactaatctgttcagacgaccttcagcctaacctgaacctgcagaccaagcccgtggacccgaccgtggaggggggcgcgcaggtgcagcaggtggtcaacatagagtgcgtgtccgacttcacggaggcgccagtcctcaacattcaagttcacggtagtgggggcaccgttccagaaccgtgtctttgcagctgcccatcactctcaacaaattcttccagccgacacgaaaagttttgtcaggatttctttcaacgttggaagcagacgagcaatccacagcaggaagtgcacaacatcttcaaagcaaagcacccaatggacacagaattcaccaaaggcaaagatcattggaatttggttctgaacttcttgcagaagttgatcctaatcctgcgaatttcgtgggagctgggaatcatcccacacgaaaaccacccagatttggatgccctctgcgcctttagccgaacctgcaagcccagatgtacccggctcacgctgcgcacaagtaaggaagccgtttctccagaagattatgtgaattgctctcagcgcagttttagttcctgaaggatggaagaccaggctcgtgtgtcttgtgttggtcttcggtctgtgccgtttgtccttcgtgggccatcctgcagaatgagcaccgtgtccagtgccacagcacaaggagccttcccgccccgccgccccacacctctcccctttgggctggacgggaacacacgtgtgtggctcaggaggaaaagctcagcctggactgtggcagccacggcagaaggtggatcttgggatcaatttttataaaaatcgagacagttctgtggttaaatctacaaattaaagggaaattagaagttggcgtgaacgtggcgtttgtgggagtgtcactgagatggcccgtgctgccgcccaccccgcctcggagcctctgggagcagcagtgccactgtgcatggcgtgggctgagccttggtgtgtggccgtcctggtggctgcacacctggcgtcgtcctgggcccttgggaggagcacagctgaccctggttttgctgcagtcccagctggactgttttcccaggcaggattttaatctagaatttagaaacatttgtatttgtaatgacttctggcaaaagcacgtgtcctggccggatgtaactgttctcctttcccagctcctgtttgtgaagggcgtctgttatgctcctgcagtcgccgaggccttggatgtgcagccaggggaggagcgtcctgccggccccgcagggcccccaggactccagggtaaagtgtgggccggtggcgcaagactcagaggtgtgctcgtctctttcctgtcagagtgggcgtccccaggccacggtgcaggcctgagtccttccaccggccccgtccagtcgtccctggaggggctgtggaggaaggacgcctctgtgtggtcaggaagtgaaggggccattggccgcatgccatgtgccacctgcggcttgtgtctcacctgtcatctggactcagcacccaggctgcacatctgacacctgagaggcgagagagtggggccggcctaggagccaaggctggggccttgcgctctgtccccaggatggtggccttgtttgtcctaaacacacccagcacaggttctggcttcctgacatgctgtggaggcagggagggtgggtggccacatgtgcttgagggttttcaccctggccctcagttgcctgctgtgcgggtccctggggcagctgcaggggctcacggacccatcagggtctccacagctcccctgcagtgtgtgcaccccacaatgtctgcggctcttcttccggcgtgtcgggctttgatcacagcatagccacgtcagtggcgtgcgcctctcgcacaggccattctgggtctggtggtgccaggtgccgtgacacgccgtgctgggcttgtgctgcagctgggtggtgtggccctcattctcatgttccagctgctgggcagtgctctgcctgtgtgctgcgcctgcaggctgcgtgtgctgccgtggatctcctgcatcccttgacccctcccgccatcagaggaaaggctgctccccgaggcaccgcttccctgtgcggcgctgcagaggggccctcagtgtggcactcctcgtcaaagaaaaataaaggctagaactgc

SEQ ID NO: 148972 - DNA, 437 bp, Homo sapiens
tgagacagagctcacttctgtcgcccaggcaggaatgcagtggcacgatctcagctcactacaacctccaccctgcccagggttcagggtgattctcctgggctgctttattgtttgtaggagacaaggtctcactatgctgagatgcaaaaagcattccttttgccccttcccagtccatatgctgtcagagggtaaccactgttcggagtttttaaagttttgtttctgactgcagaatcttacattttaattttatttgggaaaatggctccctttactattcccaattaggtaggtctacaattgttcccataatttatattactgctaccctactttcccatcttagtcacgtattcacattttgttaaagacattttttattaggaactaatttgcaccccctttactacaattgaaggctaaatgatttg

SEQ ID NO: 148973 - DNA, 320 bp, Homo sapiens
gtggatatcacagatgtgggccccgggaattatatctgccaggggattgtgaacccccactatgaagtggcagagtcagatttctccaacaatatgctgcagtgccgctgcaagtatgatgggcaccgggtctggctgcacaactgccacacagggaattcatacccagccaatgcagaactctccctggagcaggaacagcgtttcaggaacaacctcatctgaagctgtcactgcacactcctagctgctgccgatacaccagatacctaagtttatgggacccatgcctttcaaagagcccattcttagagaaaggg

SEQ ID NO: 148974 - DNA, 589 bp, Homo sapiens
aatttgttccacgccaagcccgagcgccgggactcggccaacctgtgggtgctggtggactgcatctttcgcgacacctccgaggaccttggatttcagtgtgacgccgtgaacctggccttcgggcgccgctgtgaggaactggaggacgcgcggcacaagctgcagcaccacctgcacaagatgctgcgggaaatcacagatcaggaacacaacgtggtggcactgaaggaggccatcaaggacaaggaggaacctctgcacatagcccagacccggctgtagctgctctcacaccggcccaacatgcagttggccccgaatgcagcccagttcagccccagctcacaccccccaacacccccaagcttctacaagcggagcagtccctgcgcaacctcaaggacatccacatgagcctggagaaggacgtcaccgccatgaccaacagtgtcttcatcgaccgccagaagtgcatggcccatcgtacttgctaccccaccattctgcagctggctggctaccagtgagcagcggcacggtgcttccccccaatcccccaaataaacagtgcgttagcattcaaaaa

SEQ ID NO: 148975 - DNA, 500 bp, Homo sapiens; identical to SEQ ID NO: 123047
  misc_feature (1)...(500): n = a,t,c or g

SEQ ID NO: 148976 - DNA, 646 bp, Homo sapiens
ccagcgcggtcgtgtagctgagcagccctggggtgtggttctatgtccctgtggctatgtttccagtgtcctctgggtgtttccaagagcaacaagaaacgaataaatctctgccccgcagcgcctccaccccagagacccggaccaagttcacacaggacaatctgtgccgtgcccagcgcgagcgcctggactcggccaacctgtgggttcttgtggactgcatccttcgcgacacctccgaggacctgggactccagtgtgacgccatgaacctggccttcgggcgccgctgtgaggaactggaggacgcgcggcacaagctgcagcaccacctgcacaagccccagctcacaccccccaacacccccaagctggtgagtgaggtggaggagctgtacaagttccatcacagtgccgcgggagaagcttctacaagcagagcagtccctgtgcaacctcgaggacatcccccatgagcctggagaaggacatcactgccatgaccaacagtctattcatcgaccgccagaagtacatggcccatcgtacttgctaccccaccatcctgcagctggctggctaccagtgagcagcggcacggtgcttccccccaatcccccaaataaacagtgcgttagctttc

SEQ ID NO: 148977 - DNA, 1625 bp, Homo sapiens
atggtgcagacggatgtgctcctaccagagccagcaccgcagacagtgtcaccctgcgagctgccctgcaaagagtatgacgtggcccgcaacatgggccctggccaccgccagctggaggtgtggttccagaactgctatgctcgctaccaccaggccttcgccgactgcaaccagtcggagcgggagctgcaggggcgcgagagccagcagctggccgcagagacccaggcgctggcacagccgacacagcaagactccacgtgcagggtgggcgagcgactgcaagacacgcacagctggaagtcagagctgcagcacgaggtggaggtgctggctgcagagaccgacctgctgctggcccagaagcaacggctggagcgtgccctggatgccatggaggtgcccttctccatcgccactgacaacatgcagtgcagccagcgccaccagcacgccaaccttgtgcgtgactatgtggagacggagctgctgaaggcctatccccctgcaccctctcagtgcctcaagaactgctgcagctcccgcaaaccttctgcctgcaacaagggtgcctgtgaagtgatggagacactgacagtgcaggaagaggcaaacccagggacagaggggtgcaggactcgggccctggcacacaaggaggaagctgagcccatccggaacattcaggagctgctgaagagagccatcgtgcaagcagtgagccagatccaactgaaccgagagcacacggagatctgcgagatggactggttggacaaggtggaggcctacaacctcgacgagacttgcgggcgccaccacagccagagcaccgagagacccggaccaagttcacacaggacaatctgtgccgtgcccagcgcaagcgcctggagctcggccaacctgtgggttcttgtggactgcatccttcgcgacacctccgaggacctgggactccagtgtgacgccgtgaacctggccttcgggcgccgctgtgaggaactggaggacgcgcggcacaagctgcagcaccacctgcacaagatgctgcgggaaatcacagatcaggaacacaacgtggtggcactgaaggaggccatcaaggacaaggaggaacctctgcacatagcccagacccggctgtacctgccctcacaccggcccaacatgcagctgtgccgcgaagcagcccagttcagagccgctttcctggtgggatcctttcatggcgtcttcccaggacctcctgccagctcccattgggagttttgggtcccctccaccccagtaggtgcatacttcttccctccccagccccagctcacaccccccaacacccccaagctggtgagtgaggtggaggagcttgtacaagtccatcacagcgctgcaggagaagcttctacaagcagagcagtccctgtgcaacctcgaggacatccacatgagcctggagaaggacatcactgccatgaccaacagtctcttcatcgaccgccagaagtgcatggcccatcgtacttgctaccccaccatcctgcagctggctggctaccagtgagcagcggcacggtgcttccccccagtcccccgaataaacagtgcgttaactttcaaaa

SEQ ID NO: 148978 - DNA, 498 bp, Homo sapiens
aagctgcagcaccacctgccccaagatgctgcgggaaatcacagatcgggaacacaacgtggtggcactgaaggagcccatcaaggacaaggaggaacctctgcacatagcccagacccggctgtacctgccctcacaccagccccaacatgcagctgtgccgcgaagcagcccagttcagccccagcctccacccccccacacacccccaagcttggtgagtgaggtggaggagctgtacaagtccatcacagtgccgcgggagaagcttctacaagcagagcagttccctgtgcaacctcaaggacatccacatgagcctggagaaggacgtcaccgccatgaccaacagtgtcttcatcgaccgccagaagtgcatggcccatcgtacttgctaccccaccattctgcagctggctggctaccagtgagcagcggcacggtgcttccccccaatcccccaaataaacagtgcgttagctttctgaaaaaaaaaaa

SEQ ID NO: 148979 - DNA, 931 bp, Homo sapiens
gggcctccccgtgccagggacctgtgcccacgtggtctcaccccaccctgagctacctcatcttcccgggaggaagctccttcagacaaggtgagctcctggaggccacggggccagagaggccagagagggccattccctgctgccctgagggagctgtccccacctctggaggaaagtatgacctacgcctgggctacaggcatagatgggccgtccttttgtttcccttgataaaggatgcctggaggccccttctgagcctaagtacctttcttccttccctgcccctcagttccttcaaggaactgggtgcctccttccgtcaaatatcaggaatggaaagaactgagcctggtcggctgaggccagtcctgtcctgtcagggtcgagattgcacgcgggtcactcattcccactcaggcccgcgctccctgggaggacccttgtaatttatgctctgcccttagaagccgcttttcctgggtaggaatcctttcaatggcgtcttcccaggacctccttgccagctcccaattgggagttttgggtccccttccaccccagtaggtgcatacttctgccctccccagccccagctcacacccccccaacacccccaagctggtgagtgaggtggaggagctgaacatgtccatcacagcgctgtgggagaagcttctagaaggggagcagtccctttgcaacctcgaggacatccacatgagcctggagaaggatgttaccgccatgaccaacagtctcttcatcgaccgccagaagtgcatgggccatcgtacttgctacacccccatcctgcagctggctggctaccagtgagcagcggcacggtgctttcccccaatcccccaaataaacagtgcattagctttcaaaaaaaaaaaaaaaaaaaaaaaaaaagtcgtatcga

SEQ ID NO: 148980 - DNA, 381 bp, Homo sapiens
  misc_feature (1)...(381): n = a,t,c or g
gcaaggtggtcgtgtgtggccaggcgtctgtgggcaaaacttcaatcctggagcagcttctgtatgggaaccatgtagtgggttcggagatgatcgagacgcaggaggacatctacgtgggctccattgagacagaccggggggtgcgagagcagatagcagagagtcttttcagcgtgtggagctgctcaagaaggagattgacaaatccaaggacaagaaggaggtcaccatcgtggtccttggcaacaagtgtgacttacaggagcagcggcgtgtagacccagatgtggctcatcactgggccaagtcagagaaggtgaagctgtgggaggtgtcagtggcggaccggcgctccctcctggagccctttgtctactn

SEQ ID NO: 148981 - DNA, 449 bp, Homo sapiens
ctccgcaattcccgggtcgacgatttcgtcctcccctggtccccgcgagctcggagggcccggctggtgctgcgggggccccgggaggttgaaaactaagcatggggaagagctgcaaggtggtcgtgtgtggccaggcgtctgtgggcaaaacttcaatcctggagcagcttctgtatgggaaccatgtagtgggttcggagatgatcgagacgcaggaggacatctacgtgggctccattgagacagaccggggggtgcgagagcaggtcaccatcgtggtccttggcaacaagtgtgacttacaggagcagcggcgtgtatacccaaatgtggctcagcactgggccaagtcagagaaggtgaagctgtgggaggtgtcagtggcggaccggcgctccctcctggagccctttgtctacttggccagccagatgacgccaccccca

SEQ ID NO: 148982 - DNA, 2402 bp, Homo sapiens
  misc_feature (1)...(2402): n = a,t,c or g
ggaattctgaaaactaagcatggggaagagctgcaaggtggtcgtgtgtggccaggcgtctgtgggcaaaacttcaatcctggagcagcttctgtgtgggaaccatgtagtgggttcggagatgatcgagacgcaagaggacatctacgtgggctccattgagacagaccggggggtgcgagagcaggtgcgtttctatgacacccgggggctccgagatggggccgaactgccccgacactgcttctcttgcactgatggctacgtcctggtctatagcacagatagcagagagtcttttcagcgtgtggagctgctcaagaaggagattgacaaatccaaggacaagaaggaggtcaccatcgtggtccttggcaacaagtgtgacttacaggagcagcggcgtgtagacccagatgtggctcagcactgggccaagtcagagaaggtgaagctgtgggaggtgtcagtggcggaccggcgctccctcctggagccctttgtctacttggccagcaagatgacgcaaccccagagcaagtctgccttccccctcagccggaagaacaagggcagcggctccttggatggctgaagagctgccgttcctctttcacgatcccagccccatttcagtgtctggggctctggtagatgtgttgagggcaaagtagaggacaagctgtctttcacagtcagccagggagctccccgccaggccacgccccagccactttgctccctctcacctctgggaagtgcaaatactcttggttgacatccccttcctcagccctcccagcctactccccatcccagcttttagaggatctgctccactgtctcctggggcagttgtgggtcactgtcccttccagctgccccagacaggaagcagagtcaccacgcagcagtgtcccttcttgggtctgagttcctattataggtaggggccccaccctctgggcttcccattcagcgacacacacacacttatgggcaccagctgggactccagaaaaagggtgtccaggtattgtgtgtatgcaatttaagttgtgcacaacacaaaatatgcttcctaatactggcattagggcgtctccttcatccctcaccctgacctttctcctgtccttttcttggctggaagaagttggcctcctgggagtgtagttttctgttttaaatcccccacccctggctgggctcagtggctcacccctgtaatcccagcactttgggaggccaaggcgggtcgattacttgaggtcaggagttcacgaccagcctggccaacattgtgaaaccccatctctgccaaaaatacaaaagttagccgggcgttagtggcacatgccttgttaatcccagcttacccggggaggcttgaggcagggagaattgcttgaactcaggaagggcggaagcttgcagttgagccgagactcgtgccactgcactccagcctggtcaacagagcaagactccatctcgaaaaaaaaaaaaaaaaattccccacccctaccaattgttttacttcctcttcctgctcagggagcagagtgggcctcactggttgagatggaatagaataactgggctatgagtcaccagcccactttgtgacccagcaagacctttcccctctctgggcatcagtttctcatctgtaagatgaccagagttgcttagatgatctcctagatcctttccagttctcttgatttcgtaaagccaatggcttctccctctttaaggtgctatgccaaccagccctggaggctgggagtctgccgctccctccagccaccaggggggcaggagtgcactacctgctgtcagtcaccagagtggccgctcagtgcccagcccgccagcctcgctcttgggaggctgctctttatcctgcctgtggttttcagctcagagctgggacttctatttataagttacctgtatttatatttatatgcccgctctcatgggtgaaggctgggacaaggtgctcctctgggcccctcctttctttaccttcaggatggcctgaacagaacaagggcaaacccgtaggcagcctctcaggatgctgacaggtcctctttcggggctcaggagggtgggcacacacccagcggcctgcagaagtaagctgtattacccacaactggtgcccgctntttgtgcttctaaaggtgcacacctgagcctaggtgagacactggcagccaggcaaccaccgacacacgccccttctcaaagccagaggtgagtggggcaggtgcccggggctgggtgagtggaattaggacacacacaggcttgggcttcaagttcatttattgatgcattggttggacacaataaaaccacaattgttatcaaaaaaaaaaaaaaaaaaa

SEQ ID NO: 148983 - DNA, 4245 bp, Homo sapiens
gggaagcgctccgagggcgtccccgtgtcaggccccatgctcatcgagaaggccaaggacttctacgagcagatgcagctcactgagccctgcgtgttctccggagggtggctttggcgctttaaggccagacacggcattaaaaagctagatgcatccagtgaaaagcagtcagccgaccaccaggccgcggagcagttctgtgcgtttttcaggagcttggctgctgagcacgggctgtccgccgagcaggtttacaacgctgatgagaccggccttttctggcggtgcctgccaaatcccactccggaaggcggggctgtgcctggccccaagcagggcaaggaccggctgaccgtgctgatgtgtgccaacgccacgggctcccacaggctcaagcccttggccatcgggaagtgcagcggtcccagggctttcaaaggcatccagcacctgcccgtcgcctataaggcccaggggaacgcctgggtggacaaggagattttttccgattggttccatcatatctttgtgccctcggtgagagagcacttcagaaccataggtttgccggaagacagcaaagccgttctcttgctggacagctcccgggctcacccgcaggaggccgagctggtgtccagtaacgttttcaccatcttcctgcctgccagcgtggcctcattggtgcagcccatggagcagggcattcggagagatttcatgaggaacttcattaaccctccggtccccctgcagggcccccacgcccgctacaacatgaacgatgccatattcagcgtggcctgtgcctggaacgcagtccctagccacgtcttcaggcgggcctggaggaagctgtggccgtcggttgcgtttgccgaaggctcctcctctgaggaggagttggaggcagagtgcttcccagtgaagccccacaacaagtcctttgcacacatcctggagcttgtgaaggaaggctcctcctgcccgggccagcttcgccagcgccaggccgccagctggggggtagcgggaagggaggcagaagggggacggccccctgctgccacgtcgccagcagaggttgtgtggagttcagaaaagactccgaaagctgaccaggacggcagaggagatcctggtgagggcgaggaggtggcctgggagcaggcggccgtggcctttgacgcagtcctgcgctttgcggagcggcagccatgcttcagtgcgcaggaagtggggcagctgcgggcgctgcgtgccgtgttccggagccagcagcaggtgaggaggcggcgtggtgccctcggggctgtggtcaaggttgaagccctccaggagggccctggtggctgtggggccacagctcagtctcccttgccctgctcatccacagcaggtgacaactgatggcttctctgccctgccctggccactggccctgtttctcccacaccctggagtggcatggtcctgtgccccgaccccacctgaggcaggagggcatgtgcagacactcaagagcccttccaggagtgggtcgcccacgggtgtggctcgggtgcccaggacggtctgtgcccgaggttcctgtcaatacaggttttattttatcacttgccgtgtcatccgaaagtgaggaaatgttttggaagggtccaccctagcctagaacaagccagagccgcaccctggctggaatgggggccaggctgagccgatctggtctcgtgttcgctggctgatcattgcagtatcagagggtggagatgtcagtctgtccacgtggagagaagttgccctccaggccgacaggaggccatgcccaccgcccctggacaggcttcgtctcagaaggctctatctgctgggctggcggccatccccgtgttgggtggaccccgagcacggttgcctgaggtccgatggcccgagagctgggactcagttcttggcctgctagcggctgaacaggccgcacatctcacttcagttgtggcctcattcagcagaatgactctggaaccatcctctgttacccgcagatcctgtcccatgggctctggccccaagatgttggggggccccacggagagttgacttggtagagttcctttctgggaagaaagtaggagtggctgaccaggccctgctcatcacccggatagaggacacggaccctgtgtggtattttggcattttggctcagagtccaatgtaccatgttgcccagaatttcatacttatggcctttacatgaatacgtcttgatcagacattcagagattagtcttaggtttgcacgtaagtcactgaaaacagtaaaacaggctgcttagatttctagcagtatgtgtgctcttatccccagctgttagcacgttagtaatacttttggggaggagttgtctgtcctggtcagttttcacagaggcggttgtaagaggatgtggttattttctccatgtctgtagttgctttgcggcatctccatttcacgggcaacactcactgcctgcagctgagattccagaacgccctgtgtccacagtgattagcctcgtctttcagcgagcataaaataggtgcattgtccttttcttttcttgaggcagggtctcgctctgttgaccaggctggagtgaagtggtgtgatcccagctcactgcagcctcgacctccctggcttgagtgatcctcccgccccagcctcctgagtagctgggactagaggcacgcaccaccgcgcctttttattttttttgtagagacagggtctcactgtgttgcccgggctggtcttgaactcttggcctcaagcgatcctccttcctcatccttctaaagtgctgggattacaggtgtgagccacagcactcggcctaaataggtttttcttgctatgttattttcagtgctttgcccttgaattcttttcctctcttaaattcatatcatttggccgagtcagcacgtagtttgcattccagcgtctgctgttgattccactgaaacctctgttctcatgaaggagaggatttggctcgctgtgtgttctcgtactttcacatctctgtagatacaggggcaaaagtcattgctgacagagccctatctatgtcctggaagtgtgtgtttcttgctttgaatgcatgtgtgaagattataaaagccaaatagtttttaaagatctcggtgctgaacgacagtcccagttcccatttgtgtcccacacaggcgaggatcgttgggcctccttagtagccaaaggaactgaggtccagagcagggaatgtgttgcccagtgtcagcatggtctgctctggggtcaggcgtcttgccctggtcctaagccaccccaagccaaggcatgtccctgggcccatttcctctctcgaggtcttgggttccctatttctgatgtgtgtgaaaggaaggcctgtcctctggggtgaccatgaggctcagtgggaggagctgccaggcttgagctgggacttggcacctggccagccttttttctatttcattgtaccttgatgggctgtcagttctgaagagaaaaaatacactaggaatccattcttcctccaccattctccctggcagagggaagtgactacacccctatggtgtggacatactgacgctcctccatgaagcagcaaagttctgttgtttcaggagactgtgggccttgaggatgtggtagtgacctcaccagaggagttggcaattcctaagtgctgcctggaggcctctacagagacataatgttggagaacttctgccacatggcagtgctgggtaagacccctctgtccccaccagtgcccttgaggttatgggtgttggtaggtctgtggcctccatctccatgacgatggtgttaaggactgcatgtttgtgtccccccccaaagtttatatgttgaaaccctgacccccaggagggtggtattaggaggtggggcctttgggaggtgactaggcttaggtgagatcgtgagggtggggctcgccgatgagatcgagtccttataagaaaaggaaggaactagagcgaggtcactttgtgctgtgtgagcatacaagaaaactgccatcttcaagctgggtgcagtggctcacgcctgtaatcccagcactggaaggccaaggcattaggattgcatgagtccaggaagttcgagaccagcctaggcatgataagaccttattgctaaaaaaaaaaaaaaaaaaa

SEQ ID NO: 148984 - DNA, 753 bp, Homo sapiens
gtggtagtgacctcaccagaggagttggcaattcctaagtgctgcctggaggcctctacagagacataatgttggagaacttttgccacatggcagtgctgggttcacctggtccagaaggggaggcagacccacctgcccaccatgacccggacagaggcaataaatacggagcacctcatggccagggcctggaggattcccaccataccctacccagcgccaataacagagggaccctggagttgtgtacgcaagatagcagttcagtgcttgcacacatacttagttgagaagggaaatcagggctaatggaaacagcttcaactgtctggcagagccaggctccttctgccatgaaacagtttggaatgtttgtccctttcctaatcttatatggaaatttgatccccaagtgttgaaggtggggcctggtgggaaatgttcctgttatcgggatggatccttcatgaatagcctggtgccatctttgtggtaacaagtgagttctcacttgattagtttctgtgagaactgtttgttaaaaagagcctggtggcacctccctcccttcttcctccttctcttgctatgtgatgctgctgccctttgccttccgtcatgagtggaagctccctgaagcccccaccagaagcaaatgctggcaccattgctgcttgtacagcctgcaagaactgtgagccaaataaacctcttttctttataaattaaaaaaaaaaaaaaaaaaaggtt

SEQ ID NO: 148985 - DNA, 553 bp, Homo sapiens
cggagaggtcctctgagccagaatggctcttttggcccatcccctgtgagtggtggagaatgctcccctccattgacagtggagccacccgtgagacctctctctgctactctcaatcgaagagatatgcctagaagtgaatttggatcagtggacgggcctctacctcatcctcgatggtcagctgaggcatctgggaaaccctctccttctgatccaggatctggtacagctaccatgatgaacagcaggctcatgaggctcttcccctaccagggtactcgatgaaggcatgcaaactgttctccaagagcctgaagtcccctcagttcccagcattacatctttggctgagcgtccagtagcagttaatatggctccaaaagggccccctcctttcccaggagtccctctcatgagcacccccatgggaggccctgtaccaccacccattcgatatggaccaccacctcagctctgcggaccttttgggcctcgggcacttcctccaccctttggccctggtatgcgtccaccactatgcttaagagaa

SEQ ID NO: 148986 - DNA, 3590 bp, Homo sapiens
gctttcctttctaaagtagaagaggatgattatccctctgaagaactactagaggatgaaaacgctataaatgcaaaacggtctaaagaaaaaaaccctgggaatcagggcaggcagtttgatgttaatctgcaagtccctgacagagcagttttagggaccattcatccagatccagaaattgaagaaagcaagcaagaaactagtatgattttggatagtgaaaaaacaagtgagactgctgccaaaggggtcaacacaggaggcagggaaccaaatacaatggtggaaaaagaacgccctctggcagataagaaagcacagagaccatttgaacgaagtgacttttctgacagcataaaaattcagactccagaattaggtgaagtgtttcagaataaagattctgattatctgaagaacgacaaccctgaggaacatctgaagacctcagggcttgcaggggagcctgagggagaactctcaaaagaggaccatgggaacacagagaagtacatgggcacagaaagccaggggtctgctgctgcagaacctgaagatgactcgttccactggactccacatacaagtgtagagccagggcatagtgacaagagggaggacttacttatcataagcagcttctttaaagaacaacagtctttgcagcggttccagaagtactttaatgtccatgagctggaagccttgctacaagaaatgtcatcaaaactgaagtcagcgcagcaggagagcctgccctataatatggaaaaagtcctagataaggtcttccgtgcttctgagtcacaaattctgagcatagcagaaaaaatgcttgatactcgtgtggctgaaaatagagatctgggaatgaacgaaaataacatatttgaagaggctgcagtgcttgatgacattcaagacctcatctattttgtcaggtacaagcactccacagcagaggagacagccacactggtgatggcaccacctctagaggaaggcttgggtggagcaatggaagagatgcaaccactgcatgaagataatttctcacgagagaagacagcagaacttaatgtgcaggttcctgaagaacccacccacttggaccaacgtgtgattggggacactcatgcctcagaagtgtcacagaagccaaatactgagaaagacctggacccagggccagttacaacagaagacactcctatggatgctattgatgcaaacaagcaaccagagacagccgccgaagagccggcaagtgtcacacctttggaaaacgcaatccttctaatatattcattcatgttttatttaactaagtcgctagttgctacattgcctgatgatgttcagcctgggcctgatttttatggactgccatggaaacctgtatttatcactgccttcttgggaattgcttcgtttgccattttcttatggagaactgtccttgttgtgaaggatagagtatatcaagtcacggaacagcaaatttctgagaagttgaagactatcatgaaagaaaatacagaacttgtacaaaaattgtcaaattatgaacagaagatcaaggaatcaaagaaacatgttcaggaaaccaggaaacaaaatatgattctctctgatgaagcaattaaatataaggataaaatcaagacacttgaaaaaaatcaggaaattctggatgacacagctaaaaatcttcgtgttatgctagaatctgagagagaacagaatgtcaagaatcaggacttgatatcagaaaacaagaaatctatagagaagttaaaggatgttatttcaatgaatgcctcagaattttcagaggttcagattgcacttaatgaagctaagcttagtgaagagaaggtgaagtctgaatgccatcgggttcaagaagaaaatgctaggcttaagaagaaaaaagagcagttgcagcaggaaatcgaagactggagtaaattacatgctgagctcagtgagcaaatcaaatcatttgagaagtctcagaaagatttggaagtagctcttactcacaaggatgataatattaatgctttgactaactgcattacacagttgaatctgttagagtgtgaatctgaatctgagggtcaaaataaaggtggaaatgattcagatgaattagcaaatggagaagtgggaggtgaccggaatgagaagatgaaaaatcaaattaagcagatgatggatgtctctcggacacagactgcaatatcggtagttgaagaggatctaaagcttttacagcttaagctaagagcctccgtgtccactaaatgtaacctggaagaccaggtaaagaaattggaagatgaccgcaactcactacaagctgccaaagctggactggaagatgaatgcaaaaccttgaggcagaaagtggagattctgaatgagctctatcagcagaaggagatggctttgcaaaagaaactgagtcaagaagagtatgaacggcaagaaagagagcacaggctgtcagctgcagatgaaaaggcagtttcggctgcagaggaagtaaaaacttacaagcggagaattgaagaaatggaggatgaattacagaagacagagcggtcatttaaaaaccagatcgctacccatgagaagaaagctcatgaaaactggctcaaagctcgtgctgcagaaagagctatagctgaagagaaaagggaagctgccaatttgagacacaaattattagaattaacacaaaagatggcaatgctgcaagaagaacctgtgattgtaaaaccaatgccaggaaaaccaaatacacaaaaccctccacggagaggtcctctgagccagaatggctcttttggcccatcccctgtgagtggtggagaatgctcccctccattgacagtggagccacccgtgagacctctctctgctactctcaatcgaagagatatgcctagaagtgaatttggatcagtggacgggcctctacctcatcctcgatggtcagctgaggcatctgggaaaccctctccttctgatccaggatctggtacagctaccatgatgaacagcagctcaagaggctcttcccctaccaagggtactcgatgaaggcaaaggttaatatgggtccaaaaaggggccccttcttttcccaaggagttccctcttcatgagcacccccatgggagggcctgtaaccaccacccattcgatatggaccaccacctcagctctgcggaccttttgggcctcggcatcttcctccaccctttggccctggtatgcgtccaccactaggcttaagagaatttgctccaggcgttccaccaggaagacgggacctgcctctccaccctcggggatttttacctggacacgcaccatttagacctttaggttcacttggcccaagagagtactttattcctggtacccgattaccacccccaacccatggtccccaggaatacccaccaccacctgctgtaagagacttactgccgtcaggctctagagatgagcctccacctgcctctcagagcactagccaggactgttcacaggctttaaaacagagcccataa

SEQ ID NO: 148987 - DNA, 1802 bp, Homo sapiens
ctcgatggtcagctgaggcatctgggaaaccctctccttctgatccaggatctggtacagctaccatgatgaacagcagctcaagaggctcttcccctaccagggtactcgatgaaggcaaggtaaatgcacccattttgaataattagttatttcaggaacatttagctcttcctacaactctctctttgcctcatctcctatttgtgtgttctatctgtactatctcatttattttttaaaaaagcaaactgttctccaagagcctgaagtccccttcagttcccagcattacatctttggctgagcgtccagtagcagtaagtacttagaagtgtggactgaactgggctataagttgcatggcaatattgatcttacttttatccttgacttgggagtgttgctgaaatctgacggattcattggccttttctcctctctcctgtttggttagacatttaacctgtgtagagcatctgctgtaactgtaattaacttaaacaaaagtgaaaagtccccactcttgtgtgtctcagtgtttaatgctcttaggcaaagtaaattcattgtaaatggtgtaattcattattatgtcttcatttggaagtgtgctatttaagaatacctacagttgtatactaggcaaaccctattttgaatgatctgaaattacagattgataacagaagaatgtttgctggaagtgaaatactgaatagtggaagtctataattacccgttgagccagttcccagcagtgtccttaaacagtgtccacataagtgtattctcttgtaacttgtatagctgttatggctgggaagtcctctgatcatacctcactgtgattctcgacattgaaattaaaataattttaatgattgagagtttccaacccactttcccataggaagtgattaatcagtatctcatagtagacagtattactagtgaatgaagatgaatagagctgtgcctgtataatttgtgtacataacattgtttctcttggaaaatacttccaagttccagcacaggactccaggaatacacatttcttgagaaatgtttttatccaagagcagcttggataagacccgagacccctttgaagtaggagacttcgaagagtgtagagactactttgttagaaaggagaagcagaggtggaaagaacgcggccttggagtcaaacctggcatggaattccagccagcctcttacatgctgtgtgaccatcagcaaatctaatactctctgcgcctgtgttcctgcatatttagaacaagatggtcctattacagatttagagatgtcagaatttgtgttaatatatgtaaggcctacagaaggtactctgaataatcgctgttacatggtagagaatggatttttcattccctttcattctctgcattcttaatatggaaattactctgatgggagggatgtgcagagggagtgactgccttagaaatagatgtatgaatggcgtaacttctatcattagtccaggaatgacctccatttataacctgtgcgttcccttccattttgcagatgttaagccaataatatgatacagccaagtgttcactgcctgtggcatacttttaacctttctaagcttgtcagtgggaacaaatgagaggggtagagttttttgcactaattctgctctttggacaagtgcctgacatctggcttcattgggttttagtttttactggtgttgggtgcttttgtctgtcataccatagtattttcaaaacttcaattgtttctactctggagggtaa

SEQ ID NO: 148988 - DNA, 3087 bp, Homo sapiens
accctgtgtaggtatagagttgagtcaagtggagtcactgcctctgtccctctggtcagcgtgatggccagaggcctgggggccccccactgggtggccgtgggactgctgacctgggcgaccttggggcttctggtggctggactcgggggtcatgacgacctgcacgacgatctgcaagaggacttccatggccacagccacaggcactcacatgaagatttccaccatggccacagccatgcccatggccatggccacactcacgagagcatctggcatggacatacccacgatcacgaccatggacattcacatgaggatttacaccatggccatagccatggctactcccatgagagcctctaccacagaggacatggacatgaccatgagcatagccatggaggcgaagggctggttctggattgttgggaaactccacagtacttgaccttgactctccctcaccaggcactgggggccacagtgctgatctcagcagctccattttttgtcctcttccttatccccgtggagtcgaactctccccggcatcgctctctacttcagatcttgccacttgaggaggaggagtctggaatgcacatctcccttaatgtctcaatgcctccattcccaggccagggccccattctgtctgtgggactgtgggttctcagtggaattgttgcctttcttgtcgtggagaaatttgtgagacatgtgaaaggaggacatggtcaggagggagaggacatgttggaagatctgttctccactctgaccaactcttttcttccctcagagcgttctaccaaggagaagcagagctcagaggaagaagaaaaggaaacaagaggggttcagaagaggcgaggagggaaccaagactggaacaagtggtgatggaagcctctgatcattttctcttcttgtcctgtacaagacctgcgtgtgtcggggtacctgaatctggctgctgacttggcacacaacttcactgatggtctggccattggggcttcctttcgagggggccggggactagggatcctgaccacaatgactgtcctgctacatcttctaaaccactgataatctttagctattggtgagtgcctttttctcttttctgcccatcaggcgatgcgtctgcaactactgacagcagtagggggtgacctctgatccctgccctctcctccccgtgcccggtccggcgtgttctgtcctacctcaggtgcggggagcggcatcggccgagcggtcagtgtacgcctggccggagagggggccaccgtagctgcctgcgacctggaccgggcagcggcacaggagacggtgcggctgctgggcgggccagggagcaaggaggggccgccccgagggaaccatattgcctccactgccccggctttttgtggggggtttttgatgcgtaacctccccctcccataggcctgcttttctcgcccaccatctgtcgttgtgtcctgtgcgggcatcacccaggggagttggaggagggctgtcaccccagctgatcttttctcccttgttaccctttcccgccagggcaccttcctagtcactcaggctgcagcatatagagaggagaacccctccttgagactcctgactcattccacatctctgactcacctataggtggggaacgtggggcagacaaaggggcggggtctacgcgaggggcggcccccctgacgccctcctccccttccccccacccccagccttcttcgccttctcctcggctgtggagccctggtggggggtctgcgcccggtcaccatgacgacgccggcgtgctgtttctaaaacccctttccctctaacccacaccacctttctactcactgatgccttcaggaagccataatggatggcacagagattgctgtttcccctcggtcactgcattcagaactcatgtgccctatctgcctggacatgctgaagaatacgattggttcagcctaggcttcagttcccttgactgaccactcagggcttcccttctcctaccccaggaacaaggagtgtcctacctgccgaaagaagctggtgtccaagcgatccctacggccagaccccaactttgatgccctgatctctaagatctatcctagccgggaggaatacgaggcccatcaagaccgagtgcttatccgcctgagccgccttgaccggggagggactctgggagggggaacgctgggccccccaagccctcctggggcccccagccccccagagccaggtggagacccctacctccagtcctcatctgaggcgctctggctctaagcctgtcctccctcccattccaggtatgtgaagacaactgggaatgccacagtggaccacctctccaagtacttggccctgcgcattgccctcgagcggaggcaacagcaggaagcaggggagccaggagggcctggagggggcgcctctgacaccggaggacctgatgggtgtggcggggagggtgggggtgccggaggaggtgacggtcctgaggagcctgctttgcccagccttttccatcttctccaactttcctctctcttttcccctctctcccttttaccccctcctcagacgttgaatggctcgctgaccctggagctggtgaattcccccaggagacccctgcccaggcaaggcctaactctgagggccctgtccttgcctggcagccctcaacaccctgggaagctgctcacaggaggctgtgctctgggcttctccacccctgccactctacacacaggcaagcagccttacgtctgtgccacctaagccttcttgtggtagatgagggtgctggcccccactccaacctgcaacaccagcagcagaaccatacctgggggcgtccccatcacagtgaccagtgaggcaagggctatggacattgctcagggctggtgacactacacccggcgcccctatttgatgagccatcttcctgtgaggataatttcatgttgaagaagacagaaatacaaatgtctatatatctggtttgcctccaggagaaatcctcagaagacttca

SEQ ID NO: 148989 - DNA, 456 bp, Homo sapiens
tgaccggggagggactctgggagggggaacgctgggccccccaagccctcctggggcccccagccccccagagccaggtggagacccctacctccagtcctcatctgaggcgctctggctctaagcctgtcctccctcccattccaggtatgtgaagacaactgggaatgccacagtggaccacctctccaagtacttggccctgcgcattgccctcgagcggaggcaacagcaggaagcaggggagccaggagggcctggagggggcgcctctgacaccggaggacctgatgggtgtggcggggagggtgggggtgccggaggaggtgacggtcctgaggagcctgctttgcccagccttttccatcttctccaactttcctctctcttttcccctctctcccttttaccccctcctcagacgttgaatggctcgctgaccctggagctggtgaa

SEQ ID NO: 148990 - DNA, 1561 bp, Homo sapiens
ggctgctgtttctaaaacccctttccctctaacccacaccacctttctactcactgatgccttcaggaagccataatggatggcacagagattgctgtttcccctcggtcactgcattcagaactcatgtgccctatctgcctggacatgctgaagaatacgatgaccaccaaggagtgcctccacagattctgctctgactgcattgtcacagccctacggagcgggaacaaggagtgtcctacctgccgaaagaagctggtgtccaagcgatccctacggccagaccccaactttgatgccctgatctctaagatctatcctagccgggaggaatacgaggcccatcaagaccgagtgcttatccgcctgagccgcctgcacaaccagcaggcattgagctccagcattgaggaggggctacgcatgcaggccatgcacagggcccagcgtgtgaggcggccgataccagggtcagatcagaccacaacgatgagtgggggggaaggagagcccggggagggagaaggggatggagaagatgtgagctcagactccgcccctgactctgccccaggccctgctcccaagcgaccccgtggagggggcgcaggggggagcagtgtagggacggggggaggcggcactggtggggtgggtgggggtgccggttcggaagactctggtgaccggggagggactctgggagggggaacgctgggccccccaagccctcctggggcccccagccccccagagccaggtggagaaattgagctcgtgttccggccccaccccctgctcgtggagaagggagaatactgccagacgaggtatgtgaagacaactgggaatgccacagtggaccacctctccaagtacttggccctgcgcattgccctcgagcggaggcaacagcaggaagcaggggagccaggagggcctggagggggcgcctcctaacaccgaagaactaaatgtgtgtggcggggagggtgggggtgccggaggaggtgacggtctccaaggagcctgcttttgccaagcctggagggcgtcagtgaaaagcagtacaccatctacatcgcacctggaggcggggcgttcacgacgttgaaatggctcgctgacccctggagctggtgaatgaagaaattctggaaggtgtcccggcccactggagctgtgctatgctccccacccaaggatccaaagtgacccccacccaggggacaagccagaggaaaggggacccctgggataacccggtgcccgggtctataaccccaggttcttttgtcccccagttacccccagccccagccagcccgattaggaggcacaaattagggcacgtgggcttttatacaaagtatctatatgagattcttctatattgtacagagtggggcaaaaacacgcccccatctgctgccttttccattggcctgcaaagtccccactatacggagtgtttgggaaaggttagaaacctcccatttaagcgcggcttccaacaacaaacgtggcttttttcctctttgaaaaaaaaaaaaaaaaa

SEQ ID NO: 148991 - DNA, 1719 bp, Homo sapiens
tgacggagtctcactctatcgtggaggctggagtgcagtggagcaatctcagctcactacaacctctgcctcctggattcaagaaattctcctgcctcagcctcccgagtagctgggattacaggtgcctgtcaccacgcccggctaatttttgtatttttagtagagatggggttacaccatgttggccaggctggtctcgaactcctgatctcaggtgatccacccgcctcagcttcccaaagtgctgggattataggtgtgagccaccgtgcccggcctggatctgttttcttagcacgcagtgaggaatctttgtacttaaggccagggcaacaaagtcaagaggtcaaggtgtagggccatgaggcctggacctatgctgcaggcaagggtttccatccccgctgccctaggcactctcttcccaaggccaggttgggcacctggggaggactagtgcaggaaggatctagcttagacctcttatacccccatcccagcaccccatcctgttgtacccagagctggtctcccatgagggggctaaagacaaatagccgtgggcccccacccatctcactcacacacacaggcatccatacaccccagaagacttcccaaatgaggccatactcaggggcacggggaatgtgcttctgcccctgtaaagggctttggggaaagggggcaaacatagtagagggctggaaagagccccccaaacctgtgcccatgccccctccagccctgcgtgttccattttgcctttttcagagtgcctttgctgcacccagaccaccggcccaggagagaccttctctcccactccagcccctctcactgcccttcaactagagctttcaccctttttaccatttcccttatgaagcgacacaaatctgcttttctgccccatacactgggcccaagggcttcacctaacttggggagggaaggggctgttgggtacaaggatgattttctgttaggactgccattttggcacggtctcccccttcccatctgatgtgtcctgccccttcagctctttggccttatctgtgttcacttgttcactttaggcaaaaatgacaggcgggccatttgttattcaggcctctgggtgggttgcttgtggaggtggggattttagcggggaacaggtgggactttgggaggagtgggcagggaggggagttggtagttggcagttttttggagctatctgattaaggccattccgttagtttcagttgtgccctggagggcaggggacagggtcagtatctctggggctgcaggccctctatgccttggccctcctgggcatggggtaaccaccagctcagctcttcctccttccagctttcctctctctagcacaccccagccagggcaaggatgcccacgggcatagctacagcaacccctgcgggatttggtgtccacacccgagaggccagggcagatggggaaagggattagcgcctcttccctcacactctgccagggttgccgggagcttgggccaggtcttaaggtaatgaggtgctcctcttcctgctggaaaaaccggacagactcagaaccacaaaggcaggtgctgccagcctggcgccttcctctctgcttaggctgggtgagcttgtccaggcctgtgcctcaccccttctctcttctaggctcagtgtatgcttaatcaggcatggggcatcc

SEQ ID NO: 148992 - DNA, 1935 bp, Homo sapiens
gggtcggaacaagcatcttccgtttcgagccacgcgtccggagaatttagattcacgtcagaagttcccattcgatttgattatcatggcaaacatgtatcaatggatcaggggacgctagctgggattttgattggtctggctcagttaaactgctctgaactaaagctcaagaggctttcctatcgacatggtttactaggcgttgacaaattattctcatatgcaatcactgagtggcttaatgacattaagaagaaccagctaccacgaatcctgggaggtgttggacctatgcattcactagtacaattagtacaaggcctaaaggacttggtctggctcccaatagagcagtaccggaaggatggccgcattgtcagagggtttcagagaggcgctgcttcctttggtacctcgacagcgatggctgctctagaactcacaaacagaatggttcaaaccatacaggcagctgcagagactgcttatgatatggtgtctcctggtaccctttctatcgagcccaagaagaccaaaaggtttcctcatcaccggttagcccaccagccagtagacctgagggaaggtgtggccaaggcctacagtgttgtgaaagagggaatcacagacacggctcagaccatttatgaaactgcggctcgagaacacgagagcagaggggtgactggtgccgtgggcgaggttctgcgccagattcctccggcagtggtgaaacctctgattgttgccacagaagcaacgtcaaacgtgctgggtggcatgagaaaccaaattaggccagatgtccggcaagacgagtcacagaaatggcgccacggggatgactgatggcttggaacttgacagtgtgaagataaggagagtggaacccaggagctcagagtcctgacagcagcttcagaggaagctcgtttaattttattgtgctcatctcaggaacaaaagcattttttagttaaataatttaacatcaaaacaacatgcaaccaaaaacttctgacatttatagttgatacttgcctatagaaatgtttggtggctggtgtcaaaggtccttaaagcatttgctgccaagttagtggaaggctcacttttgttaagatgactgtaattctccttgttaccgacgagagatcattggaagctgccttctaacactttgtgtagctctgtggagttggattttcttaaggtttaaaaagaatcacagcttcggaacttttaactgaaaatgagagacagaagccacaggggaagcaaagcaaataggattttcaatacaaatatcagtgtggaaaaataacctattctgttgaatttagtgttcatgcacttgagaaccaccattatttccatttactccgaaaatccttctgtgggggtttgagaaagtgaatgttgcagacatgttctgttgtgttgcactttatcctgtgtttatgtgtatgtgtttttagattaattcaagttgtgtgctatatttcttgtataatttacaaagttacacaaaatattaaagagcagtaaacattgtctgaaagtttttgggcaaagggaaggtaacttccaatgtaattaggcttccctttaaggagtaccgggaaaatgccttctgtaatggaagtggggcccctgtaattgtttatattttcagttttaagcaggtatagtgcaggcttgttaggaatgtgtggaagggaagattggaagtgatttttcctcttttaaaagtaaacaaaattcttcaaatatgccctagttaactatttcagcatacccatttttacttgggttaaccagtgtacattttggataaccctatccagggaatggaattaaagtattttttattttaaagggtggatattgttttatggcttcccctggaatattttggcttttccttagggg

SEQ ID NO: 148993 - DNA, 330 bp, Homo sapiens; identical to SEQ ID NO: 146353

SEQ ID NO: 148994 - DNA, 1165 bp, Homo sapiens
  misc_feature (1)...(1165): n = a,t,c or g
ctgtggtggaattcgtggcctcacaggacaccagcttcccaggaggcgtctgacacagtattatgatgaagatcccatggggcagcatcccagtactgatgttgctcctgctcctgggcctaatcgatatctcccaggcccagctcagctgcaccgggcccccagccatccctggcatcccgggtatccctgggacacctggccccgatggccaacctgggaccccagggataaaaggagagaaagggcttccagggctggctggagaccatggtgagttcggagagaagggagacccatggattcctgggaatccaggaaaagtcggccccaagggccccatgggccctaaaggtggcccaggggcccctgggagccccaggccccaaagggtgattcgggagactacaaggccacccagaaaatcgccttctctgccacaagaaccatcaacgtccccccttgcgccggagccagacccatccgctttcgaccacggtgtatcaccaacatgaacacccaattatgaggccccgcagtggcaagttcaccctgcaagggtgccccggtctctactaattcaacctatccacgcccagctctcgaggggaacctgtgcgtgaaccctcatgcgtggccgggagcgtgcacaggaaggtgggtcaccttctgtgaattattgccttacaaacacctttccagggtcaccacagggtggcaatggtcctcagctgaagaaggncccaaaaggagggggggggggggaaaagaaaaccgttcttcctgcaggcccaccgaacaagaacttcacttactggggcatgggagggtgcccaacagcaatcttttccgggttcctggcttttttccagatatgggagggcctgacctgtgggctggcttcacatcccaccccggctccccctgcccagcaacgctcactatacccccaacaacaaccatatgaccaagccaaatgcacacagtagggcttggtgacaccccgctgagctgaatgagtaaataaactcttcaaggccaagggacagtggtctaattcaactctgtgtcccagcaacctggcacaccagaagtgccatgctcgagaaatgttggttacatgaatgaatgaaccatgaatgaatgaaaaaaaaaaaaaaagggc

SEQ ID NO: 148995 - DNA, 493 bp, Homo sapiens
gaatcctggagttctatggtgatgacatagctctgctgaagctggcccggaaagtaaagatgtccacccatgccaggcccatctgccttccctgcacgatggaggccaatctggctctgcggagacctcaaggcagcacctgtagggaccatgagaatgaactgctgaacaaacagagtgttcctgctcattttgtcgccttgaatgggagcaaactgaacattaaccttaagatgggagtggagtggacaagctgtgccgaggttgtctcccaagaaaaaaccatgttccccaacttgacagatgtcagggaggtggtgacagaccagttcctaccagcaggactgcctcgctgccccacctcccgctccttggcctgtccccagattccttccctggttgacttgactcatgcttgtttcactttcacatggaatttccctgttttgagattcataaaatacattgggccgcccaataaaaaaaaaaaaaa

SEQ ID NO: 148996 - DNA, 2903 bp, Homo sapiens
ggggggcagtacacaaagcctgtgggggagatctattgaccctatagatatattagcatcagggagacagggcaaaggtttcacccttcagttcagtccccaatccctgcttattatttccctaacagaagaccatcccccttgccactccctggtttttcttctctggcagcaatgaagcagctgctgacccagctctagttttcgggaagtcagatgaccttttccctcccgcggctctctacctctcgccgcccctagggaggacaccatgggcccactgatggttcttttttgcctgctgttcctgtacccaggtctggcagactcggctccctcctgccctcagaacgtgaatatctcgggtggcaccttcaccctcagccatggctgggctcctgggagccttctcacctactcctgcccccagggcctgtacccatccccagcatcacggctgtgcaagagcagcggacagtggcagaccccaggagccacccggtctctgtctaaggcggtctgcaaacctgtgcgctgtccagcccctgtctcctttgagaatggcatttataccccacggctggggtcctatcccgtgggtggcaatgtgagcttcgagtgtgaggatggcttcatattgcggggctcgcctgtgcgtcagtgtcgccccaacggcatgtgggatggagaaacagctgtgtgtgataatggggctggccactgccccaacccaggcatttcactgggcgcagtgcggacaggcttccgctttggtcatggggacaaggtccgctatcgctgctcctcgaatcttgtgctcacggggtcttcggagcgggagtgccagggcaacggggtctggagtggaacggagcccatctgccgccaaccctactcttatgacttccctgaggacgtggcccctgccctgggcacttccttctcccacatgcttggggccaccaatcccacccagaagacaaaggaaagcctgggccgtaaaatccaaatccagcgctctggtcatctgaacctctacctgctcctggactgttcgcagagtgtgtcggaaaatgactttctcatcttcaaggagagcgcctccctcatggtggacaggatcttcagctttgagatcaatgtgagcgttgccattatcacctttgcctcagagcccaaagtcctcatgtctgtcctgaacgacaactcccgggatatgactgaggtgatcagcagcctggaaaatgccaactataaagatcatgaaaatggaactgggactaacacctatgcggccttaaacagtgtctatctcatgatgaacaaccaaatgcgactcctcggcatggaaacgatggcctggcaggaaatccgacatgccatcatccttctgacagatggaaagtccaatatgggtggctctcccaagacagctgttgaccatatcagagagatcctgaacatcaaccagaagaggaatgactatctggacatctatgccatcggggtgggcaagctggatgtggactggagagaactgaatgagctagggtccaagaaggatggtgagaggcatgccttcattctgcaggacacaaaggctctgcaccaggtctttgaacatatgctggatgtctccaagctcacagacaccatctgcggggtggggaacatgtcagcaaacgcctctgaccaggagaggacaccctggcatgtcactattaagcccaagagccaagagacctgccggggggccctcatctccgaccaatgggtcctgacagcagctcattgcttccgcgatggcaacgaccactccctgtggagggtcaatgtgggagaccccaaatcccagtggggcaaagaattccttattgagaaggcggcgatctccccagggtttgatgtctttgccaaaaagaaccagggaatcctggagttctatggtgatgacatagctctgctgaagctggcccagaaagtaaagatgtccacccatgccaggcccatctgccttccctgcacgatggaggccaatctggctctgcggagacctcaaggcagcacctgtagggaccatgagaatgaactgctgaacaaacagagtgttctctgcacattttggtcgcctttgaatgggagcaaaccgaaaatttaaccttaagaatgggagtggagtgaccagcttgtgcccgagggttgtctcccaagaaaaaaaccatggttccccaacttgacaggatgtcagggaaggtggtgacagacccagttccttatgcagtgtgaccccaggaggatgagagtcccctgcaagtgagaattctgggggagcaggttttccttgagcggagattcaggttatctgcaggtggggtctggtgcagctggggtcttttacaaccccctgccttggctctgctggacaaaaactcccgcaaaaggggcccctcgttagcaaggtcccgccgcccacgagaactttcacatcaatctcttccgcattgcagccctggctgaggcagcaccctggggggatgtcctgaattttttacccctcttagccatgggccacttgagcccttttgcttgccctgccagaatctgccgcccctccatcttctacctctgaatgggccacccttagaccctgtgaatccatcctcatctcctagctgagtaaatccgggtctctaggatgccagagcgagcggcacacaagtctgggaaatcctcagggctcctaccagcaggactgcctcgctggcccacctcccgctccttgggctgttcccagaattccttcctggtttgacttgactcatgcttgtttcactttcacatggaatttccgcagttatgaaattaataaaaatcaatggtttccacaaaaaaaaaaaaaaaaa

SEQ ID NO: 148997 - DNA, 2114 bp, Homo sapiens
  misc_feature (1)...(2114): n = a,t,c or g
ccccagccccggctcagcccgcagcatgggcagccacaccacacgggacagcagctccctctcgggctgcgcctcaggcatcctggaggagcgcagccctgccttccgggggccggacagggcccgggctgctgtctcaagacagccagacaaggagttctccttcatggatgaggaggaggaggatgaaatccgtgtgtgaggcggacagtgggtggccaccgggagctcttggctgcatcttctccctgcccccaccccactatgacctttgaccctacggcgcaggggcagccaggacccttgattcagaccatggaccctggaccttgtagatgagggacactggcctggccctcgggtcttcggaggacgtagggggctggcatgggtgccgactggctgcctgacttcatcacgctccctgcacttaggctgcgtgggacaagggctgtgttgtcacagcaggaataggttttcctctgttggcctccctttcctccaccttgggcctcaaatggatgccagatgccaaccccagttctgggccacgtaacagccagcgggttcagcccagaggcaggcctcagctccaggggcttaaggactctcccctcccattttctctgctggcgctactgctgggcccaccacaggctgctggggaagcacctccaccaggagggagacggccttgcctctcagcccctccctgccccaccccaaatcctgacctggaaatctggagccccttggagctgagccggacggggggccagctgcgagcatgtgcactaaacgcagccctttccaggggaagagaacaggatggagaatggaaggaaagccccccagggcttcgtgaattgcaagaagggacccttccaggatgacactaggaacagggctagggcactcgctcagtccctaggggcttgtttgttctttattattgtgtttaaatccttatagagcaatatcaggatggtgttaataggtctgcctcagaatgagaatcaatccttttagaaaacctttatactaagcctcctcttcaaaattcacagtggcgattagcggactggagtctggtggcgattagcggagctggagtctggggacatccgtggcaaagacaccagctcaactttagtgcttcccaactttatttagaatgacatggggtgggtgtctggtgtgtgtgttttccctacgtcacctcccatagctattaacaactgaggaaggtccagtgcagaattatttttggagaacgatttttttttttaaaaaaatatatcattcctatgggggggaaagccttttttttctttttgggctgagttattccctccctcccctcaataccctcagtacttgactacttccctttcttttctcagggcctccccccaccgactttttgaggccaggggttggccaaggatttagccaaaacccaaaacagggtgcttgaggttaaacgcaaatttccagggtaaaccaaaaggtaattttcttggcattaatatgccccccacgcaaatatttgggaacacttatgtgaaaaatgatttgtttttctgaaaatttacgtttctctcctgaagtcctgtaaacttgtcccccgaggggattgaagcagaaagctcgggtaatgaagccctgaaggttgaactgccgggttattttttctgtccctggggaacaaggcctgaccccaacctcccctgtctcccatgtaggccagtgagggggaggggggagacacagaacccaacccacagcccagggggcgtccccatggcgacttgtgggcccggccccctcctctcttgccctgacttcttcctctcttgncctgactctagacactaacttagttcccaggtttcggtgccctgttggtgctcctgttttcaaataagcttaggtcccatggtggggggaggaaccctcaggggctatgcagcccccgccagctgccctcaaatcccgtcccaggccaattccagattctaaactgatttttttcatgatattgtcaaaacagtgaggaaacattaaaaaaaaaaggccctaaagcaaaaaaaaaaaaaaaaaacattcgcggg

SEQ ID NO: 148998 - DNA, 451 bp, Homo sapiens
atctctttctacaatgtgaccaacaagttccacatcattactttcacccacaatttctgtggcccccttcgccctttctttgaaccttgccttcatgatggaggaaaaatcacagctgctatagtcatttgatcataactacacaaatcagaggaatcaattggccccaggccagaagggaaaggccatgctaatggagatgtgtccctcaaggtgaactattctttactacccccgaaagccccatagctgaaggatataatcctgtccttgccccctgaccttgggcccagcccttcagggagctcaaggctccttctttttagggatatgccacattacctgctcccatcaccatccagcccagcaccctgggactttcagtcgcctgggccaaccccatggattatggaacgtctaatcaaattaacccaaatccagaccctgtatt

SEQ ID NO: 148999 - DNA, 2590 bp, Homo sapiens
ggtcgacccacgcgtccgcgggcggcggcagcagccgacatacgtccaggccctctttgactttgatccccaggaggatggagagctgggcttccgccggggagattttatccatgtcatggataactcagaccccaactggtggaaaggagcttgccacgggcagaccggcatgtttccccgcaattatgtcacccccgtgaaccggaacgtctaagagtcaagaagcaattatttaaagaaagtgaaaaatgtaaaacacatacaaaagaattaaacccacaagctgcctctgacagcagcctgtgagggagtgcagaacacctggccgggtcaccctgtgaccctctcactttggttggaactttagggggtgggagggggcgttggatttaaaaatgccaaaacttacctataaattaagaagagtttttattacaaattttcactgctgctcctctttcccctcctttgtcttttttttcatccttttttctcttctgtccatcagtgcatgacggtttaaggccacgtatagtcctagctgacgccaataataaaaaacaatcgtaccaagtggggctggtattctctctatgcaaaatgtctggtttatttgaattgactgaaagaagaaacagctgttcctgtgttcttcgtatatacacacaaaaaggagcgggcagggccgctcgatgcctttgctgtttagctttcctcccagaggaaggggaccttgtaggaatctgccttccagccccaggacccccccaagtgtattttgtcccaagttcacagtagaagtaagggtagaaggaaaagcatgtctctgcttccatggcattcctgagaaagcccacctgggcttgggcgccggtggctcacgccgtgtaatcccagcactttgggaggccaaggtgggcggatcacaaggtcaggagttcgagaccaacctagccaacatggtgaaaccccgtctctacctaaaaataagaaattagccgggtgtggtggcacgcacctgtaatcccagctaattgggagcctgaggcaggagaatccgcttgaacctgggaagtggaggttgagtgatccgggaccgtgccattgtactccagcctgggtgacagagcgagattccgtctcaaaaaaaaaaaaaaaaaaaaaagcccacctgaaagcctgtctctttccactttgttggcccttccagtgggattatcgagcatgttgttttttcatagtgcctttttacttatttcaagggttgcttctgagtggtgttttttttttttttttaatttgttttgttttaaaataagttaaagacagtccagagcttttcagccaattttgtctcctactctgtgtaaatatttttccctccgggcaggggagccagggtagagcaaaggagacaagcacggagtggaaggtgaggcgttctcctgcttgtactaagccaggaggctttaagctccagctttaagggttgtgagccccttggggttttcagggaactgcttgcccaggggtgcagtgttgagtgtgatgggccaacgggggcaagagggaaggtgaccgcccagctctcccacatcccactggatctggcttacaggggggtcggaagcctgtccttcaccgttttcgggggttgtggcccccgccccctccctattattgcacccttgggaaccagcaagttcccagacaaggagagcggaggagggaagtcatggggaacgcagcctccagttgttaggcaggttttcactatttcctatggttgggggttacacagtgagagtaattcaatttttcaattgtctttgctctttagatttgggccatggcttttcatcctgttttcccctgacctgtccaggtgagtgtgagggcagcactgggaagctggagtgctgcttgtgcctcccttcccagtgggctgtgttgactgctgctccccacccctaccgatggtcccagggaagcagggagagttggggaaggcaagattgggaaagacaggaagaccaaggccttcggcagaactcttctgtctttctctccacttctgggtcccctgttgggtgatgttgcctcttaaatctttttctccacccaaacccctttccccacgacaaaaaacaaagacttgcctccctcttcttccgggagctggtgacagcctttgggccttttcagttcccaaagcgggccgatggggagttttccttccgatttcagatattgaacagggcccaggcctggagcgtttgctgtgccaggaggcggcagcttttttgggcagagcctgtccccgccttccctcacttttcctcatcctgcttctcttttcctcgcagatgataaaaggaatctggcattttacacctggaccatttgattgttttattttggaattggtgtatatcatgaagccttgctgaactaagttttgtgtgtatatatttaaaaaaaaaaatcagtgtttaaataaagacctatgtacttaatcctttaactctgcggatagcatttggtaggtagtgattaactgtgaataataaatacacaatgaattctt

SEQ ID NO: 149000 - DNA, 517 bp, Homo sapiens
  misc_feature (1)...(517): n = a,t,c or g
gaaaattgaacaagatggacgggtccaggaaagaggaggaggaagacagcacattcaccaacatttctcttgcagatgacatagaccattcctcaagaattttgtatccaaggcccaaaagtttgttacccaagatgatgaatgctgacatggatgatctctctgcaagagtagatgcagttaaggaagaaaatctgaagctaaaatcagaaaaccaagttcttngacaatatatagaaaatctcatgtcagcttctagtgtttttcaaacaactgacacaaaaagcaaaagaaagtaagggattgacacccttctgttttatggaattnctgctgatcattttttctttaaaacttggatagattccaaaagttacagtacctttgtggcttcattgaatatttatgaagataatgtcagatgtagacaaaaataacacaataacaggagacttncataagtttgtgtattatgttagtctatgaaaacgtgcaaatgtattgtagagactttatg

SEQ ID NO: 149001 - DNA, 1820 bp, Homo sapiens
ctcaagcggaagaccattcctcaagaattttgtatccaaggcccaaaagtttgttacccaagatgatgaatgctgacatggatgcagttgatgctgaaaatcaagtggaactggaggaaaaaacaagacttattaatcaagtgttggaactccaacacacacttgaagatctctctgcaagagtagatgcagttaaggaagaaaatctgaagctaaaatcagaaaaccaagttcttggacaatatatagaaaatctcatgtcagcttctagtgtttttcaaacaactgacacaaaaagcaaaagaaagtaagggattgacacccttctgttttatggaattgctgctgatcattttttctttaaaacttggatagattccaaaagttacagtacctttgtggcttcattgaatatttatgaagataatgtcagatgtagacaaaaataacacaataacaggagacttccataagtttgtgtattatgttagtctatggaaaacgtgcaaatgtattgtaggagactttatggattaggaattgccatatatttatggaaacttacagatcaatgtgctattgaatttgtaggattagcactgccttttattataggattaatacgatgtactcgaacataacctaccgcgttcgagaacaatgcgagcccttatcatgtactaaatgcacagctttatgtaccctgtccaccatcttgtgcctcttctccatttgcctcttccttcctatttcccttccgctaaggaaaaaaattggtgtcacatttgtaaaagtaattttaatagttaatcatctctgagagtaacctgtattttaattgttgaaacttaaccaaaataagatactgtctcagctagggcttgtcatttgtgtatttagtgttaagataggaatgctagtgtctctttaattaattggaaatagatggaggctaaaaatgaaggtttttctttgaaactgaattaacttgggaatatttgttgttaaaaacttctttttgcccaaaataactcattttgtattatcctgaaaatatataatttctgggtcatgtgtatgttaaaatagaaaattttgatgaacaatgggaatagggtggaaaagtactcggtaaacagtagtaaccaaatattttcactccagatttgtgttttctctggcacagagtagatcttttgggaaatatatatgaaagtggattaagtttgactacccttatgttagccacatctggatgagaacagttacaaagagtttggtctctaagttgatttgtacccagtgggtccaacctccggcaaaatccccgtaatggtgtattagtattagaatagtgaataaaatggggaaagttataccatgtataccttattatccttgcctcagtattttatctccacttgttcctagaattttctggtaaacccctggcttactggggtttggaaggaggttttagtcatccctttaacaattttttaaaaatttagccttcctagattcccatttggtaaggaaaatcaatattggaagtattgcctaaaatccttataatatgaaaagagatcccacttaatggtagcttaaaggttattagattttggtcttttaatcatggaataatcttatgtattggtgtaagagttgatgaatgactttagctgtgtgaatatataatagtcaaactgcaaacattttgcatcccttttgtgacctaatttacagacatttaaattgtgttgcagttcctgctttgccgtttaataaaaagctatttcagaggtaaaaaaaaaaaaaaa

SEQ ID NO: 149002 - DNA, 545 bp, Homo sapiens
gtcaacaaagtggtgtagtcactacaggtgctcgctgccacacccagctaattttttgtattttttagtagagatggagtttcaccgtgttgcacaggctggtgtcgaactcctgagctcaggcgatccgcccgcctcagcttcccagagtgttgggattataggcgtgagccactgcacctggcacatgtatatgtatgtattttttacaaaattggatgaagtataatttatttgctaaatattttcacttatgccatgatatcttatttaatctttaatttgtctatgaaaatacctgctctgctaggggacttctagttgaaaactcattaatttaaaaaattaattttgaattcagccacctattcttttttctaattgtttcttgtagcttttgctttgattggaataactttattctaggaataaagttgtgtcatctgcaaacatgaatcatgtacacatctgattttcttatatttatgtctcctttttctcttcaaattacattgcctttaccattgatgggaacctgggtaata

SEQ ID NO: 149003 - DNA, 774 bp, Homo sapiens
cccacgcgtccgcaaagatgcagtaagggatggcttgagggctgtcaaaaatgctattgatgatggctgtgtggttccggtgctggtgccgtggaagtggcaatggcagaagccctgaataaatataagctcagtgtaaagggcaaggcacagcttggagtccaagcatttgctgatgcgttgctcgttattcccaaggttcttgcgcagaattctggttttgaccttcaggaaacattagttaaaatttaagcagaacattcagaatcaggtcagctcgtgggtgtggacctgaacacaggtgagcccgtggtagcagcagaagcaggcattatgggataacgattgtgtaaagaaacagcttcttcattcctgcactgtgattgccaccaacattctcttggttgatgagatcatgcgagctggaatgtcttctctgaaaggttgaattgaagcttcctctgtatctgaatcttgaagactctgcaaagtgatcctgaagaatacagctgtggaatttttgtccaagcttcaaatgagtttcaagggaattttcccatgtgaaaaaaggagagaacactggcatctgttgaaattcggaagttctgaaattataattacagtattttttaaaaaattgcactgaagtgtacacagataaagcaggtctttcacccagtgaacaggatgttttgctttagcagcagtgacataaaattccatgttaaataagcatatattacctaccttattaaatattccttgaaaaagcaa

SEQ ID NO: 149004 - DNA, 1224 bp, Homo sapiens
ccttcaagaaacattaggtaaaattcaagcagaacattcagaatcagggcattttgtggttgtggacctgaacacaggtaagagaatgcaactgttgtagagggaaaactacatgtaatacgtgtgagtcgaagccaggaaagattaaaaatgttttgctttgcaatttgacaccagtgctgttagggaactctgggttctaaaatgggataaaataggatattaataaaaaatggaatgactaggtataattaagggacgagtagacatgagtaatttggggatacaattttggagatgttgagtggtggtagatggttcagattaatgttgaaggattttcatattgcatttgccttactcagtttttaatcaagtactatgataagaaaatagatgtggtgattatattcatgggtgaaaaccagcctaaagatagcaattaatgccagaaaaggggatgtagaaatctagtgaaatggtgacagccctgatcttaggttcctgtaacaaaacaacacaaattaagtacaaagtaggagacagataacaggtacatccatgcagtatgtgcaagacctattgctgtcaacattattatttaataaaaaagatttctggaatgagggaaatgatcagtccattttagtcagattatagttgaagtgcctatacttcagtatgagtaaaccagaaaatgtatccagaagaagagaaggggtgttccaggacttctaagtataagccagacattcatcaaatattgtggacggtggtcatggtttagagtagaaaattgggctaacagagaagctttgaattcccatagttaatactggaggaaatgagtcatcggtgataagcaaagccacacacaatattgttggttcttattgactgaacttactttggttgccttttaggtgagcccgtggtagcagcagaagcaggcattatgggataacgattgtgtaaagaaacagcttcttcattcctggtaagtttgggaaaatgaaaactaaactgttagagaatcatcatactcttcatttggtgttttctgtttagttgctcattttcccccatgaataatgtaatcagctgaaagtatggaaactgaactagccctctgatgtgtagaggggaagggggaaatttaattggatgttaacgtgtgcagcttagttggaagtgggaagttgagtcgaattagggctcctaatc

SEQ ID NO: 149005 - DNA, 367 bp, Homo sapiens
aattttctggtgtatgtgtatacttatatgcatatttacgtgtacatacattaatgtacacaagtgtgtatgtatgcatgcatacacacatacacactcacatatattctcatgtactatatattcttcaccatatctataacattttccctgttcatccacgcaatatctaaaaatgaaaatttgtcattgtcaaaaagcatttattaactgaaactcatgacagagatttgagtgagtggagttatgggtgatttttctcatgtttctaaaatttagataatgaattatgttgcttgtacaatttgtaaaagttaagctaacatatttatatacttattcatgtatgaaaatttgtcattgtcag

SEQ ID NO: 149006 - DNA, 474 bp, Homo sapiens
ttttttttttgtattcgagtagatgggtttcaccatgttgcccaggctggtctcaaacgcctgagctcaggcaacccaccagcctgggcctcccaaagtgctaggattacaggcgtgagccaccccgctcagcctgttactggtttttaataaatacagtgtagcctgagcgtgtagaccatcacattcacattaatctgccattcattcactaactcccacagggcaactttttagtcctgaaagctccattcatgttaagtgcactaaacaggtgtggtttttaatttttcatacccatattttactggtacctttcctgtgaattagatgtgttagatacacagatgctactggtggtacaacatgcctacaggtattcaggtacaagtacatgctggtaccaggtttacaggcctaagaagccatagggctatccccgttacagtccaggtgtgcctgtaaggcgtcgac

SEQ ID NO: 149007 - DNA, 368 bp, Homo sapiens
cataatgtgtgccacctgtttgcagagcatgaccctgagcagcctgccagtgccattgtcaacttcgtatcaaaggtcatgattggttccccaaagaaggtctgagaactcccctccctccctggacccaccgatgcctctcgaagccctgaagacagccgttgggtaagggtggggcccccactttttaccaaactagtaaacctgacattccaggcccatgaggggaaagaggatcttccagctctgcaaaaacaagaacaaacaacatcaccgtgaattggcctttcctgaaagtgacttatctgacacatctctgtagccacatgctttttgggtagaaccagttgggcacgggtgcaccccac

SEQ ID NO: 149008 - DNA, 541 bp, Homo sapiens
ttttttttttgtcaagaaatttattaacctttataaacactattttcactcaatcattcataaaaaatgatttgtgattaaatctgtaataaaaccatataacgttcatcaatgcattcaataagaccagtttcttccatggaacataataaaccactttaaaacagcagttttcattcatgtcatataaggctgtcaaactaaaagtattccttataatgagttgttacccaagaaatccatctcacttcccgtgatgtggagcctggtgatgtgccctctaagagttgggtctgaaagaagactctgcccctttatggccacctccccagtctctctcaaacaagtttcacaacaggaaaatatttatgagcagagaaatcaaattcaggaggaacctgttaaagaaaaacgaaactcaattaatgtatctacaaatattcagatggtacacaaaacaaagactatttttattttagagtttcttgtgttcttagaaacaaggcagcacaaaatagattttaaaaactaggttaatgac

SEQ ID NO: 149009 - DNA, 474 bp, Homo sapiens
acgaagtactattacatatattggtatctctctgaattcctgtacgcatgggtgatgtccacattgagtcgtgccgatggctctccacatggcagaggaaaggataatggaagagcacctagaaaggccgtcgtagtaaaaaaacaaagaaaaaaaagaaaggtgctgtggattattcttatactttaagaacagagtgtactttaatttctacagataaatagatggagagctactcgtgagttggccattatattttagttcttgttccttcttttcagaaactataaggtagagactgagtcccagtatcaatgacataagccatataggaacctctctttgctttcacttctttgctggtctgtgtatcagaaaacctttgatccacgacgtacccacgtggagtgtgcaagcaagatatcggtgagggaacaatacacgcaggaggccagtgacctagtgacagagcca

SEQ ID NO: 149010 - DNA, 1589 bp, Homo sapiens
  misc_feature (1)...(1589): n = a,t,c or g
ctgaattcctttacgcatggttgatgtcaacattgagtcgtgccgatggctctcaaatggcagaggaaaggataatggaagagcagcagaaaggccgtagtagtaaaaaaacaaagaaaaaaaagaaagttcgcccattgagccgagagatcacaatgagccaagcatatcagaacatgtgtgctggaatgtttaaaaccatggtagcatttgacatggacggcaaagtacgtaaaccgaagtttgagcttgatagtgaacaagttcggtatgaacacaggtttgctccattcaacagtgtgatgaccccgccgccagtgcactacttacagttcaaggaaatgtctgacctcaataaatatagccctcctcctcagtctcctgaactgtatgtggcagctagtaagcactttcaacaggcaaaaatggattttgggaaaattattcccttaacccgggaccatggagggtttaattagaattttaaaggttgcccaaacccaactttgtggttatgaagttattggccaggaggaccacaaaaaggaatctaaagttcctcctgaatttgatttctctgctcataaatattttccctgttgtgaaacttgtttgagagagacctgggaaggtggccataaaggggcagagtcttctttcagacccaactcttagagggcacatcaccaggctccacatcacgggaagtgagaatggatttcttgggtaacaacctcattataagggaatacttttangttttgacaagccttatatgacatggaatggaaaaactggctgtttttaaaagtgggtttattatgttccatggaagaaactggtcttattgaatgcattgatgaacgttatatggttttattacagatttaatcacaaatcattttttatgaatgattgagtgaaaatagtgtttataaaggttaataaatttcttgacaaaaaaaaaatgcactgctggagatgaaaaacagtaggtctttgtccatgttaagaactgagaaaggtgtatgctctttaacatttgagtagttccaaaaacgttatccaaaagaagtttcaaatcaagggattaattaaacacttgtatgagattttggtaaaatacatttagaagggatttttgggagggcctctaaattacatgaaaattgtgatttttatgtgtcatgacatcacaaattatatatctgtaagaatacagatgtgtaaaaaaaatccttttagcacttttaaaagattatacattgtttgctggtgacatgcaaaaaggaggcagatagaaatgtatataggattaaaatttagggactaggtttaaatgtgggtgtactttttgtttacttcatattcagtttaacccatggaaacattttcaaatggggtgtctgttcagtatcctctgggctttggaaaaactggactacatccccctgtgcttggcaagtgcctgctgccagaggtcctccccttcctttcctgcttgtcctgtgtctgctctgatgtttgcggtgggcagctttctaggcctcttgggccttcctttttgtcctctgtagcaggcaatactc

SEQ ID NO: 149011 - DNA, 451 bp, Homo sapiens
gcggccgccgcggcccccttctgcctgcccttctgcttcctctcgccttctgcagctgccgcctacgtgcagcccttcctggacaagagcggcctggagaagtatctgtacccggcgtcggctgccgccccgttcccgctgctataccccggcatccccgccgccgccgccgcgttcccctgcctgtcctcggtgttgtcgccccctcccgagaaggcgggcgccgccgccgcgaccctcctgccgcacgaggtggcgccccttggggcgccgcacccccagcacccgcacggccgcacccacctgcccttcgccgggccccgcgagccggggaacccggagagctctgctcaggaagatccctcgcagccaggaaaggaagctccctgaatccttgcgtcccgaaggacggaggttcaagcagagtgagaagttaaaatacccttaagga

SEQ ID NO: 149012 - DNA, 2545 bp, Homo sapiens
  misc_feature (1)...(2545): n = a,t,c or g
gcggccgccgcggcccccttctgcctgcccttctgcttcctctcgccttctgcagctgccgcctacgtgcagcccttcctggacaagagcggcctggagaagtatctgtacccggcggcggctgccgccccgttcccgctgctataccccggcatccccgccccggcggcagccgcggcagccgccgccgccgctgccgccgccgccgccgcgttcccctgcctgtcctcggtgttgtcgccccctcccgagaaggcgggcgccgccgccgcgaccctcctgccgcacgaggtggcgccccttggggcgccgcacccccagcacccgcacggccgcacccacctgcccttcgccgggccccgcgagccggggaacccggagagctctgctcaggaagatccctcgcagccaggaaaggaagctccctgaatccttgcgtcccgaaggacggaggttcaagcagagtgagaagttaaaatacccttaaagaggttcaagcagagtgagaagttaaaatacccttaaggtctttaagggaggaagtgtaatagatgcacgacaggcataaacaagaacaatcaaaacaggtgttatgtgtacattcggagttcctgttttgctcatcccgcaccaccccaccctccacacactaacatccctttctttccccccaccagctgtaaaagatcctatgcgaaagacactggctcttttttttaatcccccaaataaattttgcccccttttagggccatgttccattatctcttaaaattggaacctaattcgagaggaagtaagaagggtctgttctgtggctgagctacggtgaaccccggggtaggggaaagatgttaacacctttgacgtctttggagttgacatggaacagcaggtagttgttatgtagagctagttctcaaagctgccctgcctgttttaggaggcgttccacaaacagattgaggctcttttggaattggaatttactcttccagtatttttcctaatgttccagctttcctaaaaggcatatatttttccaaagaagtgaggatgcagtttctccacgttgcaaacctattctgcaagtggtttaaatggtatctcttagtaacttgcactcggttaaagaaacacggagctgggccantcggtcagaactaagtcagggaaggagatggatgagaaggccagaatcattcctagtacatttgctaacactttattgagaaattgaccatggaattaatggaccctatcttaaatttcttctaagtccatatatagatagatatctatctgtacagatttctatttatccatagatagggtatctattacatacacatcttcaagtgcatctattcccacttctcattaaatccatcatgtttcctaaattttttgtaatcttactgggaaaaaaaaagtgcactgaacttcaaaacaaaacaaaaaacaacaacaacaaaaaacaagtccaaactgatatatcctatattctgttaaaattcaaaagtgaacgaaagcatttaactggccagttttggattgcaaatgctggtaaagatataggaatggaagtcctgtggggccttcttatctccaagtctatggtattttctggggggcccaaaccagataccaggataatcacaaaggaaagctttttttaataaggcttaaacccaagaccttgtctagatatttttagttttgtttgcccaaggtagcactgtgagaaatctccacttgggatgttatgtaaggggtgagacacaaacagtctgactatgagtgaggaaaattatctgggtcttttcggtcagtttggtgcatttgctgccggcctgttgctactgtttgccctcaaaccgctgtgtttaaaaccaccgttaaacctcttagcctaccaaggtggcctcttatgtaccatagttgttaaataccatcccaattaatgatgtcctgaccatgctatttttgtagggagaaaattatgtgcctaatgatattttgagttaaaatatcttttggggaggatttgcctgaaaagttgcactttttgttacaatgcttatgcttggtacaagcttatgctgtcttaaattattttaaaaaaaataaatactgtctgtgagaaacccagctggtttagaaaagtttagtatgtgacgataaactagaaattacctttatattctagtattttcagcactccataaattctattacctaaatattgccacactattttgtgatttaaaaattcttactaaggaataaaaactttaatcatacggatatgatattgtctaataattaaaaaagacataatggatgctccaattagttttaagatatcgtataactatagggatacaaatcactacagttctcagatttacagcttttttttgtcattggcttgatgtcacacatttccaatctcttgcaagcctccaggctctggctttgtctacctgctcgttcccaatgtatcttaatgaaaagtgcaaaagaaaaacctaccaattaaaaa

SEQ ID NO: 149013 - DNA, 619 bp, Homo sapiens
aggcagcagcaagagcttcaactacagagaagtgaaggcataagatactatgatgatagtgagcaactttccaaaagctagttaaatctgcttattacaactgaaatatcgaagaaagtctagcaggaaggagctcttcgccttttggaacatcaatgagagatagttgccacagtcactaggtctagcatttagacctgcaaggaagggcaataagcattagggtaaggcttgaatttgaattttttcactaattaaagagtaattttttgtaaagcaaggtaagagtaatctttttgatttgcaggttgaatgagaaccctacttgcctaaatgaggaatgtctttcctaccatctaaaataccgaaggtttctggctgggtaaggtttgtagttgacagtaaaacctgatgacaccatttgtttccctgcaagtctacattacatatttcacaactttgtccctctctagtaggcacattggaaaaattcttcaactgaaaactaccttggtaccatgtcctacacgttttaaaccttagttttaaaaattcccctgcgaaatagccataagtattcatatcaagtcagttggtgactccctggtgtatacaattc

SEQ ID NO: 149014 - DNA, 1946 bp, Homo sapiens
atgctgcgaaaaaaagaaaaggccaattatcgacttctcgcggagaggacccgtaaaaggcctagaaaagcgtcggcagaacttcagcgaaagcactacctccccatgcttcgaggccatttgcggctttttctgccgggccgcctccgccctcttccctccaatcccaggctcgctttcccggcggcagagcgaggcggcggccattgcgggccaatgcgccatttccctgtctcaacgcaagagcgcgggacggccgacccggtccacccggcctccccgctcccaccgaaccaggcccccaacgccggccattccccaccaaccccccgctctccccctaatacctcctccccccggcggcgacggcgacggccggagtcgggctgggggcgaccgggcggcggttttacctccattttgagaccggactcgcctcttccaactcgagttcaatatgggaccgagaggaagaggcggggccagtcgtcacgtgacgcgttttccgcgcgccgccagtctgttgggggaggagcgaattgggaagggggcggagccaagcgggcgcgaagagggactggaccagcgggttggcgggcggagggcggaggcgcggcgtgccgcgggagcgcgcgcgcctcgccagctttcaggggaagagggcctttgccgccgttcgcgtcagggcgagttccgggacgtcagtgcggtctccgccaatggttgcaagaaaaactcctcggcccctcggaccatctttcctgtttccaaatgccggggaccagtgtctgtgactgcgccgcctgcctgagggcatgtactgaaaagccctgcgactccaacatgtgggactcacaagcaccttggacaggcctcaaaacgcggctgacatacagaatttttaccattaacgacctgaggcaggactggtggagagactactttgaaaagtatggcaagattgaaaccatagaagttatggaagacaggcagagtggaaaaaagagaggatttgcttttgtaacttttgatgatcatgatacagttgataaaattgttggtcgtggaggtggatctggcaattttatgggtcgcggagggaactttggaggtggtggaggtaattttggccgtggtggaaactttggtggaagaggaggctatggtggtggaggtggtggcagcagaggtagttatggaggaggtgatggtggatataatggatttggaggtgatggtggcaactatggcggtggtcctggttatagtagtagagggggctatggtggtggtggaccaggatatggaaaccaaggtggtggatatggtggagagtggaggatatgatggttacaatgaaggaggaaattttggcggtggtaactatggtggtggtgggaactataatgattttgtgaaattatagtggaccaacagcaatcaagattatggacccatgaaagggggcagtcttggtggtaagaagctcgggcagtccctatggtggtggttatggatctggtcggtcggaagtggtggatatggtagcagaaggttctaaaaacagcagaaaagggctacagttcttagcacggagagagagcgacggagttgtcacggaaagctgcaggttactttgagacagtccgtcccaaactgcattagaggaactgtaaaaatcttgccaccagaaaggaacgaatgatccatagttcagaaaagtttacttgcagctttaacaggggaaccccttcttgttcaggacttgtcatagccacagttttgcaaaaaagtgcagctatttgattaaatgcaatgtagtgtcaattaggttgtacattcctgaggtcttttatctgttgtaagctttgtctttttctttttcttttcattacatcagggtaatattggccctgtaaattgtggtagtgggtaccaggaaatta

SEQ ID NO: 149015 - DNA, 2292 bp, Homo sapiens
aggtggtggaggtaattttggccgtggtggaaactttggtggaagaggaggctatggtggtggaggtggtggcagcagaggtagttatggaggaggtgatggtggatataatggatttggaggtgatggtggcaactatggcggtggtcctggttatagtagtagagggggctatggtggtggtggaccaggatatggaaaccaaggtggtgggaactataatgattttggaaattatagtggacaacagcaatcaaattatggacccatgaaagggggcagttttggtggaagaagctcgggcagtccctatggtggtggttatggatctggtggtggaagtggtggatatggtagcagaaggttctaaaaacagcagaaaagggttgaatgagaaccctacttgcctaaatgaggaaattcttttctaaccatctaaaatacaaaggttcttggctgggtaaggtttgtagttgacagtaaaacctgatgacaccatttgtttccctgcaagtctacattacatatttcacaactttgtccctctctagtaggcacattgggaaaaattcttcaactgaaaactaccttggtaccatgtcctacacgttttacaccttagatagtatgtaatcccctgcggaaatagccataagtattcatattcaagtcagttgtggactccttgtgtattacaatttcattttttgtgtcttcaggggtaaactccaatttttgggtaaagtgggtttcagcttttgtggaaaaccgtttttgtgtgtaaggcatggacacacaacagactcaggtaagggtggcccatcctcatactagggggaaacacctttcaaagggaacattaaaagttaccaggggccagggcacagtgggcttcacgcctggtaattcccaggcactttggggagggctgaggcagatggatcccaagtcccagaaatttgagacgagcctggggcaacatagttgagagcctgttcaacaaaaaatcagaagaaattagctggggcttggttgattacacatctgtagtccccagcttatttggggaggctgccttgatattcaggcagttcgaggctgcagttgagcttgactgccccactgtatttccagccttgggtgaccccatctcaaagaagaaaagtttaccagatgttcatggggtaaagggttggtcttcaagtgggccttcattaagttgtctttgcattttaaattcacgggaattccattggaccaatacggttacacttttcgttcctttttttttttgggttcatctgttaagcagtgggggcctaattactgctcctttgtaaaaacacattttcccaaagaacacttgaattaccggtcaaaactggttgttgatgggtaataagggctgttttttgctgccccaaaaggccttaacaatttaagtcggataagtttacttaaaaaaaaaaaatcctttgggagacatactgaaaatggcaaactagtttctaaattatccaattccctacatgaagaagcagtttgccagagtttagtctcagaaaatgactggttggctctatttaaatcagaacccaatttctacgcgtgttgaataaggtaacagcctttgatgaatttccttcacaacatggttttagtgaagcaaacattttttttttaagggcattgttctttctagtttatttctttttatgaaataaaattattttatttaaacagttccattgtcgtttctgaaaactacagtattctcagaagttgtagccagcagtaaaaaaaaaaaagtggttctataagtgattggggccagatttaacccggattttggttaaaaccccatttggtaaaggttacccggcctcccaatattaccacctcccaaaaagcctgaattttatacctcatggtccccaaagggagaatatgtggggaataaagtatatttggttaaggtaacctaattgaaataggcctgggtttaagagttccccagtatataataatcacaaattgaaacctgacagtatccttgggagttcccagtaatgtcacaaattagtgaataagcatgccagtgtgcaagggtaatgtaaggattgttagcctatctaaatattcaaaattactttaaaacttaagtatgttttctgatttttaagaattcagaagtgttctgtaatggattcagatgtttcatttgtagtataatgaaatgtttacagaaagataactttttcattaaaatatttttagaaaaaaaaaaaaaaa

SEQ ID NO: 149016 - DNA, 306 bp, Homo sapiens
gttgcaatggaagctggtaagaaactgaatgcctttctcctgagatcaggaacacaacaaggatatcctttcttgccacttccattcaacattgcagtgaaggtcatagctgtatgttcggcagaaaatccaaaagactatccattttcgtctggaaattaaattgattatgcatcaaaaatgtgatccttgagtactatgttgttgaacttcaccctgaaatttattataaacagacttccagaaaagatggtggtatggtagcagatatccaaaatccttcctagaaactaagccaaatcccag

SEQ ID NO: 149017 - DNA, 364 bp, Homo sapiens
  misc_feature (1)...(364): n = a,t,c or g
tggacaagcagggcaacttcaacgcctgggttgcggggagctacggtaacgatcagtggctgcaggtgggtcagccttcttgggatgtgggctggggttgggtggaaaggtgggactgccagatctttgacctctctccagcccaggcttctcttctgctccccaaaagagttctggaaaagccttggttttcttcggcttttctttcttcttcccacctgtactcccttctcttgatcctgcttccaccaaggtggannnnnnnnnnnnnnnnnnnnnnnnnnnnnnnnnnnnnnnnnnnnnnnnnnnnnnnnnnnnnnnnnnnnnnnnnnnnnnnnnnnnnnnnnnnnnnnnnaatgcgtgt

SEQ ID NO: 149018 - DNA, 8751 bp, Homo sapiens
acactcctagaatatgcagagaaatggaaaacttcagaagatcctttacctttattggaggtatacacagtggctatccaaagttatgttaaagcccgaccttatcttacctctgaatgtgaaaatgtagccttggttctggaacgcttggcattaagctgtgttgaacttttactgtgtctgcctgttgagttatcagataaacagtgggaacaatttcagacactggtgcaggtagctcatgaaaagctgatggagaatggcagctgtgaattgcattttttagctactctagctcaagagactggggtgtggaaaaacccggtactgtgcactattctttcccaggaaccattggataaggataaagtgaatgaatttttagcttttgagggtcccatcttgttggatatgagaattaaacatctaatcaaaacaaatcagttaagtcaagcaactgctctagcaaagctgtgttctgaccatccagagattggcataaaaggtagttttaagcaaacttaccttgtctgtctttgtacatcatcaccaaatggaaagttaatcgaagagactgaaggggctggacttgctacctgtatagaactgtgtgtaaaggctcttcgcttggagtctacagaaaatactgaagtgaaaatatctatttgcaagaccatttcatgtttgttgcctgatgatctggaagttaaacgtgcttgtcaactgagtgaatttcttattgagcctacagtagatgcgtattatgctgtggaaatgttgtataatcagccagaccagaaatatgatgaagagaatcttccaataccaaattctttacgctgtgagctgttacttgtattgaaaactcaatggccctttgatccagaattctgggattggaaaaccttgaaacgacaatgtcttgcattaatgggagaagaagcatccattgtgtcttcaatagatgaactaaatgacagtgaagtatatgaaaaagtggtagactaccaagaagagagtaaagaaacttctatgaatgggctttctggtggagttggtgctaattctggccttcttaaagacattggtgatgaaaagcagaagaagagagagataaaacagttaagagagaggggatttatatctgctcggtttaggaattggcaagcctacatgcagtattgtgtgttgtgtgacaaagaattccttggtcacagaatagtacgacatgctcagaaacattacaaagatggaatttatagttgccccatatgtgcaaagaactttaattctaaagaaacttttgtccctcatgtcacactgcatgttaaacaatctagtaaagagagactagcagctatgaaaccattaagaagattgggaaggcctccaaagatcacaactaccaatgaaaatcagaagactaatactgtggctaaacaggagcagcgacctataaaaaagaatagtctctattcaacagattttatagtgtttaatgacaatgatggttcagatgatgagaatgatgacaaagataaatcctatgagccagaagtgattccagtccagaaaccagtacctgttaatgaatttaattgccctgtaactttttgtaaaaagggctttaagtactttaaaaatttaattgctcatgtgaaggggcataaagataatgaagacgccaagcgctttcttgaaatgcagagcaaaaaagttatttgccagtactgtaggcggcattttgtgagtgttactcatctcaatgatcacttacagatgcactgtggcagtaaaccatatatctgtatacagatgaaatgtaaagctggttttaatagttacgccgagcttttaacccaccgaaaggagcatcaagtctttagagcaaaatgtatgtttcctaaatgtggaagaattttttcggaagcttatttactatatgatcatgaagcacaacattataatacgtacacttgtaagttcacaggttgtggtaaagtttatcgttctcagggtgagctggaaaagcatctggatgatcacagtactcctcctgaaaaagtgctgcctcctgaagcccaacttaattcatctggagattccattcagccttctgaagtgaatcagaacacagcagagaatattgagaaagaaagatctatgcttccttcagaaaataacattgaaaacagcttactagcagatagaagtgatgcttgggataaaagcaaagcagaatcagctgtgaccaaacaagaccagatttctgcctctgagctcaggcaagctaatggaccattgtcaaatggtttggaaaaccctgctactactcctctacttcaatccagtgaagtagctgtgtccattaaggtgtctctcaatcaggggattgaggataactttggaaagcaagaaaactcaactgtggaaggcagtggtgaagcactggtcacagacttacatacgccagttgaagatacttgtaatgatttgtgtcatccaggtttccaggagagaaaagaacaagattgctttaatgatgcccatgttactcagaattctttagtaaattcagaaactctcaaaataggtgaccttaccccacaaaacttagaaagacaagtgaacaacttgatgaccttttctgtgcaaaatcaggcagcatttcaaaacaatttaccaacttccaaatttgaatgtggagataatgttaaaacatcatccaatctttataatttacctcttaagacattagaaagtattgcatttgttccaccgcagtccgacctaagtaattcattaggaactccatcagtgcctccaaaagctccagttcagaaattcagctgccaggtcgagggatgtactcgaacctataattcttcacagagtattgggaaacacatgaagacagcacaccctgaccaatatgctgcatttaaaatgcagcgcaaaagtaaaaaaggtcagaaagctaacaacttaaatacaccaaataatggaaagtttgtttattttttgccatcaccggtgaacagctcaaatccattttttacatcacagaccaaagccaatgggaatcctgcttgttcggcccagttgcagcatgtctcgccacccatttttccagctcatttagcaagtgtgtcaactccattgttgtcctcaatggaaagtgtcataaatccaaatataacttctcaggataaaaatgaacaaggtggtatgttatgttcccaaatggaaaatttacctagtactgccttgccagcacaaatggaagatctaaccaaaacagttctgcctttgaatattgacagtggctcagatcctttccttcctttacctgcagaaagtagttcaatgtctctcttcccttcaccagcagatagtgggactaattctgttttttcccaactggaaaataatacaaatcattattcctcacagattgaaggaaacactaattcctcctttctaaaggggggtaatggtgaaaatgcagtttttccttcacaagtgaatgttgcaaataacttcagtagcaccaatgcccaacagtctgcacctgaaaaagttaaaaaagaccgtgggcggggcccaaatgggaaggaaagaaaacctaagcacaacaaaagggctaaatggcctgcaattatcagagatgggaaatttatctgtagcaggtgttacagggcttttactaatcccagatcactgggtgggcacttatccaagcgatcttactgtaaaccactggatggagccgaaattgctcaagaacttctacagagtaatggacagccttctcttcttgccagcatgattctctccacaaatgcagtaaatttgcagcagccacaacaatctaccttcaatccagaagcatgttttaaagatccatcatttctacagcttcttgctgaaaatcgctcgccagcatttttaccaaatacatttcctcgatctggtgtgactaactttaataccagtgtcagtcaagaaggtagtgaaattattaaacaggctttggaaactgctggcattcccagtacatttgagggtgccgaaatgctttctcatgtttcaacaggttgtgtctctgatgcatcacaagtaaatgcaacggtgatgccaaatccaactgtaccacccctgttgcacactgtatgccatccaaacaccttgctgaccaaccagaataggacgtcaaactccaaaacttcctccattgaggaatgtagcagcttgcctgtttttccaacgaatgacttactactgaagactgttgaaaatggtttgtgctctagttcatttcctaattctggtgggccatcacaaaattttaccagtaacagttctcgtgtttctgttataagtggtcctcagaacacaagatccagtcatttaaataaaaagggaaacagtgcttctaagagaagaaagaaagttgctcctccactaattgcacctaacgcttcccaaaacttggtaacaagtgacttaacaacaatgggactcatagcaaagagtgttgaaatcccaactactaaccttcattcaaatgtaattccaacttgtgaacctcagagtttggtggaaaatctaacacagaaattaaataatgttaacaatcagttatttatgactgatgtaaaagagaatttcaaaaccagtcttgagtcccatacagtgttagcccctttaacattaaaaactgaaaatggtgattcccaaatgatggctttgaattcatgcacaacttcaataaattctgatttgcagatttctgaagacaatgttatacaaaactttgaaaagactcttgaaattattaaaactgctatgaattctcaaatacttgaggtaaaaagtggatctcagggtgctggtgaaacttcacaaaatgctcaaataaattataacattcagcttccttcagtaaacactgtgcaaaataacaaattacccgattcttctccgttttcctcctttataagtgtcatgccaacaaaaagtaacattcctcagtctgaagtatcacataaggaggatcaaatacaggaaattttagaaggcttacagaaattaaaattagaaaatgacctatccactccagcatcccaatgtgtactgataaatacatcagtgacactgactcccacgcctgttaaatcaactgcagatatcacagttattcagccagtttctgaaatgataaacattcaatttaatgacaaagttaataaaccctttgtgtgtcaaaaccaaggctgtaactacagtgctatgacaaaggatgcactatttaagcactatggtaaaattcatcaatacactccagaaatgattcttgaaattaagaagaatcaattgaaatttgctccctttaaatgtgtagtacctacatgtacaaaaacatttacaagaaattctaacctccgggcacactgtcagttggtgcatcattttacaactgaagaaatggtaaagttaaaaattaaaaggccttatggaagaaaatctcagagtgaaaatgtgccggcctcacgaagtacacaagtgaaaaaacagctagctatgacagaggaaaataaaaaggaatctcagcctgctttagaattgagagcagagacccaaaatacccacagtaatgtagcagtgatcccagaaaaacaacttgtagaaaaaaaaagtcctgacaaaacagaaagttctttacaagtgattacagttacttcagaacaatgtaatacaaatgcactcacaaacacacaaaccaaaggacggaagattaggaggcataaaaaagaaaaggaggagaaaaaacgaaagaagccagtttcccaatcccttgagtttccaacaagatacagtccttacagaccttatcgatgtgttcaccagggatgctttgctgcctttacgatacagcaaaacttgattctccattaccaggctgtacacaaatcagatctacctgcattttcagcagaggtcgaagaggaaagtgaagctggtaaagaaagtgaagaaactgaaactaaacaaactttgaaagaatttcgatgtcaggtaagtgactgttctcgaattttccaagcaattactggcctaatacaacactacatgaaacttcatgaaatgactcctgaagaaattgaaagtatgactgcttcagtggatgttgggaagtttccatgtgaccagttagagtgtaaatcttcatttactacatatttgaactatgttgttcatctagaggcagaccacgggattggactaagggcaagtaaaacagaagaagatggtgtatacaaatgtgattgtgaaggctgtgaccgtatatatgcaacccggtcgaatctcctccgacacatttttaataagcataatgacaaacataaggctcatttgattcgtccaagaagattaacaccaggccaggaaaatatgtcaagcaaggcaaaccaagaaaaatcaaagtctaaacatcgggggaccaagcacagcagatgtggaaaggaaggaataaaaatgcccaagaccaaacgaaagaaaaaaaataatttagaaaacaagaatgcaaagattgtgcagattgaagaaaataagccttattctctgaaacgtgggaagcatgtatattctataaaggctagaaatgatgccctgtctgagtgtacaagcagatttgtaacccagtatccatgtatgataaagggatgtacttcagttgttacaagtgaaagcaatataattagacattataagtgccataaattatctaaggcatttacatcacaacaccgaaatcttcttattgtattcaaacggtgttgcaactcacaagtaaaggaaacgtctgagcaagaaggtgctaagaatgatgtgaaagattctgacacgtgtgtatcagagagcaatgataattcaagaacaacagctacagtttcacaaaaggaagttgaaaaaaatgaaaaagatgaaatggatgaactaacagaattgtttattacaaaattaataaatgaagatagcacaagtgtagagacccaagctaatacttcttcaaatgtaagtaatgattttcaggaagataacctctgccagtcagaaagacaaaaagcaagtaatttgaagagagttaataaggaaaaaaatgtctcacaaaataaaaaaaggaaagttgaaaaagctgaaccagcatcagcagctgagttaagtagcgtgcgtaaagaagaagaaactgctgttgccattcaaaccattgaggagcatcctgcatcttttgactggagctcttttaagccaatgggatttgaagtatcatttctgaagtttcttgaggagtctgcagtgaagcagaagaaaaatactgacaaagaccatccgaatactggaaacaaaaaaggatcccattcaaattcaagaaaaaatattgataagactgctgtgactagtggaaatcatgtatgtccttgtaaagaaagcgaaacgtttgtacagtttgccaatccatcacagcttcagtgcagtgataatgtaaaaattgttttagacaagaatcttaaagattgcactgagcttgtcttaaagcaacttcaggaaatgaaacctaccgtcagtctgaaaaaacttgaagtacattcaaatgatccagatatgtctgttatgaaagatatcagtataggtaaagccacaggcagaggtccctctgtagcagtgaggtgttcaagaagccactgggcttttgaggacacaagtgtgtttcaaactattcaggagcagatcacaccaggcagttcttcactggagatgtctgatgagctttgccacaccagcaacttcttgcccaacactggaggctttaacttcctgcgaggttcaggcaatgtcaagctggcctctgggaggaagacaggcaaggctacctgcataaatactgtccaaaaagcccttgcactgctgggagccagagagctgcttcgtcattccccaaaagtgctgactcctgctctgtctcggctttgtgcctctggggctgatggtggcattacgggtgctacttacagtcaccgacagtttactgtcctagaggtggtggttccagaagggcctctgatccacgtcacatgggcagctcccagggaggaaccagacacctcatcccggtgtcctgccaggcaggcccattctgggcttccccctgtcatgaaccagcccttcaaagagccctctggctcctggaagctgatcactttcccagagacagctgacgagtgggacataggaagaagtgaggtgctgaagttggcattattctttggttggcaggctcttcccacactcaacaagaataccgacatgtttcacacagttggagggtggacagttgtgcaaaatatgcgtgctgacagcaagggaaaagaggaaatgtctgatttggaccccaaatctcctccaggaacccagtcaccctgtggcccaccaaccttgccatttctgcagaggcggcaggtgccccaggagaccactaggtgtcgctgtgaacctgtgcaagcgcggcctcaccctgtgggcgcacacagcgcgggtggaatcttggcccaggatgccctgtggctgctctctgcaggcattgaggacacataccctgaaaggctcgggagaaggtggagagaagggagagtagtcttttaccagaggtgttcctggaccattcactggacgctaaatggcaaatag

SEQ ID NO: 149019 - DNA, 2260 bp, Homo sapiens
atgaggctgagacctgtgctgcattcccaggaagttaggcattctaagtcacaggaggagacaggagtttggtgcaagacactgctcacaaaaaccctgctgataaaacagcttgtggtaaagaagctggccaaaaccaagacggccaaaacccaccaaaaccaagacggccaaaaccaagacggccaaaacccaccaaaaccaagacggccaaaaccaagacggccaaaacccaccaaaaccaagacggccaaaaccaagacggccaaaacccaccaaaaccaagacggccaaaaccaagatccagaaaagaggcaaagcaagcgagaagtcgcgggcccagcccacagcaggccccgacgctgcgccttgggccttgtgcgcatttttttcgggggaaaactgaggctcggagtgcgaaagtcagccgaggtcgccccgcccaggacagagaagggctgtggtcggctgatccgcggcattcccgggatggcggcggcgtggatggctccggcgcaggagtctgtgaccttcgaggatgtggctgtgacatttacccaggaggagtgggggcagttggacgtgacccagagggccttgtacgtggaggtgatgctggagacctgtgggcttctggtcgcactgggtgacagcacaaaacctgagaccgtagagcctatcccttctcatctggccttgcctgaggaagtctcactccaggaacagctggcacagggagtcccaagatactcctatttggggcaggccatggatcaagatgggccatctgaaatgcaggaatactttttgagaccagggacagacccacagagtgagaaactccatgggaaaatgagccttgaacacgaaggtttggcgacagctgatggtatttgttcaatgatgatacagaaccaagtctcaccagaagatgctctctatggatttgactcatatggaccagttacagattccttgattcatgaaggggaaaattcctataaattcgaggaaatgtttaatgagaattgcttccttgttcagcatgagcagattctccctcgtgtgaagccctatgattgcccagaatgtgggaaagccttcggcaagagcaaacacctccttcagcatcacatcatccatactggggagaagccctataaatgcctggagtgtgggaaagacttcaaccgcaggtcacacctcacacggcaccagcggactcacaatggagataagccctttgtgtgcagtgaatgtggaaggaccttcaatcgcgggtcgcaccttacacggcaccagcgggttcacagtggagagaagccttttgtgtgcaatgaatgtggaaaggcctttacctaccgctccaattttgtcttgcataacaagagccacaatgagaagaaacccttcgcatgcagcgaatgtggaaaaggcttttatgagagtacagccctcattcaacacttcattatccatactggggagaggccctttaagtgccttgagtgtgggaaggccttcaactgcaggtcacacctcaagcagcatgagcggattcacactggtgagaagccctttgtgtgcagtcaatgtggaaaggccttcactcactattccacctatgtcctgcatgaaagagcccacactggagaaaagccttttgagtgcaaagaatgtgggaaagcctttagcattcgaaaagacctcattcgacacttcaacatccacactggagagaagccctatgagtgtttacagtgtggaaaggcttttacccgcatgtcagggctcacaaggcaccagtggattcatactggagagaagccgtatgtatgcatccaatgtgggaaagccttttgtcggaccacaaacctgattcgacactttagcatccacactggagagaagccctatgaatgcgtggagtgcgggaaggccttcaaccgcaggtcacccctcacaaggcaccagcggattcacactgcagagaagtcccacgaacccatccagagtgggaacgtttcttgtgagagcacagatctcattcaacactccatcatccacactgagagtagcccagtgagtgcagtgaatatggaaacgccttcaattgccgctcattcctcctcactcgacatcaacggattcatagtggaagaaaccctaccattgtaacagatgtggaaagactttttacgtacacttcagtcaacatccaagaattcctattagcgaaatagttttttaatataaccac

SEQ ID NO: 149020 - DNA, 444 bp, Homo sapiens
  misc_feature (1)...(444): n = a,t,c or g
ctggacgccctagactcactccggactgccntctaattttcgtctggacccacgcgggcggaactacagcgagtagctttagccctttgcttgggcaaacctgctgatgtctatttaattgaagagccatgggcatatttggattctgagcaaagactgatggcagctcgagttgttcaaacgacagcctttgttgtggaacatgacttcatcatggccacctatctagcggatcgcgtcatcgcttttgatggtgttccatctaagaacacagttgcaaacagtcctcaaacccttttggctggcatgaataaatttttgtctcagcttgaaattacattcagaagagatccaatcaactataggccacgaataaacaaacttaattcaattaaggatgttgaacacaagaagagtggaaactactttttcttggatgattag

SEQ ID NO: 149021 - DNA, 3549 bp, Homo sapiens
ccggtcctgagacacgctgtgtggctgaaaagtgaaggcaagagctcatttggcctctgtgctcccctccgcaagggatcgtttctccagaagagctggatattctttcgcccagttatggcagacaagttaacgagaattgctattgtcaaccatgacaaatgtaaacctaagaaatgtcgacaggaatgcaaaaagagttgtcctgtagttcgaatgggaaaattatgcatagaggttacaccccagagcaaaatagcatggatttccgaaactctttgtattggttgtggtatctgtattaagaaatgcccctttggcgccttatcaattgtcaatctaccaagcaacttggaaaaagaaaccacacatcgatattgtgccaatgccttcaaacttcacaggttgcctatccctcgtccaggtgaagttttgggattagttggaactaatggtattggaaagtcagctgctttaaaaattttagcaggaaaacaaaagccaaaccttggaaagtacgatgatcctcctgactggcaggagattttgacttatttccgtggatctgaattacaaaattactttacaaagattctagaagatgacctaaaagccatcatcaaacctcaatatgtagaccagattcctaaggctggcaaaggggacagtgggatctattttggaccgaaaagatgaaacaaagacacaggcaattgtatgtcagcagcttgatttaacccacctaaaagaacgaaatgttgaagatctttcaggaggagagttgcagagatttgcttgtgctgtcgtttgcatacagaaagctgatattttcatgtttgatgagccttctagttacctagatgtcaagcagcgtttaaaggctgctattactatacgatctctaataaatccagatagatatatcattgtggtggaacatgatctaagtgtattagactatctctccgacttcatctgctgtttatatggtgtaccaagcgcctatggagttgtcactatgccttttagtgtaagagaaggcataaacatttttttggatggctatgttccaacagaaaacttgagattcagagatgcatcacttgtttttaaagtggctgagacagcaaatgaagaagaagttaaaaagatgtgtatgtataaatatccaggaatgaagaaaaaaatgggagaatttgagctagcaattgtagctggagagtttacagattctgaaattatggtgatgatgctaggggaaaatggaatgggtaaaacgacatttatcagaatgcttgctggaagacttgaacctgatgaagaaggagaagtaccagttctaaatgtcagttataagttacagaaaattagtcctaaatcaactggaagtgttcgccagttactacgtgaaaagataagagatgcttatacacatccacaatttgtgactaatgtaatgaagcctctgcaaattgaaaacatcatcgatcaagaggtgcagacattatcgggtggtgaactacagcgagtaacttttagccctttgacttgggcaaaacctacctgatgtctatttaattggatgaaccacctgccatatttggattcctgagcaaagactgatggcagctcgagttgtcaaacgtttcataccccatgcaaaaaagacagccctttgttgtgggaacatggactttcatcatgggccacctatctaggcggatcgcgtcatcgtttttgattggtgttccatctactaagaacacagttgcaaacagtcctcaaacccattttggctggcatgaataaatttttgtctcagcttgaaattacattcagaagagatccaaacaactataggccacgaataaacaaacttaattcaattaaggatgtagaacaaaagaagagtggaaacctactttttcttggatgattagactgactctgagaatattgataagccatttattaaaaggagtatttactagaattttttgtcatataaaacttgaatcaggatttttatgcctcacatactctggaacttgaagtataatatacttaatataacataaaaagccagttgggttctaaattgtagttgaaacacagaaaatgccacttttctgttcctgaagaggctcttttgtgcataatattctaaaatgaagacatttcaagctatacaaattacttccaagttttcatgatgtatgggaagattttcagtaggtgtattatattcacggtaccaaatgctgaccagtgttgctccattttttaaatcttgaaaagggtttctgtacttacctggtttgccaagtatgccagtgtaatgaaactgcccttattttaaaagccagtcaaagattccactgattgacatttgataaataaacatcaggattatgtttattgtttgttttcagtctttgcactatattaccagtatatggtttccgaggaagattatctactgcaaaacaccactgttggaaaaataggtatttttaaattgtttttaatccttttttggtgcttttaaacatgtttaagcaaaaaccaattcagtccattccccgcaaaaaacccctaactttactctgaactttttttgtttttgcattccatgaggttctgtattcagtcattctctaggtaatgtcatttttgtacacatatatttatataatcactgattgagatttaggaaaaagcatttctaaagaatatttgcttcccttagaactacagactcgaaatctttaaagatggtgcctaagcatctatgtattttttttaagttccacagatttttctgttgggcaggccaaggattataaaccacttccctaaaggcaacattaatgcaaaagtccccagatggcaatacaaagtatcccctggtaccacatatattcatttgtgagtttggatatagagcacattatctaaaccattttgtagttccaaaaacccatctaaatttcttgagttcctgaattttgaacaggattacctggagcctggagccactttaagttgtacttctgactaaactggaattatgagtgaggaagagtgtttactaaataaatgactggggcaagcaaaattgaggaggaaattagaaactgtttgacaaactttaagagctacttgaaataacagaagtcttgattaatatgcaaataatggctagaaagtatggtttaactggaccctattatgccttttaaaaataatttcagtaacccataaatacatgttgtaaaaaattcaaatatacagaatggaataaaaaaatgatctccctttattaccctcccaaaggttaccagcgtttgaatttaataatgtatattctttcatgcttttttctgtgcacttacctaagtgtgaatatgtaaagggtttgttttgtatacaaatgggattatactaaaataagtaatgcctatttttaaggataggttaaatttgtgaatgatcatttcaaatatattgaataaaataagcaaaagctattgttatttactgatcctg

SEQ ID NO: 149022 - DNA, 2132 bp, Homo sapiens
  misc_feature (1)...(2132): n = a,t,c or g
atagaaatcacagaagtaactgctccccctgaggataatcctgtagaagattcacaggtaattgtagaagaagtaagcatttttcctgtggaagaacagcaggaagtaccaccagatacttaaagcttcaaaaagactgcccctaccaccacaggaggaccagcctaaccatacgctccaaaagatggctgtgatagatcttgtgaagcaattactgagcagatcaagatctttgggaaggaacactaaagatgttttgaatgaattatagtccactggcattttagtgtatttttttttctttttagaaacacacatttctaaaaatgtcatgttacattcctgcatgtcccttttgatagcattagtggatccattggatttcttttttctttttgtgagacagcttttagtcttacctgaatttatgtgtgtttttccgacagtggttaataattatattggggatgtaacagcaattgtgttggcaggggttttatatattattagtaattaacactaactgttggactgacttgtggacactgtggtaaacatgagtttaaaagctattaagagtactttgtgttagcactcttaaaaacgctaacagagatcatcattagctgtgaagattttgagttgtatatacctgcactggatattcttatcaaaaatttctacattagctttaagtgttcagattaacacttttggaaatttttgtagcttttagctgattaattagaaaaatttaatatttcagtgaaagttttaaattatcatttatttatttttttaaatgagaggggaaagctgaaattccttgttaagacacaacggaaaaacgaatggccctactattatcatgcaaaaatgctttgttggcacctcacgattaatcatataatagctatagtctcttccagcatttcgtttaaattttagaaaacctcgtataaattactgggtgcataactttaaagattattctgccctttgggctaaattggacgtaattcccctccagcactaggagaccctccaagggctcttactagattgaactcagaaacgccttgagctgggttgattgaggatgtgtgaaaagctcacagagcccgatgcctgctgctatttcacgggcaatgagcctttttctttctacactggaagattttcttcttatttaatgtgggtttattttgggggctcaggaaataattgctctgttgaaaataatcctttggtcaggaaaagaagggtaggctaccacatcattttggaaggacccatggaggcaactattaagccaaggccattagaagtgggtttgatcggatatattaggggtagctcttgattttgttaaccattaaagataaggtgacttttttccccctgcttttngggattaaaattcaaaagatacttcccatatttttatcactataggatccataggttattataccaatgtagtgagtcctgccatgggtactccgatgtgtaatgaaaccctgaaaataataagataataagaaaagcaataaattttctaaaagctgtgctgtccggtgatacagagatggttactcaaattataataaaactcctccattttggggaaataataggaaggccaccttttttataaaggcccatattttttttaggggaaaacctaaggagtgaccatagaacctgatgaatgagtaaaagtaagttttgctggatttttgtagaactctggacgttgaggattcattatgcctgtggttaactttaaatatttttgaattccaaatatgtgaattaatgagccttgtctttacaaatatgtgccattgtgcaacatcggtggattttctaaaaataatgtaaatgtcttctattaaatgttgagtgcaataaaatacagaagaattctctatattgtcattatttttgaagtataaggtatttttaatttgttacataataaaatcagttcattttatccttactagtattttagaagattatagcatttttgataactaaaatcacaaaggaataccttcagccagttaacgtatttctaacagataatgcttattttgcatttactatcatgctacattgccaggaag

SEQ ID NO: 149023 - DNA, 2962 bp, Homo sapiens
cggacgcgtgggccgcagcagccgagccggacctgcctccccgggcgtgctccgccggccccgccgccggcccgcagcgacagacaggcgctccccgcagctccgcacgggacccaggccgccggaccccagcgccggaccaccgtccgtccgccccgaggagtttgccgcctgccggagcacctgcgcacagatggagctggaccaccggaccagcggcgggctccacgcctaccccgggccgcggggcgggcaggtggccaagcccaacgtgatcctgcagatcgggaagtgccgggccgagatgctggagcacgtgcggcggacgcaccggcacctgctggccgaggtgtccaagcaggtggagcgcgagctgaaggggctgcaccggtcggtcgggaagctggagagcaacctggacggctacgtgcccacgagcgactcgcagcgctggaagaagtccatcaaggcctgcctgtgccgctgccaggagaccatcgccaacctggagcgctgggtcaagcgcgagatgcacgtgtggcgcgaggtgttctaccgcctggagcgctgggccgaccgcctggagtccacgggcggcaagtacccggtgggcagcgagtcagcccgccacaccgtttccgtgggcgtggggggtcccgagagctactgccacgaggcagacggctacgactacaccgtcagcccctacgccatcaccccgcccccagccgctggcgagctgcccgggcaggagcccgccgaggcccagcagtaccagccgtgggtccccggcgaggacgggcagcccagccccggcgtggacacgcagatcttcgaggaccctcgagagttcctgagccacctagaggagtacttgcggcaggtgggcggctctgaggagtactggctgtcccagatccagaatcacatgaacgggccggccaagaagtggtgggagttcaagcagggctccgtgaagaactgggtggagttcaagaaggagttcctgcagtacagcgagggcacgctgtcccgagaggccatccagcgggagctggacctgccgcagaagcagggcgagccgctggaccagttcctgtggcgcaagcgggacctgtaccagacgctctacgtggacgcggacgaggaggagatcatccagtacgtggtgggcaccctgcagcccaagctcaagcgtttcctgcgccaccccctgcccaagaccctggagcagctcatccagaggggcatggaggtgcaggatgacctggagcaggcggccgagccggccggcccccacctcccggtggaggatgaggcggagaccctcacgcccgcccccaacagcgagtccgtggccagtgaccggacccagcccgagtagagggcatcccggagcccccagcctgcccactacatccagcctgtggctttgcccaccaggacttttgagctggggctgactcctgcaggggaagccctggtccagctgggtgccccctcgagctccgggcggactcgcacacactcgtgtcatccagatgtgagcaccgcacccagcggcaaagagccctcccccctgcagggctccacccatcaccctccctccgtctgtctttccggcctggaccccaccctccacactctcaggccatcacagaacaccccagcttcctcattctgctacaacacccaggccctctggacatccagaaaaccaagtgtccggatggcaggggccagcggccaccaagctcatgggacacccagagcagaagctagggcagagccaatgctgagggagcctcgacttccggcgccgccgccctctcccggcatccgcagagccagctgacgccctccctgcctcccagggcagctggccagcctcgggcagcgcggccccctcctcccaggggagagtagaagtcgcacacgcagcagagcagacctgatgtcccggtgcttcctggcccctcagctccagtgattcacgcccgcctggagaagaatcagagctcagctcatgactcacccatggcaggcggagggtcccagaggggctgagtcctcaaatccggctgaggcagcagctggcaccatcagagccaggagagtgacaacaggtctcaaggttcccacaaagtctttgctgctgtgctgggcaccacccacccctcaccttgcaggctgcctgcgtgggaggcgaagtcccaggacagcccagaggggggctacagagaggagtcggctgcagcagagggcaggagccccagcttagccctgagcgccagcgcgaggaccagggcctgccactaagcccgccccgctggccgccagctgcccgtccccagagccactgcagcaggagtcgggccctgcctccctcccagcagggaaaccccgcccgctgccaggccatcctctctgccagaggctttcatgagccccaaggccggggcaccagctcctacccctgcccagcagccctgagctcacgctgcaggaaggacactcccagaagccatggctcctggggcgctttcaggcattttgccctgccccaacacccaaaaccctggtgctggtgggccactagcgtctgcagcctaagcacgtgctgcgctcagggttcatcgttctgccttgtccactgggggaccagccctgcagaccactctgacaagtcttcagcccacaccctgccagccccacagattttatttttgcacataagccataaccaatcctcaaggctggcacaggctttggggaagccctggagcctgtgaagaccctggaaacctcatgaggctgtggccaacccctgccccttgccccacacagaccaggccttaaatgtcggtccaggccctgtgcaccttaccccagagacagactctttttgtaagattttgttaataaaacactgaaacttcaaaaaaaaaaaaaaaaaaattct

SEQ ID NO: 149024 - DNA, 1600 bp, Homo sapiens
gggatccttggctactgtagaagcagtcctgtatggagaccttggaccagcaggggaagatctatgggcatgggaggtgggcgttggaaaggctgagtaggaatggtgcctggcacccctgaaccatgatctgagcctccctggagaaggtattttatatgtctgctgccagctgctggtctccacaccctcaaccgttctcaacccccctgcagggagaaggcctcctgggcactgtccttccacctgtgccagccaccccctgccccactgctgaatgaaggccatttcaagcgctgcttctcactccattcctcttcagctgttattgctgcagggccaagccctttttagtgctgtgctcgtccagctcaccaccacagcccctctcagccctcagtaggtgggaggggccagctgcctctttaggccagttgcatcctccatttatccaaaccactcctctcctcccagtggagtggggttctgccagtacagccctacttgcatcatctgcgtcagccggtcctagcccatctgcagggtgaaagaactcatcaagagctccttctgcccttgtaagcccatcccagctacttgtaaccatctctaagggcaatggcattgctccctacccattcatctgcatgagctactcttggcttccttaaagggtcaagaaagcaatttttcctbcttactagattcattgagatcagctgtgtgagccccaaagtgggcacaagggtgtctccttmcattacttaaagatattcatgagggtgggtcactacagatgttggggagcaagggctaggctcactttttaaaaaatcaccacttttggccttgtcccaggagtgcggttgtaacatcctccccacctcataacggcagccactgagggaaggagtggttttccttaaggaaggacatttgctgggagttggactttcttctgttccaaacaaacaaacaaaaaatttaaacacacacacaaacccccagaaacccacaatatgttacacgctaagggaaaaactaggcacccttctgtccacttcaggcaataagaggggatctctttcccaccttacccttacctactccttacccccaaccccctttccccatttaatgtggagtaatggaattaggcctggaccacaggtggtcactgtcrggctaatggaaactmcccaaggrcggcgcaaagccccccccatcaagaatgccatgaaatgtttgccgaaatgttgacctggccactgccccccacacactgtgtcctttatagaattccccctttgcccacccctcttccctgtctccaacctggacaccaactttgctcaaaaggctggtgacttgtgggcccattcatcctacaacccaagtcctgatggagcaagaggcccacggcctaggggatgcaagaacaaccccgtttcttaaatgttaccagtcccagccaatcttacggtgacattacagttaaatttcccaattgaaaacaagcaaacagacactcaaactggtcctgtaattgttgctagactttatgtgttgtacaactaaacattgctgtttgaacagtaaa

SEQ ID NO: 149025 - DNA, 4276 bp, Homo sapiens
  misc_feature (1)...(4276): n = a,t,c or g
gcgaggcggggccgccggggccgccatggagcccgactcggtgattgaggacaagaccatcgagctcatgtgttctgtgccaaggtctttgtggctaggctgcgccaacctggtagagagcatgtgcgcactgagttgcctgcagagcatgcccagtgtcagatgtctccagataagtaatggaacatcatctgtgatcgtctccagaaagaggccatcagaaggaaactatcaaaaagaaaaagacttgtgtattaaatattttgaccagtggtctgaatcagatcaagtggaatttgtggaacatcttatttcacgaatgtgtcattatcagcatggacatattaactcttacctgaagcccatgttgcagcgggactttattaccgctttaccagagcaaggcttagatcacatagcagaaaacattctttcgtacctggatgccaggtctctgtgtgcagcagagctggtatgtaaagaatggcagcgagtgatctcagaaggaatgctttggaagaagctgattgaacgaatggtacgcactgatcccctatggaaaggactttcagaaagaagagggtgggatcagtacctgtttaaaaacagacccacagatggccctccaaattcattttataggtcattatacccaaagattatccaggatatagagactatagaatctaactggcggtgtggacgacacaacttgcagaggattcagtgccgctctgaaaatagtaaaggtgtctactgtttacagtacgatgatgaaaaaattatcagtggcctacgagataattctattaagatatgggataaaaccagcctggaatgtttgaaagtgttaacaggacacacaggctctgtcctctgtctgcagtatgatgagcgtgtcattgtaactggctcttcagattctacggtgagagtgtgggatgtgaacacgggtgaagttcttaacacattgatccaccacaatgaggctgtattgcacttacgcttcagcaatggactgatggtgacctgttccaaggaccgctccattgctgtgtgggacatggcttctgcgaccgacatcactttacgccgtgtcctggttggccaccgggctgccgtcaatgtagtagactttgacgacaagtacatcgtgtctgcctctggtgacaggaccatcaaagtctggagcacgagcacctgtgaatttgttcgtactctcaatgggcacaagcggggcattgcctgtctccagtacagggatcgcctggttgttagtggatcatcagataataccattaggctctgggatattgaatgtggtgcctgtttaagagtcctagagggacatgaagaattggtccgatgcatccggtttgataacaagaggattgtcagtggggcctatgatgggaaaattaaagtttgggacttgcaagctgctcttgaccctcgagccccagcaagcacattgtgtttgcgcacattggtggaacattctggacgtgtgtttcggctccagtttgatgagtttcagatcatcagcagctcccatgatgacactattttgatttgggatttcttaaatgtgcctcccagtgcccagaatgagacccgttctccctccagaacatacacttacatctctagataacagtctgcactttcacccgtttcagggttttctagtcttgaactactggctacgtggctaccaaatgcctaagggagttcgttcacagctgagttatgaagctggaattggttctagacgctgggtagatgcaaagcagcctaactcttcaagtaccgacatttctcacctctgattccggctctcctttgagaaggagaccttagcttccccggcttcaagtagaacagaagcccgtttccttccctcatcagtgaaaaaatctaatgtttcaaatgtaaattgttcatagaaaaggaacatagaatctgttttacagaagtaaatcgaccgtcaagagaagacttggcctctaatttatattgctttgcactttggtttgatattaagaaacagcattcttcttcagtgaaattttgggtgccaaacacctacccagaatgtccagggctttcattttcaaaagttagcattctccttttgaccgtccaagtcattatgaattctgacttgttgtattaggaacatgttggacagtggaaaattttctctggattgttttagtaatatttttgggattatacttcctttctgtaccaatttcttttaatttaaagaactataagtcagttatattatctaccaacaggtaatatagctctttcttttattaactgttctctgtcccccaaccatctcctgatatttggtagagtaacacctttatacgtgtgcttgcctcctaatttaaaatactgtattcgcatgtagatataatgtacataacagtttaacctcaaagttgctgggagtcagggccccctgtgcttgagacactaatacagagtgtgttcgcacttagccatgggntggggctcaagaacctgatacctgggttgatgtggattacctagaacccttcctgcagtattcatacagtgtttttattttgttgttgtcattgcgtgtgtgtggtttgtgtgtgtttttaatgagaatcttgttttaaaatgtaatttctaaggtttaacaccaaaatgttttatttgttgtggagtatatattatacaataggagaggtaccttaaacattttttgttcttattcctttttctcataagtactcctgagtacaagtgggtcacctcccatagtattcatttgggcttcgctgttcaaaaatcattattctgtgccagtcgtgggccccgggaagggggnaaataaggaaggccctgttgacggggctgtcttggctctggaattcatgcatcctgcgccttgacaaggttctggcagggcctgctggtgtgccggaccctgcagggcaggtcaggctggttcaaaggcccatgctgaggggtgggtgctctgaaacggagtgaagcctcaagcccatgaatgccaccccagtcatctctggtgtcagctgctggtgtgggcccataaggtaatcaaagctcccaagtcctccctacgacacagcccaaatgtgtaaatggcactgttgccctgacagtgcatggaaaggacgttggcatccaattggcactccttctcccttattcaatattaggtttgatttgcccttcgccattgtttccaaagatcaaggaatgtcaataacattttaaaggaccaataaacagcctcctataaagtaaacctcttcccgtggaagcacactctactactaaagggaaggcccctgggctctgatttgtcctttgcattgagaacggtgtggggatcagtgtgtgtgtatgtgatttgtttattgagttggctggacttttttagtttttcttttaaaaataaaatccttccttcccatgttactaaattaatttatgtttttgagaggttgagtctcaaagtgtaaacaataaacctccattcataaggtggatgttgtaagcttgatggtggttgtgaaagtgatttagctttgaccacttttcatcctacagcttcaatatcaaactggttaggaaagccccagggggaagggagggggcaggggaggaggcaattctgaatgaatgaatggattttttgttgtttttgcatgtttaatatagaagttcccctcgttccttgggagatgatggcctttggaatatgcagacaacctttgaattgtgcctactaaattatagcaggggacctttggcacccaaggagttctgactttctgggaattataatagtaaattccccagcccataactctgggactttattttgctaacccataactggaggcaaatgtaaattactgctatattaatgttttaaagcactgggatagtctaattctaacttgtaaattaattatgtttgccaattatctgtttgaaataaatttgtggcctgaacagctattggaactggttaaattgtaccagatattattccatgacagctttgtactgtggaatgtgcttaataaaaaaacaaaaaagtttgacttttgtccagtaaattgctaagtaatgtcaataaatcgagtatgggtattatgcagtacacctgacctggcttcctggcgattgttacttcagctactgattcaaagccaatactcttaataaagtgttgcaatactctgaaaaaaaaaaa

SEQ ID NO: 149026 - DNA, 499 bp, Homo sapiens
cccgttctctgccgcccgcccactccgtttccctgtggtccgtgaaggacggcctcaggccttggcatcctgagcttcggtctgtccagccgacccgaggaggccggactcagacacataggcggggggcggcacctggcatcagcaccccgcacaccctcggaggacgggcttcggctgcgcggaggccgtggcacacctgcgggaggcagcgacggcccccacgcagacgccgggaacgcaggccgctttattcctctgtacttagatcaacttgaccgtactaaaatccctttctgttttaaccagttaaacatgcctcttctacagctccatttttgatagttggataatccagtatctgccaagagcatgttgggtctcccgtgactgctgcctcatcgataccccatttagctccagaaagcaaagaaaactcgagtaacacttgtttgaaagagatcattaaatgtattttgcaaagcctaaagttaaaaaa

SEQ ID NO: 149027 - DNA, 508 bp, Homo sapiens
  misc_feature (1)...(508): n = a,t,c or g
cgagcnccgtgtgtttctgaagactctgggggtgggacacggcggggaggtggtgccccgcggaccccggggtgccaggcacggaaggcgggactctgggagaagcgtgcggaggaccgtggcgtcggcgtcccggatgtgtcggtcgtgcccggggaggccgggttcccctcgctgcgggccatgcttggctcctgattccctctctggtccctgtattggtcaacacttgagcgtacaatatcttgaacatgcttcttccaattgggttttgtttcccatttcctgcccctttcgccactcacggaccttgaggccagttgacggcccttctccccacgcctgtttcttttgaaagcaagtgtagacaccttcgagggcagagatcgggagatttaagatgttacagcatatttttttttcttgttttacagtattcaattttgtgttgattcagctaaattatgaaaaataaagaaaaactcaattgataaaaaaaaaaaaaaaa

SEQ ID NO: 149028 - DNA, 1545 bp, Homo sapiens
atgcgtcagcacccagagggcgccgcgtgcaggctgggccagtgccaggggtcgcgacagcgcacgcaaagagtgcctgtgatgctgctggtggtttttgtaaattgtgacacagccctgcccccccaggggacatttgatgatgtctggggacagctgtggttgttccaacgtgggatgcatgggacagtccccagcacagagacccaactctatgtccacatcaccactgcaggaaaccctgggatgcttgggacggtccctagcacagagtcccagctctgtgtccacatcgcctctgcaggaaaccctggatcacagccccctggatgggagagggcagatgccacccggcaacgccgagtgtcctcccggcagaggagtgcgggcacctgggaaattggagctgagctggggtcacgtgctttaaaacctcttgggctccagtgttggctggggagccccagatgtccagggatccctgggtcaccctgcggcagcatcctcacgactgctgtgagtgtccccaggtctccagctgtgcagtgtgagggagctcttggaccagagcccctgctgcctcattacccagatgcacagccccggcgtcacaccggcctcccgagccccgtgttaactgcagaagaaattagccagactcaggcgctgggagcagttcgaaagcggttcctgctaacgcctcctcgcctgtctgcccttctcaccttgtctcttggcctcggtccacactggctggctagtttcacccaaaataaaagcggtaataatagtaacatcctaattgatgtgcggagccagcgttatcggcagcaaagtgcctttacccctgtggtcatgaggcggccttgccagcctgagctctgccgttatccctgctggtctcgtatctgtaatgaaatcccgcaccctcgctcaggccccagctcagagatggtgcccatgcaggccccaaatcgtgaccgcacccccccaaccccgccgcccaaggcctgtggcatcagctctgctccaggcatccacctgctggggctgagctgggggtcgcgacagcccagaaagactgagaggcactgcaacccggctgccatgtggatctcagatgcacggcctccagcgccatgggataagaacgtgtaccgttcaggctgcccggcaggcatggcagttcctccctggcagcgtggctggttccacacaacttttgacaagcctgagcgggggtctgacctattttccggctccaaagtgccacaccctggggccagtgtgctggcacttggggatggagaccaagcactgtgcctcgtacagcccggcttctctccagcaggtcagctggccgccggcacctgtgagattgtgaccttggaccgggacagcagccagcctcggaggacgatcgcccggcagaccgcccgctgtgcgtgtagaaaggggcagatcgccggcaccacgagagcccggcccgcctgtgtggacgacctagcagccgtatgccactggccctccggccaccagccctga

SEQ ID NO: 149029 - DNA, 2146 bp, Homo sapiens
ggcgcgcgcggggcccgcacgtggaggccggcgcgggggcgcgggcagggccggctgctgagacgcgctgctgccccccgcgcgggcgccgcggcttcaatggcgccatcgcccaggaccggcagccggcaagatgcgaccgccctgcccagcatgtcctcaactttctgggcgttcatgatcctggccagcctgctcatcgcctactgcagtcagctggccgccggcacctgtgagattgtgaccttggaccgggacagcagccagcctcggaggacgatcgcccggcagaccgcccgctgtgcgtgtagaaaggggcagatcgccggcaccacgagagcccggcccgcctgtgtggacgcaagaatcatcaagaccaagcagtggtgtgacatgcttccgtgtctggagggggaaggctgcgacttgttaatcaaccggtcaggctggacgtgcacgcagcccggcgggaggataaagaccaccacggtctcctgacaaacacagcccctgaggggccccgggagtggccttggctccctgggagagcccacgtcttcagcccacagtttcttccattcgcctcggacttcacccgttctctgccgcccgcccactccgtttccctgtggtccgtgaaggacggcctcaggccttggcatcctgagcttcggtctgtccagccgacccgaggaggccggactcagacacataggcggggggcggcacctggcatcagcaatacgcagtcatgtgggagcccggtcgcgcccagcccccgccgaccgtggcgttggccatgcatgtcctcagaggaggaggaggaggaggcagctccggcagccacagaaggctgcagcccagcccgcctgagacacgacgcctgccccaggggactgtcaggcacagaagcggcctcctcccagtgccccagactgtccgaattgcttttattttcttatactttcagtatactccatagaccaaagagcaaaatctatctgaacctggacgcaccctcactgtcagggtccctggggtcgcttgtgcgggcgggagggcaatggtggcagagacatgctggtggccccggcggagcggagagggcggccgtggtggaggcctccaccccaggagcaccccgcgcaccctcggaggacgggcttcggctgcgcggaggccgtggcacacctgcgggaggcagcgacggcccccacgcagacgccgggaacgcaggccgctttattcctctgtacttagatcaacttgaccgtactaaaataccctttctgttttaaccagttaaacatgcctcttctacagctccatttttgatagttggataatccagtatctgccaagagcatgttgggtctcccgtgactgctgcctcatcgataccccatttagctccagaaagcaaagaaaactcgagtaacacttgtttgaaagagatcattaaatgtattttgcaaagcctaaagttatatatttaacaggttttatatgttgtatatttgtagaaaatcctatttaacaattaacggggcagtcccggccgtcctgagagtcgggccgagccccgtgtgtttctgaagactctgggggtgggacacggcggggaggtggtgccccgcggaccccggggtgccaggcacggaaggcgggactctgggagaagcgtgcggaggaccgcggcgtctgcgtcccggatgtgtcggtcgtgcccagggaggccgggttcccttcgctgcgggccaggcttggctcctgattccctctctggtccctgtattggtcaacacttgagcgtacaatatcttgaacatgcttcttccaatgggttttgtttcccatttcctgcccctttcgccactcacggaccttgaggccagttgacggcccttctccccacgcctgtgtccccgcgttctgagaagtcctctgtcttcgtgtcactaggtccagaaagtcgcgccgggcagaggcgcaggcggggccggcagggccgaggaataagcgacaattctggtttttctcccctggccgtcgttcgccagcctccttcattttcctgagttcccgctgaagtatatactacctatgagtccaattaacatgagtattatgctagttctatcctact

SEQ ID NO: 149030 - DNA, 2324 bp, Homo sapiens
  misc_feature (1)...(2324): n = a,t,c or g
ttttttcacagttgcaccttttattcactgtcagtggggaaagaaacacaccacacagcacagggttgagcagtgagggcagtcactgagtgcacagccagaagcagcacatctggaggggatagggggctacactggaactggcctccttcccctgctacccagaccccccccttccccaagcctcctttctactgctgcttagaaggccctgggcctgactggcctccaccaagcaggaagggctatacaccctggcaggcccaggtcttgcccccacactctggcaaaggtaaaaagaaaacctcgaaaattccagaaagaaaatcccatatttttctgtactttttaattccaaaggtttgaattattttcttttttcaagaatgatgaataaaacatgtaagacattcttgaccccacaggggatctcttaaagtcagctcaaagcctcacccagggtgggatcttcaggaaatatttgttgcttcaatacatttttgtgtaaaaattatttaggtgtcaggcttactaccctgccggggggaccccagcttcttctcttcttctctttcttttctttcccccatcccacggccattccttctctctctggcaggcaagggcaaatttctacctctaggaggacttctggccattgttcaggggaaaggggatttaggtggcctttacttatggaacctaacttttttcctncacttttggattatacaggggaagggtaaaataatcccgactacaggctggaaagggactaaagtggggccatctgaagtagcctttgctgataatttttagagataagaaataagatgctcatcaattagcccaaaaggatgaatgagggtagagtatgtgagaaggcagattctgggaccttgcaattcacagagttgttgcaataagattggaatttaaaggagagtttgaatatatcaatgttttgattgtctgtatatttttgtgtctgtgcaagtcatacataaatctctgccagccttgtgctttgtggcaagtctctctcagctggtgcagggacgggagacctgtgtctcttctcaaggcagggccagtgctctaccacagtgctcctgagcacacagtccttgggacccccaggaagtatgcaggaagcatgtccctgggccaacctgttgttcccttcccatcaagcaaagatggtggtccccagttccctgcccctggcattgtgtgttcacactgctgggctgtcctgagaatattgggcctgaggagcaaaaatcacccatgggtatgtgtgtcccagaagccctggagtaatcaaaaacagccctccatggggtaggcatgtttcctcccttagtgaaagatgatgggtggggtaaaagacaatgccnggatgccttcgagggttcctgaagtccagaggactcccccaggacagcactgaagctgttaagcacaaggtcccagaggcagaacactgaagtgccttgaaaaatgtgggggaccttcaacccaagctccctattttttttggaagaccacaatcctcagaagctttttagcaggaagccctataaaggatgaatatccaatgtaacttgccctgctgttcaaacctcctgcacaccttaatccacagaaatggaacaggggaagagactctgaaaaagaagaaaccctccttagagccttggtttcaagtccttagccctgtgtcacctcctgactatgtgatcttgcacaagggatgcttcctctctgaatctcagcttccaagtctagagaaaagaagtgaaaatcctcccctccatgggatgtgagtatagaatgagatggggcacatggcaagcctttgaaagccatgaaattctgtgtggttgcgaattaggctagattcagcatttgcagggaaggaacctcacttaagtgaaaaagcttttcaacccagaaagatttaggtccccagctaagcccaggctgggtgagcatctatgtgtctgtgatgctgactgaccgcacaagacatacctaatagccagctccctgggagcaatgcaacatccttgaggcattgctggataaacaactgctagttcctgcctgaggatgtgaactccccagcctcaccatatggctggtcatgagcaagaggatagcaaaaggattagaacccagtggttgcaaaccagtggttgctatccccagcaagaggatagcaacccagtggccttgctacctccaagggcccagtagagcttgggaccaagctctattgatcagcatcccccagagttttcacctgcagagaagcagga

SEQ ID NO: 149031 - DNA, 3774 bp, Homo sapiens
atggtcgtggcgctgcggtacgtgtggcctctcctcctctgcagcccctgcctgcttatccagatccccgaggaatatgaaggacaccatgtgatggagccacctgtcatcacggaacagtctccacggcgcctggttgtcttccccacagatgacatcagcctcaagtgtgaggccagtggcaagcccgaagtgcagttccgctggacgagggatggtgtccacttcaaacccaaggaagagctgggtgtgaccgtgtaccagtcgccccactctggctccttcaccatcacgggcaacaacagcaactttgctcagaggttccagggcatctaccgctgctttgccagcaataagctgggcaccgccatgtcccatgagatccggctcatggccgagggtgcccccaagtggccaaaggagacagtgaagcccgtggaggtggaggaaggggagtcagtggttctgccttgcaaccctcccccaagtgcagagcctctccggatctactggatgaacagcaagatcttgcacatcaagcaggacgagcgggtgacgatgggccagaacggcaacctctactttgccaatgtgctcacctccgacaaccactcagactacatctgccacgcccacttcccaggcaccaggaccatcattcagaaggaacccattgacctccgggtcaaggccaccaacagcatgattgacaggaagccgcgcctgctcttccccaccaactccagcagccacctggtggccttgcaggggcagccattggtcctggagtgcatcgccgagggctttcccacgcccaccatcaaatggctgcgccccagtggccccatgccagctgaccgtgtcacctaccagaaccacaacaagaccctgcagctgctgaaagtgggcgaggaggatgatggcgagtaccgctgcctggccgagaactcactgggcagtgcccggcatgcgtactatgtcaccgtggaggctgccccgtactggctgcacaagccccagagccatctatatgggccaggagagactgcccgcctggactgccaagtccagggcaggccccaaccagaggtcacctggagaatcaacgggatccctgtggaggagctggccaaagaccagaagtaccggattcagcgtggcgccctgatcctgagcaacgtgcagcccagtgacacaatggtgacccaatgtgaggcccgcaaccggcacgggctcttgctggccaatgcctacatctacgttgtccagctgccagccaagatcctgactgcggacaatcagacgtacatggctgtccagggcagcactgcctaccttctgtgcaaggccttcggagcgcctgtgcccagtgttcagtggctggacgaggatgggacaacagtgcttcaggacgaacgcttcttcccctatgccaatgggaccctgggcattcgagacctccaggccaatgacaccggacgctacttctgcctggctgccaatgaccaaaacaatgttaccatcatggctaacctgaaggttaaagatgcaactcagatcactcaggggccccgcagcacaatcgagaagaaaggttccagggtgaccttcacgtgccaggcctcctttgacccctccttgcagcccagcatcacctggcgtggggacggtcgagacctccaggagcttggggacagtgacaagtacttcatagaggatgggcgcctggtcatccacagcctggactacagcgaccagggcaactacagctgcgtggccagtaccgaactggatgtggtggagagtagggcacagctcttggtggtggggagccctgggccggtgccacggctggtgctgtccgacctgcacctgctgacgcagagccaggtgcgcgtgtcctggagtcctgcagaagaccacaatgcccccattgagaaatatgacattgaatttgaggacaaggaaatggcgcctgaaaaatggtacagtctgggcaaggttccagggaaccagacctctaccaccctcaagctgtcgccctatgtccactacacctttagggttactgccataaacaaatatggccccggggagcccagcccggtctctgagactgtggtcacacctgaggcagccccagagaagaaccctgtggatgtgaagggggaaggaaatgagaccaccaatatggtcatcacgtggaagccgctccggtggatggactggaacgccccccaggttcagtaccgcgtgcagtggcgccctcaggggacacgagggccctggcaggagcagattgtcagcgaccccttcctggtggtgtccaacacgtccaccttcgtgccctatgagatcaaagtccaggccgtcaacagccagggcaagggaccagagccccaggtcactatcggctactctggagaggactacccccaggcaatccctgagctggaaggcattgaaatcctcaactcaagtgccgtgctggtcaagtggcggccggtggacctggcccaggtcaagggccacctccgcggatacaatgtgacgtactggagggagggcagtcagaggaagcacagcaagagacatatccacaaagaccatgtggtggtgcccgccaacaccaccagtgtcatcctcagtggcttgcggccctatagctcctaccacctggaggtgcaggcctttaacgggcgaggatcggggcccgccagcgagttcaccttcagcaccccagagggagtgcctggccaccccgaggcgttgcacctggagtgccagtcgaacaccagcctgctgctgcgctggcagcccccactcagccacaacggcgtgctcaccggctacgtgctctcctaccaccccctggatgaggggggcaaggggcaactgtccttcaaccttcgggaccccgaacttcggacacacaacctgaccgatctcagcccccacctgcggtaccgcttccagcttcaggccaccaccaaagagggccctggtgaagccatcgtacgggaaggaggcactatggccttgtctgggatctcagattttggcaacatctcagccacagcgggtgaaaactacagtgtcgtctcctgggtccccaaggagggccagtgcaacttcaggttccatatcttgttcaaagccttgggagaagagaagggtggggcttccctttcgccacagtatgtcagctacaaccagagctcctacacgcagtgggacctgcagcctgacactgactacgagatccacttgtttaaggagaggatgttccggcaccaaatggctgtgaagaccaatggcacaggccgcgtgaggctccctcctgctggcttcgccactgagggctggttcatcggctttgtgagtgccatcatcctcctgctcctcgtcctgctcatcctctgcttcatcaagcgcagcaagggcggcaaatactcagtgaaggataaggaggacacccaggtggactctgaggcccgaccgatgaaagatgagaccttcggcgagtacaggtccctggagagtgacaacgaggagaaggcctttggcagcagccagccatcgctcaacggggacatcaagcccctgggcagtgacgacagcctggccgattatgggggcagcgtggatgttcagttcaacgaggatggttcgttcattggccagtacagtggcaagaaggagaaggaggcggcagggggcaatgacagctcaggggccacttcccccatcaaccctgccgtggccctagaatag

SEQ ID NO: 149032 - DNA, 590 bp, Homo sapiens
gggcggcaaatactcagtgaaggataaggaggacacccaggtggactctgaggcccgaccgatgaaagatgagaccttcggtacccaccacacaacatccaagtggcctccgtcactacctggttgcggggcgggcacacctcctcccactgcccactggccggcctcttccagccgcccccaccccccaggaccccttagcagccctgccctcccctatcgtctgaacagttgtcttcctcagcctcctcccgcccccaccttggcgaatgtaaatacaccgtgactttgaaagttttgtaccccctgtccttccctttacgccactagtgtgtaggcaaatgtttgagtccctaggtggtttttaggattgatagcaattagctttgatgaacccctcccaggaaaaataaaaacagacaaaaaaaaaaggaaagattggttttcccagccctgctcagcagccccagcctccctgtatgcctgtgcttggtttactgataagccctttacaaaaaaacaaaagtatatatatatatgtacataatatcagaattataacaggcaaataaaacctgaaaatcaagaaa

SEQ ID NO: 149033 - DNA, 2959 bp, Homo sapiens
atgcagcagaaaaaagaggaggaagaagttcttaaagaagtaactgcacatttccaaattactttaactgaaactcaagcccagctggaacagcatgaaatacacaatgccaaactgcagcaggagaacatggaaatgggagaaaagctaaagaagctcactgaccagtatgcactgagggaagagcaaattaataaagcgttcaaacataaggaattacgacaacagcttgtagatgccagacttcaacaaacagcacagctgataaaagaagctgatgaaagacatcagagagagagagagtttttattaaaagaagcaacagaatcgaggcacaaatatgaagaaatgaaacaagaagaagcacaactgaaagagcagcttttcctttatatggataagtttgaagaattccagactaccatggcaaaaaccaatgaactttttacagccttcaagcaggaaacggaaaagaaaactattcgtgataaaaattataaggtctttcaaataaaattggagcggttagagaagctgtacaaggctcttcaaatagaaaggaatgaactcagtgagaaactgggaattctgaaagggcaggtctctgtgaaagtagcagatgtagatttagcagtgcctgtgacgcattcctgtgctgacctggattcttccaatatgctgaacactccttctaaaagagcccccaggagtccatctggaagctgaccccaaagggaatgaatgaagtaaaatgctactcaaaagccctctccacaggatctcctctaggcattgattaagattaagtgtgatcattgtactgatggatatattttgtgtacatgtttctcttttagttgtaactattgattttgtaatgaaaatttcctctcctttttctaccatatctctgtttttttagaactactcaactgtgtggtaacagaaagcttcttaccaatttccccaactatgttgcacatcagcctcattttccccctttattggaatgcatgttttcattgccttctcctttcaaagtgtacgtttgtgtgttcatcaccttaaattatcttaatttgagacttttttataatggtttcgtaatgtgaaatcaaatactaatttaaactctggagcccataatatctacataaaagaaaatataaactgactaatattgtcaagtcatttaaatgataagtaaaacttcaatggattaagaaacaagcatggcatatttgattcagatcagttttttgacaatatatgtatgactttccaaattgatgtgactgtaaactttgaattcctcaaaattgacagaatatatatatatatatatatatatatatatatatatatatgtatgtacacacacacagagagatcatttaaatgtaaatgatgttaagaaaaaccaaaacagtagcatatgcaggcaagtcattggaccaataggcttaatatttatgaaactgacaattgttctgctttagtttcaggttacaattatgtttaaagaaaaaaaaatcagtatctagatctctgcacttggcatggaaaattttgaactatttattccttaattttcttttatttcagtttctcatagagctaaatggttttacatatattctcttgtcagatttgtggtctaatagaggtagaaaatggaaatttcccagtacttagaaatatggtacttaggaagaagtctaggatgtgaattacatatacacttcccctagtgactatgataatcaagggggcagatagcagaggaaaataagttaacatgaaatttgacaaattttattactttgccaaaattagcaaaacaaaaatactcaccttcccctgctcaccccccaactttttataaatattcaattcagctacaaaacaaaatactggacccacttctttcagaagagatgaagataccttatatgccctaaagttaataccagcagtcatattttatcagatgtaaatctggatgtaagctcttaatgttatactaaggcagtttcttaggctgtgacacttctttgtggtacttgttttgtgtgaaaggtaaattttggggagaaaacaatgtgaaaaacagaacttgttctgttgtttttggcatactgtttatgttagatacactgtgttacaatacaattattacgaagatctacattgtattttggaatttggtttcctttcagaattattgctctggctagcattggaaacaacaacaacaacaaaacccaaaggaaccctttgcagaagattcccttgtaaatggccctgtggcatgcccagtatctgccaatgttctagaatagaagttggcaaacctctctgtttgccaagcctgcagagttgaacatgtccataaatgtatacaatctgaccctgttttttggccctgtttctggacactgtagctgaccaagaaaatgtttaaatgttgcgatcaattaaatttttttgttgtatcattctggagttgtaatatgtatagtggcaggggattccaagctatagaaaaaacatgagtctagaatgacagagtgtgtcatcttcaaatgtgtattaatatatttcttgatgatgagaccaaatatttctaagttaatggaactattttattacacctgataatcacagttcaattcttgtctgttgcagaattatctacctctttcaaactgtaaatgaaaataactgtgaaaaaaaggatgcagtactgataaaaacactgctttgtttttatctcacctcttttttaaggatatgattttataagaggcagttctcttttgcttttcaagacttctgtagagtttgtgttttttgtttttgtttttgtttttgtttttgtttttttacctaatgtgcaatcttattttatctactcaacttcgttcaggttaactaaagatatagatataatggttaa

SEQ ID NO: 149034 - DNA, 398 bp, Homo sapiens
  misc_feature (1)...(398): n = a,t,c or g
aaggtggccatgaattaagtgattttattagctatctacatatttctttggatttagcttcttgttggctggagagaagtatatgaaggtggccatgaattaagtgattttattagctatctacaacgagaagctacaaacccccctgtaattcaagaagaaaaacccaagaagaagaaggcacaggaggatctctaaagcagtaggcaaacaccactttgtaaaaggactcttccaccagagatgggaaaaccactggggaggactaggacccatatgggaattattacgtctcagggccgagaggacagaatggatataatctgaatcctgttaaattttctctaagccatttcttagctgcactgttatggaaataccaggaccagtttatgttn

SEQ ID NO: 149035 - DNA, 2295 bp, Homo sapiens
gagcaacagcgcaggctcccagccgagtccgttatggccgctgccgtcccgaagaggatgagggggccagcacaagcgaaactgctgcccgggtcggccatccaagcccttgtggggttggcgcggccgctggtcttggcgctcctgcttgtgtccgccgctctaacacagtgttgtatcacggactggattcacctgagcccaaccgtactcaactcacatatttctaccccaaatgtgaatgctttaacacatgaaaaccaaaccaaaccttctatttcccaaatcagcaccaccctccctcccacgacgagtaccaagaaaagttggaggagcatctgtgggtccctcatccctcgcctactcctctgtctcaagaggaagctgataacaatgaagatcctagtatagaggaggaggatcttctcatgctgaacagttctccatccacagccaaaggacactctaggacaatgggcgattatgggaggaaccaggactatggactgggaccacggagccccaggggacagacgacagagtctgatggacaccttgggaaggaaaacaggggtttacatgggaaaattggaacagttcagtgaaattctttttaaggtggccttcctcaaatattagaagagggaagacagccatttcttttttcatcttattatttttgctttttgcattgctgttgtttacattacatatcacaacaaaaggaagatttttcttctggttcaaagcaggaaatggcgtgatggcctttgttccaaaacagtggaataccatcgtcctagaacagaatgttaatgaagcaatgccttctttgaagattaccaatgattatattttttaaagcactgtgatttgaatttgcttatgtaattttatttgcttgactttttatatgatattgtgcaaatgttctgccataggcaattggtacttaaatgagaggtgagtctctcttttgccttggtgctttggaaattaaatgtcacaaaccgagtatataattttttatctgtactttttaagagctgagtttaatccaggtgtccaaaatgtgagttaaacatttaccttatatttacactgttagtttttattggtctaaattaattatgctttcttctgggaagtattagtgatgctacttttaaaaggatccccaaacttgtaaccaaatatctgacatatactgttactgctggactcacatttcattctccgccctttcaaatactattttttatccacattttttttttgttcccaaactggtaatgtacaaggatatgtgtggataatgctttgggatttgagtaatatttttttttccttcccaagaaaactggctttgggatatttttaggataatttaaacataatttaggataatgatattgctcaatctgaccacaattttaggtaaaacattaaatggtgtccaagaaatcttgggcaacagagactctgcagcttggcagtgggacatagataaaaatggttacagagatactatttttttggttggaattactatattaaatttagaagcagaaactggtaaaatgttaaatacatgtacaattgcttttagttagcaattgattgtagcatgggttcctcccaaggtttcaagcaatgggcagagtttaaaattatatcagattcgtttacttcgtttattattttacaagtaaatttgaataaatcttagggggtcattatcacttaattaatactgtacctaggtctttcaaattaaaattatacctgaatgaagttgtttgtatacataaaggatatttgtgtaaccaattacccttttttccccccacacttgttttctttgtttttgttttttatggccaactggggaaagtcatttactatggggggttccatttatgtcctgtcctttcctatcataaaaggaattgaatcaaatatgtaaaatatgtgatttggaaccatgggttgactttacaagtgtcacctacagctttttaggaaaacatggccccaatatatggtaggcgggacccggtgtgagccatgtgcgcttgcgctttatgtagagctgggaagaaggccgtccatcctttctttttggccggacagtgtactttcctaatagggaagggaagcacaatgcgaaatacccctgaaccgtttttattgccagtaattttttttcatatctggaaactattatttaatattttgaataagattttaaaaaataaatggcaaagatataaatctaaaaaaaaaaaaaaaaaa

SEQ ID NO: 149036 - DNA, 1388 bp, Homo sapiens
tctctttttttcagttttgctctgccgcccagcttggagtgcaggatcgtgatcatggcccattgcagcctctacctcccgggctcaaggcaatcctccccacctcagcctcccaagaagccgggaccacaggcatgttccaccacacccagcttatttttggtaaagatggggttttgccatattgcccaggatggtctcgaactcctgggttcaagcaatccaccccagcgttccaaagtgctgggattatgttgcgaaaaagctgagtgttgggagaaagctgagggcaggggtttgcatttctgacataatggtaaaaagaagtctttggaatattgtccaggggtccaaggggtctaaaaccccttgtggtctttggaacagcaaagctctgtgctaaagggtgaaaggctgccctgacgcaccataatctaagcccagggacataaaatccctcgtggcttggatagaatcccagggcctgtggctctggaatgtctagacttgctggctccttgctctcccaggatcgactgtaacttgagttaaaagaacctgctctccatcatctcaagtagcagagcaaatgctaaaccatcacagctgtaaatcatgtgcttaatgcaaggtgcccttctgaccttcacattctcaccatctgtttctttgttggattaccaataaatagtgtgggctcccagagctcacggccttcacagcctccaccatcccgatggtctgctggtcctacttctctctcaaactgtctttttctcaatcctttgactccactggactttgtcacccccacgacctggtgttgggtctggtcaccctaacagggttacagatgtaagccactgcatctagcacccacattatctttgaaagcagttgagtctttggcatgcaagaacattcctgcactgcagtgaatctgtgactttactattacggatgcatcccaattctcaaccagtgaaaggccacgtacctaaaaaggtgtttactgcctcagaatatacttgacaattgtggaaacgttagcaatctactcttccaagattccttggagttgtcatacataagcaaatccatatggactgaggaataaggaggaagaggataaggcttatggaagataaatcatgttcttgcctccggtaggtaggattcaatttagtccctgtataaatgactccatgttaatttcccttcccatatggatgctaatccagtgactcataagcttagaccaacaagctcagcatgaaagccaagaaacttctgtttctcctaaattccgtagccgactatcatacagcgagaccctcactgggccactctgggaatgactacaaatcggacgcgtgggtcgacccggg

SEQ ID NO: 149037 - DNA, 1515 bp, Homo sapiens
atgctggagtccattcgcgtgacggaaaagcttcactggcctgagcaagaacttgctaagaagtctattctaaatgcagaagattcattgatcattgacaacaaaagaagcatttcacatttgtcctcgggagtgctaaaagacattttcacaactggaaccagtagttacaatgtcctactacagagcaaggaggaaaaaaagtatcattcacaaaaacagtcttcctccacctactccaaaagatgtagaaaacccagcaaatctcctaacacttctcgtagcaaagatcctcgcaggatgaaagccctggtgcctgtgacaagcagtggtacttggtactgcctggagaggcggcctgctgtttttgtcactagttcagtgtcaagtcctgtaaagtttacacatgatatctctgttacagggaatggcatagtactgccacctaaacccaaaagcaaggtcaagtggtgccatttctccactcttccaaagccaaagcctcagctgtctagaagctttgaaaagggagatgacttttctgggaagaaattttgtatattgactgctataaaacccaccaacttagagaaagaaaaactgagattcttcaaatctgactatacctacaatcctcagtttgagtatgccaatcctgctctgccaagcgtattagctaagcatagccacgcatctgaccgatttcttaagcagtctatcaatattatggaactgactttacagaaatatggaagttatgaaaaatttgaacaagccactggtggtagcttgctctctaaaactcgaatctggagtcacgttaggaagtacatgatgaaggaaggctgcctaggggagattgtagttcatctcactgaggacctgctttcccgagcgtcaatgacagtagtaaatggatgtccgactctgactatcaatgtgtccactgcacgtacacattattttcgaggtattaacaacctccagcagccatggaacagttggactggacgtaaaaaacatgagctaaagccaaataatcccacagaggaaggactagcaagcattcacagtgttctgtttagaaaagacccttttttatggagggctgccctcctctactacactgtttatcaagccagccaaatgtctttttgtgaactctttaaagatattggcaggtttgtcaaggaccccaatacaagatgggattattgtgtacgggccaagaggggatggactgatacttcccaaccagggtgttttagtaaagaccaggtatacttggatggaattcttcaaatcctccgatacagagataccatagacttccatctgctgactgctctcgggaaggtttcttatgaagatgtggatcgcttaaaaggattggcagttaccgaaaacatgagggtccctcatttcctgcaggaccatggccgatatatggaacacttagagaagatcatggaagtgaatgaactgactgacagggaactgaaagatcttatatag

SEQ ID NO: 149038 - DNA, 4311 bp, Homo sapiens
ccagtagctacgggctggtggaagcgctgctcacagtcagtgtcggtacgtcttcgtccgcccttaccctccttatcctgctccaggtagcggagagccgcctcccgccgcgcccccgccaccgaggcccgggtcagaggctagaggccgcccgcccctgcgcggccctttcccctgagcccgcggagcccgccgccccgggcctcggggcgacgatgctggagtccattcgcgtgacggaaaagcttcactggcctgagcaagaacttgctaagaagtctattctaaatgcagaagattcattgatcattgacaacaaaagaagcatttcacatttgtcctcgggagtgctaaaagacattttcacaactggaaccagtagttacaatgtcctactacagagcaaggagaaaaaaaagtatcattcacaaaaacagtcttcctccacctactccaaaagatgtagaaaacccagcaaatctcctaacacttctcgtagcaaagatcctcgcaggatgaaagccctggtgcctgtgacaagcagtggtacttggtactgcctggagaggcggcctgctgtttttgtcactagttcagtgtcaagtcctgtaaagtttacacatgatatctctgttacagggaatggcatagtactgccacctaaacccaaaagcaaggtcaagtggtgccatttctccactcttccaaagccaaagcctcagctgtctagaagctttgaaaagggagatgacttttctgggaagaaattttgtatattgactgctataaaacccaccaacttagagaaagaaaaactgagattcttcaaatctgactatacctacaatcctcagtttgagtatgccaatcctgctctgccaagcgtattagctaagcatagccacgcatctgaccgatttcttaagcagattgtagttcatctcactgaggacctgctttcccgagcgtcaatgacagtagtaaatggatgtccgactctgactatcaatgtgtccactgcacgtgagcattggctggagggaatgctgaggcatgaaataggtacacattattttcgaggtattaacaacctccagcagccatggaacagttggactggacgtaaaaaacatgagctaaagccaaataatcccacagaggaaggactagcaagcattcacagtgttctgtttagaaaagacccttttttatggagggctgccctcctctactacactgtttatcaagccagccaaatgtctttttgtgaactctttaaagatattggcaggtttgtcaaggaccccaatacaagatgggattattgtgtacgggccaagaggggatggactgatacttcccaaccagggtgttttagtaaagaccaggtatacttggatggaattcttcaaatcctccgatacagagataccatagacttccatctgctgactgctctcgggaaggtttcttatgaagatgtggatcgcttaaaaggattggcagttaccgaaaacatgagggtccctcatttcctgcaggaccatggccgatatatggaacacttagagaagatcatggaagtgaatgaactgactgacagggaactgaaagatcttatatagtaattagcgttctggcaaacatagctaagctatgcctccatgtatattaccagttaggtgcagttagcaccagaagatttataaaagaagaaagactacttgtgttttctgaagaagggtcttcagtattcagcggaatttttaggttaagtacagatcttaaactatttccctaaaatgtttctataggctgcagggggaagttattcctattttctgaatctcgacagagtcagatgaaaatactactgctgagcatttttgaagactcttggtcaaattgcatgataaatttctgcctgagcagtaagcactggcctagtgcttctgcctaaatatggaggtcagctccaactggagactggctgaattccattgctgttcagactccaaagttatattttatttgataaataatggtaattattctcctttgaaaaattagttttgtgttgctccaaaaagctagctatatatctcagctttcttatttcttttatatgttgagggattttaaagggagaggaaaagcaatttgaaaatttttcattaagtgttttattttaacattattgtttcaccttatcagcttataggaactaaattagagaatcacctctttttgtccggttatctcttaactatgttttcatttgctgaaacatattgtacccttttaaattttttacagagttttaacgtcttttccactgcatcctttataaaaataagtacaaattccagagaggttttcctacacaaatacaaaataattggggaagggctactcaccttttttatgaaacagaatatgtaacaagcagaggacaaatagactgacctggttaaacgtaggttctggatgttgatgggtagcacctgcagtaaacttgaccatgctctgaaaaaagaaatttctgggtattgatggtttataaagccagctttgtgctattggttcagtatattgttatcaaattctttgacttcatccaacccagtaatgacatagtttaatttttaaaatggaggagttctgttttgctgtatttctcctgctagcctagctttgtattttatcatcagcttcagtatatacttgtatatatatacctggattcaaatggttcttcatacaacttaatgatcagaaagaatgctgctgtaaacaccccactcaagattgctgctggaatttctacccaaagctgtctgagagtttatctttacctcagtgcaggcttaaataatggtgctaatactggtagatatatactgtgaagcctgggttcacattcatgctaggaaaatgattttggggaaatcttttatagggagagggttacatggatttttctctttccacatatctaggaagggacttgcctccaaaggaaggaatgggttcaggccaaacagggatatactcttggctgggtgccccaaaggttctttgcaaaaccatgaatcttgcttttagcagtaaagggccagacactttgggagcattgaaaggccttagcccctgcttccccaactacgtgccatgctgggtagtgtgtatcctgtacatctgtgtgccaggctggggcagactgtgccaatgctcaccaaacactagaatctgctcttacacctctagcatgtatctcgttgtagcagagttgtgcactttctcagcattgtgtagtgttttctaattgcatctaaaaacttatcaaaagtgattgtgaaaacagtgtcttaggaagtataaacagaaatggccaatatttatgtcctgtgattcaagcccaaaggttattaaattccaacttttcacaggggaattaggcactgcttaattcttactttatgatttaaatataaaggaaaatcacagcagccttaatttcctgttggtcggatcatttgcagcagttctagttcctgacttttaaaatggatgaaattttctctttgtctgatttggaaaaggaactgcttttttgccttactgctttggtataaggatgaaaaacatgagcactctgcagacaaaatgaccttaaatcacattgattaagatattttaaaagttagcagtgaaccaaaagtagtttcagattagcagaaataaagagctttaagttttaaaagttgagattgaatatttaatgaaaagtttattaattctttttccaggaatagcagtaaggtcagtttttttccctaaaataaaaagttttaataaacagaaaattatagcaacagtacttaggagaatagttgaagattgtattaattttaattataatagttatttgtcatagccctattgatgattagaatttcattagttttgtcccactataattttaaaaatagttgtgtcaaatacaaattctggtaaactgtttaggttttaacaccagacagtattcaaagggaaattaatgtttgcaaacataaatccatagtcttcatttctttatattgtcacctttgtaaaagtgtttaaaatttgtattgtttgttttgtatatctttgggcatcttgtgtcgtagcgtataataaaaagaaacgggtgccaaggttaaaaaaaaaaaaaaaggggcggccgttttaaaggatccttgggggggcccaagtttacccgggcatgcaacgcattagctttttccttatagggagccgtattataac

SEQ ID NO: 149039 - DNA, 413 bp, Homo sapiens
ggcaaaaccatcacccttgaggtcgagcccagtgacaccattgagaatgtcaaagccaaaattcaagacaaggagggtatcccacctgaccagcagcgtctgatatttgccggcaaacagctggaggatggccgcactctctcagactacaacatccagaaagagtccaccctgcacctggtgttgcgcctgcgaggtggcattgaaatacaactgcgacaagatgatctgccgcaagtgctatgctcgccttcaccctcgtgctgtcaactgccgcaagaagaagtgtggtcacaccaacaacctgcgtcccaagaagaaggtcaaataaggttgttctttccttgaaggcagcctcctgcccagccccgtggccctggagcctcaataaagtgtccctttcattgactgga

SEQ ID NO: 149040 - DNA, 831 bp, Homo sapiens
tgatccccggctgcagtttttttttttcttcttgtcttctcttcttcagcgaggcgaccgagctggttggtggcggcggttcttcggaacgcaaacatgcagagtctttgtgaagacccttcactggcaaaaaccttcaccctttgaggtacgagacccagtgacacccattgaagaatgtccaaaagccgaaaatttcaagaacaaaggagggtatcccaacctgaccaagcagcgtcttgataatttgccggcaaaacagctggagggatggccgcacttctctcagactacaaacatccagaaagagtccacccgtgcaccgtggctgttgcgcctgcgaaggtggcattattgagccattctctccgccaggcttgcccaagaaatacaacttgcgacaagatgatcttgccgcaagtgctatgctcggcctttcaccctcggtgcttgtcaacttgccgcaaagaagaagtgtgggtcacaccaaacaaccttgcgtccccaaagaagaaggtcaaataagggtgggttctttccttgaagggccagcctccttgcccaggcccgcgtggccgctggaagcctcaataaagtgttccttttcattgactgcgagcagcaattggtgtcctcatggctgatctgtccagggaggtggctgaagagtgggcatctcccttagggactctactcagcactccattctgtgccacctgtggggtcttctgtcctagattctgtcacatcggcattggtccctgccctatgcccctgactctggatttgtcatctgtaaaactggagtaaaaacctcagtcgtgtaaaaaa

SEQ ID NO: 149041 - DNA, 499 bp, Homo sapiens
caggaggctcacaaagaggcctttatttatctagctcaaagtagacactatcacaatcttgtttgttactccttttactaaaatagttcaaatcaatgtttttaccacactatcaaaaagttctatttcttcttgtctccccacgtcagagtggttgaatagaaggtagaaacaggccgggagtccacgggctcccagctctaaacggcgccagggcaggaaggggtggctccacagtatgaaaaatatacacctctaccgctctgcagtcatgcatttagttttaagaaaaaaaaaaaatcagtagtatgtatcttgtttcctcaagtttcaagaaaaaaaaaatgaaaggtcacttttttctctttaaacactgatgtgtagctagtaacttggataaaaaggtgccaccctacaaaatgtgctcagcatgttctgaggccaggatgggcttggccacctgggctggggcgaaaggagacctccatctgtcacagtg

SEQ ID NO: 149042 - DNA, 2085 bp, Homo sapiens
gcggccgccagccagctacccacctcctgccgtcccccctggaggacagcctcctgtgcccccgcccattcccccacccggcatgcctccagttggggggctggggcgggcagcctggatgagataacgtgagccttttttccctctttgtttttttaacaagattttctaatcgacttgcagagtagttgaagtgggtaagcagcagggtaccttgtataatgcacgacagttgcagtatgggaagaatggaccgggcccctgggataaaatcagagtggtcctcacacctagaggacggggacaacccagctttcagaagtagccctcatcagtgccccttgcagtctgactgtgtacacttggttcagcctaatgtctgagagtcctgcactgggttactttatacttagttgagggacgtttaaccagccattattggcttcaattaaataggctttcgggtaagggagttaatttccttctagaaatccagtgccctatttttcccccggaaacctcaattttaaaataagtcccaattcccatcctgaagcccaagctgttgttcattttcattcggtgacattctctccccatgacaccccagaaaggggcagaagaaccacattttccatttaataggatgtttgcatccctttgtattaaaattattttgaaggggttgccctcattgggatggcttttttttttttccctccaggggagaaggggagaaatgtacttggaaattaatgtatgtttacatctctttgcaaattcctgtacatagagatatattttttaagtgtgaatgtaacaacatactgtgaattccatcttggttacaaatgagactccttcagtcgagttatccaaataaaagcagttctgaaactatccctttctttgttatggggtggaaggtggggctccaggccctttccagtctgtggcttataaaatgtgcagaggccctccttccagaccctggggacgcgggagaggcctggctgcagctcacagcagccacagccaaccccactgcctcccaaggcactctgggtggatccgcacagctgcctgccaagccagcctgcccccatcctgtgcctgccttggtttcctttggaggacctggttgagttccaaaccagtttgaaactttgaagccttgctgcgtagaacgcacacaggaacccgggggcttgattttgaaacttttccaactttgggcctgtgatgagacagaggcagctggaggagcagcggcctcactgtccaccttgagggggccacggctctgtctgtggaaggggccccgactgagccccccatctgcggtgcttgaggggccttggccctgtctctgcctgctgaccctgccacccacgacagaaacaagcactgagcacccagccaggaggctcacaaagaggcctttatttatctagctcaaagtagacactatcacaatcttgtttgttactccttttactaaaatagttcaaatcaatgtttttaccacactatcaaaaagttctatttcttcttgtctccccacgtcagagtggttgaatagaaggtagaaacaggccgggagtccacgggctcccagctctaaacggcgccagggcaggaaggggtggctccaggtctcactgtggcaccttctacagaaaaaggacgtagctgccgggcccggggacagaaaccaagacgttccagtccatctccaaaaagcagcacaaatactttgccccacagtatgaaaaatatacacctctaccgctctgcagtcatgcatttagttttaagaaaaaaaaaaaaatcagtagtatgtatcttgtttcctcaagtttcaagaaaaaaaaaatgaaaggtcacttttttctctttaaacactgatgtgtagctagtaacttggataaaaaggtgccaccctacaaaatgtgctcagcatgttctgaggccaggatgggcttggccacctgggctggggcgaaaggagacctccatctgtcacagtggaaactgaagccgagtgccagtgccgcgtccggcttcaagatcaagagtcagagc

SEQ ID NO: 149043 - DNA, 3053 bp, Homo sapiens
  misc_feature (1)...(3053): n = a,t,c or g
ggcacgagaatttatcctccaatatgactgccactactaaatttgtgagcactacatctcagaacacacaacttgtgcgacctcctattagaagtcatcacagtaatacccgggacactgtgaaacaaggcatcagtagaacctctgccaatgttacaatccggaaagggcctcatgaaaaagaactattacaatcaaaaacagctttatctagtgtcaaaaccagttcttctcaaggtataataagaaataagactctatcaagatccatagcatctgaagttgtagccaggcctgcttcattgtctaatgataaactgatggaaaagtcagagcccgttgaccagcgaagacatactgcaggaaaagcaattgttgatagtagatcagctcagcccaaagaaacctcggaagagagaaagtaagtagatataattttctttattacattagttttcaataaagtactgtttgtagatttggattataatttccttgactgcattagaattttctttcatggtttctcttctgtcatatgcaggcaaatttatattgtggaacaatatgacctaaaagtttttgtgtttgagtatgttttataaggttgctttttaaaatctaaggtaaatgcttaataataattgggaaatactttataatctcaaatcaaaaaatgcattcatggaatcattgagcataattgacgttgatatgtttaatatttcttcaagcttgtgaactatatatgccattaaagtaagattacttaaaaatatgattttttcttttaactttatttgacagagttctgtcagcaatttcaaagtaacgtttatatctgcttctaactatagagctcgtctgagtgagtggaaagctggcaaaggaagagtgctaaaaaggccccctaattcagtagttactcagcatgagccctgcaggacaaaatgaaaaaccagttgggtctttttgggactaccatggcagaagaagatgaacaaagattatttactggaaaagtaaccaacacattttcctgaatgcctgaacttgattaatgagggatgtccaaaagaagattatactggtcaccactgaatgacctgattaaaaatattcccagatgcccaaaaagcttgttaagtattggatatgtcttgcacttattgaaccaatcacaagtcctattgaaaatattattgcaatctatgagaaagccattctggcaggggctcagcctattgaagagatgcgacacacgattgtagatattctaacaatgaagagtcaagaaaaagctaatttaggagaaaatatggagaagtcttgtgcaagcaaggaagaagtcaaagaagtcagtattgaagatacaggtgttgatgtagatccagaaaaactggaaatggagagtaaacttcatagaaatttgctatttcaagattgtgaaaaagagcaagacaacaaaacaaaagatccaacccatgatgttaaaacccgcaatacagaaaccggggaccaagttgccttaattaaatataatgtgtcctaccacgccctacttgcaaagtgtgaaaaaaaaaggtgcagtttgatggaacaaattcccgcatttaaagagctgaagtttttaacaccagtgagacgttctcgacgtcttcaagagaaaacttctaaattgccagatatgttaaaagatcattatccttgtgtgtcttcattggaacagctaacggagttgggaagagaaactgatgcttttgtatgccgccctaatgcagcactgtgccgggtgtactatgaggctgatacaacataagagaaataaagctctgttagggaatggggtttttattatttgtggggtgttttgttttgagtagctttatattgctcttaggtctggagttggccatgtacctatgtatcctaagcattcacggcagtgagcntccctttactaacattcatgttatggcaaggagttctcctctacattggaaagctaatcctaccttgtcagtttccaaccaactgagttttttctttaagaaaggtaaattttgtcagctagtttactatgttccttgaatataaacaggttataatactaccctgttcactttactaaatataagtacagtaatgatgcataattagaaaatgaggtattctaggtaaaatgtatgtttgccttgacatgtttttaaaagttatgatgtacctccctgcctttaaacagaatacttttttcttttttttggcctttctcagattagtcaaaaattctatagaatgactcacttcgaatactaagacacaggaggtttagcctgctttcttaccaaattccatggttacccagacttgtgttctcttgcggtcccttgggactgcctgttgattgatggaaaggtgtctgcactgacacttttcgtcagtagtctgtagtttcgtggcctcttttgattataactggggtcaccaagaaggtttacttaattaaataccgcatttctaagagaagatactttgtgtaagaaaagatgccacatttagtggtttaacttttgtaacttcacttgatagtttttaagcaattagaatggagttagggaaagaacatatcatactgaacaaatgtcattctagtttagatagcatttctaagataacttgatactaatacttgtttttcttccctataacataaaaaacttcactgttaagtcatgtcccttgaaacatggtaagttacatacacagttttctctccacacataaataacaccactaaagttgttttgtaaggttccaaactaatatggcatatatcaactctacagtttcaaataaatgactttttaattgtaaaagattagttgaaaaactgtatgaatgtgaagatcacatgcttagtcatttttatgttcattccactttgtatatcttttctatttattgacttctcatgttctagagagtaggacttttattccgtgtacctgatatatatacaattaaaatatctgtataaaaaaaaaaaaaaaaaa

SEQ ID NO: 149044 - DNA, 1787 bp, Homo sapiens; identical to SEQ ID NO: 145236

SEQ ID NO: 149045 - DNA, 1553 bp, Homo sapiens; identical to SEQ ID NO: 145237

SEQ ID NO: 149046 - DNA, 1862 bp, Homo sapiens; identical to SEQ ID NO: 145238

SEQ ID NO: 149047 - DNA, 1295 bp, Homo sapiens
cggtggctcatgcctgtaatcccagcactttgggaggccgaggtgggcggatcacgaggtcaggagatcgagaccatcctggctaacacggtgaaaccctgtctctactaaaagtacaaaaaattagccaggtgtggtggcagatgactgtaggccaagctaattgggaggctgaggcaggagaatggtgcgaacccggggagggcagagcttgcagtgagccaagatcacccactgcactccagcctgggtaacagagcaagactcggtctcaaaaaaaataataagttacatttaaatgtcatatacatatttaagaaaaaaaaaaccaagtacttctcatttaagacagagtagaaattatttaaaattaggagttggtgtaaaggatgagctacatattcaagtcaaattatagtaagtattcactattccactaccaaagtaggtcaattatactaaagagaagaaatctatgtgaattgaggcattttctcactttgatatatgtgaataaatttcaggttgtctaaattcctagggttatatagttagaaatatataattctcttatagacaggtcaactaggggaaataagttagcacaatcatttgaattggttgtctacatactgggcagggcttattccttttctttagcttctttgcacatgtaaagcaggccataagatgtcctgttttgccatggacaatgcaaccatttttaggtcgaccttgacaaatcacacaaggttcaatggcattaaggggcaaactagattccacactctcttctttgtcttgggtttcttccctttcaaactctttcacatcttcttggctgctataaataatgctactagaagttgatggctgagaatagtcttcactttcttgtctaaccagggtctcttgttccgaagctggaatctgtgaggtggttacagcaccatcagtaggtacagacatgttggtattgcacatttgcctgctcctcaccatccggggttttcgcgcttggagtcgggggtccctcaagactccccagtttccttcacggggactgactactgcggaagcacgacgccctgggcctcggggatcattccactctccgggccagggcactgggcgctcgtacgcactaatccggggagggacggtgctcctggctgcgaaagcagcaggatctcggtcagaggggtcgcggccgcccctcgggctcggcttcttgctccatctttccgacacacagggccacacaggccccagaagcagccaagctcgcgcggtgc

SEQ ID NO: 149048 - DNA, 1149 bp, Homo sapiens; identical to SEQ ID NO: 145240

SEQ ID NO: 149049 - DNA, 9234 bp, Homo sapiens
tcaatccatggcagccagctgctcgatggcacggcgcactttcttcgcagtttcctcaaattctttcttcttattgttggtttcctttgcctggaaataaagaatagacacatgacactgaaaccagagcttcccagtcacatcctgtagataagatgacaaaggaaaaaacaatcagggaacactgagagagcacctaaataaactgggcactgggctaggcagattcccagctacctgggacaaacatcctgattcagctcaactccctctagtttaagctgcctcctaatcatcgaataacaggaaacactgacggagtgcttggtatgcacccagcaccactctacctgcttcctccattaactgatttatgttcacagtgatcctgcgctgggtgctcccatatctctactatacaggtgaggaaaccgaggtccaggctgaaggagccactcaaagtacccagctagtctaggcaccccagctagtctgggcaccccagctagtctaggcaccccagctagtctaggcagagctctgctcttaaccactgccctacctttctcctgaaactcctggaggaaagtccagagccttcctcttcatgtccagttaaacagaccctggcaaacatcaggctcttcctcgaacagaaattcttttgcttccagtccctccctgaatctggcttccaattttttcattctgctaacagagctctctcctaaggggcaaatgacaatcacattagcaaatccagggacccccttccctaccatattttttataaaccctaactcctctactacattaaaaaacaaagacctttattgggttaaatttgtttgctgacagaggttaacttaaaaaaaattactttttttttgagacggactttcgctcttgttgcctaggctggtgtgcaaaggcacgatcttggctcaccgcaacctctgcctcccgggttcaagagattctcctgcctcagcctcccgagtagctgggattacaggcatgcgccaccaccccggctaattttgtatttttagtagagatggggtctctccatgttggtcaggttggtctcgaactcatgatctcatgtgatctgcccgccacggcctcccaaagtgctgggattacaggtgtgagccactgtgccagccaaaaaattacttttcaatatgtactttatatatcctaagttttacctcatgtataagtaataaaaatttgtcattttttaatataaatttataatttataaattattaaaagaaaatttaatttaaaaataataaattgataagaaaaaagaaaacagtgcaccgtttggttttttttttttttagagacagggtctcgctctgtcatccaggctggaatgcagtggcaagatcatggcttactgcagctttgacctgcaaggctcaaagtgatcctcccacctcagcctcctgagtagctgagactacaggcacgtgccaccatgcctggctaattttttgtgtattttttgaagagatgaggtctggccacattgcccaggctcgcctcaaaactcctgggctcaatgaatcctcctgccttggcctcccaaagtgctgggattcaggcacaagccactgcacctggcccagcagcgcacttataatggactgtgatggacaactctgcagtcccagggagcctcagctttactgatatggaaagatgaccatggcttttaaaatatatatacacacatggattattcagtttcttctctttcaaaaaagccttaaattagcgaagctcctttgcatacatgctataatttaaccaccccaatgtggaggtcaatatctccattttatacatttttccactaaaggtaggggcgaagcaaacacaactcttgctattgaaagacaaaacaggccgggtgcagtggctcacgcctgtaatcccagcactttgggtttgggtttgtaatcccagcgcctgtagtcccagctacttgggaggctgaggcaggcgaatggagtgaacctgggaggcggagcttgccgtcagccgagatcacgccactgcactccagcctgggcgacagagtgagattccatctcaaaaaagagaaaaaaaaaaatttaaaattagccaggcatggtggcatgcgcctgtagtcccagctactgggaggctgaggcaggaggattgcttgagtccaggaggtcgaggctatagtgagctgtgattgtgccactgtactccagcctgagcaacagagcaagaccctgccaaagaaaacaaacaaaacactcctgccacccaggtctacaactcgcctctccttctagtgcttcgttttgtcctcatcacaagtatttaccaagtaaactcttatgaagaactaagttgttcagtttatttccacattaaatttattccctgatcgattttcacactggttctaatttatttcattgtttcaaaagctaagcaccgaggcagcagcaggaacaagaatcagcgcccaatgcatcgccctggatggccgggcctcagcttccacagcagcgccctcctggcaccctggcaaggcagcagacaggggcatcctgccatcaaatctgggatcttgggaatccccagcatcaccagcaacagcatccttgtcttcaggatttgtatagcgcaacacacgcacctgtggtcccagctacttgggaagctgaggtgggagaatcatttgagcccagggggtcgaggctgaggtgagccaagatcacaccactgcactcagcctgggtgacagagtaagaccctgtctcaaaaaaacaacaaaaaaaagattatattgtttcaaaattaaagtaataaaaacaaatccataaaagtattctgtattctgaattggggaaaacaaacaaacaaaaaaaacagttcaaaataaaagccaagcagtttttaaatctccctacttttctcgcaggctgtaatgtctcccctctttccagtgtggctgggtctgactatcaggagatagagaccgaggggtctcctgcagggactgaggcctctacttctgcctactgcgccttcagctcacacatcatgaaagcctacttttttttttttttttgagacggagtctcgctctgtcgcccaggctggagtgcagtggcgcgatctcggctcacagcaagctccacctcccaggttcacgccattctcctgcctcagcctcccgagtagctgggactacaggcgcccgccaccacgcccagctaattttttgtatttttagtaaagacggggtttcaccatgttagccaggatggtctcgatctcctgacctcgtgatccacccgcctcggcctcccaaagtgctgggattacaggcgtgagccaccatgcccggccctgaaagtctacttttcttaatcacatcttccaacaggtgagtggactccccctaccagactgcatcttcatccctgtaaccctagagcggagcaccccgcagcgtccaccagcacttcagggctttctggaactggatggtgtcagatttcagttgctctacttgcaagggcaaaaaccctctgtctttctcagcgctctgggacctggtttccagctcacacctccacatccactctgctcctcccctgtgcccatgatggttccaggcacacaagctgctccttgtctaaaacagggcttggcaagcaagggcctgctgggccaaatccatacagcccgtcatggcctttttttgtccagcccacgggctaagaatgctttttatgtttctaaaaggttgtgaaaaacaacaaaagacaatatgcaacagagactctgacccacgagggctaagagatggtctatggcacgctgcagaaaagctggctgacccctgacctggaaaaagatgatccccagcccactttccagttcccacgctgcagctcccacaacctcaaccaggtgacaagctctctcacagcatgcttcacccacaactggcctcttcctgacaaaacacaatctcagtccttagcacttaaaagccactatattgaggccaggtgtggtggttcacacctgtaatcccagcactttgggatgccaaggcgggcagatcacttgaggccaggagttcgagaccagcttagccaacatggcaaaaccctgtctctactaaaaatacaaaagttagctgggcctggtggcacacacctataatctcagctacttgggagcctgaggcacgagaatcgcttgaacctgggaggtggaggtcgcagtgagccaagatcgcaccaccacactccagcctgggcgactgagtgacactctgtctcaaattaaaataaagccacatataaggacagaattattttacgctgatctctacaaaggaatacaattttcaagctgaaaagcaacctgagaaaccatgggatagggggtctaacctctatttagcaaggaaagcatgagcacgactggcttaaactcaaagtctgcaagtggcagagacagaactacaacatctcctgactctccacccagggctttgctacaaggatatggaatcccccagtacttattctgtgtggggctgccagacttagcaaataagaatatatgacgcccaggcctggcgcagtagatcacacctgtaatctcagcgctttgggaggccgaggcaggcagatcacttgaggtcaggagtttgagaccagcctggccaacatgatgaaaccttgtctctaataaaaataccaaaaaaaattagccaggcgtggtggtgggcacctgtagtcccagctactcaggaggctgaggcagaagaatggcgtgaacccgggaggcggagcttgtagtgagctgagatcgtgccactgcactccagcctgggcgacagagcaaggctctgtctcaaaaaaaaaaaaaatcaaaaaattttaaaaagaccacgcatggtggctcatgcctgtaatcccagcactctgggaggctaaagcgggcagatcacaaggtcaggagtttgagaccagcttggccagcatggtgaaaccccgtctactaaaaatacaaaaattagccaggcatggtggtgcgtgcctgtagtcccagctactcgggaggctaaggcaggagaatcgcttgaccccgggaggcagaggttgcagtgagccgagatcgtgccactgcactccagcctgggtgacaaagtgagactcgtctcaaaaaaaaaaattaaaaataaataaataaataaataaataaataaagcccagttacatttcaacttcagataaatgactaagtttctagtaaatactgacacaaaatgtgggatttacttataccggtatatacttataccggccacactccaggagctttaaaatcacacagacatcctaggggctttaaaaatgattcctagctgggcacggtggctcatgcctgtaatctcagcactttgggaggcccaggcaaaaggatcccgtgagctcaggagttcaagaccagcctggacaacacagggaaccctcatctctatgaaaataaataaataaataaataaataaattaggtgggcatggtggggtgcacctgtagtcccaattacttgtgaggatgaggtgggaggatcacttgagctcaggagttcgaggctgcagtgagctatggtgtaccactgcactgcagcccaggtgacagagtgagtccctgtctcaaaaaaataaaaatagccgggtgtggtggctcacacctgtaatcccagcactttgggaggccgaggcaggcagatcacgaggtcaggagatcaagaccctcctggctaacacggtgaaaacccgtctctactaaaaatacaaaaaaattagccgggtgtggtggcgggcgcctgtagtcccagctactcgggaggctgaggcaggagaatggcttgaacctggggggcggagcttgcagtgagccgagatcccgtcgctgcactctagcctgggcgacagagcaagactccatctcaaataaataaataaatttaaaaataaaaatacttcctgaggccaggtgtggtggctcacacctataatctcagcactttgggaggctgaggcgggtggatcacctgaggtcaggagttcaaaaccagcctggccaacatggtgaaacctcgtctctaccaaaaatacaaaaattacctgggtgtggtggcacatgcctgtaatctcggctacttgggaggctgaagcaggcaaatcacttgagcccaggaggcggaggttgcagtgatccgagatcaggccaccctactccagcctgggtaacagagtgaaactgtgtctcagaacaaaaaaaaaaaagccaggcgtggtggttcacgcctgtaatcccagcactttgggaggccaaggtgggcgaatcacgaggtcaggagttcaagaccagcctgggcaatgtggtgaaaccccatctctactaaaaatacaaaaattagctgggtgtggtggcacttccctgtaatcccagttacttgggaggctgaggcaggagaatcacttgaacccgagaggcagaggttgcagtgagccaagattgcaccattgcactccagcctgggcaacaagagtgaaactctatctcagaaaaaaaaaaaaaatgcttcctgaggaaaacacagagtccctttgagggactaggtagtttagtgctaaagacattgaacagggtttgagcagttcttattcccaatacatacaattttgttcttggctctttctctgtccagtttcaaaaattcaccaagggttaattcttcaaactgcttcttgacagaaaggaaagcgcaaccggacgaatgctttttatgttcctctctagaaaaatcaaaacaacagcggaaaggcagctgaagggattaaagcggcagtccactccccacgggccacctccccacgccctccacaggcacaccctgctctgcctcaggagtaagacgtcaagtctgaagttgatggcatcagtgctttgcccaagccacattcccatatggcacctcttagcaccttctctctccctgtggacatctccccccacatctgtgtggctaatgtatctattttatctggacttccttagcaattagttggaaaagtgttacatggtatatgtccaaaggaattacatgtcaaatccctccaacattctcaaggaactgtttgaagtaatttcatttcactggaattgttatgtaatccactgtaaagatttttttcttttttttttttttttgagacggagtctcattctgtcgcccaggctggagtgcagtggtgcaatctcggctcactgcaagctccgcctcctgggttcacgccattctcctgcctcagcctcccgagtagctgggactacaggcgcccaccaccacgcccggctaattttttgtatttttagtggagacggggtttcaccgtattagccaagatggtctcgatctcctgacctcgtgatccgcccgcctcggcctcccaaagtgctggtattacaggcgtaagccaccgtgcccggcccactgtaaggattaagggcagagaagggcattattgccccgggttccccaagggaccccctagctcacactctcattttctgctaggggagtctccctgtataactgactatcaccgttaccagaactgcattacaatgaaaacatggccacacaaagtccaaaaagacagccagttgtaactctaatctgaaaatatcataacacttattcattttcaagaagaataccactgatcttttcccagtgattacggggatgcagtataaccaccatagcaaacatactaagaaaaaaaacagctactctcttctggccaaaaagaaaaacaactggggtgattctccaggggaaaaaaattaaagctgtggaagcaactgaatccgacagaaaaaaaggtgagaaaagaatatggcattacagtgtggaaagacagataccatccgagtacagaatttcattgtcattaactaggcatcttgaagaaaaaaatccagaacaacactgaagtatatgctttctttcttttttttttttcaattttttatttttatgacggagtctcgctctgtcgccgaggctggagtgcattggcacaatctcggctcactgcaacctccgcctcccaggttcaagcgattctcctgccttagcctcccgagtagctgggattacgggcgtgcgctaccatgcccggctaatttttgtatttttagtagagacggggtttcgccaagttggccaggcaggtcttgaactcctgacctcaggtgatccgcccgcctcagcctccgaaagtgtgaagtgcacactttcaaagggtaatttttgtgctgtgtaggttatatttcaattaaactgttttttaaaaaatctcaaaaaaagcacttggacattcctgggagttcacaacaacagggtctgctgatgtattctgttgaacatgaaaggcatcaggcatcttacgtccaccccaaggcattttggtcaaatgagatttaattaggttgtaagcatcaccaaggcaccagcatatagagaggtatccgttcacaacagctgtttaagaagcaatgagggtggaaagcaaccctcccatactaagtgtctttgcaactcaaatcttttgacaactcagttcaaaacaaagcccatcgaggctggccagagaagacttacatggggtcgtcatctggctcccagccttccagctccttgaagcagaagaaacactgggccaagtctggctcgttctcagtggggcagtggatgaagccagcctcggccatctgcaagggacagcacagctcgtgagtggacgtggcagcccggaaccccgaggcccagccacaaaggcctcgatggggacaaagcagggaggggaggccggcctggacccaaggggcccagccacagtggcctcgctggggacaggacggggaggggagggcggcttgtacccccgaggcccagtcacagtggcctcgctagggacagggcaaggcgggcgtgggggaccccaggaggccgggcagtctcacccgctccggggtgcaggcgcagccctccaagaagggccagttcttgaatgtagagatgcggtggtccttgagaaagggctgccaggcagggggcaacgtcggggcacccat

SEQ ID NO: 149050 - DNA, 7979 bp, Homo sapiens
gaggatgcagagtgggagaccttaaaaccgtctgatctggctgctaaagcgagtgtctgacgaccacccattaacaccagcgagtagcgtttgctcacggctttaggataagaagcctggaatggtcccccctccgccgggagaagaaagccagacggtcatccttccacctggctggcagagctacctgtcgcctcagggccggcggtactatgtcaacacgaccaccaatgagaccacctgggaacgtcccagcagttctcctgggattccagccagccctggctctcacaggagctctctgcctccaacagtgaatggataccacgcatcagggaccccagcgcaccctccagagactgcccacatgagtgtccgaaaatccaccggtgattcccagaacctgggatcctcatcgccaagcaaaaagcagagcaaggaaaacaccatcacaataaactgtgtgacgttccctcacccagacacgatgccggaacagcagctgctgaaaccaaccgagtggagctactgcgactacttctgggctgataagaaggacccccaaggcaacggcacggtggctgggtttgaactactgctccagaaacagctgaagggcaaacaaatgcagaaggaaatgtcagaattcatccgggaaaggataaagattgaagaagactatgcgaagaacttagctaagctctctcagaactccttggcttcacaggaggaaggctccttgggagaggcgtgggcccaggtgaagaagagcctggcggacgaagcagaagttcacctcaagttctctgccaagcttcacagcgaggtggagaagcccctgatgaacttccgtgagaacttcaagaaagacatgaagaagtgcgaccaccacattgccgaccttcgcaagcagctcgccagccgctatgcctcggtggagaaggcccggaaagccctcacagagcggcagagagacctggagatgaagacccagcagctggagatcaagctgagcaacaagacagaggaggacatcaagaaggcgcggagaaagtccacacaggctggagacgacctcatgcgctgtgtggatctctacaaccaggcccagtccaaatggtttgaagagatggtgaccaccacattggagctagagcggctggaggtggagagggtagagatgatccggcagcacctgtgccagtacacgcagctgcggcatgaaacagacatgttcaaccaaagcacagtcgagcccgtggatcagctgcttcgaaaagtggacccggccaaagacagggagctgtgggtcagagagcacaagacgggcaacatccgccctgtggacatggagatctagatgggcctgtgcagcttcggggggtcctgctggggaggggggctgggctcccaccatggggcccatgccgagtggatgccccccaccctctctcctgggccactgaggagaggggagagagctggtgattccagaagggtgacccggacagcctagctgggggctcccccatattcccaggcccagaagacagacccacagccctgcccttgtctctgaggctgaagaccccctgactcccatgctgtgcttgccgctctgaaacaaacagaggctggaactttgtggtccttgccgagttttgtaggggtcactgtcacatgcttgtgccctggaagccccaaggctcttcctccagctggctcccttgtctccagggctttggaggatcagggtagggagggctctgtctctaagccaggtgtcaggatcagaatcatgggtagaaggtgccattcagctcacagccgcacccagaatcctttgcagccctccttctttatttttttcccattgcattctgggagtccacatctggctttctcagccactgttcatcaccaggggttttaggaggaaggcttggctcctgtcttcccagacccaccatgcctggagaggtcaggatggaactacctcattcggcaaattagccccaaattgagcgctgaatcgtgtcccatgagatcaggcgccatctgtaaagtctcctctggaaatgccaatccatccttcccccagctgcttcctcggggaggcccctgcccccaccctgccagcccttcccagtctcattagaggaagctttccaaagttctcagttatcaagacctcatccagctcgtccaaaggcttcagggatggaaacaaaccagctcgtctcagaggccagcaagctggggcctgtccgccacggtgccctgtgcacctttgggctgccctggcccccactctcccgggccgcccaccacaggctcttaatggggccgggtcagtcctacatgtgagatgggttagggcaagtctttgccatcccccagatggctctgtcttcttgtgtatggcagggctgggactgctgtcccttgtacagttttctgtcactggtgggcactggacaggcatagcagactctcttgtggccacactaggttgtcgcctttcaggcagtgtcccgccacctttgcttcccgctccttctggacattccagagccctgcaccaaacccttacttggtgtctgcacctcctttccctctctccatcttccaatccctggaaaagtctggtctgagtgtgacttgggaagctttcagtgctgctgtttggcccagctcattactttctccctttctctaccacagcaaacacattctccaccatgtcagtctaaagagtctaaaggggccgggagaagcatgagcgaggggcagattctagtcgggagcccatgccctggaaatccatctttcttcatctttcccattgaccactttgggtttgacctgcacatctgcagtgagggcagaattcaacaagcacaactcactggtctttcagtcaacgtgctagaaaccgatgacttattaatctctaattttttggcgcctctttcattgaatgagaattgctttcgtatagttcacattagaaaaatgcctaatatactaaagtaaaccaaacgttgtcacttttctcttgttcttgaaacattgcaaccaaaaaggtcagcacaaaggccttcacctacgtgaagacctcctggtaggatctgtccatgggatggagaaccactctgtccagatctggggttgggtcatgacaccagctaccaattttagaatattatttcttggtttctttatgaaaaatgggtgctagtggtaattgctttgtggcttagtaaactactctgtggatgatttccaaacattcaaagccaatagccttgttattaacaagatattttgagtacaatatggctcattgacttttccattacatctgaggattccagagtcctctgttcatccctgggatagagtgagccctcttgcgtcttccagggtagctcaggttggcccagtttgggccagtccatttttggaggtcactctttcccccctcatcccctcacctccttctctttacccccttcacgtacttcctttctttcttccctctgttattcattcatcaagcaggttaaagccattgtgctaagatctaatctgaggacactataatggccctgtcgtcagggaagcccgtgatcgctcgttttcaggggtcttaccggtcagcaaccttggcattgatacataggcactctacagaatttaagttttcagaggtaagtctgttgttctgattaatctgcattcattcagcgaatgctcaagacaagccaggcatgctgagaagcggcgctctagttgtatgtaagatgggcattcctctgctctcctctattctccatgtcgactgagaagagtataataagaacattgtaccctctccacacttaaccctctgggattctttattataatataaaccaccgtcgtgaggcatttacctgttggatggaaggtagacagcaacaagattttaatcacctggtcaccagaccctcacggcccatatccaattcgaatttcagaaatttctctgtttgctttaaataactctttacaaataagggtcgggcacggtggctcacgcctgtaatcccagctctttgggaggccgaggtgggcagatcacgaggtcaggagatcgagaccatcctggctaacatggtgaaaccccgtctctgctaaaaatacaaaaaattagccagatgtggtggtgcacacctgtagtcccaactattcggcaggctgaggcagtagaatcgcttgaacctgggaggcggagattgcagtgaaccaagatcgggccactgcactccagcttgggtgacagagcaagactccatctcaaaaaaattataaataactctttgcaaataggaaagtgaagctcaagggtaaccagtgaggctatgaaattgccagtgaattaagaccagggctagagtcaacagtccagaacccctatccgtatgaacaggggcccgtttctggttgaaatcaaggttaggatgcaactgagaaaataaaagactgcactttggagaggcaagcacgctatccgggttgttgttttgttttatgtcttggtgcttaggtgaggacttagctgggtttattcaaagtgggcgggtctgggctattcttgagaatgtcccttccatttctgagaacaagtcagccccttctacctgcctccacccaggagactgatgcacaagatctgtttgtgaaagcctgatttaaaaagaaaaaaaaaattccttaagccaaatggtgttccaagttggttgctgtgacaacctccaggaagagccacttgttaccctctattctttctagtgctttcagtcagtggcaacacataggccccttggaccgtggggatggcggccctgagattctgtcagtgggaccaccctgggcctcctttctacctccactcagcaccctgttggccaaggagaatttctgcggtgggaggcagtgctctgctagtcaggattgataaacagctgggcacaccgaaacagtgtaccaacgaattcaccaaccaggggtttctttccctaccctttgtgaaaaccaatcaattactagatgagtggatggatgcagaaaaatctgggctgagccaaagtcccttttggaaatacaagccataacattcgaaggacatcagcgaccttggcttgtttaggtgattttacttccagctgcaggtagtcttgacaaggagtgtttaaacagaaggctcaagatgcattccttgtgtaggtcggagagagcacttctaatgttaagtggggtacagatcagctgcccccccacgtagcctggacatcgtcttatccccataatccttgccatccctacaaggcccatcgccaccaccttttcccaggtttattgaggtatgattgacatccagtaaaattcaccctttggaaatatacagctctgtgaattttgacaaatttagtgtcttgtgaccatcaccaagatcaacctgtttttaaccctccaaaaaattcccttctcctgccctctttccctggcaaccctgattgattatctgatcctataattttgccttttctagaatgtcatataaatggagtcacactgatgtcgccttttgagtctggcatctttccctcagcttaatgcttttgagtcattcatgatgtgtgcgtgtggtttgttccttctccttgccgggaagtatttcattgcatgggcgtactactctgcttctttatttttacactgagcctttcgccctggaagttcttggcccagggtcttcaacttgtttgcacgaccacttccagcttgctgcttccttcagttccccaggctcctcctccaaatgccagctgtgcccacaagctgttcttagggctcacactcgccttttggcgcgtggtgggtttttggtagtgcagaaagaatccagggatgggaggggaagggacggatgggtgctcaattgctgctcacgtctgctgcaacctgaagcttgcatctcagccagcagatctgctcccttctgggacccaggcttcagtgtcacacggtccttggctatgtattgggcgttggaggctttgaaaggcgagcagaagcagcatggacaagaaggctggggctggccctggggctcatcatgatgctttcctggatctgttgcttcatctgcaagctgagggtgtttgttctagatgagtgtctcaggccaccggcaactgcatgtacctcctccctttctcatttccaatgatgtaccctgtacacgtgttcatgctgtgtctggctctcatctgcacaatcgtgcatagaattgcctcaagtcctggtgagagagatgccgtggtacttttccatttagattcaaatggagctaaaattaagagttttatgagctgttaagaatgaggtagtttctcctaggaccccccaaagacagtgcaagtaatgaccgtttggatctcattcgtcgatctttgatagtatgttctggagtctactccccaggagccaggacaggcgtgaagatggagtccttgtcgcagctggagccttgcctagctggtgatcacacagcctggcctgtacctgcaccccactggatggtggtacatggtggcagggacaggaccacacccagttaaggccagaccaggctgagtgtgacccctgaggtaaacactccactaagctgtgtcttgttcatgccccctgctcagtgaaaggtgagtcccgagaccagttgggtacctctctatgcgaaccagagacatttctggatccaggccaggtgaagattagggccaggaagcctgagcccccggggcctcaaggtagggagccgaagaggctgccaggactctgctgggttgaaatttgccggggaggactcttgtctccccctcaggagtatttttgttgaggctttcctggaggtgaagaagcaattcccattgcagcaggttagagcgagaatcagacagagggcaaaaaccaattcgcttctccccacgttctaaatgctggggcatggctgtcaggagggcttcctgggaggtgtctctgggggtggggtgaggttggggcgatggcctttggagattgcgtgtggtgttcaggactgttccttggtgtttgagggaaactttagtgggattgcagtggaatgtaaggtcagggcacgtgggtgctctctcggggtggggtgactgggagacctagagggaaagcctgctatgcagggggagagcacaggactggccctgctctgcggcctcctttgtcccataacctgaagttaagtcacatcccctgtcgggacctccgtgcactcatctgtcaagtgggggcgcttcccttccagcatcacctgcagcagacgggctctcgggagtcgtgggttccaggcagctgtgtggacccagggacagacattcaaagggacgccagccatccttagtgacaggggccccaacttagcatcccttcccttccgttaggaaggagatgaccggaagcaaccccttcacagacacgagcacatcggcaaaccctatgaaagtggaattttctaacaaaataaacttgcttgtttgatctgttttctgtaacttttgctaaatactttatacatttttcatgttaaagagccgtgtctcccgccagcactcctcaccccggtatgaatgtgtttcctccacattgtatatccttccaccctctggctgcctagatcagtaaataaaattgatgtaatataatttataagtaacactgttgaaaccctgatcccagtggaggctgtaacccacctgcccccgcaccacccccctgacccctgttaccgcatttgtgtgtattaatgctgaagaattaaatgtttaaagagtttaaattttgaaggcgtttgctatatacagttgtcctgcattattataaagagttttcaggaagtt

SEQ ID NO: 149051 - DNA, 829 bp, Homo sapiens
caataatctacttattttggttacaaaccagagttaagactaactgttacataacacttggcctgacttccaagaaagctaatgttttgcttaagcaaatgaagtaatttaataagtactcgaaaatcttgctctaatttcatgtgggagggcagcttaatcttttttgccccatacttctgatggtgtttttgatgactacccaaaaatctaaccaaactcatttctgatctcttctacatgttgtgtaacttacgtgatgtcttatccttttaaatgccaacgaaactaagttgatttttgtccatcaaatatatctaatccattcactatgaaatgattgtagttcctgtgaatttaaacacttcttatacgctgatacatacaccttggtgtcttaaagacagatgagcccttggggatttctttactgtatatgattctgtagggactacatttggggagtggagacaatttcccaggatggcataccaactagaagcatattaccaaaagaagcaagtttttttcatagaaaaatatctccattcagggtcagctctggtttaactaaggcatctcacaaaacattgttctctaagagcactaaattccatcttgcatgccagttgagagtggtatgttagctgggacttgaaactgggtatgtgagctgagtaatggtatgaacttacatgttatttaaaacagctacacttcttctggctcacgcctgtaatcccagcactttgggaagcccaggtgggcggatcacgaggtcaagagatcgagaccatcctggccaacacggtgaaaccccgtctctact

SEQ ID NO: 149052 - DNA, 560 bp, Homo sapiens
aggccgatggctcaggatgatggggcacagccgccctttgaacaatcatgcttcagaaatctgcctgaccctagctgctgctgctgctcactttattcttgtatggctttggtaggcatacttggagaacatatcccacattaggaattgatttaagcctgagagtttgagggctttaatcctttaaaacttggagaagctggctgggcgcggtggctcacgcctgtaatcccagcactttgagagaccgaggcgggcggatcacgaggtcaggagatcgagaccatcctggctaacacggtgaaaccccatctctactaaaaatacaaaaaattagctgggcgtggtggcaggcgcctgtggtcccagctactcgggaggctgaggcaggagaatagtgtgaacccaggaggcggagcttgcagtgagccaagatagtgccactgcacttcagcctgggtgacagagtgagactctgtctcaaaaaaaaaaaaaaaaatcctggagaagccagaacaatatacaaacaagtatgtggaggcagatttgctttattccaa

SEQ ID NO: 149053 - DNA, 1627 bp, Homo sapiens
gccgactgaggcacgagcgggtgacgctgggcctgcagcgcggagcagaaagcagaacccgcagagtcctccctgctgctgtgtggacgacacgtgggcacaggcagaagtgggccctgtgaccagctgcactggtttcgtggaaggaagctccaggactggcgggatgggctcagcctgtatcaaagtcaccaaatactttctcttcctcttcaacttgatcttctttatcctgggcgcagtgatcctgggcttcggggtgtggatcctggccgacaagagcagtttcatctctgtcctgcaaacctcctccagctcgcttaggatgggggcctatgtcttcatcggcgtgggggcagtcactatgctcatgggcttcctgggctgcatcggcgccgtcaacgaggtccgctgcctgctggggctgtactttgctttcctgctcctgatcctcattgcccaggtgacggccggggccctcttctacttcaacatgggcaagctgaagcaggagatgggcggcatcgtgactgagctcattcgagactacaacagcagtcgcgaggacagcctgcaggatgcctgggactacgtgcaggctcaggtgaagtgctgcggctgggtcagcttctacaactggacagacaacgctgagctcatgaatcgccctgaggtcacctacccctgttcctgcgaagtcaagggggaagaggacaacagcctttctgtgaggaagggcttctgcgaggcccccggcaacaggacccagagtggcaaccaccctgaggactggcctgtgtaccaggagggctgcatggagaaggtgcaggcgtggctgcaggagaacctgggcatcatcctcggcgtgggcgtgggtgtggccatcatcgagctcctggggatggtcctgtccatctgcttgtgccggcacgtccattccgaagactacagcaaggtccccaagtactgaggcagctgctatccccatctccctgcctggcccccaacctcagggctcccaggggtctccctggctccctcctccagggcctgcctcccacttcactgcgaagaccctcttgcccaccctgactgaaagtagggggctttctggggcctagcgatctctcctggcctatccgctgccagccttgagccctggctgttctgtggttcctctgctccccgcccatcagggttctcttagcaactcagagaaaaatgctccccacagggtccctggcgcaggtgggctggacttctacctgccctcaagggtgtgtatattgtataggggcaactgtatgaaaaattggggaagagggggccgggcgcggtggctcacgcctgtaatcccagcactttgggaggccgaggcgggtggatcacgaggtcaggagatcgagaccatcctggctaacatggtgaaaccccgtctctactaaaaatacaaaaaaaatttagccaggcgcggtggcgggcccctgtagtcccagctacttgggaggctgaggcaggagaatggtgtgaacccgggagcggaggttgcagtgagctgagatcgtgctactgcactccagcctgggggacagaaagagactccgtctcaaaaaaaaaaaaaaaaaaa

SEQ ID NO: 149054 - DNA, 27844 bp, Homo sapiens
  misc_feature (1)...(27844): n = a,t,c or g
gcaccgcgcgagcttggctgcttctggggcctgtgtggccctgtgtgtcggaaagatggagcaagaagccgagcccgaggggcggccgcgacccctctgaccgagatcctgctgctttcgcagccaggagcaccgtccctccccggattagtgcgtacgagcgcccagtgccctggcccggagagtggaatgatccccgaggcccagggcgtcgtgcttccgcagtagtcagtccccgtgaaggaaactggggagtcttgagggacccccgactccaagcgcgaaaaccccggatggtgaggagcaggcaaatgtgcaataccaacatgtctgtacctactgatggtgctgtaaccacctcacagattccagcttcggaacaagagaccctggttagaccaaagccattgcttttgaagttattaaagtctgttggtgcacaaaaagacacttatactatgaaagaggttcttttttatcttggccagtatattatgactaaacgattatatgatgagaagcaacaacatattgtatattgttcaaatgatcttctaggagatttgtttggcgtgccaagcttctctgtgaaagagcacaggaaaatatataccatgatctacaggaacttggtagtagtcaatcagcaggaatcatcggactcaggtacatctgtgagtgagaacaggtgtcaccttgaaggtgggagtgatcaaaaggaccttgtacaagagcttcaggaagagaaaccttcatcttcacatttggtttctagaccatctacctcatctagaaggagagcaattagtgagacagaagaaaattcagatgaattatctggtgaacgacaaagaaaacgccacaaatctgatagtatttccctttcctttgatgaaagcctggctctgtgtgtaataagggagatatgttgtgaaagaagcagtagcagtgaatctacagggacgccatcgaatccggatcttgatgctggtgtaagtgaacattcaggtgattggttggatcaggattcagtttcagatcagtttagtgtagaatttgaagttgaatctctcgactcagaagattatagccttagtgaagaaggacaagaactctcagatgaagatgatgaggtatatcaagttactgtgtatcaggcaggggagagtgatacagattcatttgaagaagatcctgaaatttccttagctgactattggaaatgcacttcatgcaatgaaatgaatcccccccttccatcacattgcaacagatgttgggcccttcgtgagaattggcttcctgaagataaagggaaagataaaggggaaatctctgagaaagccaaactggaaaactcaacacaagctgaagagggctttgatgttcctgattgtaaaaaaactatagtgaatgattccagagagtcatgtgttgaggaaaatgatgataaaattacacaagcttcacaatcacaagaaagtgaagactattctcagccatcaacttctagtagcattatttatagcagccaagaagatgtgaaagagtttgaaagggaagaaacccaagacaaagaagagagtgtggaatctagtttgccccttaatgccattgaaccttgtgtgatttgtcaaggtcgacctaaaaatggttgcattgtccatggcaaaacaggacatcttatggcctgctttacatgtgcaaagaagctaaagaaaaggaataagccctgcccagtatgtagacaaccaattcaaatgattgtgctaacttatttcccctagttgacctgtctataagagaattatatatttctaactatataaccctaggaatttagacaacctgaaatttattcacatatatcaaagtgagaaaatgcctcaattcacatagatttcttctctttagtataattgacctactttggtagtggaatagtgaatacttactataatttgacttgaatatgtagctcatcctttacaccaactcctaattttaaataatttctactctgtcttaaatgagaagtacttggttttttttttcttaaatatgtatatgacatttaaatgtaacttattattttttttgagaccgagtcttgctctgttacccaggctggagtgctgtggcatgatcttggctcactgcaagctctgccctccccgggttcgcaccattctcctgcctcagcctcccgaggagctgggactacagacacctgccaccacacctggccaattttttgtatttttagtagagacggggtttcaccatgttgggccaggatggtctccatctcctgacctcgtgatctgcccgcctcggcctcccaaagtgctgggattacaggcgtgagccaccgtgcccagccctgccacatcttttttgttagttgcagtagcaatacaaccttatctagaaaagctggccaaaaaagaaaataccatgataatagggtacctaatttattgctttatttaagaaaaatgtaatatttcattcgaataagtacttttgggctgggatgatatttcatttagctacttggcatgccacccatcttagggaattatatgagggtttatactttaaataacataaaaagcaaaacatgctgaatgtaataatttgagagaagtgtaaataataaaaatctgtcatctaccacctggactagtaatatattgtttgttttcttaactatacactcacccctgcactcatctccattttatcgtggaagtcaggtatattccaagagttggctttatggtactgagtaacttgccattagctgccatgctgggagctggactaaaatttttcctcttgtgtggaatccaatattaagagttcgggtctccccggccctctcccagtttcatcttgtcacccttgagctgatctcatttcatgtgtcttgtatggccctgctgggtggcactggtaagtgtatgaacatagacttgataccaacctctgtctctactactgaattgatcacatgatttttctttctcagttttatttttaaagactcctgatccatcttaccatatgactgcttttgaaatagttccatgatgtagattagtaaatatcgatagttcttaagttttattataacctagtaagtttacaaagtctcctggcttaaggtcgggagtagatatcagatctggcaaaagcagcttagatgtgataggctgattgcactagattgaacttggtgctgtttctcttaggttttaacaggacacatcaggactgagcaaccaagtaagtccaagttattacaattcatgttgtttttttctcctaaaacagtaaatatttcggcctttgtggaccataggtctgtctcaactactgaattctgccattgtagtgagaaagcacccacagacgatttgtaaacaaatgggcatagtattttttttaaaaaaaaaaaaacctaaaacattaaaaaaattttaaacttgttggccgtacaaacaggcagtggggtggggtttggcctgtaggttgtagttctctgccctgctcatgtctatttcccaaaacattttttaaaccatacaggcgtttaaaaacaaaatctacaatctgtacaacctcattttaagtgactaagctttttcagtgtatgccaatacatgcataaaacaggtagttctgtctagtagtgttctgcctttttcaatcactattgaaaggactccctgtggcagcacatagctctttggtaaccacaaagtatccagtaaatagattgccatgacttaatcacatttgaatattaaattggtaccagtttcataaatcctacaacacacatatttgaccatagcttggttgtgcaacttgtccatttgttgactagactcccaggagtggaactgttgggtgaaagggtatgtatgcagctgtgataaaatactactcagtagctctccgacaggctgtatcagtttccactcagatccttacgcaaatgtcatttctaatgactgtaatattacaccatatggatatattgcaagttaaccattacaaatcctttgctgctgagcattttattttaatggcttttcactctagtgccttgtcttggtatatgtctttgtccacattcccgtagatacgttgaattcctagtatatttacttcgtcaataggcatgtttcttaaggttgataaataatgatggccaaatgaaagtacttcactaacatgaatttgaggaaaagttgagaaaagcaggaaaatttacttccattgtctgatactgattagcatcaggagagtgggagtctacatattgggagatgtttgtcaaatgttacaaaaatgcattaagagtaataccgggttatcagaatttgctgaaatcatatcaaggtggaagaattagagaatagttccctggctagaagacgttgaacctttgagtgtttaggtctttgctataatgtcttgcttgctaagataggccttaatggccctctcatcgtactgctagaatttagccagtggcaccagtcaggaaggtattaaagtagcaccagcgatagattacttttcatcctgacttttgtcctagagctccataaaatgtgcatttggtgggggaaatcacgtctacaaataaaattgtattgcttttgaagatggtataagtctatagataaaaaagctgtaaaaccttgaaaaatactgaaggatgtaaaaacaccaagataggccaggtgcggtggctcacgcttgtaatcccaacactttgggaggccaaggcaggaagatcacttgaggtcaggagatcgagaccatcctggctaacacggtgaaaccctgtctctactaaaaatatttttttaaaaattagctgggcgtggtggcacgcgcctggtagtcccagctactcaggaggctgagggcaggaggcacagaagaatggcgtgaaccccaggaggcgcaggcttgcactgaaccgagatcgcgccactggcactccagcctgggtgacagaagccgagctccatctcaaaaaaacaaacaaaaaagccaaaactacaccaagataaatcacttatctctaccccactagaatataagctctttgagattagaaaattgttttgtgctcttatcacaaatactaggcataaagaagatgcttattattgaacagcaaatgcttaaaaagacctgcaggccagacgaggtggctcatgccaatcatcctagcactttgagaaggctgaggctggaggactgcttaagcctaggagtttgagaccagcctgggcaacacagcaagaccccatctctaccaaaaaaaaaaaaaaaattaaaagagtcctatagagaattcttatactccaatgtgaagacaacattggaaagggccaagtttctcatgccctccaactaagaaacccctaataaaaaatgaagtgacacttgaacaggacttaaggattctacagttggtctttggcagcagtatgttttaggaaatgtaatggcggcgggtggggcggtgacttagccagttatgcttttaaatggaactgcaataataaaagtgatactagtgcagaaagtatctgtattagaattctagagtaagtcaagagctcacattcattaaaataatgacacaactccacgggggtggggagaacagcagtaaagcaaccacatactatactattagactggcaacattgagactgaaaatatccatgaggagaatactgacatcttagtggtaagcatttccttttaacccggtaattccagtagtaaggatcatacaaatgtaccgctaggaagaggtaacgtatatgatcatcaatgggagaacagtaaaggtgttactgtggaattcccgacaggctttcacttggagggggaatatttgaacacaagtttaaacaacccagggtaagcacacaatgcactatgcactgaaaggtatacgtttccgctgggtgtttatacatttcaaagttaaaagcatacaccttacccaaagtttcagaaacctggtttgcaaatctgagttcatgtgtgtgtgtttttgtttttttttttaaagccatgatcattttttccatttttatttgatgtttccaaatataaaaaagtcaggattcttacatcaattatctcaaatgagaccatgcaaagcaattcagtgtatacaacaatcatttttccccttcagttctgctgctttatacaacagtgtgattgacagaaaattggatggcatgtgcctggtcagaaaatgtcatctgttacaaaataacatcatgcagcacagtttctactttgtctgcaagtcaattcacaaaaactacttattttctgttttttatttgggaggcacatggaactgaaaaatttagctgcccaattttattcaactaccccaccaaaaaaaaaaaaaaaaatcacaaatgacagtcccaacactctgcaaattttggagggttgagatagtagacactatttgtcatactcagcagagttaactatttaacagaaataaatctccctagggcctttcctctcattttgctagactgggttccaggagaatcgtgaagaacccctcatgtaaaatttgaagtgtgaaaactgtgttgttgcattatgcagatttttgctagttgcatagactaaagacgttttgctaaatggcactgaaaatccttaccgagtgtcactattcagtccaagtgtttctgaccaaagaaaattatacaacaatatttataggctaactttaaagagatggttgacgttaatactgtacatattttacatgtcaaatacatagtccaagagtttataaaataaattcatgcatcattaccttattacctctaagaatatcatgtacaagatgggcactcccccacccccccagtacttatgacagcatttcaggtggaagcagtcttatatacaaaaacaatccagtttctctgctatgttaagtatataatttaaggaaatttcagagattactgaccaaaaaaatcttagtccattgaagatagaaagtgtcaatttgtgggatttaaaatgtttcctttataaaagaacacccagaatatgtaacctctgtacaaagaaaaaaatataaaaattctggatgatcatgtttgatcacactacgtacttgaaatgttgctggttaaaagtttttctgctttactcattcctttgacagcattaatttgtgaacatttatattcagttcagctgtatttatggcacaagatctcatttccaaaatggcactaattttccttaagtgtaacagcactctatttttagcagtaattatatttttaaaggttaatttgtagaacaaatgttttaactatactttttttctactctatactccccagttacaatatttacaaagggctgaagtctatataaaaaaatgatctttggctgggcatggtggctcatgcctgtaatcccagcactttgggaggtcgaggcaggcggatcacctgcggtcaggagttcaagaccagcctggccaacatggtgaaaccccgtctctactaaaaatacaaaaaatttaggtgggcgtggtggtatacgcctgtaatcccaactactcgggaggctgaggcaggagaatcgcctgaacccgggaggcggaggttgcagtgagccgagtttctgccactgcactccagcctggggaaagagtgtgaccgtctcaaaaaaaaaaaattatatatatataaatatgtgtgtgtatatatgtatattatatatgtatgtattatatgtatgtatattatatatatatagtacacaaggttataagtggtgcacccgaagaggagggcacttaccatgaatggagcttgctgagctggaagttgccctggttgagtcggtgactgaatgtgaaggcctcagacattacactactggagactttataatctgtacacctaggctacactaaatttataaaaatatatttttcttcagaataaatcaaccttagcttactgtaactttataaactttttacttcgactgttgtaataatacttagcttaaaacaaacacattatttagctgtacgtaaatattttctctgcttatctccttatttataagttttctattttaaaattttttaatttttttcttaaaaaatttttttttgttaactaagacacaaacacagcacacacagtagccttgacctacacagggtcaggatcatcaagacatcactaggagataggaatttttcagctctgttataatcttatgggggccaccatcacatacgcagtctgtacttgcaaaacattatgtggcatgtgactgtaattgtagacctaaaatccatttcctacctgccctaatttcggtctttattttaaacccttgtttcatttattcttggggaaaattcccaaatcctgtgtttgtttttttagtaattattttgccaaagaaacataagaagaaaaaggagcggaagtcattgccagaagaagatgtagccgtgagtagtaatgtgtttgacttcactttgactaaaaagaaagtttacttaaataacaaactaaaggaaagaagtgtttttaaaggtttccaaggaatgggccagcattggtagtcattgtgtagattcgaaaaagcactgaaatgacacagccccagacagtccaagtgtccttcaggcatagcttactaaatggtgctggccttaccaactgctgtctctgaatttgtcttccttatgccacccacagacccgccatccccctttctctttaaatgtttggacccatcttagtgacatttcacttcccctctgtactcctggttcatttcttctctctctttcccttggaggtcccagtgaaaaggcataggaagccttgttttctgtttaaaaggcatacatttccatggcagtaatggaattgttcaaaatcgggtgggaagtttaataggttatatttctgtcctgtcgaaggaaatacaacacgctgaagaatttcttatcaaacctgaatccaaagttgctaagttggacacgtctcagtggccccttttgctaaaggtatgtggttaaaatcgtgcatcagatgaatgcctgcttttacgttatttccaagtgttaaacaattgattgagaatgcttactgctggcatccttgactttgggaagtgcccactgatacagtttaaagcaggattccttaaggtatctgaaatgagaaccaagtttttaaaaaattggcagtgcactcaacactgttgtagaacacatgtccccacaatgttaaattgctgagtttgtcaacagttctcagtttttgtacttagtccatcttgcagacctatgccagtttgtgggccacatagtggtactgactctttttttacatgtgctcacgacatggtattttgttttgtgttgtgtcgttgctttgtagaattttgataagctgaatgtaaggacaacacactatacacctcttgcatgtggttaaaatcctctgaagagagagattggggactatatcaggtaagtgttgggaggaggcactgtgcaaacttactttcttttgaaaatgctttcacatcagctattcaggaaggcagtggcatgccagaatagctttgtcttgaatatataacctgtacccgcagtgaattatttttctttttaacttttcagatttgttgtttcactggagcattaagagtgggtgatacattaattttttttttttccattccaggacaggtttcattaatcttgacaagccctctaacccctcttcccatgaggtggtagcctggattcgacggatacttcgggtggagaagacagggcacagtggtactctggatcccaaggtgactggttgtttaatcgtgtgcatagaacgagccactcgcttggtgaagtcacaacagagtgcaggtatgtgggagagggagggaaggactggctagagtgaaaagctttctgtatttcccttctatgttttgtctgctggaaactatttcttcattaagaaaaaaaaaaatcctaaagcaaggatattgttttggtttctgtgtacgttctgtcccctgccagatcttggtggtccgcgctttttggaattccacatactaagcatgtattcatcaagctgactggatccatttgtccgggttcagctctcagcttgtcactccaggcttctcactctgtgctaccgcttctgcctaaagtatccttcgttcatttttatctgagaaaagcctgcttatcttgcaaggctttttccacgcagcttctacactgagtactcccaactgtccctgttagtacattgaattcccagtgagaaagtgtcttcattctttcccacatcatcaccatgaaatctctcttaatgcaaattttatagaaacacaaggtcaaactgccgcttttcctgctgtgcaaaatgggagtgactgagcatataagaaatatggaaaacagaaaactcagtggccacacctgactactcttttgtcatttttcaggcaaagagtatgtggggattgtccggctgcacaatgctattgaaggggggacccagctttctagggtaagtctgcaattgtagggaggacaccctttgttgacttggatctctgagcccctaaacatctggagatgggttagctgtcctgactgactccttttgtccccttttcagtcggctgctgcagccagcctggaccagtgactgcacatgtacattctgatgaggtgtttgttttcatttgtgtttgttcttaggccctagaaactctgacaggtgccttattccagcgacccccacttattgctgcagtaaagaggcagctccgagtgaggaccatctacgagagcaaaatgattgaatacgatcctgaaagaagattaggtgagtcattaggcctgtgagtgggtatgaacacattcttcaggattctgttctcttattaaaagtagatgcccttgaagttgaagactttctaaaacctgccctacagctgggatattgtctgtgggcgatagtttttgttatcttttgttgaaaaagtgaacagtgcctagtaaagtgagatggcttttacaccttttatgatgactgcttctgctggagttgaaatgttttcattctgcatttgtgtagttcggtgctttgttcaaaggtaagtgttttcaccaaagtatgttttgcatgtgttttttatttgctgcaattttgactgcttagaagtttctgttgtcagaagtaaatttaagacaatgccaattttcctcccatccatgaaacataccatgctgaatatacctgcaacttaagtgttaaaaattctgctaatatcagaattacagatctttttttttttttttttttttttgagacggagtctcgctctgtcgcccaggctggagtgcggtggcatgatctcggctcactgcaaactctgtctcccgggttcacaccattttcctgcctcagcctcccaagtagctgggactataggcgcccgccatcatgcccggctaattttttgtacatttagtagagacggggtttcaccatgttagccaggatggtcttgacctcctgacgtcgtgatccacccgcctctgcctcccaaagtgctggaattacaggcgtgagccaccgtgcctggccagaattacagatctttacagcaaatgcttatattttaagaagtgtgtctgtcacctctagtcttggtggctcagatgaaggataactgcatttctcaaccagtgatgtatttacagtaggtgctgcttttcttttgtgtgtgtgtatcttaggaatcttttgggtgagttgtgaggctgacacctacagtcggacattatgtgtgcaccttggtttgttattgggagttggtggtcagatgcaggagcttcggagggttcgttctggagtcatgagtgaaaaggtatgtgttacggggctagaagttttagagctggttcttaccatctgccagcctttgatggcactccacttgcttcatgtcgtgggaaagatgctttccaaagtgttgagttcagtccagggcagcttccctgttctgttaattaaactttgggacattaaaatgggctaagggagatgattgggtagaaagtattattctattcatttgcctcccagcctacaaaaatgcctgcttggggtctaatacttcaacggttaaagatgcctggaagagggcgcggtggctcacagctgtaatcccagcactttgggaggccaaggcaggttggtctcttgagtccaggagtttgagaccaccctggctaacacggtgaaaccccgtctctactaaaaaaatacaaaaaaaattagctgggcatggtggtggcaggcgcctgtagtccctcccagctactcactcaggaggctgaggcaggagaatgggtgttgaacccgagacgtggaggttgcagtgaagtgagccgagattgcgccattgcagtccgcagtccggcctgggccacggccacagagcgagactccgtctcaaaaaaaaaaaaaaaaaaaaaaaaagatgcctggaagagccaggactgaagaggctgaaaacataatgagcttggactagtaaacaagtgacattcagttttaggaagtttggggtctgatgggctgagatacaaataaactgaattattttcatacatggctgcttttcaggaccacatggtgacaatgcatgatgtgcttgatgctcagtggctgtatgataaccacaaggatgagagttacctacggcgagttgtttaccctttggaaaagctgttgacatctcataaacggctggttatgaaagacagtgcagtaagttccgggttaggagtttatatttggaaagaacgtactccaaagatgacgcttgctctttttattgttttccttgggttttattttatttttttcaagtccaaaccaagtatattaatttaaagtaaaagtttaatggtaggcatacttaaaaataaggcacattaggccaggcacagtggctgatgcctataatcctagcactttggcaggctgaggcaagaggatcacttgagtccaggaaggagtttgagaccagcttgagcccaggagatcaaggctgtgagctgtgtttttatgatgatcagagagttggccttttataaattaaaacattgtctttttctctaacttgagggataaaaatttctggatatttaaaatgtttgtagttggtaattatttatattcaaatcttgtatagatgttcacattttttgtatgtgtataggctgtaataaatactgaaagatggcaccataatagttgaaaaaactcagtcacaaaacagtggacaacataaatgtgatgtcctctccttatcaaaccattggcttctgggtgaatgtaaagggaggggagaatgtgatcaaaagaggtctaggtgagtggagatggtatgaggcagatgggtgcattgggtaccattgaacctctggagaggtagccttaacttgtacccactgacctataaattctgcaccaagacttttgtgtgattggttcaacagggctcagtaatcttgttctcaagttctttaagagcctgttattgcctggatctccagtaaatctgttctttctcctcataaggaggagagaggagtaattaaggaatgccaaggctatttttatgtttcaaatgaaaatatggaccacgtgcggtggctcacacccataatcccagcgctttgggaggccgggccaggcaaattgcttgagctcaggagtttgagaccagcctgggcaatatggtgaaaccctgtctctattaaaaatacaaaaattagctgggcgtggtggcacgtgcctgtaatcccagctccttgggagactgagaatcacttgaacttgggagatggaggttgcagtgagccgagaatgtgccactgcactccaccctggacaacagagggaggttctgcctgaaaattaaaaaaaaaaaaaaaaaaaagaaaatacttgtgagtctctagaacctgaaaacctgaaagtcttctttactacttttgagtcgtgtgtaatgtgcggagagtggtacctatagcacagtgaggtggctcttctgagtaccactcatgccccttgcagctagtgggctataagtgtcatccctgtttcctggtgtcaggccccactcccttgttgtcctcctttactctggtgtgggagtggggtggagggcagcagctgggccccttacacttggtgccatctctgcaggtaaatgccatctgctatggggccaagattatgcttccaggtgttattcgatatgaggacggcattgaggtcaatcaggagattgtggttatcaccaccaaaggagaagcaatctgcatgggtnagaggggatgtttatttcccaaattctaaatgtttgtggttacatactaggtgtatatatttatggggttcatgagatgttttgatacaggcatgcaatacataataatcacatcatggagaatggggcatccatcttaagcatttatcctttgtgttacaaacaatcctattttactgttagttatttatcaccttagttattttaaaatatacacttaagttattattgattatagtcaccccgttgtgctattaaatagtctcactcttcttgttcattcttttggttttttggtggtggtgttttttttttttttttttttttgagacggagtttcactcttgctcgcccaggctggagtgcagtggcgcaatctcggctcactgcaacctcacccctcccgggttcacgccattctcctgcctcagcctcccgagtagctgggattacgggcgcccgccaccacgcccggctaattttttgtatttttagtagagacagggtttctccatgttaggcaggctggtctcgaactcccgatctcaggtgatcctcccgcctcagcctcccaaagtggtgctgggattacaggcgtgaagctgtgccctgccgctagtcttctattttaagtatttagtggtaggtcccgggccggcagaatctattttcagcatttaccacgtgtggcgcgcaaaccacaggttttggcgattgggttgcgcgggatctcagagctgacgaccgcgggggcctgggggtcccggtttccgactggagccgcgacgaccccggcgacggcagcctggggctgcagccgagggccggggagctccccctccatatgtgcgcgcacattctccagacttgctcaaactaaccccccggagcagcgcacgggctgggactgatgatcaaatatttggtttccgagataacacaccccgatagcgctgtttcctgagccgctttcattctacttgtgtaacttgctgcgaaaacccgaaccaagtcaagacagcaaactcacgcccacgggcctgtgtcaacatggaaataatgatactgaagccccacgctgggcacctggggcgtggactgggggcgcgggggaagcgcagatccgccttcatgcttcccctcctcctgataaggtccctggagttcccgggagccattgtctgtacttaataataactaaatccaactagtgaaccaagcttcagcgaggcaaggggagggaggtttagatgccaaaattaccttcaaaaaagtttaaattatactaagcagccagttaagaaggaagcagcaatatatgacctgatttagaaccatctccaagatgtatgaggtggaaagaagcaaggtgcagatgagtgggctgcatgtgtgcttgtatatcatcgtgtcctcctggaggaagacaccaggaactggagagagattttactggaggggtatatggcgggggcatagctggggcttacggagtgggaggtggggtctgatttttcgtcgtctgcacttctgtatttgtgatttttttaaaacaatgtgtatttattaactataccaaaaaataaaggaaaattccaaatacatacatataaataatgaaccgcagagctctgtcgccctcctgaagcctggggttagccagggccctttctctggtgggggatttatagcatcttcccttctgttgggtaccccggactcccactgaatgtgcaggtcccagtggctgccttcagagcctggctggaatcattaaaaaggtatttgtaatctctggcttctgcagaaggccctgcaaaccaagagcaaaaaagcccccagtgcttatgggccggcagtgtgggctaggcccggggctccctgtccccaagagaaagaccaggttgctcggagggtgcctctgggaactttggtgcgggctatttgctccccccatggcggcaggagcaagctgggacttgtttgggaaggccacagctgggtggttttcctcctctggctgtacatacacctttcaatccatttctttcatcttgaaaggacaaagaccggcttgtctgagcctcttaatcagtcaggctggctttgggctttggggaccctgactttctcaggtctagctttctgggacatcactccaaattagatggcagagtggcttttaacagagcgcactgaccttgttttctttctctctctgtccctaaactcgaggtcattagttaggtgaagacctgggctgcagtttggcgagacacttcctgtagatgcttctaatgttggcctttaatttctgctaagcagcagcacacaaataaatggcctgtcccttctatcctgttgtagcttggaatttctccataggagggacttgggggtggcagtagggttggagagggttggggggaggtgtaggagacttgtctggccactgagtttgctgagaaagtactgctatagtgtttttccttggattgcaaatcatgttgatctgaactgctgatttgaagtggattgagaggatggaacaatagaaggaggatatggctcaggacagtcaagtactggaagagggaaaggtacaaagaggtgttggcactgaatgaccctgaacagggctgccctggaaatatcagaggtgagtgacaaagagaactctagtcgaaggtctggaagtcaattattgtctccagcttttgtcccaccctaagggatggagcatgaacttcatgcatgtaacatccctccaggagcgctgaggttctgggaattcccagtgctggctaccatgccattcttttctcattcactcaagagcgtattgggatatgcgtgcatgaaagcaatgtaattatgggcacaacctcaaaacctgctctaattttttttttttttggagatggagtctcgctccatcacccaggctggagtgcaatggcgcgatctcagctcactgcaagctcagacctccagggttcacaccattctcctgcctcagcctcccgagtagctgggaatacaggcgcccgccaccatgcgcggctaatttttttgtatttttagtagagacggggtttcactgtgttagccaggatggtctcgatctcctgacctcgtgatccacccgcctcggcctcccaaagttctgggattacaggcgtgacagccgtgcccggaatctgctctaattttttaaagatatcatttgcaaactttgggcacttgagtcactcagtaagatattatttacaaccccaccatagattcaaacctctgtcctagaatgttgtcgagttaggcatctggcttgcagcaacagctggctttcctgtctatgctgtctccttccagggaggatgtttcacccttcatattgaggaaatgggcacagagaacccatttctcttactcatcatgtaacttcagtgggatggtcagatctatctttaacctggccactcttccacaagctcacactgactccagcaagatcttaaactagaaggcaggagttcaaatcctagctggtgcagtggccaaatctcggctcacagcaccttctgcctcctgggctcaagcgatcctctgacctcagtctcccaagtagctgggaccataggcatgcaccactatgcctggctaatttttgtatttttgtaattttttgtagagacagagtttcaccatgttgcccagcccagtcttgaactcctggactcaagcaatcttcccacctttgcctaccagagtgccgggattacaggtgtgagccatcatgctagttgcgcacagttgggcgaaactgacagatgagaaagcagaacctcgtgagtccactcagtaagagactccctactttctttctgagtctttgtttctcatcaattgaatggcaataaacaacttggtggcccaagagttgatgacaacagtcctataagattatacatgtaaaagaaacagagtattctacaaatatcagttattgatagttcaataggcaacctgacattaccttttcttggaacttgatgaacaactcagaaactcattaatatcaaacccaatggtgagcacttggtctttatttatggctgtaagagaagaaattgaattaactctatgtaaatgccaactaagaacatcgaagtctgaaatcaacagttttcctcgctcatacgacacacccaaactcaagcagtggttccaagcccctttggaaaataccatgggctaacgactttaaaagcttagaagtgaattctacttacttattacttaaaagtggttctcaaacttcaaggtgaatcaaaatcatctgtagagcttgttaaaacacaggttgctggtccaccccaagagtgtcttgagtcagtaggtctcaagtagggctcaagaatatgcatttctaatgagctccaggtgagtctaagtgttagtcgtcggtcttgggaccacaactttgggaacaattgatttagaagaactcaaagatcagaaaggggtggaatatttttaaaattgtggtaaaatacgcataaacagaaaaggtacaattttaaccacttagagagaggtgggatctaagaacagaaattgttatgccatcaaaggtgagttcagataagcattattaaatggtatctatggataaacttcaggggccctgtggagcaacccaatgctgggatggggtccaggtgtgctatggtttggatgtggtttgtccctacaaaaactcatgttgaaatttaattgccagtgtaacattattgagaggttatggacttttaagaggcatttgggtcatgagggatccaccttcagggattagtgcagtctccagggagtgagtgagttcccattctagtgggactggattagttaccatacagtggttgttataaagtgaggctgcttctggtgttttatctgtttgcaggcacttccttccccttccacttctctgccaggttaggatgcagcatgaggccctcaccagaagctgaccagatgtggctgcctgatcttgaacttcccagtccccagaaccatgagctaaataaaccttttttctctataaattacgcagtctagagtattctattatagcaacacaagacagactaagacacagtggtagaaagaacactactgacttctcccatactctggcctatggacaagagtgacagacagacaagagtgaatatcagggccctcaggcacattcctctctgccccttcctcccttcttgcagagtctccagtgactgccagctaatgctatcatagaccccacctttcccctgacttgattggaccagaagcagcctcctgatccatggccaacaatcagattcactttcaagaatttgaactaagagacactaggaagatggcccttgagctgtgagtcctacacttgaaagttcttagcatcttggtcaggtacccaccagggccatgtgcaaactgagataatggggacatggaacaagggtaagtggagagggctggctggagagagacgggcagaggaaagccctgccaagaggagcagagatgagagaccttggagggagaggtaataaaaggaggcaaagatgattttccatgcttacaactcacagctgaggcctaactatctttatgtccataagaggcatccttgtgtcgaacctctcctctttcttgggtcaatgggggatggttgcaagggaccatcagtaggaaggcatagtacactaacccagtctggggtgggcttttagactagtcttcctcccatgctcctcctcccattggaaccccggactttcaagactgctacctagcacaccagtgcaccagatgtcactcaaaacctcttcagcaatggcccactcaccttcaaaaaggctgaagagcagactggctgggttcttcatggtggaggggcagtctgggaggttttaaggttgaagatgaaaactttcacttttggctcaatggtctgaaaaagagaaggaccagcaagtgaactgaagcctcctggaaagcatcttgataacaggggcagagtttcaagatgagaagctgtggcacttactctggctttggaaatgacctctaagtatctcagttaattaaaggagtcaaactctagactcgaaggagaagatctacaattttcaataacatagtctaccctcccctccttcccccaccttcacctcttctttcatcacaggcttacagggcacctcttagagccaggcacggtgttgggatcaggaacaaggccactgctcacatccagagcctgtgctacttaagaagcttccaggacctcttggatggctgtggttagtgccctacttttcccagcaggttggatgcagaatcatgctcttgtcgttcaggatgaccatggggaccatgggtctgagcctgtgaccctccagtctacagtgtgttggtgaggaaggagcagttgtcactggggtcactggcaatgggcatgcctccatctagcttaggcaagatgcttagactcagagccagagagtgaaacccagacactaatgagctgtcggtgttggtgtgtgttctcttcctcttccagtggaacatgacaaggaattcttccacccacgctaccaccatcgagagttccggtttgatctttccaagatcccagaaggggaagctgtcacggcagccgaattccggatctacaaggactacatccgggaacgcttcgacaatgagacgttccggatcagcgtttatcaggtgctccaggagcacttgggcaggtgggtgctatacgggtatctgggagaggtgctgagtttcctctgggggcagaggaagaaggtggtgagggtttccctcccctcccaccccatgagctctgcttcccatctgttggggtagtggagctgtgacctgctaacgcgaagcccgtgtctctcctcctctctcgcagggaatcggatctcttcctgctcgacagccgtacctctgggcctcggaggagggctggctggtgtttgacatcacagccaccagcaaccactgggtggtcaatccgcggcacaacctgggcctgcagctctcggtggagacgctggatggtgagtcccccgccactgccagtcctaatgcagcctgtgctcctggacttcaggagggtctcagcagtgctcatgcttgcttcactacaaacaggcttccccgcccctcccaaccagtactccatgttcagccttttgatcctgcagccctgtcccgctcgtggccctcctgtaactgctcttctgtgcacttggctgcttcctgtccagggcagacgatcaaccccaagttggcgggcctgattgggcggcacgggccccagaacaagcagcccttcatggtggctttcttcaaggccacggaggtccacttccgcagcatccggtccacggggagcaaacagcgcagccagaaccgctccaagacgcccaagaaccaggaagccctcggatggccaacgtggcagggtatcttaggtgggagggatcacagacccaccacaggaacccagcaggccccggcgaccgcaggagactgactaaaatcattcagtgctcaccaagatgctctgagctctcttcgattttagcaaaccaggagtccgaagatctaaggagagctgggggtttgactccgagagctcgagcagtccccaagacctggtcttgactcacgagttagactccactcagaggctgactgtctccagggtctacacctctaagggcgacactgggctcaagcagactgccgttttctatatgggatgagccttcacagggcagccagttgggatgggttgaggtttggctgtagacatcagaaacccaagtcaaatgcgcttcaaccagtagaaaattcaccagcccgcagagctaaggttgggtggacattagggttggttgatccaggagctcaacagtgtcctctgagccccagctccttctgccccaccccaccatcttcagtgctgcttcctctcaaggccacagctgtagttggccaggggggcttcattattttttgctcctgggcagtaggaggaagagaatgaatgtctctccatgggtctttcttaggaatgtgggaactttttccagaagtctctatgtcttttagtttgtgttgggtcacttgcccttcctgaaccacttcctgactcctggacaggatgtgcactgatgagcttagctttggggatctaatagtgactttacaaagcctctttgagaaggtgacattggaaccaaggcttgagcagacacaacaaagattgcagggaggggcattgcaggtggaggaaacggcacatgcaagagccctgcgtgggagtgagcttggtgtttggtcaatcagttgtcagagcacaccgggccctgtcagcaggcacagcctgggcctgctctgagtatgacagagagcccctgggaagttgtaggtggaggaaagacaggtcatgactaggaaaaaagcaatccctctgttgtggggtggaaggaaggttgcagtgtgtgtgagagagagacaagacagacagacagacacttctcaatgtttacaagtgctcaggccctgacccgaatgcttccaaatttacgtagttctggaaaaccccctgtatcattttcactactcaaagaaacctcgggagtgttttcttctgaaaggtcatcaggttttgactctctgctgtctcatttcttcttgctggtggtggtgatggttgcttgtcccaggccctgtcccgcatcctcttgcccctgcagagggatgagtgtgttggggcctcacgagttgaggttgttcataagcagatctctttgagcagggcgcctgcagtggccttgtgtgaggctggaggggtttcgattcccttatggaatccaggcagatgtagcatttaaacaacacacgtgtataaaagaaaccagtgtccgcagaaggttccagaaagtattatgggataagactacatgagagaggaatggggcattggcacctcccttagtagggcctttgctgggggtagaaatgagttttaaggcaggttagaccctcgaactggcttttgaatcgggaaatttaccccccagccgttctgtgcttcattgctgttcacatcactgcctaagatggaggaactttgatgtgtgtgtgtttctttctcctcactgggctctgcttcttcacttccttgtcaatgcagagaacagcagcaggcaccagaggcaggccttgtaagaagcacgagctgtatgtcagcttccgagacctgggctggcaggtaaggggctggctgggtctgtcttgggtgtgggccctctggcgtgggctcccacaggcagcgggtgctgtgctcagtcttgtttctcatctctgccagttaagactccagtatcaagtggcctcgctagggaaggggacttgggctaaggatacagggaggcctcatgaaatccgagagcagaaatgtggttgagacttgaactcgaaccaggaacccaaacactttggactctgaaccccattctctgcatgcacctcattcccatcccttggctggctgcttctcaagatgatgccgggccgtgtgtttgaatgtagatacctggggagccatctccccctctgccctctgacttcatttaccccattcccattcccacgggagggacggatctccccagcttggttcaggcgcttgttcctgaaccagtcaactgtttcaggggtggggtcatgttactggcacatggctgccccctctggagccatttgcatggagtgaggcaaaaggcaggggatgaatctaggagaggagtgagggtcatgtgatccacctgccgtgagctctggatcgtgattctcattcagcagtcacgagcatctcgagcgttctgggccctgttctaggtactggattggagatgcagcgatgaacactgcaatgtgtctgccctgtggggctcaaatatccctggagagggtattgtcatgaggtcatcagggcaactggtggtattctaccctcagggagcttgtagttcagtgggagagtccagaatcttccctggggattatgcccagacacactcagggcgtacgtgcacacagccagctctgagccctcctgtgagcctgccctcaggactgatgaccacatctacctgcagctgggacagaacccaaactccaggggcctctgctggaagattccatgtgcttaagcatcactgaggagtatattgattattgggcaacatttctgtgccacccagaccctagaggcaaggatggcacatggatcccttactgaccagtgcacccggagccagcatgggtgatgccattatgagttattagcctctctggcaggtgggcaaaccgaggcatggaggtttgtttaaggtgaactgccagtgtgtgaccacctagtgggggtagagctgatgattgcctcacaccggaggctccttcctgtgccgcgttctgtccagaagacacagccatggatgtccattttaggatcagccaagcccgtggggctttccttcatttttattttatgtttttttagaaatggggtcttgctctgtcacccaggctggggtgcagtggtgtgatcatacgtcaccgcagctttgagccgtcttcccactcagtctactaagcttggactataggccaagactatagagtggtccttctttccattcttttgggaccatgagaggccacccatgtttcctgcccctgctgggccctgctgctcagaaggcatggtctgaggctttcaccttggtcgtgagccttcgtggtggtttctttcagcatggggttgggatgctgtgctcaggcttctgcatggtttcccacactctcttctcctcctcaggactggatcatcgcgcctgaaggctacgcgcgctactactgtgagggggagtgtgccttccctctgaactcctacatgaacgccaccaaccacgccatcgtgcagacgctggtgggtgtcacgccatcttggggtgtggtcacctgggccgggcaggctgcggggccaccagatcctgctgcctccaagctggggcctgagtagatgtcagcccattgccatgtcatgacttttgggggccccttgcgccgttaaaaaaaaatcaaaaattgtactttatgactggtttggtataaagaggagtataatcttcgaccctggagttcatttatttctcctaatttttaaagtaactaaaagttgtatgggctcctttgaggatgcttgtagtattgtgggtgctggttacggtgcctaagagcactgggcccctgcttcattttccagtagaggaaacaggtaaacagatgagaaatttcagtgaggggcacagtgatcagaagcgggccagcaggataatgggatggagagatgagtggggacccatgggccatttcaagttaaatttcagtcgggtcaccaggaagattccatgtgataatgagattaacgtgcccagtcacggcgacactcagtaggtgttattcctgctctgccaacagcaaccatagttgataagagctgttagggattttgtccttttgcttagaatccaaggttcaaggaccttggttatgtagctccctgtcatgaacatcatctgagcctttcctgcctactgatcatccaccctgccttgaatgcttctagtgacagagagctcactaccaggactactccctcctttcatttagtaatctgcctccttcttttcttgtccctgtcctgtgtgttaagtcctggagaaaaatctcatctatccctttcatttgattctgctctttgagggcaggggtttttgtttctttgtttgtttttttaagtgttggttttccaaagcccttgctcccctcctcaattgaaacttcaaagccctcattgggattgaaggtccttaggctggaaacagaagagtcctccccaacctgttccctggcctggatgtgctgtgctgtgccagtatcccctggaaggtgccaggcatgtctccccggctgccaggggacacatctctatccttctccaacccctgccttcatggcccatggaacaggagtgccatcgccctgtgtgcacctacttccatcagtatttcaccagagatctgcaggatcaaagtgaattctccagggattgtgaaatgatgcgattgtggtcatgtttaaaagggggcaactgtcttctagagagtcctgatgaaatgcttccagaggaaatgagctgatggctggaatttgctttaaaatcattcaaggtggagcaggtggggaagggtatggatgtgtaagagtttgaaattgtccatcataaaatgtgtaaaaagcatgctggcctatgtcagcagtcacagcctggaggtggtaacagagtgccagtcactgatgctcaagcctggcacctacagttgctggaaacccagaagtttcacgttgaaaacaacaggacagtggaatctctggccctgtcttgaacacgtggcagatctgctaacactgatcttggttggctgccgtcagcttaggttgagtggcggtcttcccttagtttgcttagtccccgctattccctattgtcttacctcggtctattttgcttatcagtggacctcacgaggcactcataggcatttgagtctatgtgtccctgtcccacatcctctgtaaggtgcagagaagtccatgagcaagatggagcacttctagtgggtccaagtcagggacactattcagcaatctacagtgcacagggcagttccccaacagagaattacctggtcctgaatgtcggatctggccccttccttccccactgtataatgtgaaaacctctatgctttgttccccttgtctgcaaaacagggataatcccagaactgagttgtccatgtaaagtgcttagaacagggagtgcttggcttggggagtgtcacctgcagtcattcattatgcccagacaggatgtttctttatagaaacgtggaggccagttagaacgactcaccgcttctcaccactgcccatgttttggtgtgtgtttcaggtccacttcatcaacccggaaacggtgcccaagccctgctgtgcgcccacgcagctcaatgccatctccgtcctctacttcgatgacagctccaacgtcatcctgaagaaatacagaaacatggtggtccgggcctgtggctgccactag

SEQ ID NO: 149055 - DNA, 353 bp, Homo sapiens
ggtgatgcaagaagtttctaggaaaggccggacaccaggtgattattgctgttgctgccgccgctgctgctgctactgccgccgccgccgctgttgccgctggtgccgctgccgccgccgctgctcatgatcattattttaccttttaattctttttttttccgctcttgccaaatgctttggctccaagtttttctatgtgtatctattgatataaatgtatatatttatttattctagctgtcaggtgttaaaataaatgccgaagattagtcccacgtctctcccaccataggatatagattgttatgtatttattattattattgttgtctttgaggtcgacgcggccg

SEQ ID NO: 149056 - DNA, 462 bp, Homo sapiens
atgtcacaacagtattatgtgcgattatgtcagatccagccttctccatctcggagtgttggcagggagaacttagttcttgtaggagactttcctgacccaactgagctgaagagggtaaaagggagaggctgtgctcactgtggcctcacagatctacctgagcccacagcccaggtgttggttgagcagggccaggatgaagctttatggttccataatgtaatttctgaagagtttggagtgggagtgaatatcttttggaagcaccttccatctgaatgctatgataaaacagatacctatggaaacaaagatcctacagcagcatcaagagctgcacaaattctggacagagccttgaaaacactggccgagttaccagaggaatatagggacttctatgcacgacgaatggtcctacacattcaagacaaagcctacagcaagaactctgagtaa

SEQ ID NO: 149057 - DNA, 1636 bp, Homo sapiens
gaaaaaagcgtgttgtactcttcagtcctcgagatgcccagtatttatatttaaaaggtactaaatcagaagtactgaatatagataacccagacttggctaaatatccacttttttccaaggctagaagatatgaatgttcccttgaagctggtgatgtattattcattcctgctttatggttccataatgtaatttctgaagagtttggagtgggagtgaatatcttttggaagcaccttccatctgaatgctatgataaaacagatacctatggaaacaaagatcctacagcagcatcaagagctgcacaaattctggacagagccttgaaaacactggcccgagttaccagaggaatatagggacttctatgcacgacgaatggtcctacacattcaagacaaagcctacagcaagaactctgagtaaataatgaagtgaatgcaatgcacattaacactttagtaaggtataacgatataaattaaagattttgttaaaataggaaagatacatcagatttacagattatgtaagtacgaaggggtgtttgtgtggattctacttgatacagattgttataattaaagaatgctgtgctgggaccactctttaacattcagatgctgaccactaaaagtccaacttaaaatgacttaaaaacagtaagaaaatatattgattcacaatacatgaaatctattgacagaatgtgctgcagtgtttctgatccaatgattcagtaatgtcatcaagaaccttgggaacccgcctccacaccccacccccttttcaaccacaacattggcatcatcctaaggctggctaccctcgtggtcatggggatgattgccagtagcagttgggagccttgtgcatcttcatttacatgcaggcggaaggagtcaggctgggattctagggggccctgtcctagtattgaggaaagcttttcccaggatttcacttttcccttattcctttagggtcttcattggttttaaagtaacttagacctgtccatccctgagccagtcactggcaaagggtctagaataacctttaggccagtccaggtccactggagctgagagtagaagtggaggcccacatgagggatatatgggggacagaaaggatagtttttttaaaatccatggttctgataggaaaaaccatgagcaacgcacaatatctattacatttgcctagaagcagaattttttgaggaaccttaaaaaatgtacagatacctaggtccccaactttgtagactgattcaagagtgtttgggatttggtataggaacttaatagacctcacagggtgttctgatgcataatcagagctgagatcaactggagttgatgatagtgacttggattattagttttgtgattagtgcaaaacaaatgtttaatctgatcttgacttttcttgccacccagtatgtcagggtggtttttggtttttgaatgttacaaaataaatattttaatttatacctatgtctaaaccttagcctagttaaagatttcccaactattttttccacctatccctttttttaaaagaaaaattacttaaagaatgaataaatgagatcctaaaagtgttgtcatcgaagacagtg

SEQ ID NO: 149058 - DNA, 908 bp, Homo sapiens
aaaaccaagttgtcttggaacaaagatggcattctccatggagtcagatatcaggatgggaatctggtgatccaattccctgattactgtggcatgatcctccaccattcacactctaccctggactctgggaagggacactgctgccttgaaactctacaaccctgaaccttgatgctggttgctgcagacaagaactgcttctaccctgggtcactgtcactgctaagtggaaagtcatgaacttgatggtaccagtcactctgggcctaaaccgacatagccaggaaacggttcaccccccacaaacagaatcatctagacctgtccatgatttggaatcgtggcccaatacttcctggccccagagagagaaaaaagtctgaccaccccctactcaaagtgccaactcatttccttcccagaattaatcacttcccaaaatgtatgactgtgtgaacatcaattcccttcaggggaaaaccccactcccacctctcaggctgtcatcttaccctatgaccccaacctgacaatcatgcaacagcccattattggtaccttttccaatgtttaggtgactcattcttatctacaatcactttgttgttctaggaaagtttttgacacagcaggcatttgatatatatttcttgattaaatgaaagattaaatgaataccatttttagatgtctgcatagtgctttaaagtttacaccactattctttcaaatagtacaagagagaactaagctgtgtactcaactgggaagaagcagaactgagagtgggagcacctggtattctgatttcttgtctagaactatactatattctgagatcactaaactacaacctcaggcgactctgcctacttttgtaaataaagttttattggaacacaaaa

SEQ ID NO: 149059 - DNA, 490 bp, Homo sapiens; identical to SEQ ID NO: 148734
  misc_feature (1)...(490): n = a,t,c or g

SEQ ID NO: 149060 - DNA, 407 bp, Homo sapiens
  misc_feature (1)...(407): n = a,t,c or g
cggcaagaaggaggccgacgcgctgaccaacgccgtggcgcacgtggacgacatgcccaacgcgctgtccgccctgagcgacctgcacgcgcacaagcttcgggtggacccggtcaacttcaagctcctaagccactgcctgctggtgaccctggccgcccacctccccgccgagttcacccctgcggtgcacgcctccctggacaagttcctggcttctgtgagcaccgtgctgacctccaaataccggtaagctggagcctcggtagccgttcctcctgcccgctgggcctcccaacgggccctcctcccctccttgcaccggcccttcctggtctttgaataaagtctgagtgggcggcnnnnaaattaaaaaccctgnaaggaagaggaaaaataaaaaaaaa

SEQ ID NO: 149061 - DNA, 683 bp, Homo sapiens
tggtccccacagactcagagagaacccaccatggtgctgtctcctgccgacaagaccaacgtcaaggccgcctggggtaaggtcggcgcgcacgctggcgagtatggtgcggaggccctgggaaggagttttcctgtccttccccccccaccaagacctacttcccgcacttcgacttgagccccggctctgcccaggttaagggccacggcaaaaaggtggccgacgcgctgaccaacgccgtggcgcacgtggacgacaatgcccaacgcgctgtccgccctaagcgaccttgcacgcgcacaagcttcgggtggacccgatcaaacttcaagctcctaagccactgcctgctggtgaccctggccgcccacctccccgccgagttcaacccctgcggtgcacgcctccctggacaagttcctggcttctgttatgcaccgtgctgacctccaaataccgttaagctggagcctcggtagccgttcctcctggcccgctgggcgctcccaacgggcccttcttccctccttgcaccggcccttcctggtctttgaataaagtctgagtgggcggcaaaaaaaaactgaacatctccttcccagccactgggtgccagaaactcattggagtggacgatgaacgcaaacttcgtactttttattgaaagcggttgggcccag

SEQ ID NO: 149062 - DNA, 758 bp, Homo sapiens; identical to SEQ ID NO: 146737
  misc_feature (1)...(758): n = a,t,c or g

SEQ ID NO: 149063 - DNA, 767 bp, Homo sapiens
  misc_feature (1)...(767): n = a,t,c or g
cgagttcacccctgcggtgcacgcctccctggacaagttcctggcttctgtgagcaccgtgctgacctccaaataccgttaagctggagcctcggtggccatgcttcttgccccttgggcctccccccagcccctcctccccttcctgcacccgtacccccgtggtctttgaataaagtctgagtgggcggcnnnnnnnnnnnnnnnnnnnnnnnnnnnnnnnnnnnnnnnnnnnnnnnnnnnnnnnnnnnnnnnnnnnnnnnnnnnnnnnnnngggggggccccnnnnnnnnnnnnngggggggggattattttttnnnnnnnnnnnnnnntttaaaaaaaacgggggggaaaaaaaaacccgggcccnnnnnnnnnnnnngggggggnnnnnnnnnnnnnnnnnnnnnnnnnnnnnnnnnnnnnnnnncnnnnnnnnntnnnnnncncnnnnnnnnnnnnnnnnnnnnnnannnancnntnnnnnntnntntnntnnntttctnncttcctccntcttctaattnnctttttcttacttttcttttctaacctaattattttctttaataanctttaatttaatataaanttattataaaaatannnnnnnnnnnnntttattanatataattaataaaattatatannnnnnnnnnaattctttataacatcttattttctcttttctacttctttatattaaaattaaatatattttttaaaaatnatntttctannaatattacataaaaaaataaaaatac

SEQ ID NO: 149064 - DNA, 654 bp, Homo sapiens; identical to SEQ ID NO: 144884
  misc_feature (1)...(654): n = a,t,c or g

SEQ ID NO: 149065 - DNA, 763 bp, Homo sapiens
  misc_feature (1)...(763): n = a,t,c or g
aggcctagaattcggcacgagcacagactcagagagaacccaccatggttcttgtttcctgcggccaagaccaacgtcaaggccggcttggggtaagggtaggggtctcacccgccaagtaatgttgcgaagaccctggaaagggatgttcctgtccttccccaccacccaagacctacttcccgcaacttcgaaccttgagccacgggttttgcccaggtttaagggccacggtcaagaaggttgcccgacgcgctgaccaaanggccgtggcggcacgtggacgaccatgcccaaacgcgctgtcccgccctgagcgacctgcacggcgcacaagctttcgggtggacccggtcaacttcaagctcctaagccactgcctgctggtgaccctggccgcccacctccccgccgagtttcacccctgcggtgcacgcctacctggacaagttcctggcttctgtgagcaccgtgctgacctccaaataccgttaaagctggagcctcggtgggccatgctttcttgcacacttgggcctccccccagcccctccttcccttgctgcacccgtacccccgtggtctttgaataaagtctgagtgggcggcatancttaatgcaagaaagttccttgcgaaatacccgtaagacataatggagcaggctgtgaaaaaagttaattatggttggggcgggtttttggaagaaaaagaatttttgtctcggggggtggggggaagaaataatttttttttgggggtc

SEQ ID NO: 149066 - DNA, 447 bp, Homo sapiens
  misc_feature (1)...(447): n = a,t,c or g
agtacagatgatgttatcattatgcttctagttcatacgccatggggcatttcacagaggaggacaaggctactatcacaagcctgtggggctaggtgaatgtggaatatgctgcaggagaaaccatgataaggctcctggctgtctacccatggaccccgaggttctttgacagctttggcatccttgttctctgactctgccatcatgggcaaccccaaagtcaaggcacatggcaagaaggtgctgacttccttgggagatgccataaagcacctggatgatctcaagggcacctttgcccagctgagtgaactgcactgtgacaagctgcatgtggatcctgagaacttcaagctcctgggaaatgtgctggtgaccagtttggcaatccatttcggcatagaattcacccctgaggtgcatgcttactggcanaagatgtga

SEQ ID NO: 149067 - DNA, 734 bp, Homo sapiens
  misc_feature (1)...(734): n = a,t,c or g
ggcacgagggaacgtctgaggttatcaataagctcctagtccagacgccatgggtcagtttcacatagggaggccaaggctactatcgcaagcctgtggggcaaggtgaatgtggaagatgctggaggagaaaccaatgataaggctccctggttgtctacccatggccccaaaggtcctttgccagcttttgcttctcttttctctgcctctgccatcatgggcaaccccaaagtcaaggctacatggcaagaaggtgctgacttccttgggagatgccataaagcacctggatgatctcaagggcacctttgcccagctgagtgaactgcactgtgacaagctgcatgtggatcctgagaacttcaagctcctgggaaatgtgcctggtgaccgttttggcaatccattttcggcaaagaattcacccctgaggtgcaggctttcttggcagaagatgggtgactaggagtggccaatgcccctgtcctccacataccacttgaactcactgcccatgatgcagaacttttaaaggatagagctttattctgcaagcaatacaaataataaatctattcttgcttagagatcaccaaannnnnatnntnnnnnnncccccggattttttatttagcgggccgcacctttttccccttttagggggggtaaatttatattgggccttgggccggggttttcaaaagcggggggannnnnnnnnnaaagagccc

SEQ ID NO: 149068 - DNA, 185 bp, Homo sapiens
cttgagagatctgaatcgcgtgcgcgtctacgtagaaatgggtacatggagtcataatgatgttgacatgagttggattcctcatgaaacattgaatcaaatcagtaaagcttcaccaataaggttgtccacgaaacggtcacagatgagatcaatgggatctgatgagtgactgtacctttggg

SEQ ID NO: 149069 - DNA, 658 bp, Homo sapiens
atggccgtcatggcgccccgaaccctcgtcctgctactctcgggggccctggccctgacccagacctgggcgggctcccactccatgaggtatttctacacttccgtgtcccggcccggccgcggggagccccgcttcatcgccgtgggctacgtggacgacacgcagttcgtgcggttcgacagcgacgccgcgagccagaggatggagccgcgggcgccgtggatagagcaggaggggccggagtattgggaccggaacacacggaatgtgaaggcccactcacagactgaccgagtggacctggggaccctgcgcggctactacagatgtgtctctcacagcttgtaaagtgtgagacagctgccttgtgtgggactgagaggcaagagttgttcctgcccttccctttgtgacttgaagaaccctgactttgtttctgcaaaggcacctgcatgtgtctgtgttcgtgtaggcataatgtgaggaggtggggagaccaccccacccccatgtccaccatgaccctcttcccacgctgacctgtgctccctccccaatcatctttcctgttccagagaggtggggctgaggtgtctccatctctgtctcaacttcatggtgcactgagctgtaacttcttccttccctattaaaa

SEQ ID NO: 149070 - DNA, 1229 bp, Homo sapiens
atggccgtcatggcgccccgaaccctcgtcctgctactctcgggggccctggccctgacccagacctgggcaggctcccactccatgaggtatttctccacatccgtgtcccggcccggccgcggggagccccgcttcatcgccgtgggctacgtggacgacacgcagttcgtgcggttcgacagcgacgccgcgagccagaggatggagccgcgggcgccgtggatagagcaggaggggccggagtattgggacgaggagacagggaaagtgaaggcccactcacagactgaccgagagaacctgcggatcgcgctccgctactacaaccagagcgaggccggttctcacaccctccagatgatgtttggctgcgacgtggggtcggacgggcgcttcctccgcgggtaccaccagtacgcctacgacggcaaggattacatcgccctgaaagaggacctgcgctcttggaccgcggcggacatggcggctcagatcaccaagcgcaagtgggaggcggcccatgtggcggagcagcagagagcctacctggagggcacgtgcgtggagtggctccgcagatacctggagaacgggaaggagacgctgcagcgcacggacccccccaagacacatatgacccaccaccccatctctgaccatgaggccactctgagatgctgggccctgggcttctaccctgcggagatcacactgacctggcagcgggatggggaggaccagacccaggacacggagcttgtggagaccaggcctgcaggggatggaaccttccagaagtgggcagctgtggtggtaccttctggagaggagcagagatacacctgccatgtgcagcatgagggtctgcccaagcccctcaccctgagatgggagccgatgtgtctctcacagcttgtaaagtgtgagacagctgccttgtgtgggactgagaggcaagagttgttcctgcccttccctttgtgacttgaagaaccctgactttgtttctgcaaaggcacctgcatgtgtctgtgttcgtgtaggcataatgtgaggaggtggggagaccaccccacccccatgtccaccatgaccctcttcccacgctgacctgtgctccctccccaatcatctttcctgttccagagaggtggggctgaggtgtctccatctctgtctcaacttcatggtgcactgagctgtaacttcttccttccctattaaaa

SEQ ID NO: 149071 - DNA, 1286 bp, Homo sapiens
atggccgtcatggcgccccgaaccctcgtcctgctactctcgggggctctggccctgacccagacctgggcgggctctcactccatgaggtatttcttcacatccgtgtcccggcccggccgcggggagccccgcttcatcgcagtgggctacgtggacgacacgcagttcgtgcggttcgacagatggccgtcatggcgccccgaaccctcctcctgctactcttgggggccctggccctgacccagacctgggcgggctcccactccatgaggtatttcaccacatccgtgtcccggcccggccgcggggagccccgcttcatcgccgtgggctacgtggacgacacgcagttcgtgcggtttgacagcgacgccgcgagccagaggatggagccgcgggcaccgtggatagagcaggaggggccggagtattgggacctgcagacacggaatgtgaaggcccagtcacagactgaccgagcgaacctggggaccctgcgcggctactacaaccagagcgaggccggttctcacaccatccagatgatgtatggctgccacgtggggtcggacgggcgcttcctccgcgggtaccggcaggacgcctacgacggcaaggattacatcgccttgaacgaggacctgcgctcttggaccgcggcggacatggcggctcagatcacccagcgcaagtgggaggcggcccgtgtggcggagcagttgagagcctacctggagggcacgtgcgtggagtggctccgcagatacctggagaacgggaaggagacgctgcagcgcacggacgcccccaagacgcatatgactcaccacgctgtctctgaccatgaggccaccctgaggtgctgggccctgagcttctaccctgcggagatcacactgacctggcagcgggatggggaggaccagacccaggacacggagcttgtggagaccaggcctgcaggggatggaaccttccagaagtgggcgtctgtggtggtgccttctggacaggagcagagatacacctgccatgtgcagcatgagggtctgcccaagcccctcaccctgagatgggagccgtcttcccagcccaccatccccatcgtgggcatcattgctggcctagttctctttggagctgtgttcgctggagctgtggtcgctgctgtgaggtggaggaggaagagctcagatagaaaaggagggagctactctcaggctgcaagcagtgacagtgcccagggctctgatatgtctctcacagcttgtaaagtgtgagac

SEQ ID NO: 149072 - DNA, 1006 bp, Homo sapiens
atggccgtcatggcgccccgaaccctcctcctgctactcttgggggccctggccctgacccagacctgggcgggctcccactccatgaggtatttcaccacatccgtgtcccggcccggccgcggggagccccgcttcatcgccgtgggctacgtggacgacacgcagttcgtgcggttcgacagcgacgccgcgagccagaggatggagccgcgggcgccgtggatagagcaggaggggccggagtattgggaccggaacacacggaatgtgaaggcccactcacagattgaccgagtggacctggggaccctgcgcggctactacaaccagagcgaggccggttctcacaccatccagatgatgtatggctgcgacgtggggtcggacgggcgcttcctccgcgggtaccagcaggacgcctacgacggcaaggattacatcgccttgaacgaggacctgcgctcttggaccgcggcggacatggcggctcagatcacccagcgcaagtgggaggcggcccgtgtggcggagcagttgagagcctacctggagggcacgtgcgtggagtggctccgcagacacctggagaacgggaaggagacgctgcagcgcacggacccccccaggacgcatatgactcaccacgctgtctctgaccatgaggccaccctgaggtgctgggccctgagcttctaccctgcggagatcacactgacctggcagcgggatggggaggaccagacccaacacctgccatgtgcagcatgagggtttgcccaagcccctcaccctgagatgggagccgtcttcccagcccaccatccccatcgtgggcatcattgctggcctggttctctttggagctgtgatcactggagctgtggtcgctgctgtgatgtggaggaggaagagctcagatagaaaaggagggagctactctcaggctgcaagcagtgacagtgcccagggctctgatgtgtctctcacagcttgtaaagtgtga

SEQ ID NO: 149073 - DNA, 2353 bp, Homo sapiens
  misc_feature (1)...(2353): n = a,t,c or g
atggccgtcatggcgccccgaaccctcgtcctgctactctcgggggccctggccctgacccagacctgggcgggctcccactccatgaggtatttctacacttccgtgtcccggcccggccgcggggagccccgcttcatcgccgtgggctacgtggacgacacgcagttcgtgcggttcgacagcgacgccgcgagccagaggatggagccgcgggcgccgtggatagagcaggaggggccggagtattgggaccggaacacacggaatgtgaaggcccagtcacagactgaccgagtggacctggggaccctgcgcggctactacaaccagagcgaggccggttctcacaccatccagatgatgtatggctgcgacgtggggtcggacgggcgcttcctccgcgggtaccggcaggacgcctacgacggcaaggattacatcgccctgaaagaggacctgcgctcttggaccgcggcggacatggcagctcagaccaccaagcacaagtgggaggcggcccatgtggcggagcagtggagagcctacctggagggcacgtgcgtggagtggctccgcagatacctggagaacgggaaggagacgctgcagcgcacggacgcccccaaaacgcatatgactcaccacgctgtctctgaccatgaagccaccctgaggtgctgggccctgagcttctaccctgcggagatcacactgacctggcagcgggatggggaggaccagacccaggacacggagctcgtggagaccaggcctgcaggggatggaaccttccagaagtgggtggctgtggtggtgccttctggacaggagcagagatacacctgccatgtgcagcatgagggtttgcccaagcccctcaccctgagatgggagccgtcttcccagcccaccatccccatcgtgggcatcattgctggcctggttctctttggagctgtgatcactggagctgtggtcgctgctgtgatgtggaggaggaagagctcagatagaaaaggagggagctactctcaggctgcaagcagtgacagtgcccagggctctgatgtgtctnnnnnnnnnnnngtcatggcgccccgaaccctcgtcctgctactctcgggggctctggccctgacccagacctgggcgggctctcactccatgaggtatttcttcacatccgtgtcccggcccggccgcggggagccccgcttcatcgcagtgggctacgtggacgacacgcagttcgtgcggttcgacagcgacgccgcgagccagaggatggagccgcgggcgccgtggatagagcaggagggtccggagtattgggacggggagacacggaaagtgaaggcccactcacagactcaccgagtggacctggggaccctgcgcggctactacaaccagagcgaggccggttctcacaccgtccagaggatgtatggctgcgacgtggggtcggactggcgcttcctccgcgggtaccaccagtacgcctacgacggcaaggattacatcgccctgaaagaggacctgcgctcttggaccgcggcggacatggcagctcagaccaccaagcacaagtgggaggcggcccatgaggcggagcagttgagagcctacctggagggcacgtgcgtggagtggctccgcagatacctggagaacgggaaggagacgctgcagcgcacggacgcccccaaaacgcatatgactcaccacgctgtctctgaccatgaagccaccctgaggtgctgggccctgagcttctaccctgcggagatcacactgacctggcagcgggatggggaggaccagacccaggacacggagctcgtggagaccaggcctgcaggggatggaaccttccagaagtgggcggctgtggtggtgccttctggacaggagcagagatacacctgccatgtgcagcatgagggtttgcccaagcccctcaccctgagatgggagccgtcttcccagcccaccatccccatcgtgggcatcattgctggcctggttctctttggagctgtgatcactggagctgtggtcgctgctgtgatgtggaggaggaagagctcagatagaaaaggagggagctactctcaggctgcaagcagtgacagtgcccagggctctgatgtgtctctcacagcttgtaaagtgtgagacagctgccttgtgtgggactgagaggcaagagttgttcctgcccttccctttgtgacttgaagaaccctgactttgtttctgcaaaggcacctgcatgtgtctgtgttcgtgtaggcataatgtgaggaggtggggagaccaccccacccccatgtccaccatgaccctc

SEQ ID NO: 149074 - DNA, 783 bp, Homo sapiens
atggccgtcatggcgccccgaaccctcctcctgctactcttgggggccctggccctgacccagacctgggcgggctcccactccatgaggtatttcaccacatccgtgtcccggcccggccgcggggagccccgcttcatcgccgtgggctacgtggacgacacgcagttcgtgcggttcgacagcgacgccgcgagccagaggatggagccgcgggcgccgtggatagagcaggaggggccggagtattgggaccggaacacacggaatgtgaaggcccactcacagattgaccgagtggacctggggaccctgcgcggctactacaaccagagcgaggccggttctcacaccatccagatgatgtatggctgcgacgtggggtcggacgggcgcttcctccgcgggtaccagcaggacgcctacgacggcaaggattacatcgccttgaacgaggacctgcgctcttggaccgcggcggacatggcggctcagatcacccagcgcaagtgggaggcggcccgtgtggcggagcagttgagagcctacctggagggcacgtgcgtggagtggctccgcagacacctggagaacgggaaggagacgctgcagcgcacggacccccccaggacgcatatgactcaccacgctgtctctgaccatgaggccaccctgaggtgctgggccctgagcttctaccctgcggagatcacactgacctggcagcgggatggggaggaccagacccactctgatgtgtctctcacagcttgtaaagtgtga

SEQ ID NO: 149075 - DNA, 348 bp, Homo sapiens
atggccgtcatggcgccccgaaccctcctcctgctactctcgggggccctggccctgacccagagaggtggggagaccaccccacccccatgtccaccatgaccctcttcccacgctgacctgtgctccctccccaatcatctttcctgttccagagaggtggggctgaggtgtctccatctctgtctcaacttcatggtgcactgagctgtaacttcttccttccctattaaaattagaacctgagtataaatttactttctcaaattcttgccatgagaggttgatgagttaattaaaggagaagattcctaaaatttgagagacaaaataaatggaacacatgag

SEQ ID NO: 149076 - DNA, 136 bp, Homo sapiens
atggccgtcatggcgccccgaaccctcgtcctgctactctcgggggccctggccctgacccagacctgggcgggctcccactccatgaggtatttctacaccctctgatgtgtctctcacagcttgtaaagtgtga

SEQ ID NO: 149077 - DNA, 1886 bp, Homo sapiens
atggccgtcatggcgccccgaaccctcctcctgctactctcgggggccctggccctgacccagacctgggcgggctcccactccatgaggtatttcttcacatccgtgtcccggcccggccgcggggagccccgcttcatcgccgtgggctacgtggacgacacgcagttcgtgcggttcgacagcgacgccgcgagccagaagatggagccgcgggcgccgtggatagagcaggaggggccggagtattgggaccaggagacacggaatatgaaggcccactcacagactgaccgagcgaacctggggaccctgcgcggctactacaaccagagcgaggacggttctcacaccatccagataatgtatggctgcgacgtggggccggacgggcgcttcctccgcgggtaccggcaggacgcctacgacggcaaggattacatcgccctgaacgaggacctgcgctcttggaccgcggcggacatggcagctcagatcaccaagcgcaagtgggaggcggtccatgcggcggagcagcggagagtctacctggagggccggtgcgtggacgggctccgcagatacctggagaacgggaaggagacgctgcagcgcacggacccccccaagacacatatgacccaccaccccatctctgaccatgaggccaccctgaggtgctgggccctgggcttctaccctgcggagatcacactgacctggcagcgggatggggaggaccagacccaggacacggagctcgtggagaccaggcctgcaggggatggaaccttccagaagtgggcggctgtggtggtgccttctggagaggagcagagatacacctgccatgtgcagcatgagggtctgcccaagcccctcaccctgagtccgtgtcccggcccggccgcggggagccccgcttcatcgccgtgggctacgtggacgacacgcagttcgtgcggttcgacagcgacgccgcgagccagaggatggagccgcgggcgccgtggatagagcaggaggggccggagtattgggaccggaacacacggaatgtgaaggcccagtcacagactgaccgagtggacctggggaccctgcgcggctactacaaccagagcgaggccggttctcacaccatccagaggatgtatggctgcgacgtggggccggacgggcgcttcctccgcgggtaccagcaggacgcttacgacggcaaggattacatcgccctgaacgaggacctgcgctcttggaccgcggcggacatggcggctcagatcacccagcgcaagtgggagacggcccatgaggcggagcagtggagagcctacctggagggcgagtgcgtggagtggctccgcagatacctggagaacgggaaggagacgctgcagcgcacggacgcccccaagacgcatatgactcaccacgctgtctctgaccatgaggccaccctgaggtgctgggccctgagcttctaccctgcggagatcacactgacctggcagcgggatggggaggaccagacccaggacacggagctcgtggagaccaggcctgcaggggatggaaccttccagaagtgggcgtctgtggtggtgccttctggacaggagcagagatacacctgccatgtgcagcatgagggtctgcccaagcccctcaccctgagatgggagccgtcttcccagcccaccatccccatcgtgggcatcattgctggcctggttctctttggagctgtgatcgctggagctgtggtcgctgctgtgatgtggaggaggaagagctcagatagaaaaggagggagctactctcaggctgcaagcagtgacagtgcccagggctctgatatgtctctcacagcttgtaaagtgtga

SEQ ID NO: 149078 - DNA, 178 bp, Homo sapiens
atggccgtcatggcgccccgaaccctcgtcctgctactctcgggggccctggccctgacccagacctgggcgggctcccactccatgaggtatttctacaccagggagctactctcaggctgcaagcagtgacagtgcccagggctctgatatgtctctcacagcttgtaaagtgtga

SEQ ID NO: 149079 - DNA, 1319 bp, Homo sapiens
atggccgtcatggcgccccgaaccctcgtcctgctactctcgggggccctggccctgacccagacctgggcaggctcccactccatgaggtatttctccacatccgtgtcccggcccggccgcggggagccccgcttcatcgccgtgggctacgtggacgacacgcagttcgtgcggttcgacagcgacgccgcgagccagaggatggagccgcgggcgccgtggatagagcaggaggggccggagtattgggacgaggagacagggaaagtgaaggcccactcacagactgaccgagagaacctgcggatcgcgctccgctactacaaccagagcgaggccggttctcacaccctccagatgatgtttggctgcgacgtggggtcggacgggcgcttcctccgcgggtaccaccagtacgcctacgacggcaaggattacatcgccctgaaagaggacctgcgctcttggaccgcggcggacatggcggctcagatcaccaagcgcaagtgggaggcggcccatgtggcggagcagtggagagtctacctggagggcacgtgcgtggagtggctccgcagatacctggagaacgggaaggagacgctgcagcgcacggacccccccaagacacatatgacccaccaccccatctctgaccatgaggccactctgagatgctgggccctgggcttctaccctgcggagatcacactgacctggcagcgggatggggaggaccagacccaggacacggagcttgtggagaccaggcctgcaggggatggaaccttccagaagtgggcagctgtggtggtaccttctggagaggagcagagatacacctgccatgtgcagcatgagggtctgcccaagcccctcaccctgagatgggagccatcttcccagcccaccgtccccatcgtgggcatcattgctggcctggttctccttggagctgtgatcactggagctgtggtcgctgctgtgatgtggaggaggaacagctcagatagaaaaggagggagctactctcaggctgcaagcagtgacagtgcccagggctctgatgtgtctctcacagcaaaggcacctgcatgtgtctgtgttcttgtaggcataatgtgaggaggtggggagaccaccccacccccatgtccaccatgaccctcttcccacgctgacctgtgctccctccccaatcatctttcctgttccagagaggtggggctgaggtgtctccatctctgcctcaacttcatggtgcactgagctgtaactttttccttccctattaaaattagaacctgacatattcc

SEQ ID NO: 149080 - DNA, 408 bp, Homo sapiens
atggccgtcatggcgccccgaaccctcgtcctgctactctcgggggccctggccctgacccagacctgggcgggctcccactccatgaggtatttctacacctccgtgtcccggcccggccgcggggagccccgcttcatcgccgtgggctacgtggacgacacgcagttcgtgcggttcgacagcgacgccgcgagccagaggatggagccgcgggcgccgtggatagagcaggaggggccggagtattgggaccggaacacacggaatgtgaaggcccactcacagactgaccgagcgaacctggggaccctgcgcggctactacaaccaagggagctactctcaggctgcaagcagtgacagtgcccagggctctgatatgtctctcacagcttgtaaagtgtga

SEQ ID NO: 149081 - DNA, 620 bp, Homo sapiens
atggccgtcatggctccccgaaccctcgtcctgctactctcgggggctctggccctgacccagacctgggcgggctctcactccatgaggtatttcttcacatccgtgtcccggatagaaaaggagggagctactctcaggctgcaagcagtgacagtgcccagggctctgatatgtctctcacagcttgtaaagtgtgagacagctgccttgtgtgggactgagaggcaagatttgttcctgcccttccctttgtgacttgaagaaccctgactttgtttctgcaaaggcacctgcatgtgtctgtgttcttgtaggcataatgtgaggaggtggggagaccaccccacccccatgtccaccatgaccctcttcccacgctgacctgtgctccctccccaatcatctttcctgttccagagaggtggggctgaggtgtctccatctctgcctcaacttcatggtgcactgagctgtaactttttccttccctattaaaattagaacctgagtataaatttactttctcaaattcttgccatgagaggttgatgagttaattaaaggagaagattcctaaaatttgagagacaaaataaatggaacacatgagaaccttc

SEQ ID NO: 149082 - DNA, 608 bp, Homo sapiens
atggccgtcatggctccccgaaccctcgtcctgctactctcgggggctctggccctgacccagacctgggcgggctctcactccatgaggtatttcttcacatccgtgtcccgacgctgcagcgcacggacgcccccaagacgcatatgactcaccacgctgtctctgaccatgaggccaccctgaggtgctgggccctgagcttctaccctgcggagatcacactgacctggcagcgggatggggaggaccagacccaggacacggagctcgtggagaccaggcctgcaggggatgggaccttccagaagtgggcgtctgtggtggtgccttctggacaggagcagagatacacctgccatgtgcagcatgagggtctgcccaagcccctcaccctgagatgggagccgtcttcccagcccaccatccccatcgtgggcatcattgctggcctggttctctttggagctgtgatcgctggagctgtggtcgctgctgtgatgtggaggaggaagagctcagatagaaaaggagggagctactctcaggctgcaagcagtgacagtgcccagggctctgatatgtctctcacagcttgtaaagtgtga

SEQ ID NO: 149083 - DNA, 2030 bp, Homo sapiens
atggccgtcatggcgccccgaaccctcctcctgctactctcgggggccctggccctgacccagacctgggcgggctcccactccatgaggtatttctccacatccgtgtcccggcccggcagtggagagccccgcttcatcgcagtgggctacgtggacgacacgcagttcgtgcggttcgacagcgacgccgcgagccagaggatggagccgcgggcgccgtggatagagcaggagaggcctgagtattgggaccaggagacacggaatgtgaaggcccactcacagactgaccgagagaacctggggaccctgcgcggctactacaaccagagcgaggccggttctcacaccatccagataatgtatggctgcgacgtggggtcggacgggcgcttcctccgcgggtatgaacagcacgcctacgacggcaaggattacatcgccctgaacgaggacctgcgctcttggaccgcggcggacatggcggctcagatcacccagcgcaagtgggaggcggcccatgtggcggagcagtggagagcctacctggagggcacgtgcgtggagtggctccgcagatacctggagaacgggaaggagacgctgcagcgcacggacccccccaagacacatatgacccaccaccccatctctgaccatgaggccaccctgaggtgctgggccctgggcttctaccctgcggagatcacactgacctggcagcgggatggggaggaccagacccaggacacggagctcgtggagaccaggcctgcaggggatggaaccttccagaagtgggcggctgtggtggtgccttctggagaggagcagagatacacctgccatgtgcagcatgagggtctgcccaagcccctcaccctgagatgggagctgtcttcccagcccaccatccccatcgtgggcatcattgctggcctggttctccttggagctgtgatcactggagctgtggtcgctgccgtgatgtggaggaggaagagctcagatagaaaaggagggagttacactcaggctgcaagcccggccgcggggagccccgcttcatcgcagtgggctacgtggacgacacgcagttcgtgcggttcgacagcgacgccgcgagccagaggatggagccgcgggcgccgtggatagagcaggagggtccggagtattgggacggggagacacggaaagtgaaggcccactcacagactcaccgagtggacctggggaccctgcgcggctactacaaccagagcgaggccggttctcacaccctccagatgatgtttggctgcgacgtggggtcggactggcgcttcctccgcgggtaccaccagtacgcctacgacggcaaggattacatcgccctgaaagaggacctgcgctcttggaccgcggcggacatggcagctcagaccaccaagcacaagtgggaggcggcccatgtggcggagcagttgagagcctacctggagggcacgtgcgtggagtggctccgcagatacctggagaacgggaaggagacgctgcagcgcacggacgcccccaaaacgcatatgactcaccacgctgtctctgaccatgaagccaccctgaggtgctgggccctgagcttctaccctgcggagatcacactgacctggcagcgggatggggaggaccagacccaggacacggagctcgtggagaccaggcctgcaggggatggaaccttccagaagtgggcggctgtggtggtgccttctggacaggagcagagatacacctgccatgtgcagcatgagggtttgcccaagcccctcaccctgagatgggagccgtcttcccagcccaccatccccatcgtgggcatcattgctggcctggttctctttggagctgtgatcactggagctgtggtcgctgctgtgatgtggaggaggaagagctcagatagaaaaggagggagctactctcaggctgcaagcagtgacagtgcccagggctctgatgtgtctctcacagcttgtaaagtgtga

SEQ ID NO: 149084 - DNA, 1575 bp, Homo sapiens
atggccgtcatggcgccccgaaccctcgtcctgctactctcgggggccctggccctgacccagacctgggcaggctcccactccatgaggtatttctccacatccgtgtcccggcccggccgcggggagccccgcttcatcgccgtgggctacgtggacgacacgcagttcgtgcggttcgacagcgacgccgcgagccagaggatggagccgcgggcgccgtggatagagcaggaggggccggagtattgggacgaggagacagggaaagtgaaggcccactcacagactgaccgagagaacctgcggatcgcgctccgctactacaaccagagcgaggccggttctcacaccctccagatgatgtttggctgcgacgtggggtcggacgggcgcttcctccgcgggtaccaccagtacgcctacgacggcaaggattacatcgccctgaaagaggacctgcgctcttggaccgcggcggacatggcggctcagatcaccaagcgcaagtgggaggcggcccatgtggcggagcagcagagagcctacctggagggcacgtgcgtggacgggctccgcagatacctggagaacgggaaggagacgctgcagcgcacggacccccccaagacacatatgacccaccaccccatctctgaccatgaggccactctgagatgctgggccctgggcttctaccctgcggagatcacactgacctggcagcgggatggggaggaccagacccaggacacggagcttgtggagaccaggcctgcaggggatggaaccttccagaagtgggcagctgtggtggtaccttctggagaggagcagagatagataatgtatggcgtggggtcggacgggcgcttcctccgcgggtaccggcaggacgcctacgacggcaaggattacatcgccctgaacgaggacctgcgctcttggaccgcggcggacatggcggctcagatcaccaagcgcaagtgggaggcggcccatgaggcggagcagttgagagcctacctggatggcacgtgcgtggagtggctccgcagatacctggagaacgggaaggagacgctgcagcgcacggacccccccaagacacatatgacccaccaccccatctctgaccatgaggccaccctgaggtgctgggccctgggcttctaccctgcggagatcacactgacctggcagcgggatggggaggaccagacccaggacacggagctcgtggagaccaggcctgcaggggatggaaccttccagaagtgggcggctgtggtggtgccttctggagaggagcagagatacacctgccatgtgcagcatgagggtctgcccaagcccctcaccctgagatgggagctgtcttcccagcccaccatccccatcgtgggcatcattgctggcctggttctccttggagctgtgatcactggagctgtggtcgctgccgtgatgtggaggaggaagagctcagatagaaaaggagggagttacactcaggctgcaagcagtgacagtgcccagggctctgatgtgtccctcacagcttgtaaagtgtga

SEQ ID NO: 149085 - DNA, 849 bp, Homo sapiens
atggccgtcatggcgccccgaaccctcgtcctgctactctcgggggccctggccctgacccagacctgggcgggctcccactccatgaggtatttctacacttccgtgtcccggcccggccgcggggagccccgcttcatcgccgtgggctacgtggacgacacgcagttcgtgcggttcgacagcgacgccgcgagccagaggatggagccgcgggcgccgtggatagagcaggaggggccggagtattgggaccggaacacacggaatgtgaaggcccactcacagactgaccgagtggacctggggaccctgcgcggctactacagcagatacctggagaacgggaaggagacgctgcagcgcacggacccccccaagacacatatgacccaccaccccatctctgaccatgaggccactctgagatgctgggccctgggcttctaccctgcggagatcacactgacctggcagcgggatggggaggaccagacccaggacacggagcttgtggagaccaggcctgcaggggatggaaccttccagaagtgggcagctgtggtggtaccttctggagaggagcagagatacacctgccatgtgcagcatgagggtctgcccaagcccctcaccctgagatgggagccatcttcccagcccaccgtccccatcgtgggcatcattgctggcctggttctccttggagctgtgatcactggagctgtggtcgctgctgtgatgtggaggaggaacagctcagatagaaaaggagggagctactctcaggctgcaagcagtgacagtgcccagggctctgatgtgtctctcacagcttgtaaagtgtga

SEQ ID NO: 149086 - DNA, 1222 bp, Homo sapiens
atggccgtcatggcgccccgaaccctcgtcctgctactctcgggggctctggccctgacccagacctgggcgggctctcactccatgaggtatttcttcacatccgtgtcccggcccggccgcggggagccccgcttcatcgcagtgggctacgtggacgacacgcagttcgtgcggttcgacagcgacgccgcgagccagaggatggagccgcgggcgccgtggatagagcaggagggtccggagtattgggacggggagacacggaaagtgaaggcccactcacagactcaccgagtggacctggggaccctgcgcggctactacaaccagagcgaggccggttctcacaccgtccagaggatgtatggctgcgacgtggggtcggactggcgcttcctccgcgggtaccaccagtacgcctacgacggcaaggattacatcgccctgaaaccagagcgaggccggttctcacaccatccagatgatgtatggctgcgacgtggggtcggacgggcgcttcctccgcgggtaccggcaggacgcctacgacggcaaggattacatcgccctgaaagaggacctgcgctcttggaccgcggcggacatggcagctcagaccaccaagcacaagtgggaggcggcccatgtggcggagcagtggagagcctacctggagggcacgtgcgtggagtggctccgcagatacctggagaacgggaaggagacgctgcagcgcacggacgcccccaaaacgcatatgactcaccacgctgtctctgaccatgaagccaccctgaggtgctgggccctgagcttctaccctgcggagatcacactgacctggcagcgggatggggaggaccagacccaggacacggagctcgtggagaccaggcctgcaggggatggaaccttccagaagtgggtggctgtggtggtgccttctggacaggagcagagatacacctgccatgtgcagcatgagggtttgcccaagcccctcaccctgagatgggagccgtcttcccagcccaccatccccatcgtgggcatcattgctggcctggttctctttggagctgtgatcactggagctgtggtcgctgctgtgatgtggaggaggaagagctcagatagaaaaggagggagctactctcaggctgcaagcagtgacagtgcccagggctctgatgtgtctctcacagcttgtaaagtgtga

SEQ ID NO: 149087 - DNA, 1257 bp, Homo sapiens
atggccgtcatggcgccccgaaccctcgtcctgctactctcgggggctctggccctgacccagacctgggcgggctctcactccatgaggtatttcttcacatccgtgtcccggcccggccgcggggagccccgcttcatcgcagtgggctacgtggacgacacgcagttcgtgcggttcgacagcgacgccgcgagccagaggatggagccgcgggcgccgtggatagagcaggagggtccggagtattgggacggggagacacggaaagtgaaggcccactcacagactcaccgagtggacctggggaccctgcgcggctactacaaccagagcgaggccggttctcacaccgtccagaggatgtatggctgcgacgtggggtcggactggcgcttcctccgcgggtaccaccagtacgcctacgacggcaaggattacatcgccctgaaagaggacctgcgctcttggaccgcggcggacatggcagctcagaccaccaagcacaagtgggaggcggcccatgtggcggagcagcagagagcctacctggagggcacgtgcgtggagtggctccgcagatacctggagaacgggaaggagacgctgcaagaggacctgcgctcttggaccgcggcggacatggcagctcagaccaccaagcacaagtgggaggcggcccatgtggcggagcagttgagagcctacctggagggcacgtgcgtggagtggctccgcagatacctggagaacgggaaggagacgctgcagcgcacggacgcccccaaaacgcatatgactcaccacgctgtctctgaccatgaagccaccctgaggtgctgggccctgagcttctaccctgcggagatcacactgacctggcagcgggatggggaggaccagacccaggacacggagctcgtggagaccaggcctgcaggggatggaaccttccagaagtgggcggctgtggtggtgccttctggacaggagcagagatacacctgccatgtgcagcatgagggtttgcccaagcccctcaccctgagatgggagccgtcttcccagcccaccatccccatcgtgggcatcattgctggcctggttctctttggagctgtgatcactggagctgtggtcgctgctgtgatgtggaggaggaagagctcagatagaaaaggagggagctactctcaggctgcaagcagtgacagtgcccagggctctgatgtgtctctcacagcttgtaaagtgtga

SEQ ID NO: 149088 - DNA, 1386 bp, Homo sapiens
atggccgtcatggcgccccgaaccctcgtcctgctactctcgggggccctggccctgacccagacctgggcaggctcccactccatgaggtatttctccacatccgtgtcccggcccggccgcggggagccccgcttcatcgccgtgggctacgtggacgacacgcagttcgtgcggttcgacagcgacgccgcgagccagaggatggagccgcgggcgccgtggatagagcaggaggggccggagtattgggacgaggagacagggaaagtgaaggcccactcacagactgaccgagagaacctgcggatcgcgctccgctactacaaccagagcgaggccggttctcacaccctccagatgatgtttggctgcgacgtggggtcggacgggcgcttcctccgcgggtaccaccagtacgcctacgacggcaaggattacatcgccctgaaagaggacctgcgctcttggaccgcggcggacatggcggctcagatcaccaagcgcaagtgggaggcggcccatgtggcggagcagcagagagcctacctggagggcacgtgcgtggagtggctccgcagatacctggagaacgggaaggagacgctgcagcgcacggacccccccaagacacatatgacccaccaccccatctctgaccatgaggccactctgagatgctgggccctgggcttctaccctgcggagatcacactgacctggcagcgggatggggaggaccagacccaggacacggagcttgtggagaccaggcctgcaggggatggaaccttccagaagtgggcagctgtggtggtaccttctggagaggagcagagatacacctgccatgtgcagcatgagggtctgcccaagcccctcaccctgagatgggagccgcgcacggacgcccccaaaacgcatatgactcaccacgctgtctctgaccatgaagccaccctgaggtgctgggccctgagcttctaccctgcggagatcacactgacctggcagcgggatggggaggaccagacccaggacacggagctcgtggagaccaggcctgcaggggatggaaccttccagaagtgggcggctgtggtggtgccttctggacaggagcagagatacacctgccatgtgcagcatgagggtttgcccaagcccctcaccctgagatgggagccgtcttcccagcccaccatccccatcgtgggcatcattgctggcctggttctctttggagctgtgatcactggagctgtggtcgctgctgtgatgtggaggaggaagagctcagatagaaaaggagggagctactctcaggctgcaagcagtgacagtgcccagggctctgatgtgtctctcacagcttgtaaagtgtga

SEQ ID NO: 149089 - DNA, 1293 bp, Homo sapiens
atggccgtcatggcgccccgaaccctcgtcctgctactctcgggggctctggccctgacccagacctgggcgggctctcactccatgaggtatttcttcacatccgtgtcccggcccggccgcggggagccccgcttcatcgcagtgggctacgtggacgacacgcagttcgtgcggttcgacagcgacgccgcgagccagaggatggagccgcgggcgccgtggatagagcaggagggtccggagtattgggacggggagacacggaaagtgaaggcccactcacagactcaccgagtggacctggggaccctgcgcggctactacaaccagagcgaggccggttctcacaccgtccagaggatgtatggctgcgacgtggggtcggactggcgcttcctccgcgggtaccaccagtacgcctacgacggcaaggattacatcgccctgaaagaggacctgcgctcttggaccgcggcggacatggcagctcagaccaccaagcacaagtgggaggcggcccatgtggcggagcagcagagagcctacctggagggcacgtgcgtggagtggctccgcagatacctggagaacgggaaggagacgctgcaggacgcctacgacggcaaggattacatcgccctgaacgaggacctgcgctcttggaccgcggcggacatggcagctcagatcaccaagcgcaagtgggaggcggtccatgcggcggagcagcggagagtctacctggagggccggtgcgtggacgggctccgcagatacctggagaacgggaaggagacgctgcagcgcacggacccccccaagacacatatgacccaccaccccatctctgaccatgaggccaccctgaggtgctgggccctgggcttctaccctgcggagatcacactgacctggcagcgggatggggaggaccagacccaggacacggagctcgtggagaccaggcctgcaggggatggaaccttccagaagtgggcggctgtggtggtgccttctggagaggagcagagatacacctgccatgtgcagcatgagggtctgcccaagcccctcaccctgagatgggagctgtcttcccagcccaccatccccatcgtgggcatcattgctggcctggttctccttggagctgtgatcactggagctgtggtcgctgccgtgatgtggaggaggaagagctcagatagaaaaggagggagttacactcaggctgcaagcagtgacagtgcccagggctctgatgtgtctctcacagcttgtaaagtgtga

SEQ ID NO: 149090 - DNA, 1607 bp, Homo sapiens
atggccgtcatggcgccccgaaccctcgtcctgctactctcgggggctctggccctgacccagacctgggcgggctctcactccatgaggtatttctacacctccgtgtcccggcccggccgcggggagccccgcttcatcgcagtgggctacgtggacgacacgcagttcgtgcggttcgacagcgacgccgcgagccagaggatggagccgcgggcgccgtggatagagcaggagggtccggagtattgggacggggagacacggaaagtgaaggcccactcacagactcaccgagtggacctggggaccctgcgcggctactacaaccagagcgaggccggttctcacaccgtccagaggatgtatggctgcgacgtggggtcggactggcgcttcctccgcgggtaccaccagtacgcctacgacggcaaggattacatcgccctgaaagaggacctgcgctcttggaccgcggcggacatggcagctcagaccaccaagcacaagtgggaggcggcccatgtggcggagcagttgagagcctacctggagggcacgtgcgtggagtggctccgcagatacctggagaacgggaaggagacgctgcagcgcacggacgcccccaaaacgcatatgactcaccacgctgtctctgaccatgaagccaccctgaggtgctgggccctgagcttctaccctgcggagatcacactgacctggcagcgggatggggaggaccagacccaggacacggagctcgtggagaccaggcctgcaggggatggaaccttccagaagtgggcggctgtggtggtgccttctggacaggagcagagatgagcgaggacggttctcacaccatccagataatgtatggctgcgacgtggggccggacgggcgcttcctccgcgggtaccggcaggacgcctacgacggcaaggattacatcgccctgaacgaggacctgcgctcttggaccgcggcggacatggcagctcagatcaccaagcgcaagtgggaggcggtccatgcggcggagcagcggagagtctacctggagggccggtgcgtggacgggctccgcagatacctggagaacgggaaggagacgctgcagcgcacggacccccccaagacacatatgacccaccaccccatctctgaccatgaggccaccctgaggtgctgggccctgggcttctaccctgcggagatcacactgacctggcagcgggatggggaggaccagacccaggacacggagctcgtggagaccaggcctgcaggggatggaaccttccagaagtgggcggctgtggtggtgccttctggagaggagcagagatacacctgccatgtgcagcatgagggtctgcccaagcccctcaccctgagatgggagctgtcttcccagcccaccatccccatcgtgggcatcattgctggcctggttctccttggagctgtgatcactggagctgtggtcgctgccgtgatgtggaggaggaagagctcagatagaaaaggagggagttacactcaggctgcaagcagtgacagtgcccagggctctgatgtgtctctcacagcttgtaaagtgtga

SEQ ID NO: 149091 - DNA, 1239 bp, Homo sapiens
atggccgtcatggcgccccgaaccctcctcctgctactctcgggggccctggccctgacccagacctgggcgggctcccactccatgaggtatttcttcacatccgtgtcccggcccggccgcggggagccccgcttcatcgccgtgggctacgtggacgacacgcagttcgtgcggttcgacagcgacgccgcgagccagaagatggagccgcgggcgccgtggatagagcaggaggggccggagtattgggaccaggagacacggaatatgaaggcccactcacagactgaccgagcgaacctggggaccctgcgcggctactacaaccagagcgaggacggttctcacaccatccagataatgtatggctgcgacgtggggccggacgggcgcttcctccgcgggtaccggcaggacgcctacgacggcaaggattacatcgccctgaacgaggacctgcgctcttggaccgcggcggacatggcagctcagatcaccaagcgcaagtgggaggcggtccatgcggcggagcagcggagagtctacctggagggccggtgcgtggacgggctccgcagatacctggagaacgggaaggagacgctgcagcgcacggacccccccaagacacatatgacccaccaccccatctctgaccatgaggccaccctgaggtgctgggccctgggcttctaccctgcggagatcacactgacctggcagcgggatggggaggaccagacccaggacacggagctcgtggagaccaggcctgcaggggatggaaccttccagaagtgggcggctgtggtggtgccttctggagaggagcagagatacacctgccatgtgcagcatgagggtctgcccaagcccctcaccctgagggacacggagctcgtggagaccaggcctgcaggggatggaaccttccagaagtgggcgtctgtggtggtgccttctggacaggagcagagatacacctgccatgtgcagcatgagggtctccccaagcccctcaccctgagatgggagccgtcttcccagcccaccatccccatcgtgggcatcattgctggcctagttctctttggagctgtgttcgctggagctgtggtcgctgctgtgaggtggaggaggaagagctcagatagaaaaggagggagctactctcaggctgcaagcagtgacagtgcccagggctctgatatgtctctcacagcttgtaaagtgtga

SEQ ID NO: 149092 - DNA, 1272 bp, Homo sapiens
atggccgtcatggcgccccgaaccctcgtcctgctactctcgggggccctggccctgacccagacctgggcgggctcccactccatgaggtatttctacacctccgtgtcccggcccggccgcggggagccccgcttcatcgccgtgggctacgtggacgacacgcagttcgtgcggttcgacagcgacgccgcgagccagaggatggagccgcgggcgccgtggatagagcaggaggggccggagtattgggacctgcagacacggaatgtgaaggcccactcacagactgaccgagcgaacctggggaccctgcgcggctactacaaccagagcgaggacggttctcacaccatccagaggatgtatggctgcgacgtggggccggacgggcgcttcctccgcgggtaccagcaggacgcttacgacggcaaggattacatcgccctgaacgaggacctgcgctcttggaccgcggcggacatggcggctcagatcacccagcgcaagtgggagacggcccatgaggcggagcagtggagagcctacctggagggccggtgcgtggagtggctccgcagatacctggagaacgggaaggagacgctgcagcgcacggacgcccccaagacgcatatgactcaccacgctgtctctgaccatgaggccaccctgaggtgctgggccctgagcttctaccctgcggagatcacactgacctggcagcagggcgagtgcgtggacgggctccgcagatacctggagaacgggaaggagacgctgcagcgcacggacccccccaagacacatatgacccaccaccccatctctgaccatgaggccactctgaggtgctgggccctgagcttctaccctgcggagatcacactgacctggcagcgggatggggaggaccagacccaggacacggagctcgtggagaccaggcctgcaggggatggaaccttccagaagtgggcggctgtggtggtaccttctggaaaggagaagagatacacctgccatgtgcagcatgagggtctgcccgagcccctcaccctgagatgggagccatcttcccagcccaccatccccattgtgggcatcattgctggcctggttctccttggagctgtgatcgctggagctgtggtcgctgccgtgatgtggaggaagaagagctcagttagaaaaggagggagctactctcaggctgcaagcagtgacagtgcccagggctctgatgtgtctctcacagcttgtaaagtgtga

SEQ ID NO: 149093 - DNA, 1177 bp, Homo sapiens
atggccgtcatggcgccccgaaccctcgtcctgctactctcgggggctctggccctgacccagacctgggcgggctctcactccatgaggtatttcttcacatccgtgtcccggcccggccgcggggagccccgcttcatcgcagtgggctacgtggacgacacgcagttcgtgcggttcgacagcgacgccgcgagccagaggatggagccgcgggcgccgtggatagagcaggagggtccggagtattgggacggggagacacggaaagtgaaggcccactcacagactcaccgagtggacctggggaccctgcgcggctactacaaccagagcgaggccggttctcacaccgtccagaggatgtatggctgcgacgtggggtcggactggcgcttcctccgcgggtaccaccagtacgcctacgacggcaaggattacatcgccctgaacgaggacctgcgctcttggaccgcggcggacatggcagctcagaccaccaagcacaagtgggaggcggcccatgtggcggagcagttgagagcctacctggagggcacgtgcgtggagtggctccgcagatacctggagaacgggaaggagacgctgcagcgcacggacgcccccaaaacgcatatgactcaccacgctgtctctgaccatgaagccaccctgaggtgctgggccctgagcttctaccctgcggagatcacactgacctcaccacgctgtctctgaccatgaggccaccctgaggtgctgggccctgagcttctaccctgcggagatcacactgacctggcagcgggatggggaggaccagacccaggacacggagcttgtggagaccaggcctgcaggggatggaaccttccagaagtgggcgtctgtggtggtgccttctggacaggagcagagatacacctgccatgtgcagcatgagggtctgcccaagcccctcaccctgagatgggagccgtcttcccagcccaccatccccatcgtgggcatcattgctggcctagttctctttggagctatgttcgctggagctgtggtcgctgctgtgaggtggaggaggaagagctcagatagaaaaggagggagctactctcaggctgcaagcagtgacagtgcccagggctctgatatgtctctcacagcttgtaaagtgtga

SEQ ID NO: 149094 - DNA, 1185 bp, Homo sapiens
atggccgtcatgccgccccgaaccctcctcctgctactctcgggggccctggccctgacccagacctgggcaggctcccactccatgaggtatttcttcacatccgtgtcccggcccggccgcggggagccccgcttcatcgcagtgggctacgtggacgactcgcagttcgtgcagttcgacagcgacgccgcgagccagaggatggagccgcgggcgccgtggatagagcaggaggagccggagtattgggacgaggagacacggaatgtgaaggcccactcacagactaaccgagcgaacctggggaccctgcgcggctactacaaccagagcgaggacggttctcacaccatccagataatgtatggctgcgacgtggggtcggacgggcgcttcctccgcgggtaccggcaggagagcgaggacggttctcacaccatccagaggatgtatggctgcgacgtggggccggacgggcgcttcctccgcgggtaccagcaggacgcttacgacggcaaggattacatcgccctgaacgaggacctgcgctcttggaccgcggcggacatggcggctcagatcacccagcgcaagtgggagacggcccatgaggcggagcagtggagagcctacctggagggccggtgcgtggagtggctccgcagatacctggagaacgggaaggagacgctgcagcgcacggacgcccccaagacgcatatgactcaccacgctgtctctgaccatgaggccaccctgaggtgctgggccctgagcttctaccctgcggagatcacactgacctggcagcgggatggggaggaccagacccaggacacggagctcgtggagaccaggcctgcaggggatgggaccttccagaagtgggcgtctgtggtggtgccttctggacaggagcagagatacacctgccatgtgcagcatgagggtctgcccaagcccctcaccctgagatgggagccgtcttcccagcccaccatccccatcgtgggcatcattgctggcctggttctctttggagctgtgatcgctggagctgtggtcgctgctgtgatgtggaggaggaagagctcagatagaaaaggagggagctactctcaggctgcaagcagtgacagtgcccagggctctgatatgtctctcacagcttgtaaagtgtga

SEQ ID NO: 149095 - DNA, 1551 bp, Homo sapiens
atggccgtcatggcgccccgaaccctcgtcctgctactctcgggggctctggccctgacccagacctgggcgggctctcactccatgaggtatttcttcacatccgtgtcccggcccggccgcggggagccccgcttcatcgcagtgggctacgtggacgacacgcagttcgtgcggttcgacagcgacgccgcgagccagaggatggagccgcgggcgccgtggatagagcaggagggtccggagtattgggacggggagacacggaaagtgaaggcccactcacagactcaccgagtggacctggggaccctgcgcggctactacaaccagagcgaggccggttctcacaccgtccagaggatgtatggctgcgacgtggggtcggactggcgcttcctccgcgggtaccaccagtacgcctacgacggcaaggattacatcgccctgaaagaggacctgcgctcttggaccgcggcggacatggcagctcagaccaccaagcacaagtgggaggcggcccatgtggcggagcagttgagagcctacctggagggcacgtgcgtggagtggctccgcagatacctggagaacgggaaggagacgctgcagcgcagcgaggccggttctcacaccatccagatgatgtatggctgcgacgtggggtcggacgggcgcttcctccgcgggtaccagcaggacgcctacgacggcaaggattacatcgccttgaacgaggacctgcgctcttggaccgcggcggacatggcggctcagatcacccagcgcaagtgggaggcggcccgtgtggcggagcagttgagagcctacctggagggcacgtgcgtggagtggctccgcagatacctggagaacgggaaggagacgctgcagcgcacggacccccccaagacgcatatgactcaccacgctgtctctgaccatgaggccaccctgaggtgctgggccctgagcttctaccctgcggagatcacactgacctggcagcgggatggggaggaccagacccaggacacggagctcgtggagaccaggcctgcaggggatggaaccttccagaagtgggcgtctgtggtggtgccttctggacaggagcagagatacacctgccatgtgcagcatgagggtctccccaagcccctcaccctgagatgggagccgtcttcccagcccaccatccccatcgtgggcatcattgctggcctagttctctttggagctgtgttcgctggagctgtggtcgctgctgtgaggtggaggaggaagagctcagatagaaaaggagggagctactctcaggctgcaagcagtgacagtgcccagggctctgatatgtctctcacagcttgtaaagtgtgagacagctgccttgtgtgggactgagaggcaagatttgttcctgcccttccctttgtgacttgaagtaccctgactttgtttctgcaaaggcacctgcatgtgtctgtgttcttgtaggcataatgtgaggaggtggggagaccaccccacccccatgtccaccatgaccct

SEQ ID NO: 149096 - DNA, 1653 bp, Homo sapiens
atggccgtcatggcgccccgaaccctcgtcctgctactctcgggggccctggccctgacccagacctgggcgggctcccactccatgaggtatttctacacctccgtgtcccggcccggccgcggggagccccgcttcatcgccgtgggctacgtggacgacacgcagttcgtgcggttcgacagcgacgccgcgagccagaggatggagccgcgggcgccgtggatagagcaggaggggccggagtattgggaccggaacacacggaatgtgaaggcccactcacagactgaccgagagaacctggggaccctgcgcggctactacaaccagagcgaggacggttctcacaccatccagaggatgtatggctgcgacgtggggccggacgggcgcttcctccgcgggtaccagcaggacgcttacgacggcaaggattacatcgccctgaacgaggacctgcgctcttggaccgcggcggacatggcggctcagatcacccagcgcaagtgggagacggcccatgaggcggagcagtggagagcctacctggagggccggtgcgtggagtggctccgcagatacctggagaacgggaaggagatgtatggctgcgacgtggggccggacgggcgcttcctccgcgggtaccagcaggacgcttacgacggcaaggattacatcgccctgaacgaggacctgcgctcttggaccgcggcggacatggcggctcagatcacccagcgcaagtgggagacggcccatgaggcggagcagtggagagcctacctggagggccggtgcgtggagtggctccgcagatacctggagaacgggaaggagacgctgcagcgcacggacgcccccaagacgcatatgactcaccacgctgtctctgaccatgaggccaccctgaggtgctgggccctgagcttctaccctgcggagatcacactgacctggcagcgggatggggaggaccagacccaggacacggagctcgtggagaccaggcctgcaggggatgggaccttccagaagtgggcgtctgtggtggtgccttctggacaggagcagagatacacctgccatgtgcagcatgagggtctgcccaagcccctcaccctgagatgggagccgtcttcccagcccaccatccccatcgtgggcatcattgctggcctggttctctttggagctgtgatcgctggagctgtggtcgctgctgtgatgtggaggaggaagagctcagatagaaaaggagggagctactctcaggctgcaagcagtgacagtgcccagggctctgatatgtctctcacagcttgtaaagtgtgagacagctgccttgtgtgggactgagaggcaagatttgttcctgcccttccctttgtgacttgaagaaccctgactttgtttctgcaaaggcacctgcatgtgtctgtgttcttgtaggcataatgtgaggaggtggggagaccaccccacccccatgtccaccatgaccctcttcccacgctgacctgtgctccctccccaatcatctttcctgttccagagaggtggggctgaggtgtctccatctctgcctcaacttcatggtgcactgagctgtaactttttccttccctattaaaattagaacctgagtat

SEQ ID NO: 149097 - DNA, 2458 bp, Homo sapiens
atggccgtcatggcgccccgaaccctcgtcctgctactctcgggggctctggccctgacccagacctgggcgggctctcactccatgaggtatttctacacctccgtgtcccggcccggccgcggggagccccgcttcatcgcagtgggctacgtggacaacacgcagttcgtgcggttcgacagcgacgccgcgagccagaggatggagccgcgggcgccgtggatagagcaggagggtccggagtattgggacggggagacacggaaagtgaaggcccactcacagactcaccgagtggacctggggaccctgcgcggctactacaaccagagcgaggccggttctcacaccgtccagaggatgtatggctgcgacgtggggtcggactggcgcttcctccgcgggtaccaccagtacgcctacgacggcaaggattacatcgccctgaaagaggacctgcgctcttggaccgcggcggacatggcagctcagaccaccaagcacaagtgggaggcggcccatgtggcggagcagttgagagcctacctggagggcacgtgcgtggagtggctccgcagatacctggagaacgggaaggagacgctgcagcgcacggacgcccccaaaacgcatatgactcaccacgctgtctctgaccatgaagccaccctgaggtgctgggccctgagcttctaccctgcggagatcacactgacctggcagcgggatggggaggaccagacccaggacacggagctcgtggagaccaggcctgcaggggatggaaccttccagaagtgggcggctgtggtggtgccttctggacaggagcagagatacacctgccatgtgcagcatgagggtttgcccaagcccctcaccctgagatgggagccgtcttcccagcccaccatccccatcgtgggcatcattgctggcctggttctctttggagctgtgatcactggagctgtggtcgctgctgtgatgtggaggaggaagagctcagatagaaaaggagggagctactccatcgccgtgggctacgtggacgacacgcagttcgtgcggttcgacagcgacgccgcgagccagaggatggagccgcgggcgccgtggatagagcaggaggggccggagtattgggaccggaacacacggaatgtgaaggcccagtcacagactgaccgagagagcctgcggatcgcgctccgctactacaaccagagcgaggacggttctcacaccatccagaggatgtatggctgcgacgtggggccggacgggcgcttcctccgcgggtaccagcaggacgcttacgacggcaaggattacatcgccctgaacgaggacctgcgctcttggaccgcggcggacatggcggctcagatcacccagcgcaagtgggagacggcccatgaggcggagcagtggagagcctacctggagggccggtgcgtggagtggctccgcagatacctggagaacgggaaggagacgctgcagcgcacggacgcccccaagacgcatatgactcaccacgctgtctctgaccatgaggccaccctgaggtgctgggccctgagcttctaccctgcggagatcacactgacctggcagcgggatggggaggaccagacccaggacacggagctcgtggagaccaggcctgcaggggatgggaccttccagaagtgggcgtctgtggtggtgccttctggacaggagcagagatacacctgccatgtgcagcatgagggtctgcccaagcccctcaccctgagatgggagccgtcttcccagcccaccatccccatcgtgggcatcattgctggcctggttctctttggagctgtgatcgctggagctgtggtcgctgctgtgatgtggaggaggaagagctcagatagaaaaggagggagctactctcaggctgcaagcagtgacagtgcccagggctctgatatgtctctcacagcttgtaaagtgtgagacagctgccttgtgtgggactgagaggcaagatttgttcctgcccttccctttgtgacttgaagaaccctgactttgtttctgctggcagcgggatggggaggaccagacccaggacacggagctcgtggagaccaggcctgcaggggatggaaccttccagaagtgggcggctgtggtggtgccttctggacaggagcagagatacacctgccatgtgcagcatgagggtttgcccaagcccctcaccctgagatgggagccgtcttcccagcccaccatccccatcgtgggcatcattgctggcctggttctctttggagctgtgatcactggagctgtggtcgctgctgtgatgtggaggaggaagagctcagatagaaaaggagggagctactctcaggctgcaagcagtgacagtgcccagggctctgatgtgtctctcacagcttgtaaagtgtga

SEQ ID NO: 149098 - DNA, 1830 bp, Homo sapiens
atggccgtcatggcgccccgaaccctcgtcctgctactctcgggggctctggccctgacccagacctgggcgggctctcactccatgaggtatttctacacctccgtgtcccggcccggccgcggggagccccgcttcatcgcagtgggctacgtggacaacacgcagttcgtgcggttcgacagcgacgccgcgagccagaggatggagccgcgggcgccgtggatagagcaggagggtccggagtattgggacggggagacacggaaagtgaaggcccactcacagactcaccgagtggacctggggaccctgcgcggctactacaaccagagcgaggccggttctcacaccgtccagaggatgtatggctgcgacgtggggtcggactggcgcttcctccgcgggtaccaccagtacgcctacgacggcaaggattacatcgccctgaaagaggacctgcgctcttggaccgcggcggacatggcagctcagaccaccaagcacaagtgggaggcggcccatgtggcggagcagttgagagcctacctggagggcacgtgcgtggagtggctccgcagatacctggagaacgggaaggagacgctgcagcgcacggacgcccccaaaacgcatatgactcaccacgctgtctctgaccatgaagccaccctgaggtgctgggccctgagcttctaccctgcggagatcacactgacctggcagcgggatggggaggaccagacccaggacacggagctcgtggagaccaggcctgcaggggatggaaccttccagaagtgggcggctgtggtggtgccttctggacaggagcagagatacacctgccatgtgcagcatgagggtttgcccaagcccctcaccctgagatgggagccgtcttcccagcccaccatccccatcgtgggcatcattgctggcctggttctctttggagctgtgatcactggagctgtggtcgctgctgtgatgtggaggaggaagagctcagatagaaaaggagggagctactctcaggctgcaagcagtgacagtgcccaggggagcgaggacggttctcacaccatccagataatgtatggctgcgacgtggggccggacgggcgcttcctccgcgggtaccggcaggacgcctacgacggcaaggattacatcgccctgaacgaggacctgcgctcttggaccgcggcggacatggcagctcagatcaccaagcgcaagtgggaggcggtccatgcggcggagcagcggagagtctacctggagggccggtgcgtggacgggctccgcagatacctggagaacgggaaggagacgctgcagcgcacggacccccccaagacacatatgacccaccaccccatctctgaccatgaggccaccctgaggtgctgggccctgggcttctaccctgcggagatcacactgacctggcagcgggatggggaggaccagacccaggacacggagctcgtggagaccaggcctgcaggggatggaaccttccagaagtgggcggctgtggtggtgccttctggagaggagcagagatacacctgccatgtgcagcatgagggtctgcccaagcccctcaccctgagatgggagctgtcttcccagcccaccatccccatcgtgggcatcattgctggcctggttctccttggagctgtgatcactggagctgtggtcgctgccgtgatgtggaggaggaagagctcagatagaaaaggagggagttacactcaggctgcaagcagtgacagtgcccagggctctgatgtgtctctcacagcttgtaaagtgtga

SEQ ID NO: 149099 - DNA, 1185 bp, Homo sapiens
atggccgtcatggcgccccgaaccctcctcctgctactctcgggggccctggccctgacccagacctgggcgggctcccactccatgaggtatttcttcacatccgtgtcccggcccggccgcggggagccccgcttcatcgccgtgggctacgtggacgacacgcagttcgtgcggttcgacagcgacgccgcgagccagaagatggagccgcgggcgccgtggatagagcaggaggggccggagtattgggaccaggagacacggaatatgaaggcccactcacagactgaccgagcgaacctggggaccctgcgcggctactacaaccaggacgcctacgacggcaaggattacatcgccctgaacgaggacctgcgctcttggaccgcggcggacatggcagctcagatcaccaagcgcaagtgggaggcggtccatgcggcggagcagcggagagtctacctggagggccggtgcgtggacgggctccgcagatacctggagaacgggaaggagacgctgcagcgcacggacccccccaagacacatatgacccaccaccccatctctgaccatgaggccaccctgaggtgctgggccctgggcttctaccctgcggagatcacactgacctggcagcgggatggggaggaccagacccaggacacggagctcgtggagaccaggcctgcaggggatggaaccttccagaagtgggcggctgtggtggtgccttctggagaggagcagagatacacctgccatgtgcagcatgagggtctgcccaagcccctcaccctgagatgggagctgtcttcccagcccaccatccccatcgtgggcatcattgctggcctggttctccttggagctgtgatcactggagctgtggtcgctgccgtgatgtggaggaggaagagctcagatagaaaaggagggagttacactcaggctgcaagcagtgacagtgcccagggctctgatgtgtctctcacagcttgtaaagtgtgagacagctgccttgtgtgggactgagaggcaagagttgttcctgcccttccctttgtgacttgaagaaccctgactttgtttctgcaaaggcacctgcatgtgtctgtgttggtgtaggcataatgtgaggagatagggagaccaccccacccccatgtccaccatgaccct

SEQ ID NO: 149100 - DNA, 952 bp, Homo sapiens
atggccgtcatggcgccccgaaccctcgtcctgctactctcgggggccctggccctgacccagacctgggcgggctcccactccatgaggtatttctacacctccgtgtcccggcccggccgcggggagccccgcttcatcgccgtgggctacgtggacgacacgcagttcgtgcggttcgacagcgacgccgcgagccagaggatggagccgcgggcgccgtggatagagcaggaggggccggagtattgggaccggaacacacggaatgtgaaggcccactcacagactgaccgagagagcctgcggatcgcgctccgctactacaaccagagcgaggacggttctcacaccatccagaggatgtatggctgcgacgtggggccggacgggcgcttcctccgcgggtaccagcaggacgcttacgacggcaaggattacatcgccctgaacgaggacctgcgctcttggaccgcggcggacatggcggctcagatcacccagcgcaagtgggagacggcccatgaggcggagcagtggagagcctacctggagggccggtgcgtggagtggctccgcagatacctggagaacgggaaggagggacacggagctcgtggagaccaggcctgcaggggatggaaccttccagaagtgggcgtctgtggtggtgccttctggacaggagcagagatacacctgccatgtgcagcatgagggtctccccaagcccctcaccctgagatgggagccgtcttcccagcccaccatccccatcgtgggcatcattgctggcctagttctctttggagctgtgttcgctggagctgtggtcgctgctgtgaggtggaggaggaagagctcagatagaaaaggagggagctactctcaggctgcaagcagtgacagtgcccagggctctgatatgtctctcacagcttgtaaagtgtga

SEQ ID NO: 149101 - DNA, 1435 bp, Homo sapiens
atggccgtcatggcgccccgaaccctcgtcctgctactctcgggggctctggccctgacccagacctgggcgggctctcactccatgaggtatttctacacctccgtgtcccggcccggccgcggggagccccgcttcatcgcagtgggctacgtggacgacacgcagttcgtgcggttcgacagcgacgccgcgagccagaggatggagccgcgggcgccgtggatagagcaggagggtccggagtattgggacggggagacacggaaagtgaaggcccactcacagactcaccgagtggacctggggaccctgcgcggctactacaaccagagcgaggccggttctcacaccgtccagaggatgtttggctgcgacgtggggtcggacgggcgcttcctccgcgggtaccaccagtacgcctacgacggcaaggattacatcgccctgaaagaggacctgcgctcttggaccgcggcggacatggcagctcagaccaccaagcacaagtgggaggcggcccatgtggcggagcagttgagagcctacctggagggcacgtgcgtggagtggctccgcagatacctggagaacgggaaggagacgctgcagcgcacggacgcccccaaaacgcatatgactcaccacgctgtctctgaccatgaagccaccctgaggtgctgggccctgagcttctaccctgcggagatcacactgacctggcagcgggatggggaggaccagacccaggacacggagctcgtggagaccaggcctgcaggggatggaaccttccagaagtgggcggctgtggtggtgccttctggacaggagcagagatacacctgccatgtgcagcatgagggtttgcccaagcccctcaccctgagatgggagccgtcttcccagcccaccatccccatcgtgggcatcattgctggcctggttctctttggagctgtgatcactggagctgtggtcgctgctgtgatgtggaggaggaagagctcagatagaaaaggagggagctactctcaggctgcaagcagtgacagtgcccaggggggatggggaggaccagacccaggacacggagctcgtggagaccaggcctgcaggggatgggaccttccagaagtgggcgtctgtggtggtgccttctggacaggagcagagatacacctgccatgtgcagcatgagggtctgcccaagcccctcaccctgagatgggagccgtcttcccagcccaccatccccatcgtgggcatcattgctggcctggttctctttggagctgtgatcgctggagctgtggtcgctgctgtgatgtggaggaggaagagctcagatagaaaaggagggagctactctcaggctgcaagcagtgacagtgcccagggctctgatatgtctctcacagcttgtaaagtgtga

SEQ ID NO: 149102 - DNA, 1934 bp, Homo sapiens
atggccgtcatggcgccccgaaccctcgtcctgctactctcgggggccctggccctgacccagacctgggcgggctcccactccatgaggtatttctacacctccgtgtcccggcccggccgcggggagccccgcttcatcgccgtgggctacgtggacgacacgcagttcgtgcggttcgacagcgacgccgcgagccagaggatggagccgcgggcgccgtggatagagcaggaggggccggagtattgggaccggaacacacggaatgtgaaggcccactcacagactgaccgagcgaacctggggaccctgcgcggctactacaaccagagcgaggacggttctcacaccatccagaggatgtatggctgcgacgtggggccggacgggcgcttcctccgcgggtaccagcagaacgcttacgacggcaaggattacatcgccctgaacgaggacctgcgctcttggaccgcggcggacatggcggctcagatcacccagcgcaagtgggagacggcccatgaggcggagcagtggagagcctacctggagggccggtgcgtggagtggctccgcagatacctggagaacgggaaggagacgctgcagcgcacggacgcccccaagacgcatatgactcaccacgctgtctctgaccatgaggccaccctgaggtgctgggccctgagcttctaccctgcggagatcacactgacctggcagcgggatggggaggaccagacccaggacacggagctcgtggagaccaggcctgcaggggatgggaccttccagaagtgggcgtctgtggtggtgccttctggacaggagcagagatacacctgccatgtgcagcatgagggtctgcccaagcccctcaccctgagatgggagccgtcttcccagcccaccatccccatcgtgggcatcattgctggcctggttctctttggagctgtgatcgctggagctgtggtcgctgctgtgatgtggaggaggaagagctcagatagaaaagggacgccgcgagccagaggatggagccgcgggcgccgtggatagagcaggaggggccggagtattgggaccggaacacacggaaagtgaaggcccagtcacagactgaccgagtggacctggggaccctgcgcggctactacaaccagagcgaggacggttctcacaccatccagaggatgtatggctgcgacgtggggccggacgggcgcttcctccgcgggtaccagcaggacgcttacgacggcaaggattacatcgccctgaacgaggacctgcgctcttggaccgcggcggacatggcggctcagatcacccagcgcaagtgggagacggcccatgaggcggagcagtggagagcctacctggagggcacgtgcgtggagtggctccgcagatacctggagaacgggaaggagacgctgcagcgcacggacgcccccaagacacatatgactcaccacgctgtctctgaccatgaggccaccctgaggtgctgggccctgagcttctaccctgcggagatcacactgacctggcagcgggatggggaggaccagacccaggacacggagctcgtggagaccaggcctgcaggggatggaaccttccagaagtgggcgtctgtggtggtgccttctggacaggagcagagatacacctgccatgtgcagcatgagggtctgcccaagcccctcaccctgagatgggagccgtcttcccagcccaccatccccatcgtgggcatccttgctggcctggttctctttggagctgtgatcgctggagctgtggtcgctgctgtgatgtggaggaggaagagctcagatagaaaaggagggagctactctcaggctgcaagcagtgacagtgcccagggctctgatatgtctctcacagcttgtaaagtgtga

SEQ ID NO: 149103 - DNA, 2108 bp, Homo sapiens
atggccgtcatgccgccccgaaccctcctcctgctactctcgggggccctggccctgacccagacctgggcaggctcccactccatgaggtatttcttcacatccgtgtcccggcccggccgcggggagccccgcttcatcgcagtgggctacgtggacgactcgcagttcgtgcagttcgacagcgacgccgcgagccagaggatggagccgcgggcgccgtggatagagcaggaggagccggagtattgggacgaggagacacggaatgtgaaggcccactcacagactaaccgagcgaacctggggaccctgcgcggctactacaaccagagcgaggacggttctcacaccatccagataatgtatggctgcgacgtggggtcggacgggcgcttcctccgcgggtaccggcaggacgcctacgacggcaaggattacatcgccctgaacgaggacctgcgctcttggaccgcggcggacatggcggctcagatcaccaagcgcaagtgggaggcggcccgtcgggcggagcagctgagagcctacctggagggcacgtgcgtggagtggctccgcagatacctggagaacgggaaggagacgctgcagcgcacggacgcccccaagacgcatatgacattgggacggggagacacggaaagtgaaggcccactcacagactcaccgagtggacctggggaccctgcgcggctactacaaccagagcgaggccggttctcacaccgtccagaggatgtatggctgcgacgtggggtcggactggcgcttcctccgcgggtaccaccagtacgcctacgacggcaaggattacatcgccctgaaagaggacctgcgctcttggaccgcggcggacatggcagctcagaccaccaagcacaagtgggaggcggcccatgtggcggagcagttgagagcctacctggagggcacgtgcgtggagtggctccgcagatacctggagaacgggaaggagacgctgcagcgcacggacgcccccaaaacgcatatgactcaccacgctgtctctgaccatgaagccaccctgaggtgctgggccctgagcttctaccctgcggagatcacactgacctggcagcgggatggggaggaccagacccaggacacggagctcgtggagaccaggcctgcaggggatggaaccttccagaagtgggcggctgtggtggtgccttctggacaggagcagagatacacctgccatgtgcagcatgagggtttgcccaagcccctcaccctgagatgggagccgtcttcccagcccaccatccccatcgtgggcatcattgctggcctggttctctttggagctgtgatcactggagctgtggtcgctgctgtgatgtggaggaggaagagctcagatagaaaaggagggagctactctcaggctgcaagcagtgacagtgcccagggctctagaggacctgcgctcttggaccgcggcggacatggcagctcagaccaccaagcacaagtgggaggcggcccatgtggcggagcagttgagagcctacctggagggcacgtgcgtggagtggctccgcagatacctggagaacgggaaggagacgctgcagcgcacggacgcccccaaaacgcatatgactcaccacgctgtctctgaccatgaagccaccctgaggtgctgggccctgagcttctaccctgcggagatcacactgacctggcagcgggatggggaggaccagacccaggacacggagctcgtggagaccaggcctgcaggggatggaaccttccagaagtgggcggctgtggtggtgccttctggacaggagcagagatacacctgccatgtgcagcatgagggtttgcccaagcccctcaccctgagatgggagccgtcttcccagcccaccatccccatcgtgggcatcattgctggcctggttctctttggagctgtgatcactggagctgtggtcgctgctgtgatgtggaggaggaagagctcagatagaaaaggagggagctactctcaggctgcaagcagtgacagtgcccagggctctgatgtgtctctcacagcttgtaaagtgtga

SEQ ID NO: 149104 - DNA, 2615 bp, Homo sapiens
  misc_feature (1)...(2615): n = a,t,c or g
atggccgtcatggcgccccgaaccctcgtcctgctactctcgggggccctggccctgacccagacctgggcgggctcccactccatgaggtatttctacacttccgtgtcccggcccggccgcggggagccccgcttcatcgccgtgggctacgtggacgacacgcagttcgtgcggttcgacagcgacgccgcgagccagaggatggagccgcgggcgccgtggatagagcaggaggggccggagtattgggaccggaacacacggaatgtgaaggcccactcacagactgaccgagtggacctggggaccctgcgcggctactacaaccagagcgaggccggttctcacaccatccagatgatgtatggctgcgacgtggggtcggacgggcgcttcctccgcgggtaccggcaggacgcctacgacggcaaggattacatcgccctgaaagaggacctgcgctcttggaccgcggcggacatggcagctcagaccaccaagcacaagtgggaggcggcccatgtggcggagcagtggagagcctacctggagggcacgtgcgtggagtggctccgcagatacctggagaacgggaaggagacgctgcagcgcacggacgcccccaaaacgcatatgactcaccacgctgtctctgaccatgaagccaccctgaggtgctgggccctgagcttctaccctgcggagatcacactgacctggcagcgggatggggaggaccagacccaggacacggagctcgtggagaccaggcctgcaggggatggaaccttccagaagtgggtggctgtggtggtgccttctggacaggagcagagatacacctgccatgtgcagcatgagggtttgcccaagcccctcaccctgagatgggagccgtcttcccagcccaccatccccatcgtgggcatcattgctggcctggttctctttggagctgtgatcactggagctgtggtcgctgctgtgatgtggaggaggaagagctcagatagaaaaggagggagctactctcaggctgcaagcagtgacagtgcccagggctctgatgtgtctnnnnnnnnnnnnnnnnnnnnnnnnnnnnnnnnnnnatggccgtcatggcgccccgaaccctcctcctgctactctcgggggccctggccctgacccacacctgggcgggctcccactccatgaggtatttcttcacatccgtgtcccggcccggcagtggagagccccgcttcatcgcagtgggctacgtggacgacacgcagttcgtgcggttcgacagcgacgccgcgagccagaggatggagccgcgggcgccgtggatagagcaggagaggcctgagtattgggaccaggagacacggaatgtgaaggcccagtcacagactgaccgagtggacctggggaccctgcgcggctactacaaccagagcgaggccggttctcacaccatccagataatgtatggctgcgacgtggggtcggacgggcgcttcctccgcgggtatgaacagcacgcctacgacggcaaggattacatcgccctgaacgaggacctgcgctcttggaccgcggcggacatggcggctcagatcacccagcgcaagtgggaggcggcccgttgggcggagcagttgagagcctacctggagggcacgtgcgtggagtggctccgcagatacctggagaacgggaaggagacgctgcagcgcacggacccccccaagacacatatgacccaccaccccatctctgaccatgaggccaccctgaggtgctgggccctgggcttctaccctgcggagatcacactgacctggcagcgggatggggaggaccagacccaggacacggagctcgtggagaccaggcctgcaggggatggaaccttccagaagtgggcggctgtggtggtgccttctggagaggagcagagatacacctgccatgtgcagcatgagggtctgcccaagcccctcaccctgagatgggagctgtcttcccagcccaccatccccatcgtgggcatcattgctggcctggttctccttggagctgtgatcactggagctgtggtcgctgccgtgatgtggaggaggaagagctcagatagaaaagcggacgcccccaaaacgcatatgactcaccacgctgtctctgaccatgaagccaccctgaggtgctgggccctgagcttctaccctgcggagatcacactgacctggcagcgggatggggaggaccagacccaggacacggagctcgtggagaccaggcctgaaggggatggaaccttccagaagtgggcggctgtggtggtgccttctggacaggagcagagatacacctgccatgtgcagcatgagggtttgcccaagcccctcaccctgagatgggagccgtcttcccagcccaccatccccatcgtgggcatcattgctggcctggttctctttggagctgtgatcactggagctgtggtcgctgctgtgatgtggaggaggaagagctcagatagaaaaggagggagctactctcaggctgcaagcagtgacagtgcccagggctctgatgtgtctctcacagcttgtaaagtgtga

SEQ ID NO: 149105 - DNA, 1593 bp, Homo sapiens
atggccgtcatggcgccccgaaccctcgtcctgctactctcgggggccctggccctgacccagacctgggcaggctcccaatccatgaggtatttctccacatccgtgtcccggcccggccgcggggagccccgcttcatcgccgtgggctacgtggacgacacgcagttcgtgcggttcgacagcgacgccgcgagccagaggatggagccgcgggcgccgtggatagagcaggaggggccggagtattgggacggggagacacggaaagtgaaggcccactcacagactgaccgagagaacctgcggatcgcgctccgctactacaaccagagcgaggccggttctcacaccctccagatgatgtttggctgcgacgtggggtcggacgggcgcttcctccgcgggtaccaccagtacgcctacgacggcaaggattacatcgccctgaaagaggacctgcgctcttggaccgcggcggacatggcggctcagatcaccaagcgcaagtgggaggcggcccatgtggcggagcagcagagagcctacctggagggcacgtgcgtggacgggctccgcagatacctggagaacgggaaggagacgctgcagcgcgcggacccccccaagacacatatgacccaccaccccatctctgaccatgaggccactctgagatgctgggccctgggcttctaccctgcggagatcacactgacctggcagcgggatggggaggaccagacccaggacacggagcttgtggagaccaggcctgcaggggatggaaccttccagaagtgggcagctgtggtggtaccttctggagaggagcagagatacacctgccatgtgcagcatgagggtctgcccaagcccctcaccctgagatgggagccatcttcccagcccaccgtccccatcgtgggcatcattgctggcctggttctccttggagctgtgatcactggagctgtggtcgctgctgtgatgtggaggaggaacagctcagatagaaaaggagggagctactctcaggctgcaagcagtgacagtgcccagggctctgatgtgtctctcacagcttgtaaagtgtgaacgctgcagcgcacggacgcccccaagacgcatatgactcaccacgctgtctctgaccatgaggccaccctgaggtgctgggccctgagcttctaccctgcggagatcacactgacctggcagcgggatggggaggaccagacccaggacacggagctcgtggagaccaggcctgcaggggatgggaccttccagaagtgggcgtctgtggtggtgccttctggacaggagcagagatacacctgccatgtgcagcatgagggtctgcccaagcccctcaccctgagatgggagccgtcttcccagcccaccatccccatcgtgggcatcattgctggcctggttctctttggagctgtgatcgctggagctgtggtcgctgctgtgatgtggaggaggaagagctcagatagaaaaggagggagctactctcaggctgcaagcagtgacagtgcccagggctctgatatgtctctcacagcttgtaaagtgtga

SEQ ID NO: 149106 - DNA, 3104 bp, Homo sapiens
  misc_feature (1)...(3104): n = a,t,c or g
gaaggttctcatgtgttccatttattttgtctctcaaattttaggaatcttctcctttaattaactcatcaacctctcatggcaagaatttgagaaagtaaatttatactcaggttctaattttaatagggaaggaagaagttacagctcagtgcaccatgaagttgagacagagatggagacacctcagccccacctctctggaacaggaaagatgattggagagggagcacaggtcagcgtgggaagagggtcatggtggacatcggggtggggtggtctccccacctcctcacattatgcctacacgaacacagacacatgcaggtgcctttgcagaaacaaagtcagggttcttcaagtcacaaagggaagggcaggaacaactcttgcctctcagtcccacacaaggcagctgtctcacactttacaagctgtgagagacacatcagagccctgggcactgtcactgcttgcagcctgaagagccctgggcactgtcactgcttgcagcctgagagtagctccctccttttctatctgagctcttcctcctccacatcacagcagcgaccacagctccagtgatcacagctccaaagagaaccaggccagcaatgatgcccacgatggggatggtgggctgggaagacggctcccatctcagggtgaggggcttgggcaaaccctcatgctgcacatggcaggtgtatctctgctcctgtccagaaggcaccaccacagccgcccacttctggaaggttccatcccctgcaggcctggtctccacgagctccgtgtcctgggtctggtcctccccatcccgctgccaggtcagtgtgatctccgcagggtagaagctcagggcccagcacctcagggtggcttcatggtcagagacagcgtggtgagtcatatgcgttttgggggcgtccgtgcgctgcagcgtctccttcccgttctccaggtatctgcggagccactccacgcacgtgccctccaggtaggctctcaactgctccgcctcatgggccgcctcccacttgtgcttggtggtctgagctgccatgtccgccgcggtccaagagcgcaggtcctctttcagggcgatgtaatccttgccgtcgtaggcgtactggtggtacccgcggaggaagcgccagtccgaccccacgtcgcagccatacatcctctggacggtgtgagaaccggcctcgctctggttgtagtagccgcgcagggtccccaggtccactcggtgagtctgtgagtgggccttcactttccgtgtctccccgtcccaatactccggaccctcctgctctatccacggcgcccgcggctccatcctctggctcgcggcgtcgctgtcgaaccgcacgaactgcgtgtcgtccacgtagcccactgcgatgaagcggggctccccgcggccgggccgggacacggatgtgaagaaatacctcatggagtgagagcccgcccaggtctgggtcagggccagagcccccgagagtagcaggacgagggttcggggcgccatgacnnnnnnnnnnnctcacattatgcctacacgaacacagacacatgcaggtgcctttgcagaaacaaagtcagggttcttcaagtcacaaagggaagggcaggaacaactcttgcctctcagtcccacacaaggcagctgtctcacactttacaagctgtgagagacacatcagagccctgggcactgtcactgcttgcagcctgagagtagctccctccttttctatctgagctcttcctcctccacatcacagcagcgaccacagctccagtgatcacagctccaaagagaaccaggccagcaatgatgcccacgatggggatggtgggctgggaagacggctcccatctcagggtgaggggcttgggcaaaccctcatgctgcacatggcaggtgtatctctgctcctgtccagaaggcaccaccacagccgcccacttctggaaggttccatcccctgcaggcctggtctccacgagctccgtgtcctgggtctggtcctccccatcccgctgccaggtcagtgtgatctccgcagggtagaagctcagggcccagcacctcagggtggcttcatggtcagagacagcgtggtgagtcatatgcgttttgggggcgtccgtgcgctgcagcgtctccttcccgttctccaggtatctgcggagccactccacgcacgtgccctccaggtaggctctcaactgctccgccacatgggccgcctcccacttgtgcttggtggtctgagctgccatgtccgccgcggtccaagagcgcaggtcctctttcagggcgatgtaatccttgccgtcgtaggcgtactggtggtacccgcggaggaagcgccagtccgaccccacgtcgcagccatacatcctctggacggtgtgagaaccggcctcgctctggttgtagtagccgcgcagggtccccaggtccactcggtcaatctgtgagtgggccttcactttccgtgtctccccgtcccaatactccggaccctcctgctctatccacggcgcccgcggctccatcctctggctcgcggcgtcgttcagggcgatgtaatccttgccgtcgtaggcgtactggtggtacccgcggaggaagcgccagtccgaccccacgtcgcagccatacatcctctggacggtgtgagaaccgtcctcgctctggttgtagtagccgcgcagggtccccaggttcgctcggtcagtctgtgagtgggccttcacattccgtgtgttccggtcccaatactccggcccctcctgctctatccacggcgcccgcggctccatcctctggctcgcggcgtcgctgtcgaaccgcacgaactgcgtgtcgtccacgtagcccacggcgatgaagcggggctccccgcggccgggccgggacacggaggtgtagaaatacctcatggagtgggagcccgcccaggtctgggtcagggccagggcccccgagagtagcaggacgagggttcggggcgccatgacggccatcctcggcgtctggggagaatctgagtcccggtgggtgcgtgcggactttagaa

SEQ ID NO: 149107 - DNA, 304 bp, Homo sapiens
  misc_feature (1)...(304): n = a,t,c or g
agtatttaggattcatagctgtggaattcgcggcagcgtcgacgtaaaaatcaccgatggacttctagtgatcagaaggattgagaatgttcccccaggccccaacaataagaacaagaatccatatgcaatattccaatctagttctatagagtcccaataaaaaaagatgtcgaatattcatagacagagtctgtacattagtatttcactcaannnnnnnnnnnnnnnnnnnnnnnnnnnnnnnnnnnnnnnnnnnnnnnnnnnnnnnnnnnnnnnnnnnnnnnnnnnnnnnnnnnnnnnn

SEQ ID NO: 149108 - DNA, 654 bp, Homo sapiens; identical to SEQ ID NO: 144884
  misc_feature (1)...(654): n = a,t,c or g

SEQ ID NO: 149109 - DNA, 679 bp, Homo sapiens
  misc_feature (1)...(679): n = a,t,c or g
atcgagaccatattccatgtggnggaattccacagactcagagagaacccaccatggttcttgtttcctgcggccaagaccaacgtcagggcccgcctgggggtaaaggtcgggcgcgcacgctggcgcagtatggtgcggaggccctggagaggaatggtcctgttccctccccccacacccaagccttacttcccggaacttcgaacctgagcccacgggttttgccccaaggttaaagggcccacggcaaaaaaagttggccgaacgcgcttgaccaaacgccgtggcgcaacgtggacggacatgccccaaacggcgctgtcccgccctgagcggacctgcaacggcgcacaagctttcgggtggacccggtcaactttcaagctccttaagccacttgcctgctggtgacccttggccgcccaccatccccgccgagttcaccccttgcggtgccacgcctccctgggacaagttcctgggctttctgtgagcaccgtgctgacctccaaaatacccgttaagctggagccctcggtgggccatgcctttttgcccctttgggcctttcccccagcccctcctcccctttcctgcacccgtacccccgtgggtctttgaataaaagtcttgagtgggcggcaaaaaaaaaaaaaaaaaaaagatcttaattaag

SEQ ID NO: 149110 - DNA, 700 bp, Homo sapiens; identical to SEQ ID NO: 147658

SEQ ID NO: 149111 - DNA, 982 bp, Homo sapiens
atgagcgggtccctcggccgagctgcggcggctctgctccgctgggggcgcggcgcgggcggcggtggcctttggggtccgggcgtgcgggcggcgggctcgggcgcgggcggcggcggctcggcggagcagttggacgcgctggtgaagaaggacaaggtggtggtcttcctcaaggggacgccggagcagccccagtgcggcttcagcaacgccgtggtgcagatcctgcggctgcacggcgtccgcgattacgcggcctacaacgtgctggacgacccggagctccgacaaggcattaaagactattccaactggcccaccatcccgcaagtgtacctcaatggcgagtttgtagggggctgtgacattcttctgcagatgcaccagaatggggacttggtggaagaactgaaaaagctggggatccactccgcccttttagatgaaaagaaagaccaagactccaagtgagggcggccaagtcctcgctgagcagagagggagccgctcatgtcagagactcactgccagaaaagccttacccattttggttttcactattgagaccgcaactgctttgcactgatcattttggttcatgagcagttggtgattttagttggtctggtgttcgggctaagaatattttattgtggactttaattacaaccacctgcactgtaatgattccaatggctgtattaatgatattgctgtaaccaaaattcattcttatattgtcacttattctttgcctgattcagaagttaaataggagctttggaatcattattcatgacccctctgcaaatgtgtcagtctccaaagagagtatctccccccaaattttgtgtagcttcttttgttatggaaaatggtggacaaaaaaagaaactgtgataactggggcgttgttttttaaaataaactccagcacagggatgctgtgcatgcctgagttgattcccgagttccaaaa

SEQ ID NO: 149112 - DNA, 683 bp, Homo sapiens
gggtcgacgatttcgtggcaagcggatcgtggacctgcagcacaccgaggtcccagatgcctaccgtgggcgtggcatcgccaagcaccttgccaaggccgccctggacttcgtggtggaggaggacctgaaggcccatctcacctgctggtacatccagaagtacgtcaaggagaaccccctgccgcagtacctggagcgcctgcagccgtaaccctggcctgcaggcgggagcgctccctgccggactcttccacgtggcctttgcctggccccacgtgctctcaggaacctggtcccactgggaacagactcagagttatttttgtaaggacactcatctgtgccccacgtccagatccctggaggcagctgaccaatgatgggcggtgacccggtaaccgaggcggcaaggaggccaggtagtcccggcacctctcactctgcagagaccagcggcttcgtgggaggcctgtgggtcacacgtaggggctagagccagcctgcatcctgcccaccgggctccacttggagatcagcaggagggccagtgtgggacccctgctgccacctctcctgggcctgtgtcctttctggaaattaagaaggtgtgctccagagccaagaggagcaataagaaacctcgtgtgccagcttcttaagggtggcagtgcaagacccca

SEQ ID NO: 149113 - DNA, 490 bp, Homo sapiens; identical to SEQ ID NO: 148734
  misc_feature (1)...(490): n = a,t,c or g

SEQ ID NO: 149114 - DNA, 407 bp, Homo sapiens; identical to SEQ ID NO: 149060
  misc_feature (1)...(407): n = a,t,c or g

SEQ ID NO: 149115 - DNA, 685 bp, Homo sapiens
tggtccccacagactcagagagaacccaccatggtgctgtctcctgccgacaagaccaacgtcaaggccgcctggggtaaggtcggcgcgcacgctggcgagtatggtgcggaggccctgggaaggagttttcctgtccttccccccccaccaagacctacttcccgcacttcgacttgagccccggctctgcccaggttaagggccacggcagagaaggtggccgacgcgctgaccaacgccggggcgcacgtggacgacaatgcccaacgcgctgtccagccctgaagcgaccttgcacgcgcacaagcttcgggtggacccgatcaaacttcaagctcctaagccactgcctgctggtgaccctggccgcccacctccccgccgagttccacccctgcggtgcacgcctccctggacaagttcctggcttctgtgagcaccgtgctgacctccaaataccgttaagctggagcctcggtagccgttcctcctggcccgctgggcgctcccaacgggcccttcttccctccttgcaccggcccttcctggtctttgaataaagtctgagtgggcggcaaaaaaaaactgaacatctccttcccagccactgggtgccagaaactcattggagtggacgatgaacgcaaacttcgtactttttattgaaagcggttgggcccag

SEQ ID NO: 149116 - DNA, 464 bp, Homo sapiens
  misc_feature (1)...(464): n = a,t,c or g
nttagagacctttcgtagaccactatccatgtggtggaattcgttcaatggccttcatccacaaataaagatgtgctgtccaccaattcctctacacagaatcttgagggacagagattttcatcgcatagtccaaatttcttctttcatagcgtttagtgggctacagatggcatggcatctaaaaccttacaatgcttgattttcatacagaagacactttggccagttgatgtgggttttacctcttcataaaatgagttgcatgctgagaatttgaaaaatgaagatgatgtagacactggactattaggattctggactctacttataatatccctaactgctggattctcctgttgcagcttttcttggacagtgacttactttgattcttttgaaccaggaatgtttcctcctactcctctttcacctgccaggttcaagaaactgactggacattc

SEQ ID NO: 149117 - DNA, 705 bp, Homo sapiens
aggaattcggcacgagtggcggtcggctctgcggcgccgcggtcccggcaccccgggccctgtggctcggccatcgtattcctcctttactcagggggacagctggggtgaaggcgaagtcgacgaggaggagggatgcgaccaagtggcccgcgacctgcgggcggagttctcggctggggcgtggtcagagcccagaaagcgctcggtgctcccgccggacgggaacgggtcgcccgttctgcccgataagcgcaatggtatctttcccgcggccgcgggcagcagagcccagcctcggcggtggccggtccaggtcctctctattctctgctcgctgctcttcgccattcttctcgccttcctcctcgccatcgcctacttgatcgttaaagagttgcatgctgagaatttgaaaaatgaagatgatgtagacactggactattaggaattatctgtattagcaggaaattttcccttatgctgtaagttgcaaaggattctggactctacttataatatccctaactgctggattctcctgttgcagcttttcttggacagtgacttactttgattcttttgaaccaggaatgtttcctcctactcctctttcacctgccaggttcaagaaactgactggacattctttccacatgggctatagcatggcgattttgaatggcatcgtagctgctcttact

SEQ ID NO: 149118 - DNA, 853 bp, Homo sapiens
gcggccgcgggcagcagagcccagcctcggcggtggccggtccaggtcctctctattctctgctcgctgctcttcgccattcttctcgccttcctcctcgccatcgcctacttgatcgttaaaggtattgaagccgacgccttgaaagtctgtccagagtaaagttgagccagggtgtggctctcgtctccacccatctccctttccctcgcgctaagccctcaggctggcagctgctttcacccagagtcctcatttgcatcttactttgctctcccgccctttgccttttctaagtggagcgtcctgatccatgatcaggagacgtatttttaaaaaggatcgtttgattaaatgggtactcttgaagaaatatcttcaagtccttgaacactggggatgaaatattgtcaagattaaacaaaatgcgaaacacccaccattaaaaggagacagtgaaaagtgcatataattaaaataggccatgttcaatggccttcatccacaaataaagatgtgctgtccaccaattcctctacacagaatcttgagggacagagattttcatcgcatagtccaaatttcttctttcataggtaaaataattagcctctcagtttttaagtttgtatccaggtgtagtgcacggagttctgttgcagaaagtatagtccactcgtcctctaataattttgtttttctgtctgaagttgaaatattggccggttgaagtttattgcaaggcatacggttgtataatttagttggctagtgtatattatagtggaaagaagcagagttaagtttaaatttccattctcactagtttgtgacctttgccaagttactgaaa

SEQ ID NO: 149119 - DNA, 219 bp, Homo sapiens
acgttcgtgtcgacacacatgctgatggactatggcccacatcgatacatagccaacatggaccatggcctttatcctcacatagacccagaacatgtgggcgcctttgtgaatgctgtgcataaacaatcacgtcagcttcgacagtactgagtgtatacctttatcctcaagtcccactaacacatatcacagatcgcctccaggactataaaagtc

SEQ ID NO: 149120 - DNA, 889 bp, Homo sapiens
tgcgcacacacacacacacacacacacacacacacacacacacaaaatcaggtcactaacaagtttggtttgtaataagagaaattgtcagagaaatatgcccacaaaaatgtatccgtaagtatgttaaatatattatgttcaaatttaataaaaaactaagtcctaatatttaaaaggaaaaaaatttaatcaaaaaataaaggaaatgttttaaaacgatcctggtccaaatgaaagaattctatgcattcacatctaaagagaggaaaatgttcttgttaagagccacctaaaaatgtcatcaatatccgtacacactagaaagaaagaaatatagcaataatccaagttggttctgcatatgctttaattgtgccatgcctttttttttcaaatatttgaaaatgaatacctatggccttttataatttttttaatacaaagtatactggaggcaaagaaaatattctttgtaaccctaagtcatagatacatatttgaacttattatttcctttaaaaaaattgactgaaggccctcagagaatatggaggaaataccaaggaataaaagagaaagcatcacatgttcaggtagtggacatcaatttacataacacactgacctacattaaaaataatagcttaaaaaaagaatgatttttaaatcataaaactattttaatgtaattgtttcactttaatcaaggaggaaaagaatgaacagtgatgccaaagatatcacatctagaatagaaaatatttgtgttaatttttggaaaacctgtggtaatattgctatggctgcctcaatcccagtacattgaagttgcatcttactacttcagagtcaacatcaagatttttattgcaaaagttaaacgatt

SEQ ID NO: 149121 - DNA, 332 bp, Homo sapiens
  misc_feature (1)...(332): n = a,t,c or g
tatctccccattctaccacctatgccagatgttaaagacagcagatgttttgaggagaatggcattgtggagatgcagagatgcgttgctaagttgaggtggatccagtatagagatacctctatttcttctttatggctcaagagagctaggacttggattttgttttacaggcatgaaccactgtgcccagtctatatataatagattttagaagaaatttctgccactcagtgactgctttaaattctagagacagaggctgagagaaacttagtagcctgcctgcgcatactgcaagtacagnctatataacnagttnaaagagaatc

SEQ ID NO: 149122 - DNA, 379 bp, Homo sapiens
  misc_feature (1)...(379): n = a,t,c or g
caaattaacattttgagattctgttaggaagattagaattggataatgggcacctctaacagtgtctgtcagagttgacatacattgtgtatctcctgcaccaaagcatttttgagatcaagtgttcttccagctgagcagaaatttggaaggctattcagtgctgcttagtgtagcagctaataatgttccaacttctatatgatagtttgcnnnnnnnnnnnnnnnnnnnnnnnnnnnnnnnnnnnnnnnnnnnnnnnnnnnnnnnnnnnnnnnnnnnnnnnnnnnnnnnnnnnnnnnnnnnnnnnnnnnnnnnnnnnnnnnnnnnnnnnnnnnnnnnnnnnnctatatataatagattttagaagaaatttctgcg

SEQ ID NO: 149123 - DNA, 471 bp, Homo sapiens
aaaggagaagttgatagggaatctaattttagaatgtgccaaatggtctgtgctcaacaatataattgaactctctcaactctacctcaccatttctttatctcaaaattctgttggctttgtcaaacgttggattttatttctgcagcctagtatctccccattctaccacctatgccagatgttaaagacagcagatgttttgaggagaatggcattgtggagatgcagagatgcgttgctaagttgaggtggatccagtatagagatacctctatttcttctttatggctcaagagctaggacttggattttgttttaagagatggcagctggccgggtgcagtggctcacgtctgtaatcccagcactttgggaggccgaggcaggtggatcacgaggtcaggagttcaagaccagcctggccaagagggtgaaaccccatctttactaaaaatacaaaaaaaaaaa

SEQ ID NO: 149124 - DNA, 3862 bp, Homo sapiens
actctgattggaatgcaccagcagaagagtggggcaattgggtagacgaagaaagagcttcacttctaaagtcccaggaaccaattcctgatgatcaaaaggtctcagatgatgataaagaaaagggagagggagctcttccaactgggaaatcccaaaaagaaaaaaaagaaaaagaagaagcaaggtgaagataactctcctgcacaggacacagaaggaattagaaaaagagattagggaagacctttccagtgaatacctctaaaacccgtccaaaacaggaaaaagctttttccttgaagaccataagcactagtgatccagccgaagtactcgtcaaaaatagccagcctatcaagactcttccacctgctacttctaccgagccatctgtaatcttatcgaaaaagtgattctgacaagagctcttcccaagtgccgccaatactacaagagacagataaatccaagtcaaataccaagcaaaatagtgtgcctccttcacagaccaagtctgaaactagctgggaatctcccaaacaaataaaaaagaagaaaaaagccagacgagaaacgtgaaattttttttcctgaattggacatgtgtttgcaaacacttgtcttgaagattatgctgtttatgcaataatttgtgaacatgtacagagttttatataaatttaaaccaatttttaaaacaaaactgcggacaccaccataaaaatgggattcaaaaggaaagttaatttatggaaatttaaggaggtcagcagaatatactccagtggatgggaagacacttgggaaagtctttttaatagaacaagaacgatcttaatttaagaatattatcctggtttaacaacagtgccctgtttacaacagattgtgccctatctcatctgcagccgaggaataaaggattctgattagaaagagggttgcctacagattagtaagcaattccttggatcttatgcacagaacttgtaccatttgaatctgttttatgcttaaatcaaagtgctttgatcaaatgcataacctgccatatctttacatatttgttggtagcaatttgtattaaagaaatcacaagtgcaaataaaaagtcatttatcatttgtttaactaaactgtcatggtttagtttacaatttttaaaaagttcttaaaatactgaaaatgcagttgacacttgtgtatggcttatgaagttatttttgatagtcttacattacttgaattgttcaaagtacagtatattttaaattaagaaaagtgaactatatgtatttgttttatacatttaaggcttagactcataaataatgctattgtttatgatttgaaaactttcaggcaaaatccaatttacatttttcccttccctagcaattacttttttccagcttcaactcttcttagttactaatactttgttgactttaaaaatgaaatcattcacaaacttttggtatatgatggagaatgaaaaactaggagtcagacagctttaaattgacattgtcaacacctccagttaatcaggaatacatttttttactgccttaacctgtagtgcgtagaatatgcatcaatttcttgaaggagattcatgtttttataagaattttcatgtaattattgcaattggggtcaaatagggaacgtttcctgcttgaaaattatattgatttaaatgatgtgtgagatgtttcaccattttcaggcacgtgtgtaattctattgtaataaactggcaggtatctttgtaactataaatagtgcatgctcagccatgtacactgtaaatagccctttaccaaacgtgtttggacaaggacccataattaacatcacttagtgaattgtgataaagaacaaaaagcccatgatttattcgatgtgaattgggccctgtttttaatgtgggcccccccaagaaccgaaccctgtttaaacagcctgtaaccccaatgggtactggatactatccagtccaatgttgttcattattattttggactgtgggtttcaacagtattggcgtttgtcagacctagcgaaagcctaaacgaacaaaatggttttagttttgctgaagactggccttattaatgggacagcttttcctaacaagagattattaacttttatcaggtgataacatctgatatcaggaacatggcagtatgtttacatgtcagaagtcttgtttaattctatggtatttctaaattgacttgtttaaataaattcagcaaatggatagcattgttttttatttgcttcaatatgggggtagataatagctaaagagccaaggatgaatttcttcaaatgactttattctgttagctttacataggtgttggaggattcctaaggtgtcagcattttgtaaaggtaccacaaaggagaagttgatagggaatctaattttagaatgtgccaaatggtctgtgctcaacaatataattgaactctctcaactctacctcaccatttctttatctcaaaattctgttggctttgtcaaacgttggattttatttctgcagcctagtatctccccattctaccacctatgccagatgttaaagacagcagatgttttgaggagaatggcattgtggagatgcagagatgcgttgctaagttgaggtggatccagtatagagatacctctatttcttctttatggctcaagagctaggacttggcctcccaaagtgctggtgttacaggtgtgagccaccacacctggccaacatgtggctttcagttcttacttgaagacagctgctctagctagaaacttcctatcggcatctgagccagctggtagagggcattacctcccccacccccaagaacacttcttggaagttacacacaatacataaacttcaatttcaaacagttgcttggtcccactagccatgaagctggatgggacgtaatattctatctgggttgtcatgggccaaattaacattttgagattctgttaggaagatgagaattggataatgggcacctctaacagtgtctgtcagagttgacatacattgtgtatctcctgcaccaaagcatttttgagatcaagtgttcttccagctgagcagaaatttggaaggctattcagtgctgcttagtgtagcagctaataatgttccaacttctatatgatagtttgctttttgttttttgttttttttctagagacacagagtctcgttggcccaggctggtctcccaattcctgggtttcaagcaatccttcctgactcaggctctaaaaatgctgggggtttaccagggcatgaaccactgtgccccagtctatatataaataggattttaggaaggaaattttctgcccactcagtggactgctttaaattctagagaccagaggcctgagagaaacttagtaagcctgcctgcgcatactgccaaagtaccaggactatataaccaagttgaaaggggaatccacccctgggtatattaatattttaaaacatgaaaaaggcattactattgttctggtctaagtactctaacaggaccgatgatttctaaccctagcatcatgacatgtatatagtgtgttgtaagacatttgccagctaatagttccagtactgaagcttgtgaatacgttaattgagaaaacctttaagcaggttcaaagttatcccatgatagtggcattcttatttgtatatatgtgctttccttttttatttgtatcaaggcatttaaaatgaatatatgtaacatgtacctaagttttaaaagcataataaaatgaacacatctgaaaccaccaaaaaaaaaaaaaaaaaaa

SEQ ID NO: 149125 - DNA, 558 bp, Homo sapiens
tatgataaaccacatgtgctagtggatatacttgtggatgatagcggtaaagagtccttgattggttatagaccaacagaagattatgatctcagaaattgtatcttagttggtatcaaccaaatggagtgacttagtgtacatgaaagcgtaaagaggatgtgtggcattttcacttttggcttgtaaagtacagacttttttttttttttaaacaaaaaaagcattgtaacttatgaacctttacatccagataggttaccagtaacggaacagtatccagtactcctggttcctaggtgagcaggtgatgccccagggacctttgtagccacttcactttttttcttttctctgccttggtatagcatatgtttttgtaagtttatgcatacagtaattttaagtaatttcagaagaaattctgcaagcttttcaaaattggacttaaaatctaattcaaactaatagaattaatggaatatgtaaatagaaacgtgtatattttttatgaaacattacagttagagatttttaaataaagaattttaaaactca

SEQ ID NO: 149126 - DNA, 115 bp, Homo sapiens
  misc_feature (1)...(115): n = a,t,c or g
tttttnnnnnnnnnnnnnnnngtctgtcctttccaagccaaaagtgaaaatgccacacatcctctttacgctttcatgtacagtaagtcactccatttggttgataccaataatg

SEQ ID NO: 149127 - DNA, 2161 bp, Homo sapiens
ggccggggctggagggcagtgctgggctggtcccgcaggcgctcggggttggagccagcgaccgtcggtagcagcatggctctcctctttctcctaccccttgtcatgcatggtgtgagcagggctgagatgggcaccgcggatctggggccgtcctcagtgcctacaccaactaatgttacaattgaatcctataacatgaaccctatcgtatattgggagtaccagatcatgccacaggtccctgtttttaccgtagaggtaaagaactatggtgttaagaattcagaatggattgatgcctgcatcaatatttctcatcattattgtaatatttctgatcatgttggtgatccatcaaattctctttgggtcagagttaaagccagggttggacaaaaagaatctgcctatgcaaagtcagaagaatttgctgtatgccgagatggaaaaattggaccacctaaactggatatcagaaaggaggagaagcaaatcatgattgacatatttcacccttcagtttttgtaaatggagacgagcaggaagtcgattatgatcccgaaactacctgttacattagggtgtacaatgtgtatgtgagaatgaacggaagtgagatccagtataaaatactcacgcagaaggaagatgattgtgacgagattcagtgccagttagcgattccagtatcctcactgaattctcagtactgtgtttcagcagaaggagtcttacatgtgtggggtgttacaactgaaaagtcaaaagaagtttgtattaccattttcaatagcagtataaaaggttctctttggattccagttgttgctgctttactactctttctagtgcttagcctggtattcatctgtttttatattaagaaaattaatccattgaaggaaaaaagcataatattacccaagtccttgatctctgtggtaagaagtgctactttagagacaaaacctgaatcaaaatatgtatcactcatcacgtcataccagccattttccttagaaaaggaggtggtctgtgaagagccgttgtctccagcaacagttccaggcatgcataccgaagacaatccaggaaaagtggaacatacagaagaactttctagtataacagaagtggtgactactgaagaaaatattcctgacgtggtcccgggcagccaatctgactccaatagagagagagagttcttcacctttaagtagtaaccagtctgaacctggcagcatcgctttaaactcgtatcactccagaaattgttctgagagtgatcactccagaaatggttttgatactgattccagctgtctggaatcacatagctccttatctgactcagaatttcccccaaataataaaggtgaaataaaaacagaaggacaagagctcataaccgtaataaaaagccccccaccctccttttgtttatgataaacccacatgtgctagtggatctacttgtgggatgatagcggtaaagagtcccttgattggttatagaccaacaggaagattcccaaagaaattttcatgagatcagcttaagttgcacccaactttgaagtcttgattttccctggacagttttctgcttttaattttcatgaaaagattatggatctcaggaaattgtatccttagttgggatccaccccaattgggagtgacttaggtgtacatgaaaagcgtaaagaggatgtttgggcattttcaacttttgggcttgtaaaagtaccagacttcttttttttttattaaacaaaaaaagccattgtaaccttatgaaccctttaacatcccagataggttacccagtaacgggaacagtatcccagtactcctggttccctaggtgaagccaggtgatgccccagtggtacctttgtagcccacttcactttttttccttttcctctgcccttggtatagccatatgtgttttgtaagtttatggcatacagtaattttaagtaatttcagaaagaaattctgcaaagcttttcaaaatttggctttaaaatctaattccaaactaatagaatttaatggaatatgtaaatagaaacggtgtatatttttttatgaaaccattacagttaggagattttttaaataaagaattttaaaactcgaaaaaaa

SEQ ID NO: 149128 - DNA, 1308 bp, Homo sapiens
atgggccataccaatgtgagtgtgcagaaaaagccggagaaaagaaacttcctggggctcccagcccacataaaagtgggctttcctaaatacctggttgtcctttgctgcccagctattgaggaagaagagtcaaagagtggcttagatgtcatgcctaatatttctgatgtgctgctgcgcaaactgcgggtccacaggagtctccctggaaggtatgtgaaggccttcccttttacaaacaagaatcagcagaaggaaatgatcgaaaccaaagtagtaaaggaggagaaggccaatgatagcaaccctaatgaggaatcaaagaaaactgataaaaacccagaagaaatctatcttaaatccgttggcaatgacaaggagaaaaagagaaccactaaagaactttgagaactgcctcctcattgatgtagacaccagcctcaacaaagacctacctgagccagttcatagggtcagagaatataaggctcagaaagatccagaataatttcctctaaacccttcattcacagagtaaataaaatgaagctaccaatgtcacaggtagctaaagttagggcttggtctaaaaatctcctccttatttaaattttctttattctccactgaacaaagagaaattgggaagaatgcaagagatctccccacttcagacctacagtccacctcgccacagccagtcttcaaaagaggcaggtgggagagccacgtgatgggcatttttcagctgggtggcaaaggatcttccctgccctttcagaatgccccttcttcatgcctgcctccctggctcacacagaataaatccactccatttgagcaaagacactctatcctgagaaggagtcatctgcaaaattggtatgcctttataaaggccccggccacccatccaaaccattaaaccatggccaatatagggcccaatcaagcaaaagctgatttcccaagaatagggaagctggactaacgcagatgccttgaggctcccacacagggcttgcacacaactggagtcctacagatatcatttggcttgaaaagaattgaatcatattgatttctagacaaggatcctaaattgtattgcctctagaccttcagctagtacctaaagcaaaatcaattgctctagggaaaaacaagtttgtaaggacaataataacatgcaagtaaatacgtttttactaaggaatgggagggtctctcacaccaaaaagaaaatgttttactattatgaatggtgccacaataaacatacgtgtgcatgtgtctttaaaacaa

SEQ ID NO: 149129 - DNA, 1969 bp, Homo sapiens
ccgagaaaataggtgtgggagccccagggaggaaaagccagctggagaggaagcagagatggaaaaggctacagaggtgaagggggagagggtgcaaaatgaagaggtgggacctgaacatgacagccaagaaacaaagaagctggaggagggagctgcagtgaaggagaccccccacagtccccctggaggagtgaagggcggagatgtccccaagcaggaaaaaggcaaggaaaaacaacaggagggggcagtgctcgagccaggctgcagcccccagaccggacctgcccagctggagaccagcagtgaggtccagagcgagccagcagtccccaagccggaggatgacactcctgtccaggacactaaaatgtgaagaacagctcattgtgccccagtgatgaagttgctggacacatctctttgcaggtagcagcaacagttgtagcagcagcagacgaagccattgcagaggcagaatatgctgagtgtctggagtcagcctgaagacacagggtggattatttcctggcctccacaccaaacgttcccttgcagatggagactgaatctgagggcagcagacttttatcagcttgagtttatgtcatttgatggacttggttcaacaacaagaacttacttaaaacaatgtactgtggtgatgagtcccaggggcactggtcagcctgtggagccctggatgctatccacacccacctatccctgcagctaatttagctgatctctaatttaactgagctctaatttaactgatcaaaatttggcttgggtaaagttcctttttaatgttctaaagtgtttacggttctcaaatatcagttaaaaactaattttaggtgggccataaacataaaataggaaaccctgtaagttacaggaaggaccctaaattgtatccaaaaccctaggggacaacttttccaatttgatcccaatttggaactggggccaaccagttctttaaaacactgggactaggaagagataatgattgaaacatttaaaaaaaaaaagtgctcccattcgcagggagcttttccctgtccctgtgggttttcccagttgggtgacccaccctgggggagggtcgctgggctcactcccttctcccacccttgagaatgtggagaactcccatggagaggcagaatggcaggaggtttcatgtcccgcgttgcatctcctcctgaaagaaaagcagtgatacctgaataatgctggctctccgattgatcctgtgaggatgaatttgcatttccagaatccttgagcatggattacatgtttcctgggaggcgccttgagtaccattatgcgcacgctacataattaaaacatttttcttaatttccctgcgaagcttttcttgactcacagcccacgttcttctgcccaacacaaaaggagtgagttggggtctttagactcttgttattggggagctgttgctttattattctgctcggcgagtgtaagggattctgcaagggacagggggcctgactacccagcctttgacttgtatgctctcccctcttcatacactcctgctgaagaatgttaatccaaatacacatttaaacttagggtcggtccttattctgatttgagtattttaatgtctgagtgtgctgaatttggtagttggaagatgttattcttctggagggttggttagactacatcctaccctgacttcaggaaaacagtcttgtcagacaaaaaaggccttatgtcaccactggtacctcagtttcctcatcccatttacagtttttctaactccagggtagtgtttagtgttaatatttgggatatattttttttcaaaactgtttttaagtagtttgtaatttgtaacaaacttgtaacctggttgggactgatattgtcatagctatgataaactttggatattagcagaaaaaaaaacaaaaaaaag

SEQ ID NO: 149130 - DNA, 326 bp, Homo sapiens
agaagcctctccggtctgtctgaatggggtgggagacaggacagagtgatgtcctcactcaggaggggcctccataaacctagacactgttcaggaaaattcccttctctggccagattggcactcaatggaaaggtggcaccagtgccacaacatacattccactcacagctccctgaccacagctcagcctcactggccagaacctctgccccagacaactctcaagagctctcagaaccagagtatggtcaagaaaacaaaagctgcaaactgctccccgggtgttgcacccacacataacacatgcacacacaggcagccac

SEQ ID NO: 149131 - DNA, 1949 bp, Homo sapiens
  misc_feature (1)...(1949): n = a,t,c or g
ctgctgccgccgccgccgccgccgtccctgcgtccttcggtctctgctcccgggacccggctccgccgcagccagccagcatgtcggggatcaagaagcaaaagacggagaaccagcagaaatccaccaatgtagtctatcaggcccaccatgtgagcaggaataagagagggcaagtggttggaacaaggggtgggttccgaggatgtaccgtgtggctaacaggtctctctggtgctggaaaaacaacgataagttttgccctggaggagtaccttgtctcccatgccatcccttgttactccctggatggggacaatgtccgtcatggccttaacagaaatctcggattctctcctggggacagagaggaaaatatccgccggattgctgaggtggctaagctgtttgctgatgctggtctggtctgcattaccagctttatttctccattcgcaaaggatcgtgagaatgcccgcaaaatacatgaatcagcagggctgccattctttgaaatatttgtagatgcacctctaaatatttgtgaaagcagagacgtaaaaggcctctataaaagggccagagctggggagattaaaggatttacaggtattgattctgattatgagaaacctgaaactcctgagcgtgtgcttaaaaccaatttgtccacagtgagtgactgtgtccaccaggtagtggaacttctgcaagagcagaacattgtaccctatactataatcaaagatatccacgaactctttgtgccggaaaacaaacttgaccacgtccgagctgaggctgaaactctcccttcattatcaattactaagctggatctccagtgggtccaggttttgagcgaaggctgggccactcccctcaaaggtttcatgcgggagaaggagtacttacaggttatgcactttgacaccctgctagatggcatggcccttcctgatggcgtgatcaacatgagcatccccattgtactgcccgtctctgcagaggataagacacggctggaagggtgcagcaagtttgtcctggcacaatggtggacggagggtagcctatcttaccgagacggctgaattcctantgaacacagaaaagaggaacgctgttccccgtgttttgggggacaacatgtacaaaacacccccatatcaaaattggtgatggaaagtggggactggctggttggtggagaccttcaggtgctggagaaaataagatggaatgatgggctggaccaataccgtctgacacctctggagctcaaacagaaatgtaaagaaatgaatgctgatgcggtgtttgcattccagttgcgcaatcctgtccacaatggccatgccctgttgatgcaggacactcgccgcaggctcctagagaggggctacaagcacccggtcctcctactacaccctctgggcggctggaccaaggatgacgatgtgcctctagactggcggatgaagcagcacgcggctgtgctcgaggaaggggtcctggatcccaagtcaaccattgttgccatctttccgtctcccatgttatatgctggccccacagaggtccagtggcactgcaggtcccggatgattgcgggtgccaatttctacattgtggggagggaccctgcaggaatgccccatcctgaaaccaagaaggatctgtatgaacccactcatgggggcaaggtcttgagcatggcccctggcctcacctctgtggaaatcattccattccgagtggctgcctacaacaaagccaaaaaagccatggacttctatgatctagcaaggcacaatgagtttgacttcatctcaggaactcgaatgaggaagctcgcccgggaaggagagaatcccccagatggcttcatggcccccaaagcatggaaggtcctgacagattattacaggtccctggagaagaactaa

SEQ ID NO: 149132 - DNA, 3254 bp, Homo sapiens
atgagcatccccattgtactgcccgtctctgcagaggataagacacggctggaagggtgcagcaagtttgtcctggcacatggtggacggagggtagctatcttacgagacgctgaattctatgaacacagaaaagaggaacgctgttcccgtgtttgggggacaacatgtacaaaacacccccatatcaaaatctctgggcagccttttggtgatagggtcagtgctgccagtgcaatgtttgcctatcactttttctctgtgtactatacctgggtatttactgataggctggagtacttcaggaaggaagaaccagaaatagcagggctgggcgctgcttgcggaaccgacggggcggagaggagcgtggcgggaggaggagtaggagaagggggctggtcaagggaagtgcgacgtgtctgcggagcctttttatacctccttcccgggagtccggcagccgctgctgctgctgctgctgctgctgctgccgccgccgccgccgccgtccctgcgtccttcggtctctgctcccgggacccgggctccgccgcagccagccagcatgtcggggatcaagaagcaaaagacgactcctttctacgaaccggttcaaggttctgaccatgaagctacagccatgatgaaagctcagtttatgagtctctgggatggattggatactgattccaagctgcaggtcatagtaatgggagctaccaattcgtcctcaggaccttgactcggctataatgagaagaatgcctacaagatttcatatcaaccagcctgctttaaaacacgacgcgaagcaatcctgaaactcatcttgaaaaatgaaaatgtggataggcatgtagacctgctacgaagttgcccaggaaaaatgatgggttttcaggaagtgaccctaaaagagatgtgtcgagatgctgccctcctctgtgttagagaatatgttaattctacatcagaagaaagccatgacgaagatgaaattcggcctgttcaacagcaggacctgcatcgggcaattgaaaagatgaagaaatcaaaggatgcagcatttcagaatgttttaacacatgtttgtttagattaagagtaaagatcatttgtacagttcagtgatctagtttggtgtgtcctcttatcagttagtggaaatagaacggaaagagtgctctttaaacaatgagggagctcagtgtttatggttttatactctggaattctaagttattggaggatatagttgttacatagggtgggtattaccgttgggtccaaaaatcatgagggaggaacagttgaatccagcctggaacgtggggtgcttgtgtttggaccttttccaggccatatattggtacaggccttaatagaatctaagctggtcttaaagtcataaatgattcattgggtcattaagtgagaaacggggatgtggttaggtgctggttcctagacatgtggagtatgcgtttgtgtgtgtgcgtgtatgtatgtgtatattaaatgtatatatccacaccattttatattgacattcctggtaggatatgtttggaatataggaaactttttttaccccaactactgaatccagggagtaccaaataatatatagtaaaactaagatttaaggttgtgtcaaaaaggtacagtgattcagccatttccatttgtcatttgtttcaaccttttttaagttgagtgtttttatttctgcagttattagttgggatcctccacatcttggcatatatacatgggctcaattattatgtttgtcaggataatcaaatgaaaatactagttcagtgatcagcattgaatggttgttaggcagccatgtgctcaacactggatttcacctcttggagtataaaccttttaaatttaaattggggtttacatggaaagtggattaaaaggcctttcaaaagaatggggtttgaaaaacctgcagtaccctttaatacatgtacatttctttccttttttcatttaatgtaacatgtctgttgtaactatgtttcttaaatattattttaaggttatgtgttctttaattatggtcaaatataatttggtcaccaaaaatgaaataatagtttaaaacaagtagctgttactaagtgtgctaaaaatactcattttataattaattttagttttcttagtatattattataaattgtgccctaagtcaggtacaaatgtaccacatccaaaatgccccatattgtatctatctgtagtcgtttaatgtgaattatatgtgaatttttttcaaaattttactaaccagaaattctgttataggcacctaaccacgcagccatgaggaaaacgggcacaacacaaatcttgaggtgcctttttaattctccagattaaattatgccttcatatgtttttgcttttactgtatttctttaaaaactctaaatctttattcatgtgtcactggattaatttatctgataatgtgtctcacaagaatctgttagatcgtttattcttccagttgttactttggaatgggtgggggtgggaagtttcaggtggaacaatgggataacaaaaaggcaagttatgggaagattgtgaagaggatggaaaaactgaatacaagataccaaaaatgaaaaaaagtgtcccatttttaataactatattctattattttataaatgtgtaataaaggggtccctctttattggttgttctccacttaatctttggtctttttcagtaattttaagttttctgggattttttttggtttataaaacttgtgtttagactttatcttgctatgggagttttcacacttctataggcacatatcctaggtatctaggtcatttctgttttaatatggaatttcagtaatttaattttaatctgggtgaccatatttaatcggaaaataagggagtaatgtataccctcccacatgtcctttctttttgtcttctcttaaattcacaatatccagtaggagtggttattcaatttcttcggtggttttaatcatcaaatgaagttagagaagtatactgatcccagcaactatgactcatctaggcatgttaagaccataaagtaattcaggaaactattttcctgatttttaaataacttttagtgttatgtaacatctatccttctgttttagacatgcatttgcacatatagttgaattctagattctaagataattcattttgggtaatacttca

SEQ ID NO: 149133 - DNA, 409 bp, Homo sapiens
gcatttggctgaagtttagggcctgtcctagccaattatgttctatttgaaaggctgatgcttaacttggtctattgcaggtcactacaacaaacccaccctctcccccaaatacatatttgttaaaaatgctctttaaactaaggactcctccctttatatctcatcacagttttattttaaagaactatgatatccagtatttttccatgagagatattgatcgacttggtatccagaaggtcatggaacgaacatttgatctgctgattggcaagagacaaagaccaatccatttgagttttgatattgatgcatttgaccctacactgggctccagccacagggaactcctgttgtcgggggactaacctatcgagaaggcatgtatattgctgaggaaatacac

SEQ ID NO: 149134 - DNA, 1260 bp, Homo sapiens
atggttgtagcctcagcagcaggatggaagaatgaacaaagaaaggggcaaaggcagttctcttcccttcccaagaagttgctgcgggacacggttctgcttatcctattgtccagaactagttcatgtgaccacatccagttacaagcgagggatttactcactagccctgaaatagaagtgctgttcacagatattgctaaggtcaggactcattgtcccaagtccttacctggcactgaaactgtgcaaattatagagttgagttcgttcttcctgaatattctagggggaaaaaagaaaaaacagagttgggagcaggaaggctgccacctaaaagactttggagatttgagttttactccagtccccaaagatgatctctacaacaacctgatagtgaatccacgctcagtgggtcttgccaaccaggaactggctgaggtggttagcagagctgtgtcagatggctacagctgtgtcacactgggaggagaccacagcctggcaatcggtaccattagtggccatgcccgacactgcccagacctttgtgttgtctgggttgatgcccatgctgacatcaacacaccccttaccacttcatcaggaaatctccatggacagccagtttcatttctcctcagagaactacaggataaggtaccacaactcccaggattttcctggatcaaaccttgtatctcttctgcaagtattgtgtatattggtctgagagacgtggaccctcctgaacattttattttaaagaactatgatatccagtatttttccatgagagatattgatcgacttggtatccagaaggtcatggaacgaacatttgatctgctgattggcaagagacaaagaccaatccatttgagttttgatattgatgcatttgaccctacactggctccagccacaggaactcctgttgtcgggggactaacctatcgagaaggcatgtatattgctgaggaaatacacaatacaggccaaaggaacactaccgagaactttgacacaagttctcaaaccttaacagaagggttgctatcagcactggatcttgttgaagtcaatcctcagttggccacctcagaggaagaggcgaagactacagctaacctggcagtagatgtgattgcttcaagctttggtcagacaagagaaggagggcatattgtctatgaccaacttcctactcccagttcaccagatgaatcagaaaatcaagcacgtgtgagaatttag

SEQ ID NO: 149135 - DNA, 1367 bp, Homo sapiens
gattctcagtgctgcggatcatgtccctaaggggcagcctctcgcgtctcctccagacgcgagtgcattccatcctgaagaaatccgtccactccgtggctgtgataggagccccgttctcacaagggcagaaaagaaaaggagtggagcatggtcccgctgccataagagaagctggcttgatgaaaaggctctccagtttgggctgccacctaaaagactttggagatttgagttttactccagtccccaaagatgatctctacaacaacctgatagtgaatccacgctcagtgggtcttgccaaccaggaactggctgaggtggttagcagagctgtgtcagatggctacagctgtgtcacactgggaggagaccacagcctggcaatcggtaccattagtggccatgcccgacactgcccagacctttgtgttgtctgggttgatgcccatgctgacatcaacacaccccttaccacttcatcaggaaatctccatggacagccagtttcatttctcctcagagaactacaggataaggtaccacaactcccaggattttcctggatcaaaccttgtatctcttctgcaagtattgtgtatattggtctgagagacgtggaccctcctgaacattttattttaaagaactatgatatccaggtattttcccatgaaagatattgatcgacttggtatccagaaggtcatggaacgaacatttgatctgctgattggcaagagacaaagaccaatccatttgagttttgatattgatgcatttgaccctacactggctccagccacaggaactcctgttgtcgggggactaacctatcgagaaggcatgtatattgctgaggaaatacacaagtacagggttgctatcagcactggatcttgttgaagtcaatactcagttggccacctcaaacgaagaggcgaagactacagctgacctggcagtagatgtgattgcttcaagctttggtcagacaagagaaggagggcatattgtctatgaccaacttcctactcccagttcaccagatgaatcagaaaatcaagcacgtgtgagaatttaggagacactgtgcactgacatgtttcacaacaggcattccagaattatgaggcattgaggggatagatgaatacttaaatggttgttctgggtcaatactgccttaatggggacatttacacattctcacaattgtaaagtttcccctctattttgggtgaccaatactactgtaaatgtatttggtttttggcagttcacagggtattaatatgctacagtactatgtaaaatttaaagaagtcataaacagcatttattaccttggtatatcaaaaaaa

SEQ ID NO: 149136 - DNA, 2039 bp, Homo sapiens
ttttttttatctcatcacaggtttattttaaagaactatgatatccagtatttttccatgagagatattgatcgacttggtatccagaaggtcatggaacgaacatttgatctgctgattggcaagtaagtaactataactgatgtcagggcaaacccccaatgggcaacacacttttagcctgtttcttgaggacagcagctttacttttaaaatacaaagcaaaaacatacacataattttaaatagttcagaaaggcaaaatttgaaacacaggtcatattcttcctctggggtttttgggaggaggtttcctctaaatcattgcctagatcttctgtctcatgaatttttctttatctccatctttaatgcttatcttctgagatgacaagcatttattgtttcaactgtcccattcttcccagcctcacgattgtttcatctgagttttatattaagcaaatcttgggcagtgtaggaaagatgggcagatgaatacctaatcaaatggtaattttaagagacattttcccaataccaagtctttaccttctggggtgattaatggtcagaattgttatctggtagtatgtccatttccataagctgttaagaaacttagttgttagcttcagcctttggacactggggctataatgaagttagaaatggaagatgttaaaactgcagacctaaaattagagttcacttcagctgctgttacgttcagagaataagagcaaccataacttacatcaagccaatttaaattagactaatttaaattgtctaattaaattgtctctagatgagagcccaatctcatctagaagtgaagaaatctctctattgacagttattagtataagaggttctaatacccagtgtaaggcagaaatatacattggagttagtctgtctgaggtatgccagaacaaatggcagtatccatgaagtggtatgtaggaagttaaataattgcccaatcctcagtaacttcccaagaataggaaccctggaaatgtattaacacgctttattaacaaagtactaggactaatacgcaacaaaatcaaggagttgcaaccataagaaggatgaagtgtccaaggacaaccagttaagtattattttaagtattattttatcctcttcctttttaggagacaaaagacccaatcccatttgaagttttggatattggatgccatttgacccctacacctggctcccagcccacagggaactccctgttgtcgggggactaacctatcgagaaggccatgtaatattgcctgaggaaatacacaatacaggtattttgccacccagggtctgtcacccctgttaacctacatagggtaaatatgcctagagtctccttgccctgcaaagggatcttttcctgcctattcccacatcattggcagagttttgtttttggcttaaacttttgtagctaaaaattatatggccatgctaataaaaagggtataggtcctttagagtcatgcttggacatgggctcttaccaaattacactaaggtaataatgagtaaaaaattgtatatttaaacaattaaatacaagaataaattgtcaaactgatgcagttctttgagttatctaaaggcagattaagataagaaggcaagataagataagagtgcaaggctgtaatttgcactctaagaccattggttcattgggagttgtgaatttggagctaaagctgatctaaaaaagaaatctgcaaactggacaatatcttgggtcctttatgtagggtaggtcttgtactagagcctgaaaggatttctaataagggggatacagttagatgagaatggctgatggaaagagtactaagatgaattctacgttatcaagaccggctacttttccaaaactcatacttgttttgcaaacagtttccatttctgtcagaaagcttctggttttaaagcttacttcaaatgacctttcattccaaattttaaaggactaccaattcatactggttcaggaaaccctc

SEQ ID NO: 149137 - DNA, 322 bp, Homo sapiens
  misc_feature (1)...(322): n = a,t,c or g
gaagcaaaaggaaaaaggaggttccattttttgggcggaggatgcatcacacttgcccatgtctgccaggcttggcctgtttacggacttcatttaaccgatttatttgtttagcccaaaagtaatcgctctggagtagaaaccaaatgtgaatagccacatcttacctgtaaagtcttacttgtgattgtgccaaacaaaaaatgtgccagaaagaaatgctcttgcttcctcaactttccaagtaacatttttatctttgatttgtaaatgannnnnnnnnnnnnnnatcgaaagaaaattttacttttggataaaaata

SEQ ID NO: 149138 - DNA, 310 bp, Homo sapiens
ttccacccaagactgttgggtctgaccggctccaccaaacaggttgcccaggctagtcagtgtttctgtttcacattataatataaaatttcaagtatagaagtgacctttgacacagataatggtaggccaagttgacagttttataggacttttgactatatgtgcatgaaaggttaagggccaaagcccacaccagtcttgaaataggcaggcttttatcaacaccaaatatattcagaggaatttgagattaatctttttatatggattcttttaaatctcttaaaaaacggtagtgtctttcaaa

SEQ ID NO: 149139 - DNA, 555 bp, Homo sapiens
  misc_feature (1)...(555): n = a,t,c or g
ttttttttttttttaaacgcagcccgtttaatgatggggcccagactgcagtggctcaagacaggacactgcggaaagccgccatgtgccgccgcacactgtctgagatctgctcagccgatctgctccggccgtagtaatccgtgaagaggccgtcagagttgagcaggtagatggcaatggagtggtccacgatgtagtcctggtcctcatccttggggccggcatttgtagtacacgcgggaaattgtgactagcctgggcaacctgtttggtggagccggtcagacccaacagtcttgggtggaagtcctggacgtagcgggccatggcttcaacgtcgtcccgctcggggtccacagtgatgaagacaggctgcactggaggcaaaccaggctctgcttccagctgccgcaccacctgcaccagcttctccagctcgtctgggcagatgtcagggcagtgagtgaagccaaagtacatcagcacccactggcccccgaagtcagccttgcagcgagcccggcctctgtataccaacangnggaagtcgct

SEQ ID NO: 149140 - DNA, 419 bp, Homo sapiens
cccgggacatgcccattattaggcctatttgatagatgatactgaggctcagagtcgggggtcacaagccaaagccacaccgctagaagggctcaggacccagcccagctcccgtcctcttggtggcatcaagcttgtgtgatatgaggtcttatgtctgctcatgacagccttaaaagcaataaacagatacaacttccagcaacttcccactcagctgcaaggctgcggggggtcctgcctcgagccataaggtgagcagctatccaatgccctaaactttacataagagttccggcaaggctgtgacttcaacttgtgttgtaactgcaacctgcagaatcaaatttagggttatgttttcagttgtatcagtcttacggctacaagatattaaagagattcttttctggttatca

SEQ ID NO: 149141 - DNA, 842 bp, Homo sapiens
tgtggcaccacacctggctgatttttgtatttttagtagagacggggtttcaccatgttggccaggctggtcttgaacacctgacctcaaatgatccgcccacctcggcctcccaaagtgttgggattacaggcgtgagccacctcaccaggccccgttgcaatcttactccacttcgttttcacagcagtcccgggacatgcccattattaggcctatttgatagatgatactgaggctcagagtcgggggtcacaagccaaagccacaccgctagaagggctcaggacccaagcccaagctcccgtcctcttggtggcatcaaagcttgtgtgatatgaggtcttatgtctgcctcatgaccagcctttaaaagcaataaaccagataccaacttcccagccaacttcccccactcaagctgcaaggcttgcggggggggtccctgccctcgagcccataaggtggagcagcttagcgcagtgctcgggccaaagtgtggaggaaggcctgaatttgccctgtgaaagctgggggttggcagccaggaatattcatggaagcccctgaccatgtactcacactgctcttcctcagttcaggggttcttggatttgctcaagtccaccccaaatatccctttacgattctcagggtcccactccttccagatccaatgccctaaactttacataagagttccggcaaggctgtgacttcaacttgtgttgtaaactgcaacctgcagaatcaaatttagggttatgttttcagttgttatcagtcttacggctacaagatattaaagagattcttttctggttaaaaaaaaaaaaaaaaaa

SEQ ID NO: 149142 - DNA, 621 bp, Homo sapiens; identical to SEQ ID NO: 15247

SEQ ID NO: 149143 - DNA, 1073 bp, Homo sapiens
  misc_feature (1)...(1073): n = a,t,c or g
atggcggcgcccagcggagggtggaacggcgtcggcgcgagcttcgtcgggccgcctcgctcctaggggccgtggcgcttttgcttttcggaggcggtgtccgagcccacgacggtggcgtttgacgtgcggcccggcggcgtcgtgcattccttctcccataacgtgggcccgggggacaaatatacgtgtatgttcacttacgcctctcaaggagggaccaatgagcaatggcagatgagtctggggaccagccgaagaccaccagcacttcacctggcaccatctggaggcccccaaggggaaagtcctatcttgtacttcacacatgttcaaggcagaggttgcggggcgcttgagatttgagtaccgccatggccttacttttaaagcccgcattttgaaaggggaaagtgatgtccctcttgaaaacttgaggaattttgaagtgaaccaaaacagcagtgggctcacaaggcccgggggcatttccaaagctgacctgtccaaagctggtgaattgtggccaaggcatccgcgcactgagctgtgaccagcagcccctgttgcgtggtggcaccttctcatctccggtgaagctgaaaggggcctgttgtcccctgaaagggcccagcacatcaactggttttcctaggagggacctcttaaagtttttctaccctgggcttacggttcccttgtcccggaggggctttgcaggggtgcctgaaagccctgggggcagagaacagagggtccaggggccctcctgggcttcccaanagccttttcaggttcccacttccttgctgagcttcttctggactccaggatcgcagatcccggggcacaaaaaagggtggggaacatgggggctatgctggggaaaagcagccatgcttccccccgacctccagccgagcatcctttcatgagcctgcagaactgctttcctatgtttacccaggggaccttctttcagatgaactgggaagagatgacatgttgtttcatatttaaataaggctgaacattagaaagcaaaaaaaatcaaaacggcccccctgtctaag

SEQ ID NO: 149144 - DNA, 390 bp, Homo sapiens
cagggacggaaccgtgcatgccagggctgccaagaaccgcgttatttctgtgctgctgccttctgatttagtacactgactctgggaaccttagcctgatgaggattaggacgcgtagagcgaaacaggtgacattgaccacagagttaccgaggaaagccatgaatagccagcattccacaattttatgcaagaatcgatggcacaatactggaagagaaacaataaataggagactttagcacacttcacttgtttcagaagtccagaattttggacctccacgtgaaagaactgttcttacctctgaactgggggctcccataagggataattttcctcagagtagcaaagtttctcttattagagaaatcttgtgactcagatgaa

SEQ ID NO: 149145 - DNA, 1647 bp, Homo sapiens
gcggcacccagtgtgtctgttggtgttgggaatggcgggatccgggaaaaccacttttgtacagaggctcacaggacacctgcatgcccaaggcactccaccgtatgtgatcaacctggatccagcagtacatgaagttccctttcctgccaatattgatattcgtgatactgtaaagtataaagaagtaatgaaacaatatggacttggacccaatggcggcatagtgacctcactcaatctctttgctaccagatttgatcaggtgatgaaatttattgagaaggcccagaacatgtccaaatatgtgttgattgacacacctggacagattgaggtattcacctggtcagcttctgggacaattatcactgaagcccttgcatcctcatttccaacagttgtcatctatgtaatggacacatcgagaagtaccaacccagtgaccttcatgtccaacatgctctatgcctgcagcatcttatacaaaaccaagctgcctttcattgtggtcatgaataaaactgacatcattgaccacagctttgcagtggaatggatgcaggattttgaggctttccaagatgccttgaatcaagagactacatacgtcagtaacctgactcgttcaatgagcctggtgttagatgagttttacagctcactcagggtggtgggtgtctctgctgttctgggtactggattagatgaactctttgtgcaagttaccagtgctgccgaagaatatgaaagggagtatcgtcctgaatatgaacgtctgaaaaaatcactggccaacgcagagagcgcaacaggagagagaacaactggaacgccttcgaaaagatatgggttctgtagccttggatgcagggactgccaaaggtgttttcactgtagacagcttatctcctgtgctgcacccttctgatttgatcctgactcgaggaaccttggatgaagaggatgaggaagcagacagcgatactgatgacattgaccacagagttacagaggaaagccatgaagagccagcattccagaattttatgcaagaatcgatggcacaatactggaagagaaacaataaataggagactttagcacacttcacttgtttctagaagtccagaattttggacctccacgtgaaagaactgttcttacctctgaactggggggctcccataagggagtaattttcctcagagtagcaaagtttctcttattaggggaaatcttgtgactcaggatgaagtcagggataggaaggacccttgggacctgggcaggtttaattgctggattattccttgggcctttcccttgtaatttatggcaagggaagggatattacttgaggctgatactctttcccaagcctacaactttcaagttttatccatttgaacttcaagtacttttgctgctgagggaatggaatcaaaagaacgtagtctcctgggtaaccacctcagatctctattattaggctagatgtatagcctcttactcccccagcttcttggctcttgaccctgcactggtaagttgcccttctatttaggcagccaagggaaaagggggaaacatgagcttattccaggaacggtgggcaggagttttccttgggcaatcaaccaacgt

SEQ ID NO: 149146 - DNA, 1253 bp, Homo sapiens
cgtcgactttttttttctttttttggatgtattgaaaatattttataatcaattctctagaatcctagccatccggtacaggaaaaaattatattggaacacttccgtatttttaaacaatgaaaaaaaaatttgactagaggatggcataagaaatttacaaatacaaacttaggcttcctcacatttcccacagagcaactaaacgagaaaaagatttcaaggaaatgacaggattacctcgaatgcaaaattccaaagtcaaatagctacttacattaaggagatttaccaaaacagtttgtaaattaaacattaacagcaaaaggcacaaaaagcctatttcttttatggtgtctcggctgattctttaagaagcagataaacaaggtactgtatggaacgatcaaaacttggcctgagctgtcttctgataattaatcctagtatatccagatttgttgtccaaggacacaagctccatgccaccttctgctgtcactttccaagaagaggctgtttttttttttgtttccagttttcactatgatctgagtagacagagaatgtcataaaataaatgagagtattccattatccgatcagaaatgccacctcttttcccaactcattgctctgacttgaaagatgaacgtatatatgaattctcattttattctcctgagaaattatgcatgatccattataaaacatacaggtaatacaaagtccacaagcctgtcatgtttatggcagtggtgtgatctcagctcacggcaaccttcacttcccgggttcaagcaattctcatgcctcagcctcccaagtaggctggggaccacagggcgtgcgccaccatgcctgggctattttttgtatttttagtataggacgggggtttcgccatggacgggtcaggttgggtctcaatctcctggggcttcaagtgatcttgcccacctcggcctcccaaagtgctgggattataggcatgagccaccatacccagccagtttcatttattttcataataggttatgagtacgtgatgtaaatgcttaaaagtcatcatcaccatactgtgctaaagatattgagaaattatgcagagaaatctgggcaaattcatctttttagtatcagatggttaaaaaaaaggaaacaaaaaacaaaagcaatccaaattatttctttaaatactcttatttatactcaggaaaacagatttgcctcgtgccaagcttggcgtaatc

SEQ ID NO: 149147 - DNA, 282 bp, Homo sapiens
aactatggggaaaacttagaattctgacggagttgcagaaatctttaaagaaaagcctctttattgactgttttattaagcatgcccctctgctccactcagaactgaggagtctacaaaaactgtgggcaatccaagaaggctggttattttcctgctttctgccaacccaaagcaaactgctctgccatgtctgtttgtatttcctgaatcctgagccctcaaaacactgctttatgaagtcaacaatgccaaaactgaaatttgcatttctattctaag

SEQ ID NO: 149148 - DNA, 320 bp, Homo sapiens
  misc_feature (1)...(320): n = a,t,c or g
cagactctgacaggatttttctagcatagcatcttaataagaagacacaaataaataaaatcagagatgaagaagggtacattacaactgatactgctgaaattagaagtatcattagaggctactataagcaactacatggcagnnnnnnnnnnnnnnnnnnnnnnnnnnnnnnnnnnnnnnnnnnnnnnnnnnnnnnnnnnnnnnnnnnnnnnntccaaaatccaaatagaccaatagtaagtaatgagatcaaagtaataataaacagtctcccagcaaagaaaagcccaggatctgatggcctcactgctgcattt

SEQ ID NO: 149149 - DNA, 419 bp, Homo sapiens
ggcacgaggaagttttgaacattttaacacatgagtaccacacttgcatggcccttacaggctgccggacgatcgctgagatcaatcgaaacttgggccagcataccaggatgtaagaaagaaaggccaataaccagactgctgaggttgcacacaggaggatcacaaactcacagcacagtgtgtgatgctgaccttcctggaccccaatctgtccggaagcaccaggcccatatatcccacatttctaataccaccagccctgtgcttgaggccctcccaacctctgtgttcatcacatgtgccatgaccttgtttcggtcctgagtatcagccggtgatctcttgactatataatgctatggcctcaaaatactgaaggcagagcatagagaatgctgcaacatgggaaaccctgt

SEQ ID NO: 149150 - DNA, 662 bp, Homo sapiens
  misc_feature (1)...(662): n = a,t,c or g
ggattttttttttttttcggggacagaatttgctctcattgcccggctagagtgcaatggtgcgatctcggctcaccacaacctccgccctctgggttcaaagcggattctccctaccctcagccctcccccaagtaggctgggaattaacatggcatgtggcccacccatgcccctggctaattttaccatttttaagtaggaggacaggggtttcctcccatgttgggtcagggttggtcttggaactcctcgaccctcagggtgagccggcccgccctcagccctcccccaaagtgcctggggatttacaggcatgagcccacccatgccccagcagaccctgaattattattattaaaatgttacatcaaccatgtacaaattattaaaactacattctaaactcctaagtacaaaccntccttatgccttaaaactccttacacagtgttaacccccaagacagatttggcaattaagtagttaaaataaggacaacaaagtccaattaaaaatcaaataaaacaatatacatttaatgtggtagactttgctgttttgctgaagctaagcaaggaaccagtttttaaatcagcaatccgttattttaatggactgagcaatttaatagtgcacctcaaaggtcaatgataaaaact

SEQ ID NO: 149151 - DNA, 378 bp, Homo sapiens; identical to SEQ ID NO: 135588

SEQ ID NO: 149152 - DNA, 579 bp, Homo sapiens
atcaaaattgcgaacccagtggaaggatctactgataggcaggttaccatcactggatctgctgccagcattagcctggctcaatatctaatcaatgtcaggctttcctcggagacgggtggcatggggagcagctagaaacaatgcagattcatccataatccctttctgctgttcacccaccacccatgatccatctgtgtagtttctgaacagtcagcgattccaggttttaaatagtttgtaaattttcagtttctacacactttatcatccactcgtgattttttaattaaagccgttttaattcctttctctgttcagctgttgatgctgagatccatatttagttttataagcttctccctggttttttttttttttttggttttttttttttggctcatgaatttttctgtttgtcatggaaatgtaagagtggaatattaatacatttcagtttagttctgtaatgtcaggaatttttcaaaaaaattaaaagatgggactggagctttttctttgtgaatagaaactggatgccacagtgattcatgtgggttttattcctcttgtctt

SEQ ID NO: 149153 - DNA, 2697 bp, Homo sapiens
atgcaggagaaaaagcagctgatgtttttgaaggttgagagggaaactgagttcttgaaaaaaagagccaggtttatgttgaggcatttggattcagtcctcagtgatcacacacgaaattctgccgaaggcacagaatatttcaaaatgcttgtagacgtttttgctccagaatttcgaaggccaaagaatatacatctccgaaatttctatataattgttccccctctgatgtctttcctggcctctgagactgaccgcaagcctgacaaagtttctctgacaccttttcttccttcctcctctcccttcctggccgaagtgccattgcccttcgccagtgtgcccaaatgccttgtacacttgttgaatgagatgtgcctggccacacaacagctttctaagcaactgctggcatatgaaaaacagactggaacttgtgggagccttttagaagcccaaaacagtgccttgaacagagcagatcaacagcagcaggaagtaaatgagatcctgagtggaaaatgctgtcttccagattctcttttgcagcagatgtttatagttcggtttttgggatcaatggcagttaaaacagacagcactactgaagtgatttatgaagcgatgagacaagtattggctgctcgggctattcataacatcttccgcatgacagaatcccatctgatggtcaccagtcaatctttgagagcacctgggggaaggggtggctgtgggcgcagtttcagcagacttaaatgttcctgcctgccagctctcaagagagcagcaggtctcccagcacaacgcttgagctctgctaagggacagactgcctcctcaagtgagtccctgactctggtggttcctgacggggagacacctcccagcaggaatcgacagacacctcatacaggagagttccagctggcatctgctttggctgcagagaaagatgggacccctgtgttcaagcttcctaaatggagggtcaagggcaagaccatcaaagaagtggcagaagcctacagatccgtgggtgcagagctaaatgtgctccctttctgcactcagttcattcccatggatataattgatagtccaaagcacggctctatcatttatcacccatccatcctgcccaggcacagaggagcctctgctatcaattggactctaattatgggagataagaaagctgggttttctgttttctgggctgatgatggcttggatacaggacccatccttcttcagagatcatgtgatgttgaacccaatgatacagtggatgcactttataatcggtttctttttcctgaaggaatcaaggccatgtcaattcgggaggatcgaaacggcagatcgcaaaaaacagtacatacagaaggagacatgaacatgaacatcaaaaaaattgtaaaacaagccacagttctgacttttacgactgcacttctggcaggaggagcgactcaagccttcgcgaaagaaaataaccaaaaagcatacaaagaaacgtacggcgtctctcatattacacgccatgatatgctgcagatccctaaacagcagcaaaacgaaaaataccaagtgcctcaattcgatcaatcaacgattaaaaatattgagtctgcaaaaggacttgatgtgtgggacagctggccgctgcaaaacgctgacggaacagtagctgaatacaacggctatcacgttgtgtttgctcttgcgggaagcccgaaagacgctgatgacacatcaatctacatgttttatcaaaaggtcggcgacaactcaatcgacagctggaaaaacgcgggccgtgtctttaaagacagcgataagttcgacgccaacgatccgatcctgaaagatcagacgcaagaatggtccggttctgcaacctttacatctgacggaaaaatccgtttattctacactgactattccggtgtggcttacattctaaagcttttggatcagtatcgggagtttgattcacttcactggttccagtctgttagagagaaatacctgaaggagataagagcagttgctaagcaacagaatgtacagtcagccagtcaagatgaaaaactcttacaaaccatgaatctcactcagaagcgactggatgtctatctacagcatttgctggacaaattatgcaaagaaatagagaaagatctgcgactttctgtgcatactcatttaaagctggatgaccgaaaccctttcaaagttggcatgaaagacctggctctttttttctctctgaatccaattcggtttttcaatcgtttcattgacattcgggcttacgtaactcactacctagacaagactttctacaatctaacaactgtagcccttcatgactgggccacttatagtgagatgagaaacttagctactcagcgttatggactggttatgacagaggcacatcttcccagtcagactttggaacagggccttgatgttttagaaattatgagaaacattcatatatttgtgtcccgatacctctataatctcaacaatcagtctccactccttaaaactactccacgtgtgtccgtgtcgttttatccaattcggcgtgagacaagagccctggtgttcttcactcatcagagccatattaatgtatatcatgagaaacatccacgaaaccaaaagttggttctttga

SEQ ID NO: 149154 - DNA, 1670 bp, Homo sapiens
gtgaaactgaggatgaatcatttccagattcatttgattctcttttgcagcagatgtttatagttcggtttttgggatcaatggcagttaaaacagacagcactactgaagtgatttatgaagcgatgagacaagtattggctgctcgggctattcataacatcttccgcatgacagaatcccatctgatggtcaccagtcaatctttgaggttgatagatccacagactcaagtatcaagggccaattttgaacttaccagtgtcacacaatttgctgctcatcaagaaaacaagagactggttggttttgtcatccgtgttcctgaatccactggagaagaatctctgagtacatacatttttgaaagcaactcagaaggcgaaaagatatgttatgctattaatttgggaaaagaaattattgaggttcagaaggatccagaagcactggctcaattaatgctgtccataccactaaccaatgatggaaaatatgtactgttaaacgatcaaccagatgacgatgatgggaaatccaaatgaacatagaggcgcagaatcccgaagcataactcacttgcgcctgtgggggaagagcaaacaggaaggagagctaccctcctaaggggttttaaccgtctctgacatacaggcacactgacctgattttccgaaggcttgacaatcgtttgtggaatgtaatcttgatgccttgatacttgagacttgggagggaaactaagaaatgggttgacagcgttccccaccccatctacaatgttatttttagggtgctttgtgggtaagtcttttttcttagattgcgctaaaatttcttagattgttcagcgctcagaacaaaagtttgaaaaatgcattgttcatatgaatgtcatctcttttcagtttccagtatcctttttaaaaaaatggcaaaagcctacgatttacaatttgattgaacactaaatatttcttattaatataatctatttttgtaattttacttaatgagctttaagtgcctgtcgttctgaaaattgtgtatttataattcagcttatctcacaattggacctaatagccatttctttgtgcagttaggtgacgagccactgctttgaggcccaagcactagtagagatgcgcgatacaggtctagtttcggtaactgttccagacatcaagcaataaaaaaatgaataccacaaaagatgtttgattttacagtggagccttactgaaccagcattcaggaagtttaaagggtcctccctagggtatggagtatttttaagtagtggatcacttgtggaccagggtgcagcttctaccaagttcctgtttccttctgagcccagaccctttttcagggaagggacccaatttaattttaaaactccacttggaaagcacagctgggtccatggggggcttgggtataaagttccctaatttccacccctggatacttccaattcctgggaaccccagcccactcccccatccctcctccctatcaaactagtataatgattttgaatcggtacagtgtgtttaactgtaactaagttcaacagactattattatacaagctccgtctttgtaataaaattaacctaggcaataaaaatttattctgtttctttaaaaaaaaaaaaaaaaaa

SEQ ID NO: 149155 - DNA, 355 bp, Homo sapiens
ggcacgagattattgttgctctctaatactttattatgtcgtaccaaagcttatctcttgtattctgctaccaggtcttgaaccttcgactgcttgcatgttgacgtctgcccctcctcaagagcttaagccaatgttgggtgaacggctgtatcctattattcacgccatgcaccctactcttgctggtaaaatcactggcatgctgttggagattgataattcagaacttcttcatatgctcgagtctccagagtcactccgttctaacgctgatgaagctgacgctgtactgccaacccaccactctagcacgctggcctgagacagcgaccatggccgcccgcgttgggtg

SEQ ID NO: 149156 - DNA, 384 bp, Homo sapiens
gatgctactcaggtggaagtgaatccctttggtgaaactccagaaggacaagtgaatggtgctgggctcgccatggctacttgggatatcattttccttaatggggggaagccagccaacttcttggatcttggaggtggggtaaaggaagctcaagtatatcaagcattcaaattgctcacagctgatcctaaggttgaagccatccttgtcaatatatttggtggcatcgtcaactgtgccatcattgccaatgggatcactaaagcctgccgggagctagaactcaaggtgcccctggtggtccggcttgaaggaaccaacgtccaagaggcccagaaaatactcaacaacagcggactccccattacttcaaccattgac

SEQ ID NO: 149157 - DNA, 2345 bp, Homo sapiens
atggcgtcccccgtagcagcgcaggccgggaagcttctgcgagccctagcgctgcggccccgcttcctggcggccgggtcccaggcagttcaattaacctccagaagatggctgaacctgcaggaataccagagcaagaaactgatgtctgacaacggagtgagagttcaaagattctttgtagcagacactgcaaatgaagctctcgaggctgctaagagactaaatgcaaaagaaattgttttaaaagcccagatcttagctggaggaagaggaaaaggtgtcttcaatagtggtttgaaaggaggtgttcatttaacaaaagaccctaatgttgtgggacagctggctaaacagatgattgggtacaatctagcgacaaaacaaactccaaaagaaggtgtgaaagttaacaaggtgatggttgctgaagccttggatatttccagagaaacctacctggcaattctgatggaccggtcctgcaatggccccgtgctggtggggcagccccaggggggcgtcgacattgaagaggtggctgcttcaaacccggagctcatttttaaggagcaaattgacatttttgaaggaataaaggacagccaagctcagcggatggccgaaaatctaggcttcgttgggcctttgaaaagccaggctgcagatcaaattacgaagctgtataatctcttcctgaaaattgatgctactcaggtggaagtgaatccctttggtgaaactccagaaggacaagttgtctgttttgatgccaagataaactttgatgacaacgcagaattccgacaaaaagacatatttgctatggacgacaaatcagagaatgagcccattgaaaatgaagctgccaaatatgatctaaaatacataggactagatgggaacattgcctgctttgtgaatggtgctgggctcgccatggctacttgtgatatcattttccttaatggtgggaagccagccaacttcttggatcttggaggtggtgtaaaggaagctcaagtatatcaagcattcaaattgctcacagctgatcctaaggttgaagccatccttgtcaatatatttggtggtatcgtcaactgtgccatcattgccaatgggatcaccaaagcctgccgggagctagaactcaaggtgcccctggtggtccggcttgaaggagccaacgtccaagaggcccagaagatactcaacaacagccggactccccattacttcagccattgacctggaggatgcagccaagaaggctgtggccagtgtggcaatgaagtgatgtctttgtcctgatccaatggagaaagaaagccatttttcccgtaaaaaagggatggttcatcattgtgaaagaaatggttatctcattggggaagaaaaggggagggggaaggcaagaatcactgaaaaatcttaaatctgtgttttctggaataagatatctagacagcctaaatctgattttagtttttataaaaataatgtcttgtgttctcatacttttctgtcactgtaagcctgcccagtaggcagtgttttgcagactttggggagtggtctatgtggccaaatattgtgtgtatagacagaatttgaaatcaagtcctgctttcatttacaagaattttggtgggcatctaatcctacataatgaaaaagaaaaacagaccatttaaaaactcagacaagattatatttaatatattaattactaaaaaggcacaagattacactgaacatattagctactaaaaaggcactgctaagacattcaagcaaatagctattacacactactgcagattttacaggtttctaattctaacatatgtttgaaaaatccgtgagtattccaaaatatatttaataatggaatatctgcattaatataccatccatgtgtttttaccatttgccttaatattgaatatactgtttacctcacactaaaaagaaaaccagaagccttatttgtgattttgggagtggaagcttccatttttgtgtcaaaaatgaatcctgattcttatggaaatctctgttattaagatatttcaagatgagacaacactgaagatcaaattgtgtttagtatcactatcttctctcctcgtttctctcttactcctcatcctcccagaatctaccagtttatggtagaaagatgggaaccttatttgaatgtgttttttttttccatgatgtccaattttgttgtgggaaaggatttggataaaatttttgtttaaattttggtagatttttatctatacaaatttaaataaaattatgttttgtaagctgtaaaaaaaaaaaaaaaaaaa

SEQ ID NO: 149158 - DNA, 1624 bp, Homo sapiens
cgcgtccgaacaaaagaccctaatgttgtgggacagctggctaaacagatgattgggtacaatctagcgacaaaacaaactccaaaagaaggtgtgaaagttaacaaggtgatggttgctgaagccttggatatttccagagaaacctacctggcaattctgatggaccggtcctgcaatggccccgtgctggtgggcagcccccaggggggcgtcgacattgaagaggtggctgcttcaaacccggagctcatttttaaggagcaaattgacatttttgaaggaataaaggacagccaagctcagcggatggccgaaaatctaggcttcgttgggcctttgaaaagccaggttgaagccatccttgtcaatatatttggtggtatcgtcaactgtgccatcattgcccaatgggatccccaaagcctgccgggagctagaactcaaggtgcccctggtggtccggcttgaaggaaccaacgtccaagaggcccagaagatactcaacaacagcggactccccattacttcagcccattgacctggaggatgccagccaagaaggctgtggcccagtgtggccaagaagtgatgtctttgccctgatcccaatggagaaagaaagcccatttttcccataaaaagggatggttccatccattgtgaaagaaatggttatcctcattggggaagaaaaggggagggggaaggcaagaatcactgaaataatcttaaatctgtgttatatggaataagatatctagtcagcctatatgtgattttagtctttataagaataatatcgtgtgttgtcatactattctgtcactgtaaccttgcccagtaggcagtggttttgcagactttggggagtggtctatgtggccaaatattgtgtgtatagacagaatttgaaatcaagtcctgcttgcatttacaagaattttggtgggcatcgaatcctacataatgaaaaagaaaaacagaccatttaaaaactcagacaagattatatttaatatattaattactaaaaaggcacaagattacactgaacatattagctactaaaaaggcactgctaagacattcaagcaaatagctattacacactactgcagattttacaggtttctaattctaacatatgtttgaaaaatccgtgagtattccaaaatatatttaataatggaatatctgcattaatataccatccatgtgtttttaccatttgccttaatattgaatatactgtttacctcacactaaaaagaaaaccagaagccttatttgtgattttgggagtggaagcttccatttttgtgtcaaaaatgaatcctgattcttatggaaatctctgttattaagatatttcaagatgagacaacactgaagatcaaattgtgtttagtatcactatcttctctcctcgtttctctcttactcctcatcctcccagaatctaccagtttatggtagaaagatgggaaccttatttgaatgtgttttttttttccatgatgtccaattttgttgtgggaaaggatttggataaaatttttgtttaaattttggtagatttttatctatacaaatttaaataaaattatgttttgtaagctgt

SEQ ID NO: 149159 - DNA, 394 bp, Homo sapiens
ggcacgaggaagttcaaattggtccagaaacagttatgaccactctttatactgccaagaaatacgcagtcccagccttggaagcacactgtgtagaatttctcaccaaacatcttaaggcagataatgcctttatgttacttactcaggtaagtaaatgtagctaaggtatgtatcattgtagttttaaaattgagtaaactatatatgggcatttaatatttcctggagaattctagattataattttaaagtatataaaatgatttttataatacaaatcagggaaacatgtcagatatctaagattttagaattgacaagtgcattagaggccatggttggaggtcacgcctgaaactccaagactttggaatgctgaaacgggtacatc

SEQ ID NO: 149160 - DNA, 282 bp, Homo sapiens
  misc_feature (1)...(282): n = a,t,c or g
gatttcccccccccggggatccgggccccccgggcccccaaaaggttgaaattttcagggggggacccccggggcccccaggtttaaaaaaannnnnnnnnnnnnnnnnnnnnnnnnnnnnnnnnnnnnnnnnnnnnnnnnnnnnnnnnnnnnnnnnnnnngctctggccccatgaagggtggatggactgagaggaaacgagactggaagaaaacagatcacacattacaacagggttggggggttgggaggtggggctggacaaaaggcaatctcgtgcc

SEQ ID NO: 149161 - DNA, 808 bp, Homo sapiens
cattctgcacgaggcggtggtcaaagaacagttactggcacgaccatagggtatgcatgccgtacttggacatgcaatcaaggttcggccttatcatagatcgacggctgacaatatggagggccgttcagtcattcaagactattgatggacatcatgcttatgatattactgtctaccctgtgcatctgaaccctttctatgctggttctcggcatcatgatttacaccacatgaacttcattggaaactatgcttcaacatttacatggtgggatcgaatttttggaacagactctcagtataatgcctataatgaaaagaggaagaagtctgagaaacagactgaataaatatctcacgtaaacctttctgaaagataaacgttctcctgaattcagaaactagtagctaacattgcttctggagagcagaaataagcatagtcttctggctactaagagataaatagaacattaacaacctttaattaccttcctagtggggaactttttctactttacctacaagttctatatatgtaggaaatgaataaatatattatttaaggtacagtttttcatgaggggaggtttttaaaaggccatgtttccctaaggctttcccagggaggggttttggggtactaggaggtatttaatctatgggcttttctcccagtaaaaccatagggcctgaagtttgacattggggtctttaaatcttttaggatatatactgggtcatttcaggaaaattcttcatagtgggtattgggccttatatttaacctttttttacttttttt

SEQ ID NO: 149162 - DNA, 453 bp, Homo sapiens
tgttcagagaaaacagaaattattaacttgatgaagtatttctgtgtgtttggatttacgtaagtaattttgaaatttgcatcattggttgggcgtggtggctcacacatgtaatcccagcactttgggaggccgaggtgggagaatcactttagcccaggagttcgagaccagcctgggcaacatagtgggaacccatctctaaaaaaaaaattaaaaaaataaagaataaattagcagcattaacaaatgaggtagtaagaaactgtactaaaggaaaacaaacaaaaaaaggactgcgcatgttcatttttgtattcacctaaacacaactctaaagtttgtaggtttctagatcacctttgttgaactcagtatattatccataacccacctaaagcaaatagtttaattctatctttctggatataattaccttttagttggggttca

SEQ ID NO: 149163 - DNA, 455 bp, Homo sapiens
cctacccagagtttcaggtttctgcctgtgagtgagatcattggccgagacctgagtggcttccctgcacctcctggagaagagcctcctgcctgaaccacgtgaactgtcatcacctggcaaccccagccccagcctcagccctgccccctttccctccttcctggagtggtggctacagaagcttggggccaaccctggctcctctttccccagcttctgtctgtctcactgtcttccctcccctcccccagctgaggtgtggccctcaggcctggtgctgccttggagggctgggggaaggagtgtgtggaggagggaggagggtgaagactgaggctaggtgccagaatggactggagtgaaggcgtgtctagagtgtgggctggctgttgtgctggaaagctggggacaggttgatggtaataaactgctcaatgaccagtgaaaaaaaa

SEQ ID NO: 149164 - DNA, 458 bp, Homo sapiens
gctacacccatctctggccctgctgataccgattcccctgacatttcaggctaagccagcaggaaagggctaggacgggtgcctgggagcccacatggagggagttgggcaagatttgattcggagcaggtgtcaagacgtgttggggaaactgaggcccagtggaatagaagccagtagaggaggaatctagaggcctcctagattaaggcctgcctggaatggattgggggtgggtctttggaaaaggaggggacccacctctagcccagtctctcaactgcccctcctttacagtgagtgagatcattggccgagacctgagtggcttccctgcccctcctggagaagagcctcctgcctgaaccacgtgaactgtcatcacctggctgttgtgctggaaagctggggacaggttgatggtaataaaccgctcaatgaccagtgaaaaaaaaaaa

SEQ ID NO: 149165 - DNA, 2526 bp, Homo sapiens
atgggggcggccagctgcgaggatgaggagctggaatttaagctggtgttcggggaggaaaaggaggcccccccgctgggcgcggggggattgggggaagaactggactcagaggatgccccgccatgctgccgtctggccttgggagagccccctccctatggcgctgcacctatcggtattccccgacctccaccccctcggcctggcatgcattcgccaccgccgcgaccagccccctcacctggcacctgggagagccagcccgccaggtcggtgaggctgggaggaccaggagggggtgctgggggtgctgggggtggccgtgttctcgagtgtcccagcatccgcatcacctccatctctcccacgccggagccgccagcagcgctggaggacaaccctgatgcctggggggacggctctcctagagattaccccccaccagaaggctttgggggctacagagaagcagggggccagggtgggggggccttcttcagcccaagccctggcagcagcagcctgtcctcgtggagcttcttctccgatgcctctgacgaggcagccctgtatgcagcctgcgacgaggtggagtctgagctaaatgaggcggcctcccgctttggcctgggctccccgctgccctcgccccgggcctcccctcggccatggacccccgaagatccctggagcctgtatggtccaagccccggaggccgagggccagaggatagctggctactcctcagtgctcctgggcccaccccagcctccccgcggcctgcctctccatgtggcaagcggcgctattccagctcgggaaccccatcttcagcctccccagctctgtcccgccgtggcagcctgggggaagaggggtctgagccacctccaccacccccattgcctctggcccgggacccgggctcccctggtccctttgactatgtgggggccccaccagctgagagcatccctcagaagacacggcggacttccagcgagcaggcagtggctctgcctcggtctgaggagcctgcctcatgcaatgggaagctgcccttgggagcagaggagtctgtggctcctccaggaggttcccggaaggaggtggctggcatggactacctggcagtgccctccccactcgcttggtccaaggcccggattgggggacacagccctatcttcaggacctctgccctacccccactggactggcctctgcccagccaatatgagcagctggagctgaggatcgaggtacagcctagagcccaccaccgggcccactatgagacagaaggcagccgtggagctgtcaaagctgcccctggcggtcaccccgtagtcaagctcctaggctacagtgagaagccactgaccctacagatgttcatcggcactgcagatgaaaggaacctgcggcctcatgccttctatcaggtgcaccgtatcacaggcaagatggtggccacggccagctatgaagccgtagtcagtggcaccaaggtgttggagatgactctgctgcctgagaacaacatggcggccaacattgactgcgcgggaatcctgaagcttcggaattcagacattgagcttcggaagggtgagacggacatcgggcgcaaaaacacacgtgtacggctggtgttccgggtacacgtgccccagggcggcgggaaggtcgtctcagtacaggcagcatcggtgcccatcgagtgctcccagcgctcagcccaggagctgccccaggtggaggcctacagccccagtgcctgctctgtgagaggaggcgaggaactggtactgactggctccaacttcctgccagactccaaggtggtgttcattgagaggggtcctgatgggaagctgcaatgggaggaggaggccacagtgaaccgactgcagagcaacgaggtgacgctgaccctgactgtccccgagtacagcaacaagagggtttcccggccagtccaggtctacttttatgtctccaatgggcggaggaaacgcagtcctacccagagtttcaggtttctgcctgcatcggcaaccccctttggcactgacatggacttctcaccacccaggcccccctacccctcctatccccatgaagaccctgcttgcgaaactccttacctatcagaaggcttcggctatggcatgccccctctgtacccccagacggggcccccaccatcctacagaccgggcctgcggatgttccctgagactaggggccccttcccttcccagagtgatgtgcatcccctacctgctgagggatacaataaggtagggccaggctatggccctggggagggggctccggagcaggagaaatccaggggtggctacagcagcggcttccgagacagtgtccctatccagggtatcacgctggaggaagacaatcttggtgttattttatttgggatgctggccgactgtagatttacttacaactacatttccaaactggaaagagttaataagatgaaaaaggagtaa

SEQ ID NO: 149166 - DNA, 470 bp, Homo sapiens
catcggcaaccccctttggcactgacatggacttctcaccacccaggcccccctacccctcctatccccatgaagaccctgcttgcgaaactccttacctatcagaaggcttcggctatggcatgccccctctgtacccccagacggggcccccaccatcctacagaccgggcctgcggatgttccctgagactaggggccccttcccttcccagagtgatgtgcatcccctacctgctgagggatacaataaggtagggccaggctatggccctggggagggggctccggagcaggagaaatccaggggtggctacagcagcggcttccgagacagtgtccctatccagggtatcacgctggaggaagacaatcttggtgttattttatttgggatgctggccgactgtagatttacttacaactacatttccaaactggaaagagttaataagatgaaaaaggagtaa

SEQ ID NO: 149167 - DNA, 802 bp, Homo sapiens
ccaggggtggctacagcagcggcttccgagacagtgtccctatccagggtatcacgctggaggaaggtgggtgtgggactgggggctgtgagtgtgagtgtgtgcaagagattgctctgcatgtttgctgagggctggagctgggcttttcagagatcgggcatccctggtctctcagggccagttggaggttcccaggaggcatgttcttgatgcctgtggctgcctgaatccaattaactgaattctgaagagtgcatggggtaactgtctcagcctttctcctgtctctgcctctgtcctctgctccaaatcataaaatctcagagctagaagcactttcaagatcattccatccagcgcattcaatttgcaagtttagggcgttgagtttccagagagggatggtagcttgctggaggtcccagtcaagcacacttgccatttgccttcagctttcccctaaacacggtgtctgtggtcagggttggtgaggaggagctttcctgttttgcctctccttcttcccattggctacacccatctctggccctgctgataccgattcccctgacatttcaggctaagccagcaggaaagggctaggacgggtgcctgggagcccacatggagggagttgggcaagatttgattcggagcaggtgtcaagacgtgttggggaaactgaggcccagtggaatagaagccagtagaggaggaatctagaggcctcctagattaaggcctgcctggaaatggattgggggttgggtctttggaaaaggaagggaaccacctctag

SEQ ID NO: 149168 - DNA, 3102 bp, Homo sapiens
atgggggcggccagctgcgaggatgaggagctggaatttaagctggtgttcggggaggaaaaggaggcccccccgctgggcgcggggggattgggggaagaactggactcagaggatgccccgccatgctgccgtctggccttgggagagccccctccctatggcgctgcacctatcggtattccccgacctccaccccctcggcctggcatgcattcgccaccgccgcgaccagccccctcacctggcacctgggagagccagcccgccaggtcggtgaggctgggaggaccaggagggggtgctgggggtgctgggggtggccgtgttctcgagtgtcccagcatccgcatcacctccatctctcccacgccggagccgccagcagcgctggaggacaaccctgatgcctggggggacggctctcctagagattaccccccaccagaaggctttgggggctacagagaagcaggggcccagggtgggggggccttcttcagcccaagccctggcagcagcagcctgtcctcgtggagcttcttctccgatgcctctgacgaggcagccctgtatgcagcctgcgacgaggtggagtctgagctaaatgaggcggcctcccgctttggcctgggctccccgctgccctcgccccgggcctcccctcggccatggacccccgaagatccctggagcctgtatggtccaagccccggaggccgagggccagaggatagctggctactcctcagtgctcctgggcccaccccagcctccccgcggcctgcctctccatgtggcaagcggcgctattccagctcgggaaccccatcttcagcctccccagctctgtcccgccgtggcagcctgggggaagaggggtctgagccacctccaccacccccattgcctctggcccgggacccgggctcccctggtccctttgactatgtgggggccccaccagctgagagcatccctcagaagacacggcggacttccagcgagcaggcagtggctctgcctcggtctgaggagcctgcctcatgcaatgggaagctgcccttgggagcagaggagtctgtggctcctccaggaggttcccggaaggaggtggctggcatggactacctggcagtgccctccccactcgcttggtccaaggcccggattgggggacacagccctatcttcaggacctctgccctacccccactggactggcctctgcccagccaatatgagcagctggagctgaggatcgaggtacagcctagagcccaccaccgggcccactatgagacagaaggcagccgtggagctgtcaaagctgcccctggcggtcaccccgtagtcaagctcctaggctacagtgagaagccactgaccctacagatgttcatcggcactgcagatgaaaggaacctgcggcctcatgccttctatcaggtgcaccgtatcacaggcaagatggtggccacggccagctatgaagccgtagtcagtggcaccaaggtgttggagatgactctgctgcctgagaacaacatggcggccaacattgactgcgcgggaatcctgaagcttcggaattcagacattgagcttcggaagggtgagacggacatcgggcgcaaaaacacacgtgtacggctggtgttccgggtacacgtgccccagggcggcgggaaggtcgtctcagtacaggcagcatcggtgcccatcgagtgctcccagcgctcagcccaggagctgccccaggtggaggcctacagccccagtgcctgctctgtgagaggaggcgaggaactggtactgaccggctccaacttcctgccagactccaaggtggtgttcattgagaggggtcctgatgggaagctgcaatgggaggaggaggccacagtgaaccgactgcagagcaacgaggtgacgctgaccctgactgtccccgagtacagcaacaagagggtttcccggccagtccaggtctacttttatgtctccaatgggcggaggaaacgcagtcctacccagagtttcaggtttctgcctgtgatctgcaaagaggagcccctaccggactcatctctgcggggtttcccttcagcatcggcaaccccctttggcactgacatggacttctcaccacccaggcccccctacccctcctatccccatgaagaccctgcttgcgaaactccttacctatcagaaggcttcggctatggcatgccccctctgtacccccagacggggcccccaccatcctacagaccgggcctgcggatgttccctgagactaggggtaccacaggttgtgcccaaccacctgcagtttccttccttccccgccccttccctagtgacccgtatggagggcggggctcctctttccccctgggggctgccattctctccgccagccccctttcggccgcctcctcttcctgcatccccaccgcttgaaggccccttcccttcccagagtgatgtgcatcccctacctgctgaggggatacaataaggtagggccaggctatggccctggggagggggctccggagcaggagaaatccaggggtggctacagcagcggcttccgagacagtgtccctatccagggtatcacgctggaggaagtgagtgagatcattggccgagaccttgagtggcttccctgaaacctccctggaaaaaaagcctcctgccctgaaaccacgtgaaactgtcatcaccctggcaaccccagccccagcctcagccctgccccctttccctcctttcctggagttggtggctacagaagcttggggccaacccctggctcctctttccccaagcttctgtctgtctcactgtcttcccctcccctcccccagcttagggtgtggccctcaggcctggttggctgccttggaagggctggggggaaaggagtgtgtggaggagggaggagggtgaaaactgaggctaggtgccaaaaatggactggaatgaacgccgtgttaaaagggtgggcctggctgttgtgctggaaagctggggacaggttgatggtaataaactgctcaatgaccagtgaaaaaaaaaaaaaaaaaa

SEQ ID NO: 149169 - DNA, 465 bp, Homo sapiens
aggcctgctgtgaactgactctgcagccactgcgtcgcttccctctggatgctgcccatgatcatctttgctaaggatgggcattttgccctggaggagctggcccaagctggctatgaggtggttgggcttgactggacagtggccccaaagaaagcccgggagtgtgtggggaagacggtgacattgcagggcaacctggacccctgtgccttgtatgcatctgaggaggagatcgggaagttggtgaagcagatgctggatgactttggaccacatcgctacattgccaacctgggccatgggctttatcctgacatggacccagaacatgtgggcgcctttgtggatgctgtgcataaacactcacgtctgcttcgacagaactgagtgtatacctttaccctcaagtaccactaacacagatgattgatcgtttccaggacaataaaagttaaggagttg

SEQ ID NO: 149170 - DNA, 421 bp, Homo sapiens
cagccactgcgtcgcttccctctggatgctgccatcatttttttcgacatccttgttgtaccccaggcactgggcatggaggtgaccatggtacctggcaaaggacccagcttcccagagccattaagagaagagcaggacctagaacgcctctgggatccagaagtggtagcctctgagctaggctatgtgttccaagccatcacccttacccgacaacgactggctggacgtgtgccgctgattggctttatcctgacatggacccagaacatgtgggcgcctttgtggatgctgtgcataaacactcacgtttgcttcgacagaactgagtgtatacctttaccctcaagtacccctaacccagaagattgatcgtttccaggccaataaaagttttggagaaaaaaaaaaaaaaaaa

SEQ ID NO: 149171 - DNA, 435 bp, Homo sapiens; identical to SEQ ID NO: 145877

SEQ ID NO: 149172 - DNA, 1354 bp, Homo sapiens
  misc_feature (1)...(1354): n = a,t,c or g
agttacagacagctgaccatggaagcgaatgggttgggacctcagggttttccggagctgaagaatgacacattcctgcgagcagcttggggagaggaaacagactacactcccgtttggtgcatgcgccaggcaggccgttacttaccagagtttagggaaacccgggctgcccaggactttttcagcacgtgtcgctctcctgaggcctgctgtgaactgactctgcagccactgcgtcgcttccctctggatgctgccatcattttctccgacatccttgttgtaccccaggcactgggcatggaggtgaccatggtacctagcaaaggacccagcttcccagagccattaagagaagagcaggacctagaagcgctacgggatccagaagtggaagcttctaagctaggctatgggttccaagccatcaccccttacccgacaacgactggctgggacgtgtgccggctgattggcttttgctggtgcccccatggaccctgaatgacatacatggtttgaggggtggtggctcaagcacccatggctcaggcccaagcgctggctctatcagagacctcagggctagtcacccagctgcttcgcatcctcactgatggctctggctcccatatctggttaggacaagtggtggctggtgccccaggcattgcagctgtttgagtccccatgcagggcatcttggcccaacagttctttcaacaagttttgcactgccttaacatcccgtgatgtggcccaagccaagtgaaggcccagtttgccgggaagccaggccctggccaccaggtgcccatgtatcatcttttgctaaaggatgggcattttgcccctggaaggagcttggcccaagctgggctaatgaaggtggttgggcttgacttggacagtggcccccaaagaaagcccgggagtgttttggggaagaccggtgacaattgcagggcaaccctggaccccatgtgcctttgtatgcaatctgaggaggagatcgggcaggttggtgaagcaaatgctggatgactttggatccacatcgactacatttgccaacctgggccatgggctttatcctgacatggacccagaaccatgtgggcgcctttgtggatgctgtgcataaacactcacngtctgcttcgacagaactgagtgtatacctttacccctcaaagtaccactaacacagaatgattgatcgtttccaggacaataaaagtttccggagttgaacctattgtgtagttttgtttgtgaaagattgtcccatatcctcagttcttcttagcctctgtctccttccctgggaccctctcatatcctcttatag

SEQ ID NO: 149173 - DNA, 355 bp, Homo sapiens
ggcacgagaactggcacacccatgaaggcgacccccttcagactgccttgagcgactactacatgccgctgtacactggccgcatctttgagccaatgctatactcaaactgcaagagccgcctcctcgactccgtggagcacgacttccatctggagatcgccaagaaaattgacattggcgatggggcagagctgacggcagaattcctctacgacgaggtgcaccccatgcaacacgccttgctacaggccttttgcaagcccactggcccaaggcgcaagcgggatcctcatcgcctcattcacggcccaaaggattataaggatcacttctagaatgatcacaggtaaag

SEQ ID NO: 149174 - DNA, 679 bp, Homo sapiens
acatccgccgcccaccccgccctgcccacgcatcccggccacaccttcatctccggcgtgacctttcccttcaggcccatccgctaggctggcccgtgtgtgccttctgcgctctcgctggacgaagcctttcgagatggaaggggtggccggactcccagaagagaacctcggggaaggggtcgggcagcccctccccgccggcagaaccgtcttggtgtcacgggagtcccagggtggcttccccaccccggtcgcattctttgacatgcagattggatggtggagggaaagagtccagcctctgccgagagcctgctgcgtgcatttttaaaagatgccgatcctgggagcctctgttctctgcgaatttcaagaaaacagcctgtgtggcgaggagtgtgaacggcaggagcccacgggtgcaaagcccgtgtgtctggccctctttccctcgtgaagacgatgtgtccccgcccagaaaaagtgggctccttctgcagccccgtgagctgagccccaggctgcgtagtgaccacaagcttatgtgcagcactgctcaggggggctgtcaggaattcccctcacctcggaaaggaacttctcagttttattggggggtgtctaaatttcctttcattatgttcaaaataaatttttctaaacagtcaaaaaaaaa

SEQ ID NO: 149175 - DNA, 421 bp, Homo sapiens
agaaaaaagattggccccattgccacaccagactacatccagaatgcacctggcttgcctaaaacccgctcaggtatgttcagaggcctccatggattgggatgggctgaggcctggtggtggtggggtgtgcgtggatgaaagcctttggcagggctagggtgggtcagtgctttcaccaagtaactggaggtctgtggttccccagggaaaatcatgaggcgagtgcttcggaagattgctcagaatgaccatgagcttaataccctgaccaaaagcactgctgacagagcatgatgaagatggaaaaaaagcaacaaaataaaacaagatagaatagtgtaacaaggtactcagaagttgcaatttctaagcaaatcttaagtgtcattctaggtccgatcttcatatcttggaagac

SEQ ID NO: 149176 - DNA, 1011 bp, Homo sapiens
cacgaacgctttgagacaacctactttaagaagtttcctcggatactatgttacaggagatggctgccagcgggaccaggatggctattactggatcactggcaggattgatgacatgctcaatgtatctggacacctgctgagtacagcagaggtggagtcagcacttgtggaacattgaaggctgttgcaagaggcaagctgtggtgggccaccctcatccctgtgaaggggtgaatgcctcctactgctttgtcaccttgtgtgatggccacaccttcagccccaagctcaccgaggagctcaagaaagcagattatgagaaaaagattggccccatttgccacaccagactacatccagaatgcacctggcttgcctaaaacccagctcagggaaaatcatgaggcgagtgcttcggaagatttgctcagaactgaccatgacctcggggacatgtctactgtggctgacccatctggtcatcagtcacctcttcagccaccgctgcctgaccatccagtgaacatgattcttgaccttttaccttaggattcctccttgctccaaacttttggcccatcctcttttgcccccttcaggagtgctgagggccagtgttgacccacactacccttcccttgaccagctgtctgggaccggaaaccagctttgtctccagggtagagacaacatcctgtgactgccagggcagaaaaggacagggcccagggtcagccttcagttcttgctgtgccttccagacttgcagagttcttcaggaacccagaacagaggacggaaaagggttaccttttccttacccaagtttaaggtgtttcaaaagggggatgttgaggggcctccactggaaggcaggggagggcagctgttgtaattctattgttcaggtctttttaggggaaggccccagtaatttatattggggcatggcactttgccctttaaaaacaatgatttgtgagtccaggaacaatttactatttttaa

SEQ ID NO: 149177 - DNA, 2655 bp, Homo sapiens
atggcccaggtggtcttgaactcctgggctcaagtgatcctcctgtgtcccgaattggtggttcctggtctcactgacttcaagaatgaaactgcggaccctcgcggtagtgttacagctcttaaggtggcgcgtctggagtttgttccttctgatgtcggatgtgttcggagttttttccttctggtgggttcgtggtgtcgctgctcagaagtgaagctgcagaccttggtgatacttattaagtacccacccactctgtgcccaacaccctacaaagctctggggatccagctgtggctaggcagccaagagtcctgcctttgtcgtgctgacattccagtgtgggtgtgggctgtcagcttgctagatgagcttgtaaaaagcagctctgttgatcccagcagcggccagggctccgctgcttctcggctgggagacccgagactgtgccctgtccacggtgcctcctgcatgtcctgcgccctgagctgtcccgagctaggtgacagcgtaccacgctgccaccatgatgaggtgtctgtcatcaaagaaggctggctccacaagcgtggccaggagctggcacagacagcttgctccttgccacacgctgggcaactggtgccccagggcactgctgctggcaccttcctgccaggcatacctgtggatcacccgggctcagcccagtgccccagcctgcgtcagcagggccacctggagggctcctctgggagaggcattctcgtgaatacatcaagacctggaggccacggtattcctgctgaagagcgacggctccttcattgggtacaaggagaggcccgggcccctgatcagactctaccccccttaaacaacttctccgtagcaggttgtcttgggatgagtggaatgccagctgatgaagaccgagaggccgcgacccaacaccttgtcatacgctgcctgcagtggaccacagtcatcgagaggaccttccactggattctccagacgagaggaggagtggatgcgggccatccagatggtcgccaacagcctcaagcagcggccccaggcgaggaccccatggactacaagtgtggctcccccagtgaccctccacgactgaggagatggaagtggcggtcagcaaggcacgggctaagtgggaacctttggcaaagtcatcctggtgcgggagaaggccactgccgctactacgccatgaagatcctgcggaaggaagtcatcattgccaagtgcgtgccccgggaattgcgctcgcgagcctctgtgggggctgcgtctgtctgcaggatgaagtcgctcacacagtcacgagagccgggtcctccagaacaccaggcacccgttcctcactgcgctgaagtatgccttccagacccacgaccgcctggctttgtgatggagtatgccaacggggctgtcttccacctgtcccgggagcgtgtcttcacagaggagcgggcccggtttatggtgcagagattgtctcggctcttgagtacttgcactcgcgggacgtgtataccgcgacatcaagctgtgtgcacaggagaagggggacacacactcaccttagaaagtgtccccctcactcagcagcaggattactctagccccaactggaacaacccaagtatccactgtgagaggaacgtcagatccactgtggagtgttctcacagtgggacgccacacagcagttggaatgagctacagctacacacgacagtgtggacgcgtctcataggctatgtcgagggaaagccgcacagaggagctgttcccaggtacatgggggtgggccagagggtgctggaggacaatgatatggccgggccgtggactggtgggggctgggtgtggtcatgtacgagagatgtgcggccgcctgcccttctacaaccaggaccacgagcgcctcttcagctcatcctcatggaagagatccgcttcccgcgcacgctcagccccgagccaagtccctgcttgctgggctgcttaagaaggaccccaagcagagctcctgccaccttcaaacctcaggtcacgtccgaggtcgacacaaggtacttcgatgataatttaccgcccagtccatcacaatcacaccccctgaccgctgtgagtgctggggcccccgcgctgagtctcgctgcctccctcacgcagagccttcaagcgccgcagtccccgacggcttccccgcgggcccactgtctccccaagacgcctggcgaggccgccggggctggaggaggcgcgagcgcgctggggctgcagggagaacgcgagtacgccggggacatcttcccgaagtcatgcccgccttccttgcctcctgagcgcggactccttctcacgggcggagctgctgcgcgccggcgtcgcatcctgagccgcctggatttccggctgcaccaccccggcccgtgctgtgcctcgggctgctggccgcgctggcagggagcagcccccagccccgaggaactgggcaccctcgagccgtgcatggccgcgctgcgctccgaggtcccgcgccgggtcgcgccgcagtcttcctcaatatgcgcggccccagcgccaggggaccagccttgccgccgcctgcctgcccgccgcctccagtctgagcctccctga

SEQ ID NO: 149178 - DNA, 1829 bp, Homo sapiens
gagactgtgccctgtccacggtgcctcctgcatgtcctgctgccctgagctgtcccgagctaggtgacagcgtaccacgctgccaccatgaatgaggtgtctgtcatcaaagaaggctggctccacaagcgtggtgaatacatcaagacctggaggccacggtacttcctgctgaagagcgacggctccttcattgggtacaaggagaggcccgaggcccctgatcagactctaccccccttaaacaacttctccgtagcagaatgccagctgatgaagaccgagaggccgcgacccaacacctttgtcatacgctgcctgcagtggaccacagtcatcgagaggaccttccacgtggattctccagacgagagggaggagtggatgcgggccatccagatggtcgccaacagcctcaagcagcgggccccaggcgaggaccccatggactacaagtgtggctcccccagtgactcctccacgactgaggagatggaagtggcggtcagcaaggcacgggctaaagtgaccatgaatgacttcgactatctcaaactccttggcaagggaacctttggcaaagtcatcctggtgcgggagaaggccactggccgctactacgccatgaagatcctgcgaaaggaagtcatcattgccaaggatgaagtcgctcacacagtcaccgagagccgggtcctccagaacaccaggcacccgttcctcactgcgctgaagtatgccttccagacccacgaccgcctgtgctttgtgatggagtatgccaacgggggtgagctgttcttccacctgtcccgggagcgtgtcttcacagaggagcgggcccggttttatggtgcagagattgtctcggctcttgagtacttgcactcgcgggacgtggtataccgcgacatcaagctggaaaacctcatgctggacaaagatggccacatcaagatcactgactttggcctctgcaaagagggcatcagtgacggggccaccatgaaaaccttctgtgggaccccggagtacctggcgcctgaggtgctggaggacaatgactatggccgggccgtggactggtgggggctgggtgtggtcatgtacgagatgatgtgcggccgcctgcccttctacaaccaggaccacgagcgcctcttcgagctcatcctcatggaagagatccgcttcccgcgcacgctcagccccgaggccaagtccctgcttgctgggctgctataagaaggaccccaagcagaggcttggtgcgggggcccagcgatgccaaggaggtcatggagcacaggttcttcctcagcatcaactggcaggacgtggtccagaagaagctcctgccacccttcaaacctcaggtcacgtccgaggtcgacacaaggtacttcgatgatgaatttaccgcccagtccatcacaatcacaccccctgaccgctatgacagcctgggcttactggaggctggaccagcggacccagcttccccgcagttctcatactcggccagcatccgcgagtgagcagtctgcccacgcagaggacgcacgctcgctgccatcaccgctgggtggttttttacccctagctttgtccttagcctttttggtttgtgtccccacccccacctcctcaccccctttccagttcttcttcaggcccctcccagacgcaccccagcggcccctgcagcccctgcctccagcctccagcctcacctttgtgcccagactcgcatttggaagactccacctcccgcccaggcctgggctgttgggctggtggagattcagggtttaatccacacaagcccc

SEQ ID NO: 149179 - DNA, 2096 bp, Homo sapiens
ggaccgcctgcccttctacaaccaggaccacgagcgcctcttcgagctcatcctcatggaagagatccgcttcccgcgcacgctcagccccgaggccaagtccctgcttgctgggctgcttaagaaggaccccaagcagaggcttggtggggggcccagcgatgccaaggaggtcatggagcacaggttcttcctcagcagccttaaggttgaacatgagtgcacgtccatgtcagtgctgtgggactcctgtgcgtgcctcggactgcgtgtgtcggcgggacgcaggcacacgtgggctgtgtgtgcatgtgtgttctgtgtgagggcagcgtgtcctccagtgtgcatggtgtgtgggcttgggccccattccctggcccgagcatttcatcctgtgggggaaggggtgcctgaaccctagtgggagaagccccaactgtgaatccatgagctgcccctgcccacgccatcccctccctgtagacaacacctctgggtgtttgggagtttagcttttgtggggtttgctctccctatcccattctcctgtaattacacagttcatggcagggtggggaggggtggggttggttcgggtgggtgagggtctttttcctctgtgtgcgatgttgttatctgacagttctccgtccctactgggcctttctcctcgtcttcatatttgtacggtacaagcaataaagacactcatttcagaccagggcccagcctgctctcacgccattcccaaccactctgggctttgccttggggatggagtcagacccctgggccccagctcctcctgtactagccgttcccttcagcaaggagggcactgagctcagggtgagggcagctggggtgtgtgcaggagctcatgctggagagggtgggtggagctggtgcggtggtgctgaggggtatgggaaggctccccgtgtgtgggggaggtgtggacagagaccactccaggccctcagtgctgcttatgctaatagaggtggggtggagggacagggctggaagatctgggtagcccagaatgaggagggtgcctgtgctgtcactgaatgagagggagtggttcattccacccggctgtcgagcctcagagggggtgcattcctatcctgccccacctccctgtttatgctgccacctggaagccttgaggcccccaaattccagtacagacccagtggtgtgttcatggtggcgtggttgctgtcacctgggaagctcctgagccgtttggttagaaccctgttcagcttggggtcagccctcccctagtcactgcccctttagcctggatgtgtctgggcccctgacacttcccgtgcttgagtcacgtggctgcatggccgggcgctggccggatggaacacctcccccagcaagggaccagggaccagagcctgggccttgccttgttgagccttgttgtgcaaagggcctgggcacagatgaatttgagattttgccgcaaggtgttagcacttcacacccattgagtctttgagattttaagtgaatgtaagcaagaaaaaagtcaggacccaatttaacagaaaatcaagagttaagctaacagcctaggactcgttttggttgggggtttttttagtttgccctttctaaagtccatgtggacccttaatttaattacaaaaagtcctacccctggtggtcaataaaaataggcaggccctatgaagaaaggccttttactcttcccatctcgtccccagccccgagttgaccccacgttgctgctcctcacaccatggtgattgcaggtcctcgtagtgtgggcacaggccttggctacctcatcctttttaagtgcctctctcctcattccacaggatgggggtcccacagctgcagcagctggccccgtagttgagcatgtgtggttatcctgtagagcttttcccaagaagggtgtttgaacttagacgtcttcataaaatcttaccaaataaattttgagtagaataatcgtcttttgcaatgtacattttaaaaatttcacacattcttttttgtatataaagaacagtgactgggcgcagtggctcatgcct

SEQ ID NO: 149180 - DNA, 391 bp, Homo sapiens
cagtggcatgatctcagctcactgcaacctccgccaccagggttcaagcaattctcctgcctctcgagtagctgggattacacacatgagccaccatgcctggcctgaacctgtatttcaacagcttccaaattcaaatatttctatgtaatgcatccgatcctcagccaggcaaagtggaaggagatggagtttgtcgtggttaagcaacagtcagactaggtgtgttcatgatgccacctgcgagcagctgtgtgaccagagcagtgattctggaagttggtctaagccacagcttcctcatcgctaccatgggcaatggtggctgcactgcaaatgccagcacactgtagagaaggggtcttgctatgttgctctggctggtctcgtc

SEQ ID NO: 149181 - DNA, 356 bp, Homo sapiens
  misc_feature (1)...(356): n = a,t,c or g
ggcacgagagaaaagcccctgatgctggaggctgtcttcacgctgacccagacttgngggtgttgttntctatattannnnnnnnnnnnnnnnnnnnnnnnnnnnnnnnnnnnnnnnnnnnatatatannnnnnnnnnnnnnnnnnannnnnnnnnnnnnnnnnnnnnnannnnnnnnnnnnnnnnnnatttttttttctattttttttcnnnnnnnnnnnnnatttannnnnnnnnnnnnnnnnnnnnnnnattcnnnnnnnnnnnattttannnnnnnnnnnnnnnannnnnnnnnnnnnnnnnnnnnnnnnnnnnnnnnnnannnnnnnnnnnnnnannnnnnnnnnnnattt

SEQ ID NO: 149182 - DNA, 344 bp, Homo sapiens
ggcacgagactacccctaaaagccaaaatgggaaaggaaaagacgcatatcggcattgtcgtcattggacacgtagattctggcaagtccaccactactggccatctgatctataaatgcggcaggcttcacaaactagccattgatacatatgcgatagacgttcctctggaaaggacctgccacccttaaagaaccctctgatacatatagccaagaattggcatgaaacggctctttatgacatttgagtgtttcatgttcctctgactttctttctttattttcatctttggccccaagtctttttagcacagctattcttgtcaccagtcgcccattcg

SEQ ID NO: 149183 - DNA, 329 bp, Homo sapiens
ggcacgagcaggaatatgctgcaggaaaaaccctgacatggctcacggttgtctacccatggacccagaggtactttaacagcttgggcaacctgtactctgactctaccatcatgggcaaccccaaaatcgatgcacatgacaagaaggtgctgaccttcttgggagatgccactaagcacctggatgatctcaggggctcctttgaccagctgagtgaactgcactgcgacacgctgcatgcggatactgataacttcgagctcctgggaaatgtgctggtgaccgttatggcaatccatttcggaaacgaattatcgccctgatgt

SEQ ID NO: 149184 - DNA, 776 bp, Homo sapiens
  misc_feature (1)...(776): n = a,t,c or g
ttttcaaattggagacggagtcttcctctgttgcccagactggagtgcagtggcaccatcttggctcactgcaacctccaccttccaggttcaagcgatcctcctgcttcagccccgctagtagctgggattacaggcacacaccaccatggctggctaatttttgtatttttagtagagatggggtttcaccgtgttggccaggctggtctcaaactcctgatcgcagggtgatccacctgccccggcctcccaaaatgttgagattacaggcgtgagcccaccgcgcccggcctggctgatgtttcaaatgtgtgcttaatagggtggaccgtgggggtaaagagagggagggagggggagatagatagatagaggaagagaggaagcccagattcagaatcccctnctgcgtgaccagggcaagtggcttaacctctcnaaatctcaaagtcntcatctatcaaaaggggantaatagtacctagcagataggcttgttaaattagatggcatacgtaaaatgtttagtatagtagacagaaagtagtagacaattaatagctagtcctatcattatgagctttggctaaaggcctcttggagagtagactggttctattacagtcccagaggaaaacactgattacacaggaaatccagactaaacaaatgcccaagtcatactgcagagaacactggtgctctggctctcttggacaatttcctcaggagcctatggtcctgttgctcctgaggctgcaccaggcgttggc

SEQ ID NO: 149185 - DNA, 392 bp, Homo sapiens; identical to SEQ ID NO: 147905
  misc_feature (1)...(392): n = a,t,c or g

SEQ ID NO: 149186 - DNA, 862 bp, Homo sapiens
accatgactaatttttttttattttttgtagagatgggatcttgctgaattgcccaggctggtttcaaacttctgggctcaccaaaggcctcttttctaagaaagagccctctccctcctctccctcttgctgtctccaggagagacatcctgcaaggttgtattctttttttttttttttgggacagagttttactcttgttgccccaggctggaagagcagtggtccaattctcaacttcacggcaaccttccacttcccggggttcaagtgattctcctgcctcagcctcctgagtagctgggactacaggcacattgccactatgcccaactaggtttttttttctatttttaagtagagacggggtttctcttcagtcctgggtaccccttggcagagggattttgctgaggaaaattaggtatccttcctagcccctccacacactttccaaaaccaggggctgcggaatctgaatgggatgccaggaatgacagccttgggctgaagaagtgacgtcactgcaagagttgagagccagcgtctaaagtgtccacggcatcctgggaggttttatccttggcgactctaatggtagatttttgtccaccttgttctatttgcttttgtttgtttttgatttttctgttttaaaattttaaggagagatgggtttcaccatgttgcccaggctggtctcaaactcctgagctcaagcgatctgcccaccttggcctcccaaagtgctgggattataggtgtgagccaccgcatccagcccacattgttctatttgtatttcatgaaagcagttctgaatgagagtaaatcagcttcagggtgaaaaaaaaaaaaaaa

SEQ ID NO: 149187 - DNA, 435 bp, Homo sapiens
tggaagctaataaagagaaccgagaggcacaaatggctgccaaactggaacgtttgccagagaaggattaagccccttggaagaagtgcggaagaacaaaggaatccaaagaccctgctgacgagactgaagctgactaatttgttctgagaaactgaaagtgttttactctttttctaaagtgttggtctttctaatgtagctatttttcttgttgcatcttttctacttcagtacacttggtgtactgggttaatggctagtactgtattggctctgtgaaaacatatttgtgaaaagagtatgtagtggcttcttttgaactgttagatgctgaatatctgttcacttttcaatcccaattctgtcccaatcttaccagatgctactggacttgaatggttaataaaactgcacagtgctgttggtggcagt

SEQ ID NO: 149188 - DNA, 1547 bp, Homo sapiens
  misc_feature (1)...(1547): n = a,t,c or g
ggggnaggcggcgcccggnnnnnaaattgtaatctantggctcgttngaattcggcacgaggactttccttatcccagttgattgtgcagaatacactgcctgtcgcttgtcttctattcaccatggcttcttctgatatccaggtgaaagaactggagaagcgtgcctcaggccaggcttttgagctgattctcagccctcggtcaaaagaatctgttccagaattccccctctccccccccaaagaagaagggttcttccccggggggaaattccgagagaattaggaagctgccgaagaaagacgccagtccccatgaagctgtagttcttgaaggcagctggctgagaaacgagaggcacgggaaagaagtgcttgcagaaggcaatagaagagaacaacaactttcagtaaaatggccagaagaggaaactgaccccccacaaaatggaagcctaataaagagacccccgagaggccacaaatgggctgcccaaactggaaccgtttgccgaagagaaggataaggcacattgaaagaagtgccggaagaaccaaggaatcccaaagaccctgtccgcgacgagacctgaagcctgactaatttgttcctgagaactgactttcttccccatcccctcccccccttaaaaatatccaaagacttgtactggcccagtgtccattttattttttcccctcctgacaaatatttttagaaagctaatgtaggactgtattaggtagatcccaggatccagaactgtaagatggttgttttaggggggctaaagggggagaaacttgaaagtgttttactctttcttctaaagtgttggtctttctaattgtagctatttttcttgtttgcatcttttctactctcagtacacttggtgtacatgggttaatgggctagtactgtaattgggctctgtgaaaacatatttgtgaaaaagagtatgtagtgtgcttcttttgaacctgttaagatgcctgaatatccgttcaacttttcaaatcccaattctggtcccaatcttaccagatgctactggacttgaatgggttaataagaactgcacagtgctgttggtggcagtgacttcttttgagttaggttaataaatcaagccatagaggcccctcctggttgatacttgttccagatggggcctttggggctggtagaaatacccaacgcacaaatgaccgcacgttctctgccccgtttcttgccccagtgtggtttgcattgtctccttccacaatgactgctttgtttggatgcctcagcccaggtcagctgttactttctttcagatgtttatttgcaaacaaccattttttgttctgtgtcccttttaaaaggcagattaaaagcacaagcgtgtttctagagaacagttgagagagaatctcaagattctacttggtggtttgcttgctctacgttacaggtggggcatgtcctcatcctttcctgccataaaagctatgacacgagaatcagaatattaataaaactttatgtactgctgtagt

SEQ ID NO: 149189 - DNA, 888 bp, Homo sapiens; identical to SEQ ID NO: 145892

SEQ ID NO: 149190 - DNA, 1322 bp, Homo sapiens
atgtcgggcaaagaccgaattgaaatctttccctcgcgaatggcacagaccatcatgaaggctcgtttaaagggagcacagacaggtcgaaacctcctgaagaaaaaatctgatgccttaactcttcgatttcgacagatcctaaagaagataatagagactaaaatgttgatgggcgaagtgatgagagaagctgccttttcactagctgaagccaagttcacagcaggtgacttcagcactacagttatccaaaatgtcaataaagcgcaagtgaagattcgagcgaagaaagataatgtagcaggtgttactttgccagtatttgaacattaccatgaaggaactgacagttatgaactgactggtttagccagaggtggggaaccagttggctaaattaaagaggaattatgccaaagcagtggaactactggtggaactagcttctctgcagacttcttttgttactttggatgaagctattaagataacccaacaggcgtgtaaatgccattgaacatgtcatcattccccggattgaacgtactcttgcttatatcatcacagagctggatgagagagtttcgagaagagttttataggttaaagaaaatacaagagaagaaaaagattctaaaggaaaaatctgagaaggacttggagcaaaggagagcagctggagaggtgttggagccctgctaatcttcttggctgaagagaaggacgaggatcttctatttgaataatctttcctgttctggttctttgagaaaccctaacactggacttcattttaattcacagtgtgtaggttttgatttgtgtggctattgattttttggcctaagaattttcactggttgtaaaatttaccctagatgtctatttatgggattacttttgcagaatcataatttagccacccattttatcatgggatggaaagagatctgttaaaacctgcccagggaacttacaggaatttactttggcagaagcgtttattcatactccaatttacatctgtgttacacgtgatctgcttaccaagcatattaggaaaatacctcttaggaagcattagcgggtctcagggccaaattactgtggagccagccttttcattccctacccaacttgcaaaccttggcgctgttgtctgagattgctgcagccattcttgttaccatggtacttctcaaactttgtgaaaacctgcacttttccttgcatgacaggttcctgtcttgtctgtcatgggagccattctgccaatttaaatgcgactgtggtataaacagtaaaataatttaaaaaaa

SEQ ID NO: 149191 - DNA, 379 bp, Homo sapiens
  misc_feature (1)...(379): n = a,t,c or g
nnnnnnnnnnnnnnnnnnnnnnnnnnnnnnnnnnnnnnnnnnnnnnnnnnnnnnnnnnnnnnnnnnnnnnnnnnnnnnnnnnnnnnnnnnnnnnnnnnnnnnnnnnnnnnnnnnnnnnnnnnnnnnnnnnnnnnnnnnnnnnnnnnnnnnnnnnnnnnnnnnnnngcaaccaaattgttcgcttcaaaatggttaattctatgttacgtgaatttcacgtcgattaaaaaatatatannnnnnnnnnnnnnnnnnnnnnnnnnnnnnnnnnnnnnnnnnnnnnnnnnnnnnnnnnnnnnnnnnnnnnnnnnnnagaagtggaaaattccatatctgatctcccgccagaaatcacagtcaaaatgcagtcgaaactttg

SEQ ID NO: 149192 - DNA, 1228 bp, Homo sapiens
ttttttttgcatgtgattgttcatagtattagtcacaataaccaaaaggtgaaacaaattgtggtatattcatacaatggaattttattcagccatagaaaggaatgaaattctgacacatgctacaacatgggtaaaccttgcaaacgccatgctaaatggaagcctgactgaccagggggctcttgggctctcaatgcaatagaaattgacatggggccaaaagacttttcccagacaaagcaccgcgaagggttagaggatattaggttaggcatcatctgggttgtgatgatcatctcgagtaatggggccacctgggtgggtctgggccagcggcaaacaagggctgttaaatcaatttaatttatttcaggcatttccctccccaagattggggacacttctggcaatcttggggttccctatttgggatctcctaagggccagttcctgggaattgtttaagtaaaagacatggttaagcattatgagagcacagaagaacaatacagaaaggccattttctttgtatgactaaagcctcgaggttagcaggtatggtgtcaatgaggtagtagtatgggttttgtgatcagtgggaatgcatgaaaaaatgctctagtgggggtgagccaaaagccaagccccccttcctactgtctcagaagaagccagacacaaaagaccacatattattgtgtaattcccacgttatatgaaatatcccagaatagaaaaagcccacagaaataaaaacggaagatccagtgggttgccccagcgggacaggtggagggggaagatagggagtgactgcctagtgtgtacaggcatttaattttgggagtgaatgaaaaaggttttgggaaaatagttaaaaggtggtggttgccccaacatccagtgaatgcaaccaaattgttcacttcaaaatggttaattcctatgttacgtgaatttcacgtcgattaaaaaatatatataccaggttgagcatccctaatctgaaaatcccaaaatgctcccaaaatttcaaaatttctgaatgccaacatgacgctagaagtggaaaattccataactgatctcatgccagaaatcacagtcaaaatgcagtcgaaactttgtttcatgcacaaaattatttaaaatattgtatcaaattacctttaggctatgtatataaggtgtatatgaagcataaatgaatttcatgtttagtctt

SEQ ID NO: 149193 - DNA, 498 bp, Homo sapiens
  misc_feature (1)...(498): n = a,t,c or g
gggatgtcccagggtnccccncactgatatccctagaagagcgcnggaanncccgcttcctagngagtcggcggctgatttagaaagaggctcaggctacgccacacaggatccatggaagtggcagagcccagcagccccactgaagaggaggaggaggaagaggagcactcggcagagcctcgggcccgcactcgctccaatcctgaaagggctgaggaccgggcagtaagggcacaggccagtgtgggcagccgcagcgagggtgagggtgaggccgccagtgctgatgatgggagcctcaacacttcaggagccggccctaagtcctggcaggtgcccccgccagcccctgaggtccaaattcggacaccaagggtcaactgtccagagaaagtgattatctgcctggacctgtcagaggaaatgtcactgccaaagctggagtcgttcaacggctccaaaaccaacgccctcaatgtctcccagaagatgatt

SEQ ID NO: 149194 - DNA, 418 bp, Homo sapiens
ttttaacgagtctcaaatttttattttgatggcaaaaatcacacagggaagaacaaaaattatccatgacaaactaggagtggaaatgggctgggagacacagaaaatgggtgcccacagttcctgggatccctcctggaatcctgggtttccctcctaggaccctgcaaggtaccctacgtgcctcctggaacccccccaccccggaggtcccaaggaacccagtttgagaactggggctggcaaggtggacggctgtagacaaggatggtgcggaccacatatggcgggggaatcgtctgcacgttctctgtgaccggaagctcagttttctgctggatgaggctgaaaagtccttccagattgaaggtggaacaggaggccgtctccagatcatagaggcagctacagagctcgc

SEQ ID NO: 149195 - DNA, 422 bp, Homo sapiens
ttaacgagtctcaaatttttattttgatggcaaaaatcacacagggaagaacaaaaattatccatgacaaactaggagtggaaatgggctgggagacacagaaaatgggtgcccacagttcctgggatccctcctggaatcctgggtttccctcctaggaccctgcaaggtaccctacgtgcctcctggaacccccccaccccggaggtcccaaggaacccagtttgagaaccaaggctttaggccaaggacttccttgcacaagaaggtgcagatgtacagggatggttcagacagtggcctcaacctcaatggcttcatcctcctcctccagcaggctgtaggaagcatggctctggcaaggccgctgcagggggtgggccaacagttctctgtgaccggaagctcagttttctgctgga

SEQ ID NO: 149196 - DNA, 703 bp, Homo sapiens
  misc_feature (1)...(703): n = a,t,c or g
ggttaacgagtctcaaatttttattttgatggcaaaaatcacacagggaagaacaaaaattatccatgacaaactaggagtggaaatgggctgggagacacagaaaatgggtgcccacagttcctgggatccctcctggaatcctgggtttccctcctaggaccctgcaaggtaccctacgtgcctcctggaacccccccaccccggaggtcccaaggaacccagtttgagaaccaaggctttaggccaaggacttccttgcacaagaaggtgcagatgtacagggatggttcagacagtggcttttgtcgatcttgtgttttgtccgcacgaacatctcaatcatcttctgggagacattgagggcgttggttttggagccgttgaacgactccagctttggcagtgacatttcctctgacaggtccaggcagataatcactttctctggacagttgacccttggtgtccgaatttggacctcaggggctggcctgtgcccctactgcccggtcctcagccccttcaggattggagcgagtgcggggccgaggtctgccgagtgctcctcttcctcctcctcctcttcagtggggctgcntggctctgccacttccatggctcctgtgtggcttcggctcaccgtagcctgaacctccttctaaatcagccgccgactcactaggaagccgccatctttaca

SEQ ID NO: 149197 - DNA, 4247 bp, Homo sapiens
  misc_feature (1)...(4247): n = a,t,c or g
cgcacccggcctgaccccgcgccaccatgtaaacggcgccagcaggcggacgctggcttctccgcctgggacccctccgccccgacccgggccccgcggccctcgatgaggacacaccatgctgaccggggtgaccgacggtatcttctgttgcctgctgggcacgccccccaacgccgtggggccactggagagcgtcgagtccagcgatggctacaccttttgtagaggtcaagcccggccgcgtgctgcgggtgaagcatgcaggacccgccccagccgctgccccacctccaccatcatccgcatcctcggatgcagcccagggggacctctccggcttggtccgctgtcagcgccggatcaccgtgtaccgcaatgggcggttgctggtggaaaacctgggccgagcccctcgagccgacctcctacacgggcagaatggctctggggagccgccggccgccctggaggtggagctggcagatccggcgggcagcagatggccgcttggcccccggcagcgcttgcagcgtttgcggcagaggcagcggtgggcggcggcggggagccaggcgccccaagaggaccatccatattgactgtgagaagcgcatcactagctgcaaaggcgcccaggccgacgtggtgctctttttcatccatggcgatggcggttccctggccatctggaaggagcagctggacttctttgtgcgcctaggctatgagggggtggctcctgacctggccggccacggagccagctctgcgccccaggtggccgcagcctacaccttctatgcgctggctgaggacatgcgaacaatcttcaagcgctatgccaagaagcgaaatgtgctcattggccattcctacggtgtctctttctgcacattcctggcacatgagtacccagacctagtgcacaaggtgatcatgatcaatggcgggggccctacggcgctggagcccagcttctgctcaatcttcaacatgcccacctgcgtcctgcactgcttgtcgccctgcctggcctggagcttcctcaaggccggcttcgcccgccaaggagccaaggagaagcagctgttaaaggagggcaacgctttcaacgtgtcatccttcgtactccgggccatgatgagcggccagtactggcccgagggcgacgaggtctaccacgccgagctcaccgtgcccgtcctgcttgtccacggcatgcacgataagtttgtgccggtggaggaagaccagcgcatggccgaggacacgttccaggactaccaggagatgttcgtgcagttcggctacgttgtgctcttctcgtccgccttccccctggcggcgctgtgcgccctggtcaacaacctcattgagatccgcagcgacgccttcaagctgtgcaccgggctgcagcggcccttcggccagcgcgtggaaagcatcggccagtggcagaaggtgatggaggccatgggtgtcctagcgattgtggtcaactgctacttaatcggccagtgcgggcagctgcagcgcctcttcccctggctgagcccggaggcagccatcgtgtcggtggtagtgctcgagcacttcgctctgctcctcaagtacctcatccacgtggccatccccgatatcccgggctgggtggccgaggaaatggccaagctggagtaccagcgccgcgaggcctttaagagagccctggcatgcaccagcctcagctggcacccgctaacaccctttcttcttagtcctgtaacggcttggctctacctgcagagacacgagcgccaggcccagcatcgctaccagcagcagcagcgcaggcggcgggaggaggaggagcgacagcgccatgcagagcaccatgcccggcgggagcatgattctggtggccgagaggaggcgagggccgagggctctgggctggaccctgccacctcctccgagaaggcctctgccaaggccaagggcagcactgcgggtggccacgggcctgaacggcccaagcgcccagggtccctgctggcacccaacaacgtcatgaagttgaagcagatcatcccactgcagggcaaattcctctcgtcaggggccacatcctcactggctgctgcaggggccggagccaccacccggcctccccctgcccagtcacccacaggcagcgacacccgcctgcctgccttcctcagcttcaagttcctcaagtcacccgagacccggcgggactctgagcgcagccactcaccgcccaaagccttccatgctggcaagctcttcccctttggtggcacccgggctgagcctgggtccaacggggcgggcgggcaggcccggccagatgggacccccagcagtggcagcagccgggttcagaggagtgggccggtggacgaggccctggctgaggagctggaagccccccggcccgaagaggaaggctcagcctatcacattgcaagctccacctctattccacgtttcagcctatcacgcccgctgaactacatttcccaggaggcgtcggggctgcgccgtacaacttccggctgtaaagatggcggcttcctagtgagtcggcggctgatttaaattgaggttcaggctacggtgagccgaagccacacaggagccatggaagtggcagagcccagcagccccactgaagaggaggaggaggaagaggagcactcggcagagcctcgggccccgcactcgctccaatcctgaaggggctgaggaccgggcagtaggggcacaggccagcgtgggcagccgcagcgacgggtgagggtgaggccgccagtgctgatgatgggagcctcaacacttcaggagccggccctaagtcctgggcaggtgcccccgccagcccctgaggtccaaatttcggacaccagagggtcaacttgtccagagaaaagtgattatcttgcctggacctgtcagaggaaatgtcacttgccaaaagcttggaagtcgttcaacggctccaaaaccaacgccctcaatgtctcccagaagatgattgagatgttcgtgcggacaaaacacaagatcgacaaaagccacgagtttgcactggttggtggtgaacgatgacacggcctggctgtgtggcctgacctccgacccccgcgagctctgtagctgcctctatgatctggagacgggcctcctgttccaccttcaatctgggaaggacttttcaagcctcatccagcagaaaaactgaagcttccggtcacagaggaacgtggcagacggattcccccgccattatgtgggtcccgcaccatcctttgttttacagccgttcccacctttgccagccccagttcttcctttgacgggagcccatggaaggaaaatgttccagtgcccatatttcttctttgacgttgtttacatccacaatggcactgaggagaaggaggaggagatgagttggaaggatatgtttggccttcatgggcagccctggataccaagggtaccaagctacaagtatgaaggtggcaactggctgggccagcccctggaagttgcacaacttgcatggcggaaaactgtttggcccacccccctgcaagcggcctttgccaagaagccaatgcttccttacagccttgctgggaggaggaaggaatgaaagccatttgaggtttgaggcccactgtctgaaaccatccctgtacattctgcacccttcttgtgcaaggaaagtcctttggcctaaagccttggttctcaaactgggtttccttgggacctccgggggtggggggggttccaggagggcacggtaggggtaccttgcagggtcctaggagggaaaccccaggattccaggagggatcccaggaactgtgggcacccattttctgtgtctcccagcccatttcccactcctagtttgtcatggataatttttgttcttccctgtgtgatttttgccatcaaaatcacaaatttgagactcgttaagnnnnnnnnnnnggggcggccgttttaaaggacccctggaggggcccaagtttacccgggcttgcaacgaattagttttttccttatagggggcggttttataacctaggccctggccgcctttttacaacgccggaacgggaaaacttgttacctgggaatctttgaaaagaacccttacttttggggggggacttattgggacaacctccctacaaaaatttaaggctttaaggaaaatataaatg

SEQ ID NO: 149198 - DNA, 812 bp, Homo sapiens
atcgattagacgtttataatgtgctgccttgtacgacctcttgaactgagcataaagctccatctatagatgatgaatatgtacatgatttggtcatcctttaagatgccatacttgtgtgatggcctatgttccccatcactgatgggacatacataatcccgtagcatactaggtttcatggatcaatttgacttggacgaattatcatctggtaaattgattacgagggcgaagtacgatgaccaggactttttgaacggaaagtgggcttgcagacctctatagaggagcgtgtggctcatctacgaagagtccagataaaatacccaggagctgatatggatatcactttatctgctccatcattttgccgtcaaattagtccagaggaatttgaatatcaaagatcatatggctctcaggaacctctggcagccttgttggaggaagtcataacagatgccaaactctccaacaaagagaaaaagaagaaactgaagcagtttcagaaatcctatcctgaagtctatcaagaacgatttcctacaccagaaagtgcagcacttctgtttcctgaaaaacccaaaccgaaaccacagctgctaatgtgggcactaaagaagcctttccaaccatttcaaagaactagaagttttcgaatgtaataatacttccacagcaacaggtgctagagaccactgttgttgttttgagtgaatggtggttaggagaaagactttggtggtggaagaaagaaaagcataaaacaaagactactgaaatatagataaagattgccttagttttta

SEQ ID NO: 149199 - DNA, 471 bp, Homo sapiens
  misc_feature (1)...(471): n = a,t,c or g
tttgagttcgatgcactcngccnggacttcgccagccagctccgggaactctttgccagcctgacaccctgggcctgtggctcccacacacctttgctggcagggcgcatgttcaggctcctggacgaaaacaaggactcgctgatcaacttcaaggagttcgtgacagggatgagcgggatgtaccacggggacctgacagagaagctcaaggtgctctacaagctacaccttcccccagctctgagcccagaggaagccgagtcagccctggaggcggcccattatttcacagaggacagctcctcagaagaagcactaccacaggaagagcaagaaggaagtggaagtgaggagagaggagaggagaaggggaccagctctccggactatcggcactaccttcgaatgtgggccaaggagaaagaggctcagaaggagacgattaaggatcttcccaagatgaaccag

SEQ ID NO: 149200 - DNA, 3790 bp, Homo sapiens
gcctcgcgggcctcggcccggtgcgagcggctccgcgatgtggctgagcccggaggaggtgctggtggccaatgcgctgtgggtgacggagcgggccaaccccttcttcgtgctgcagcgacgccggggccacggcaggggcggcggccttacgggtcttctcgtgggcaccctggacgtggtgctggactccagtgcccgcgtggccccttaccgcatcctgcaccagacccaggactcccaggtctactggacagtggcgtgtggttcttcccgcaaagagatcacaaaacactgggaatggctggaaaataacttgctccagacactgtccatcttcgacagtgaggaagatatcaccaccttcgtcaagggcaagatacacggaatcatcgcagaagagaacaagaacctgcagccccagggagacgaggaccccgggaagttcaaggaggctgagctgaagatgcggaagcagtttgggatgcctgagggcgagaagctggtgaattactactcctgcagctactggaagggccgcgtgccccggcagggctggctgtacctgacggtcaaccacctgtgcttctactccttcctgctggggaaggaagtgagcctcgtggtgcagtgggtggacataacgcgtctggagaagaacgccaccctgctcttccccgagagcatccgtgtggacacccgcgaccaggagctcttcttctccatgttcctcaacatcggcgagaccttcaagctcatggagcagttggccaacctggccatgcggcagctgctggacagcgagggcttcctggaggacaaggccctgcctaggcccatccggccacacaggaacatctcagccctgaagcgagacctggacgcccgagccaagaatgagtgctaccgagccacgttccggctgcccagggatgagcggctagacggccacacaagctgcaccctgtggacgccgttcaacaagctgcacatccctggccagatgttcatctccaacaactacatctgcttcgccagcaaggaggaggacgcttgccacctcatcatacccctgagggaggtgaccattgtcgaaaaagctgacagctccagcgtgctgcccagccccctgtccatcagcaccaaaagcaaaatgacattcctgtttgccaacctgaaagaccgtgatttcttggtgcagaggatctctgacttcctccagaaaacaccatccaagcagccaggcagtatcgggagcaggaaagccagtgttgtggaccctagcacagagtcttccccagctcctcaggaggggtcggagcagcccgccagcccagcctctcccctcagcagccgccagagcttctgtgcgcaggaggcgccaaccgcatcccagggcctgctgaagctcttccagaaaaactcgcccatggaggaccttggagccaagggggccaaggagaagatgaaagaggagtcatggcacatccacttcttcgagtacgggcgtggcgtgtgcatgtaccgcacagccaagacgcgggcactggtcctgaagggtatccctgagagcctccggggagagctgtggctcctcttctccggggcctggaatgagatggtgactcaccccgggtactatgctgagctggtggagaagtccaccgggaagtacagcctggccacagaggagatcgagcgagacctgcaccgctccatgcccgagcaccctgccttccagaacgagctggggattgctgccctccggcgggtgctgactgcctatgccttccgaaaccccaccatcggctactgccaggcaatgaacatcgtgacctcggtgctcctgctctatggcagtgaggaggaggccttctggctcctggtggccctgtgcgagcgcatgctgcccgactactacaacaccagggtggtgggagccctggtggaccaaggcatcttcgaagagctcacgagagacttcctgccgcagctctcggagaagatgcaggacctgggggtgatctccagcatctcgctgtcctggttcctgaccctcttcctcagcgtcatgcccttcgagagcgccgtggtcatcgtcgactgctttttctatgagggcatcaaggtgatcctgcaggtggccctggccgtcctggacgccaacatggagcagctgctgggctgcagcgacgagggcgaggccatgaccatgctgggcagatacctggataatgtggtcaacaagcagagtgtctctcctcctatcccgcacctccgtgccttgctgagcagcagcgatgacccccctgcagaggtggacatctttgagctcctgaaagtgtcctatgagaaattcagcagcctgagggccgaagacattgagcagatgcggtttaaacagaggctgaaagtgatccagtccttggaggacacggccaagaggagtgtggtccgagctatacctgtggacattggtttctccattgaagagctggaggacctttacatggtgtttaaggccaagcacctggctagccagtactgggggtgcagccgcacaatggccggccgtcgggaccccagcctgccctacctggagcagtaccggattgatgccagccagttccgggaactctttgccagcctgacaccctgggcctgtggctcccacacacctctgctggcagggcgcatgttcaggctcctggacgaaaacaaggactcgctgatcaacttcaaggagttcgtgacagggatgagcgggatgtaccacggggacctgacagagaagctcaaggtgctctacaagctacaccttcccccagctctgagcccagaggaagccgagtcagccctggaggcggcccattatttcacagaggacagctcctcagaagcatctcctctggcctcagatctggatcttttcctgccctgggaggctcaagaagcactaccacaggaagagcaagaaggaagtggaagtgaggagagaggagaggagaaggggaccagctctccggactatcggcactaccttcgaatgtgggccaaggagaaagaggctcagaaggagacgattaaggatcttcccaagatgaaccaggagcagttcattgagctgtgcaagacgctttacaacatgttcagtgaagaccccatggagcaggacctgtaccacgccatcgccaccgtggccagcctcctgctccgcatcggagaggtggggaagaagttctcagcccgcacaggcaggaagcccagggactgtgccactgaggaggacgagccaccagcacccgaactgcatcaggacgcagccagggagcttcagcccccagctgcaggagacccccaagccaaagcaggcggagacacacacctcggaacagccccacaggagagccaggtggtggtggaggggggcagcggcgagggacagggctcaccctcccagctgctgtctgacgatgaaaccaaagacgacatgtccatgtcctcctactcggtggtcagcacgggctccctgcaatgtgaagaccttgcagacgacacggtgctggtgggcggggaggcctgcagccccacagcgcgcatcggcggcaccgtcgacaccgactggtgcatctcctttgagcagatcctggcctccatcctgacggagtccgtgctggtgaacttctttgagaagagagtggacattggactcaagatcaaggaccaaaagaaagtggagagacagttcagcaccgccagtgaccatgagcagcctggagtttccggctga

SEQ ID NO: 149201 - DNA, 1045 bp, Homo sapiens
atgcccatggcagtcctggtgacagtggcagaggctgacttgagcttgaggaccttgatttcaaggacagaaactacagaagcagtcactgccagggagccccctaccccgggagatggcggatgcgtcccccgatcagggagcaggcctcgggatgcacaggaggctcccaatccggacattcgttcacagcacaaggtccacacaaacgaggagaaggggaccagctctccggactatcggcactaccttcgaatgtgggccaaggagaaagaggctcagaaggagacgattaaggatcttcccaagatgaaccagggcttctcgcacagccgctggctccggaagctactcttctccgttctcaggcgaatgtgctccaaacaggactgcactccctacgtgtccattacaattgcttctgtcagcgtcagcagtggtctctgtgttgctaaaaacaacgttaaatctactacagggacaagtttcagagctgccactcaggtacagttgtttgagaagagcgtggttgtcttgccctgttttcgtcttgactggataatagaagtacacagtggaaatcctgagctgggcactctgctgtggctggacctgccccaggtccctgctgtcactttgccatctgaggtcagcagctgccctcagaaccgaccccggggatgtttagaatactggggctgagcttcacccgaggagattctcacctgattacctgtgatgaggtccagacctgtggtttttaaagctggcaggccattgctctgtgcctccagagctgaaggctcttgacacagctgttcttgtttgtggcttgctcaccagagaggccgtggtaggacagaccccactgggcctgggtcagtggagaagtcccttagacttccacgtcttacaatatggcagtcaaacaccctgagcaattctcccactgaaaataactaaaaatgctagctattttaaatgcactgatgagctgacaagaaagtaactctcggccaggcgcagtggctcatgcttgtagtcc

SEQ ID NO: 149202 - DNA, 1047 bp, Homo sapiens; identical to SEQ ID NO: 119417

SEQ ID NO: 149203 - DNA, 1413 bp, Homo sapiens; identical to SEQ ID NO: 126882

SEQ ID NO: 149204 - DNA, 1686 bp, Homo sapiens
ctagaaattggatcccttatcgacctgcagcatgctaagtccttgagtaggaacagcagaagtctctggtcctcttacctggtgaggttcccaggcccccagctcagtcctcaagaatggcagttttaccaatatggggctggctggaaaaaacagcagctctgctgccagaaggggcagacttaacttgtggtagggggctttgtgagtgacttcaagaatgaagccgtggaccctagcggtgagtgttacagttcttaaaggcagcgtgtccggagtttgttcctcctgacgtccggatgtgttcggagtttcttccttctggtgggttcgtggtctcactggctcaggagtgaagctgcagacctttcccgtgagtgttacagccacatccttctgattggtccattttacagagagcccagtggtctgttttgacagggcgctgattggtgcgtttacaatccctgagctagacacaaaggttctccacgtccccactagattagctagatacagagtgtccacacaaaggttctccaagtccccaccagagtagagggccgaccctcggtgggcggagggacggagggaagatggctgcagagaccggatattggcgctgcctccccgaatcccggacctgcgctgaggaggcggttcatctgtggccagcggtgcttcgggacccgcgctgggggaaccctggcgacggggcctggccctgctatatgcgggggcctcggctggagtgagcggcgtggacgcctctttcctccggctcttcccttgttgctgcgagagcgagagggccgcgggcggcggaggcagcggggccgggatggaggacgttaactctaacgtgaacgcggaccaggaggtgcggaagctgcaggtgccggtgaagaagctggggaagcagcacgaacagccgaggagccgctcgcgctgtgctgggccccggctccatcgcggttcgccggctcctccactccctcctacggcgcggggtcccctcggggcttccccttgggtctcagcgcaaagtcgggcggcggggccggatggacccgaggcggacgaataacgaggagctgcgagacgccaccttcttgctggcggcgggggagggcggcttgctagacgacctggagcgtctgtcaggctaggaggagggggaggagagctggtgagcgccgggcgccgggcggggctgggcggggacgccccggtggcggaggacgtcccggaggatccctctggtcgggcgcctggctttgtgtagccagccaggtccgctctcggcgggtactcgtggtcttgctctggcagaggggaggtcagttggagttgggggttcgaggcttgcaagtgcagggcttgtagctccttctctggattgtggaccctctgggtgctgggccctattggggttggtgggttggttggatccagaagggctgttcgccgtggggaggagtcggaggtgggaaactgctttgtaggcagggattctgctttgtataggagaccagctttcggatgctggtctgggcattttggatgttggggaggggtttggcttgatgaggtatcaccaagttcggggggtgcagaccaaagtcgccgacgtctatgcagcggttggtgtttgggatcaatttctagcgtggatggggagaccat

SEQ ID NO: 149205 - DNA, 411 bp, Homo sapiens; identical to SEQ ID NO: 124679

SEQ ID NO: 149206 - DNA, 565 bp, Homo sapiens
aagaaaacaagcaaagaaatctccaaaggaccacaaaaacccccaggttatcggttacgtccccttcaagctgtagggggaggggaatttggcccaacccaggtacatgtccacttctccctctctgatttaaagcagatcaaggtagatctggggaagatttcagatgatcctgataggtatatagatgtcctacagggtttagggcagaccctcgatctctcttggagagatgtcatgctattgttagatcaaaccctggcctttaatgaaaagaatgcggctttagctgcagcccaagagtttggagatacctggtatcttagtgaagtaaatgacagaatgacagctgaagaaagggacaaattccctaccgaggatggggaaccaatcaagtgtgactgccaacaaattatagtccagacttatgccgctcaagatgatatcttagaagtccccttagctaatcctgaccttaacctatataccgatggaagttcatttgtggagaatgggatacgaagggcaggttatgccatagttagtgatgtaaccatacttgaaa

SEQ ID NO: 149207 - DNA, 492 bp, Homo sapiens
tggtagggaatttgtccctttctttggctgtcattctatcatttagttgactaagataccaggtatctccaaactcttgggctgcagctaaagctgcattcttttcattaaaggccaaggtttgatgtaacaatagcatgacatctctccaagtaagattaaaggtttgccctagaccctgtaggacatctatgtacctatcaggatcatctgaaaacttccccaggtctgccttgatctgctttaaatcagagagggagaatgggacatgtacccatgttgggccaaattcccctgcccctacagcttgaaggggacataaccgatagcctgggggattttgtggtcctttggagatttctttgcttatttcctttgatgcagcagcagaaacactagttttcctcccagaacacaagaaggaacgaggaaggtcagatttagtggcccttactgatgcattctcaaaaacctgcacccttgcctgtcgtc

SEQ ID NO: 149208 - DNA, 345 bp, Homo sapiens
tttctctttgcctttgaggatctcacagaccacacatcccaacttacgtggaccatcttgccccaagggtttagggatagccctcatctctttggtcaggcactggctcaagatctaggccacttctcaagtccaggcactctggtccttcagtatgtggatgatttacttttggctaccagttcagaagcctcatgccagcaggctactctagatttcttgagctttctagcaaatcaagggtacgaggcatctaggtcgaaggcccagctttgcctacagcaggatcgaggctatcaagctacagatgatcttacaaatggaaccccaaatgagctcaactaa

SEQ ID NO: 149209 - DNA, 1704 bp, Homo sapiens; identical to SEQ ID NO: 124683

SEQ ID NO: 149210 - DNA, 1374 bp, Homo sapiens
atgcagtttttgggccaatttgtgaaaactggtggttattcttggcttctggtcctcagatctgaaatgtctaatactgatggtaaaattgcctatcccacatcctgccacattccccgctgttcggtctttgaatggtcgatgcgtaatgtcacggttctaagctgccaccttgtggccatcccacgggtcagcaatgccttcacagaagagtccaggctgaagcttaagcctgcaggtcagagggccaagcttggagacaggttagacatcccagacagaaggaaaagcagcactattttgggcagggctggggacctgcagcctgccatgcctgagcctcccaccctctccgtgggctcctgtgcggcccaagcctccccaatgaaccctgccccctgctccacggcacccagtcccatcgaccactcaagggctgaggagtgcgggcgcatagcacgggactggcaggcagctccacctgcaggcccctgcgggatccactgggtgaagccagctgggctcctgagtctgctcagggattgtaaatacaccaatcggcactctgtatctagctcaaggtttgcaaacaccaatcagcatcctgcgtctagctcagggtttgtgaatgcaccaatcgacactctgtatctagctaatctagtggggacgtggagaacctttgtggctagctcagggattgtaaacgcaccaatcagcaccctgtcaaaacagaccacttggctctaccaatcagcaggatgtgggaaagagtccacacaggcttctggggcacagacaggagggaccagctttaagagcttagaaacaacaggttccatctctgaagcctcaagtgccaagcactgcactgaactcttctctaggtttactacgtttaatcccgacagtgtcccgtcagatggtgtggtaggagacacagcagggacagtgtggccaggagttctcaaaggggaaccttgtcacctgggaacttgttatagatgcgttcttgatccccatccgacaccttctgaatcagacacgattcaggggatacatgtgcaggtttgttatatgagtacattgcatgatgctgacgtttgtgatacaaatgatcctgtcacccataataccaaaaagtatatatacagcactgagattttcaccagcaacaatccagagctcagatctgaggatgagacagttttcagggccttagagaaatggaaaacctctgagcagacaataggagaaatggatttctacatctgtaatgaccctcaccccgattctgccctgtaccaaaatggtctgtccaaaatgcaagacaccgtgtcactttctgtgttcagcccttcagtggcagcctag

SEQ ID NO: 149211 - DNA, 1002 bp, Homo sapiens; identical to SEQ ID NO: 119418

SEQ ID NO: 149212 - DNA, 1635 bp, Homo sapiens; identical to SEQ ID NO: 119415

SEQ ID NO: 149213 - DNA, 816 bp, Homo sapiens
ctaattggtgggtttaaagcaaacaggcaaaagttccgtgtggtcatgctgtgactgagaggtggtcactgaggcatatctgtgtagtccctgtggagtgtgagggtcagcggagtgagtgaagttggctgcatctagctgttccagagggaaggggttcaccaagagcagttgtataaggcagatgtctggattgaccacattaaggaactgggctaagggatccccagatagctggtaaaacatttctgagtatgtctgtgagggtgtttccagaagagatttgcattcaaatcggtacactgagacgagaatatccaccctctcaatcccctctctaaacaggacaccccaactgctgttgggaattggacaatgactgctgtagctacttcctgctggataggggtgaagaaggggccctgcagttgtagtatcctccagaggggagctctcggtagggaatttgtccctttcttcagctgtcattctatcatttacttgactaagataccaggtatctccaaactcttgggctgcagctaaaactgcattcttttcattaaaggccagagtttgatctgacagtagcgtgatatctctccaagtgagatcgaaggtttgccctagaccctgtaggacatctgtgtaccggcgtccagtccaggaaggcctgcatcctccaggtctctgggagtctatgggtccctttgggtcccctatgggtccactcttgatgatgccttccaaaataaaatcctcatccctggctacttccctgaatttcagactcacaggcacaaatgccagctccat

SEQ ID NO: 149214 - DNA, 1152 bp, Homo sapiens
atggatggaactggagatcattacgttaagcgaaagaagccagacacagaaagacaaacatcacatcttctcacttctttgtgggatctaaaaatcaaaacaattgaacttgtagagatagagagtagaaggatggcaaccaaagcctgggaaggcccagctatggaacacacatgtcacttggcctcttcctatcagacaagtgtagagacagctctgggccaccccattgaagaagaagcagcagaggccgaacccaaacagaactcaggcattaatgtagttttggctgtcatatctgagctgcttcggctgccacccgtatccataatccaatccaatgaggccagggtagcaggaccacatgaccaaaatcatcacagcttctgttcaaggggccatttgtggcctctgtattctggagggaactgggggctgttatttggactctcagaacttaaatcaataccctgggagaaactgagtcatgtttatatgtcgaggggattaagccagggaccaatgggagatgaaagatacatgagagagaagagacaaggatgcagcaagggctctgaggaaatgggagcgagctactctggtggggactttgagaacctttgtgtgggcactctgtatctagctaatttagtggggacgtggagaacttttgcgtctagctcagggattgtaaacgcaccaatcagcatcctgtcaaaacggaccaatcagctctctgtaaaatggaccaatcagctctctgtaaaatggaccaatcagcaggattccacactgcctctacgagctgcaacactcacggcgaaggtctgcagcttcactcctgaagccagggagaccacgaacccaccaggaggaatgagcaactccagacgcgctgccttaagagttgtaacactcactgtgaaggtttgcagcttcattcctgagccagtgagaccaggaacccaccaaaaggaagaaactctgaacacatctgaacatcagaaggaacaaactctggatacgccacctttaagaactgtaacactcaccccaagggtccacggcttcattcttgaagtcagtgagaccaagaacccaccaattccggacacaccagcactttgggaggctgaggcgggtggatcatga

SEQ ID NO: 149215 - DNA, 675 bp, Homo sapiens; identical to SEQ ID NO: 124689

SEQ ID NO: 149216 - DNA, 2436 bp, Homo sapiens
atgcctcaagttgaccatttggtgtttgtggtgcatggcattggacctgtgtgtgacttacgctttaggagcattattgagtgtggactaaggagaattaggaaaaagcccatgaattattcaatgatgtccaccataactcagcgaaaggaagaaaatccttctgtcttccttgagtggctatgggaggccttaagaaaatatactcccctgtcacccgactcactcgagggtcaattgatcctaaaagataagtttattacgcaatcagccacagatatcagcagaaagctccaaaaccgagccctggtccctgaacaaaatctggaggtattattaaacctggcaaccttggtgttctatactagggaccaagaggaacaggccaaaaaggaaaagcgagatcagagaaaggctgcagccttagtcatggccctcaaacaaacaaaccttggtggttcagagaggacagaaaatggagcaggccaatcacctggtatggctttttatcagtgtggtttgcaaggacaccttagaaaagactgtccaacaagaaacaagctgccccctcgcccatgtccactatgccgaggcaatcactggaaggcgactgcaccagaggacaaagaggatggagaaccaatcaagcatgactgccaacaaattatagtccagagttatgctccccaagaggatcgcttagaagtccccttagctaatcctgaccttaacctatatactgatggaagttcatttgtggagaatgggatacgaagagcaggttatgccatagttagtgatgtaacaatacttgaaatgcggaagtgcgctggccaggagcgtgatcggtttccggtcagtggtgtggtaccgggtacccggagacgtgtatcggacggtgggccgcagccatggccgagagaaaacctaacggtggcagcggcggcgcctccacttcctcatcgggcactaacttacttttctcctcctcggccacggagttcagcttcaatgtgcccttcatcccagtcacccaggcctccgcttctccggcctccctgctcttaccgggagttgtccagagtgctggacattcattcgtaccctggcattccgcaaatctttgctgaatacccgttgttggtacgccaggtgctggcaggaaatgcaaataaattaaacagtggccctctcctagggtacagtagtctgtctcccactaggagacttctaggatacgaggattccacagatgttggtgaggaggacagcttccttggtcagacttctattcacacatctgccccacagacatttagttacttctctcaggtatcaagcagcagtgatccttttgggaatattggacagtcaccattaacaactgcagcaacctcagttggacaatcaggattccccaagcccctgactgctctcccttttacaactggatcccaagatgtctcgaatgcattttcaccatccatttcgaaggctcaacctggtgctccaccttcctcactgatgggaataaattcttatctgccttctcagccaagtagtctccctccttcatattttgggaaccaaccccaaggaattccccaaccaggatacaatccatatcgccatacccctggcagcagcagggctaatccttacattgcaccaccccagctgcagcagtgccaaacaccaggccctcctgctcatcctccaccttctggaccccctgttcagatgtaccagatgcctccaggatctttgccaccggttccttcttcagtgcagtcaccggcacagcagcaggtacctgccagacctggggctccctctgttcaagtgccatctccttttctacttcaaaaccaatatgagcctgttcagccccactggttttactgcaaggaggtagaatacaaacaactgtggatgccttttagtgtgttcgactctttgaatcttgaagaaatctataattcagttcagccagatccggagagcgtggttcttggcacggatggagggcgctacgatgtttacctctatgaccgaataaggaaggctgcctactgggaagaggagccagccgaagtgagacgctgtacttggttttacaagggggacacagatagtcgatttattccctatactgaggagttcagtgaaaaactagaggtaccatcactgaacgaagttccccttcattatttgaaacctaatagttttgtgaaatttcgttgcatgattcaggatatgtttgaccctgagttttacatgggagtttatgaaacggttaaccaaaacacaaaagcacatcctcaacaagaacttgatttaaactctccacgaaataccactttggaaagacagactttctattgtgttccggtgcctggggaatctacgtgggtaaaagaaatatcctttatctga

SEQ ID NO: 149217 - DNA, 1065 bp, Homo sapiens
atgtttcggaaggatgaagaactgacttcctcacagagggatttagctgtaaggaactgggcatggagcctagcccgtggtgagcgctcagcaaacatgcacgcagtacacacctcgcttctagtggaaaggacaatactgaccacgaccaaggaaagagggtctaccttgcaatatcccttaagacctggagctcataaaggattgcaagatattgttaaacgtttcaaagctcaagccttaataaggaaatgcagcagtccctgcaacaccccaattctaggagtacaaaaaccgaatggtcagtggagactagtgcaagatcttagacttatcaatgaggcagtaattcctctatatccagttgtacccaacccctataacctgctctctcaaataccagaggaagcagaatggttcactgttctggacctcaaggatgccttcttctgtattcccctgcactctgactcccagtttctctttgcctttgaggatcccacagaccacacgtcccaacttacgtggacggtcttgcccccagggtttagggatagccctcccctgtttggtcaggcactggcccaagatctaggccacttctcaagtccaggcactctggtccttcagtatgtggatgatttacttttggccaccagttcagaagcctcttgccagcaggctactctagatctcttgaactttctagctaatcaagggtacaagacacactcacgtgattctgatgcacctgttggattcacagataggcatttggtagccactgagaagatccctaggggacgtgagcctttgagcagcctggccgtttacacacgcggccgcccgacccggaccggcgcgcgtcgcacgattgtctcgcgtattcgtcgagattttcggtttttttatcgatatttggcgcaacgtgaaccacctctatatcaacaaagcctgctcattcacttacaattggacagccagcccgcactaagtgtcgtcatcggaaaagtgccaaacgtcgtagagcttacccctaattttgggactgcagctcaagtgtag

SEQ ID NO: 149218 - DNA, 2406 bp, Homo sapiens; identical to SEQ ID NO: 124674

SEQ ID NO: 149219 - DNA, 2838 bp, Homo sapiens
atgagtggaactctcaaaggcatgttgcccaagcgagacttgcccatctatcctatctatcctgacctttgccccctgggtcctaatgcctgtgagacaaacttcctctcgcctctcttctctgagaaggaaataagcaaagaaatctccaaaggtccacaaaaacccctgggctatcgattatgtccccttcaagctataggggcaggggaatttggcccaacccgggtacatgtccccttctccctctctgatttaaagcagatcaaggcagacctggggaagttttcagatgatcctgataggcacatagatgtcctacagggtctagggcaaacctttgacctcgcttggagagatgtcatgctactgttagatcaaaccctggccttttatgaaaagaatgtggctttagctgcagcccgagagtttggagatacctggtatcttagtcaagtatgtttaactattgagggccaggaaattgacttcctcctggacagtggcacggccttctcagtgttaatctcctgtcctggacaactgtcctcaaggtctgttaccatccgaggaatcctgggacagcctgtaaccaggcctgaagctcataaaggattacagaatactgttaaacatttgaaagctcaaggcttagtaaggaaatgcagcagtcccggcaacaccccaattctgggagtacaaaaacccaatcgtcagtgcagactagtgcaagatcttagactcatcaatgaggcagtgattccactatatccagttgtacccaacccctataccctgctctctcaaataccagaggaagcagaatggttcatggttctggacctcaaggatgccttcttctgtattcccctgcactctgattcccagttcctctttgcttttgaggatcccacagaccacacgtcccaacttatgtggatggtcttgccccaggggtttagggatagccctcatctgtttggtcaggcactggcccgagatctaggccacttctcaagtctaggcactctggtccttcaatatgtggatgatttacttttggctaccagttcggaagccttgtgccagcaggctactctagatctcttgaactttctagctaatcaagggtacaaggtgtctaggtcgaaggcccagctttgcctacagcaggatggggaaccaatcgagcatgactgccaacaaattatagtccagacttatgccacccgagatgatctcttagatgtccccttaactattcctgaccttaacctatataccgatggaagttcagttgtggagaatgggatacaaaggacaggttacaccatagttagtgatgtaaccatacttgaaagtcccgtggcagccatcttgctgttacttgcctttggggcctgtatttttaaccttcttgtcaaatttgtttcctctagaatcgaggccttcgagctacagatggtcttacaaatggaaccccaaatgagttcaactaacaacttctaccgaggacccatggaccgacccgctggcacttcccctggcctagagagttcccctctgaaggacactacaactgcaggagctgtaacactcaccacggaggtctgcagcttcactcctgagccagcgagaccacgaacccaccagaaggaagaaactccgaacacatctgaacatcagaaggaacaaactccagacacgctgcctttaagaactgtaacactcaccgcaagcgtccacggcttcattcttgaagtcagctttgaccaagaacccaccaattccagacacattttggtgaccacaaagggaccactgattatcgccaagtggaggaaaactaatgtttctgctgctgtgctggtgagctcaactattctgatcagcagggtccagggactgttgcaggttcttgggcagggttgtttctgctgctgcatcggtgagcgcaactattccaatcagcagggtccagggaccattgcaggttcttgggcaggggttgtttctactgctgcatcaaatgcgactttagctgcagccccaaagtttggagatacttggtatcttagtcaagtaaatgatagaatgacagctgaagaaagggacaaattccctactggtcagcaagccatccccagtatggatctccactgggacctcaactcagatcatggggactggagtcgtaaacatctgttgtcctgtgttctagaaggactaagaagaattaggaaaaaagccatgaattactcaatgttgtccaccgtaactcagggaaaggaaaaaaatccttctgccttccttgaacagctatggggggccttaagaaaatatactcccctgtcacccaaatcactagagggtcaattgattctaaaagataagtttattacccaatcagccgcagatatcaggagaaagctccaaaagcaagccctgggccctgaacaaaatctggaggcattattaaacctggcaacctcggtgttctataatagggaccaagaggaacaggcccaaaaggaaaagcgagatcagagaaaggccgcagccttagtcatggccctcagacaaacaaaccttggtggttcagagaggacagaaaatggagcaggccagtcacctgagagagcagggatagctcttggagaccttattcagactcgtgggaaaaccccacaaccagtggcatacctaagtaaggaaatagatgcagtagcaaaagtctggcctcactgtttaaagttagttgctgcagtggccgtctttgtgtcagaggctatcaaaataatacaaggaaaggatctcactgtctggactactcatgag

SEQ ID NO: 149220 - DNA, 4701 bp, Homo sapiens
atggcttttatccaaagacaggcaataacaaatgctgatgaggatgtggataaaaatgaaccctcatatactgttgttccagaatgcataactggaaaagatatcctgagcaactggcagaatccatacattagttccctgacttgtggacttgaaggtcttagttcgagagggagaaatgctgccacaaagagacctaacaataattccactgaactggaagttagcactgccactggaaactttgagatcctcatgactctggatgaacaagcaaagaagggagttactattactgggttggggtggtcaaccatgactactaggggaaaatggaactgctactccacagtggaggccctgcactcggagcactcggccggccctgccagccccggcaatgaagggcttagcacccgggccagctgccgaggagggtgtactgggtcccccagcagtgccagcccaacggtgctgcactggatttctcaccgggccttagccgccctcctgtgggacagggctcgggacctgcagcccgccatgcctaagcctcccaccccctccgtggtctcctgtgcggcccgagcctcctcgacgagcgccaccccctgctccacggcacccagtcccatcgaccacccaagggctgaggagtgccggcgcaccgtgtgggactggcaggcagctccatctgcagcccaggtgcgggatccattgggtgaagccagctgggctcctgagtctggtggagatgtggagaacctttatgtcttgctcagggattgtaaatacaccagtcagcaccctgtgtctagctcagggtctgtgaatgcaccaatcgacactctgtatctagctactctgctcagggattgtaaatacaccaatcggcactctgtatctagctcaaggtttgtaaacacaccaatcagcaccgtgtctagctcagagtttgcgaatgcaccaatcgacactctgcatctagctactctgaaggaagaaactccgaacacatctgaacatcagaaggaacaaactccggacatgccgcctttaagaactgtaacagtcacggcgagggtccgcggcttcattcttgacgtcagtgagaccaagaacccaccaattccagacacattttggcgacccagatgggaccttcgccaatcaccaagcaatcaaaccctggcgtttaatgaaaagaatgcggctttagctgcagcccaagagtttggagatacctggtatcttagtcaagtaaatgacagaatgacagccgaagaaagggacaaattcccgactggtcagcaagccatccccagtatggatccccactgggaccttgactcagatcatggggactggagtcgtaaacatctgttgacctgtgttctagaaggactaaggagaattaggaaaaagcccatgaattattcaatgatgtccaccataactcagggaaaggaagaaaatccttctgccttccttgagcagctacaggaggccttaagaaaatatactcctctgtcacccaactcactagtgggtcaattgatcctaaaagataagtttattacccaatcaaccacagatatcagaagaaagctccaaaatagggaccaagaggaacaggcccaaaaggaaaagcgagatcagagaaaggccatagccttagtcatggccctcagacaaaccttggtggttcaaagaggacagaaaatggagcaggccaatcacctggtggggcttgttaccagtgtggtttgcaaggacaccttaaaaaagattgtccaacgagaaacaagccgccccatcgtccatgtccactatacggaggcaatcactggaagtcacactacccagagggcaaagcttctctgggccagaagcccccaaccagatgatccaatgacaggactgaggatgactgcggcaagcacccgttcatgtcatcaccccctcactgagccctgggtatgtttaatcattgagggccaggaaattgacttcctcctggacactggcacgaccttctcagtgttaatcccctgtcttggacgactgtcctcaaggtccgttaccatccaaggaatcctgggacagcctgtaaccaggtatttctcccacctcctcagttgtaattgggagactttgctcttttcacatgcctttcttgttatgcctgaaagtcccacacccttattagggagggatatattagccaaagctggagctattatctccatgaagacagggaacaagttacccatttgttgtcccctacttgagggaatcaaccctgaagtctgggcattggaaggacaatttggaagggcaaaaaatgcccatccactccaaatcaggctaaaagaccccatcagttttccttatcaaaggcaatatcccttaaggcctgaagctcataaaggattacaggatattgttaaacatttaaaagctcaagactcagtaagaaaatgcagcagtccctgcaacaccccaattctaggagtacaaaaactgaacagtcagtggagactagtgcaagatcttagactcatcaatgaggcagtaattcctctatatccagttgtacgcaacccctatacccttctctctcaagtaccagaggaagcagaatggttcactgttctggacctcaaggatgccttcttctgtattcccctgcactctgactcccagtttctttttgcctttgaggatcccacagaccacacatcccaacttatgtggatggtcttgccccaaaggtttagagatagccctcatctgtttggtcaggcacaggcccaagatctaggccacttctcaagtccaggcactctggtccttcaatacagcgagatagccaagaccctctatactctaatcaaggagatggagagggcaaatactcacctagtagaatgggaaccagaggcagaaacagccttcgaaaccttaaagcaggccctagtacaagctccagctttaagccttcccacaggacaaaacttcgctttatatgtcatagagagagcagggatagctcttggagtccttactcagactcacaggacaaccccacaaccagtggcatacctaagtaaggaaattgatgtagtagcaaaaggctggcctcactgtttaaggacagttgtggcagtggctgtcttagtgtcagaggctatcaaaataatacaaggaaaggatttcactgtctggactactcatgatgtgaatggcatactaggtgccaaaggcggtttatggccatcagacaactgcctacttagataccaggcactactccttgaggaaccagtgcttcaaatacatatgtgcatagccatcaaccctgccacttttctcccagaagatggggaaccaatcaagcatgactgccagcaaattatagtccagacttatgccacccaagatgatctcttagaagtccccttagctaatcctgactttaacctatataacagtggaagttcatttgtagagaatgggatacaaagggcaggttatgccatagttagtgatgtaactgtacttggaagtaagcctctttccccagggactagcacccagttagcagaactagtggcacttacccgagccttagaactgggaaaaggaaaaagaataaatgtgtatacagatagcaagtatgcttatctaatcctacatgcccatgctgcaatatggaaagaaagggagttcctaacctctgggggcacccccattaaataccacaaggaaattatggagttattgcacacagtgcaaaaacccaaagaggtggcagtcttacactgccaaagccatcagaaggggagtgcaaggaggatcttctgtctcaccagaattcccgggaccagagtatgcaaaaacccccatgtctccctgagtggcatctctgagtggccactgagagaccacacacctctgtgcttcagacccaaggccctgctggcatgggttcatgaggagatctgctccatgggttgcaaagatccaggttggaacagtttgaaggtctcagaagaagataggaagatgcaggaaagtttggaaacttctagagacttgctgaatggttttgaccaaaatgttgataatgatatggacagtaaagtccaggctgagggagcctcagatggagatgaggaacttattgggaaatggcgtaaaggattgtcaatgctatggaagatactctctatagagaatatgatgaatgtctggaaggatggcaccataaaagatgccatcattgttatagaaaaagcagtgaaagccatcaagcctgaaacaataaattcctgccagagaaatctgtgtccagatgttgtacatgacttcacaaggtttacaacagagccaataaaggacataaaagagattggagatttggcaataaaattgggaatttttgagtcctctaatagcacccaattccttaatcagtttgtacctgatgatcggttatccccccataataaattactgaagttttacaaaccggaattttattcatcatacccccttgtttcctgccttgaccattatgtggatcaagttggagccagaatcagcatgagtttctgtgtgacaacagtgacagaggcctctggcagcggcagctggacatgtggtgtgagccagcttaagctgtcctatgccgactaa

SEQ ID NO: 149221 - DNA, 2947 bp, Homo sapiens
atgggagccattctctgggctggccgaggccggagccgcctccctcggcttgcggggagtcccatcgactgcccaagggctgaggagtgcaggcgcatggcgcgggactggcaggcagctcgacctgcggccccagtgggagacccactgggtgaagccagctgggctcctgagtctagtggggacttggagaacctttatgtctactcatggtttgtaaatataccaatcgacactctgtatctagctaatctagtggggacgtggagaacttttgtgtctagctcagggattgtaaacgcaccaatcagcaccctgtcaaaacggaccaatcggctctctgtaaaacagaccaactggctctctgtaaaatggaccaatcggcaggatgtggatgggaaacactcaggcatcacaggctcacccttgaaatgcatcctaagctattgggaccaattcgacccacaaaccctgaaaaagaggcggctcatttttttctgcgctacggcttggccccaatattctctctctgatggggaaaaacggccacctgaagggaagtacaaattacaatactatcatcctgcagcttgactttttctgtaagagggaaggcaaatggagtgaaataccttatgtccaagctttcttttcattgagggagaatacacaactatgcaaagcttacaagttacatcccacaggaggacctctcagcttacccccatatcctagcctccctatagctccccttcctattaatgataatcatcctctcatctcccctgcccagaaggaaataagcaaagaaatctccaaaggaccacaaaaacccacgggctatgggttatgtccccttcaagctgtagggggaggggaatttggccctacccagggtacatgtccccttctcctgctctgatttaaagcagatgaaggcagacctggggaagttttcagatgatcctgataggtacatagatgtcctacagggtctagggcaaacctttgacctcacttggagagatgtcatgctactgttagatcaaaccctggcctttaacgaaaagaatgcggctttagctgcagcccaagagtttggagacacctggtatcttagtcaagtaaatgatagaatgacagccaaagaaagggacaaattccctactggtcagcaagctatccccagtatggatccccactgggaccttgactcagatcatggggactggagttgtaaacatctgttgacctgtgttctagaaggactaaggagaattagaaaaaaagcccatgaattattcaatgatgtccaccataactcagggaaaggaagaaaattcttctgccttcctcgagtggctatgggaggccttaagaaaacatactcccctgtcacccgaatcactcgagggtcaattgattctaaaagataagtttattacccaatcagccacagccgcagatatcaggagaaagctccaaaagcaagccctgggccctgaagaaaatttggaggcattattaaacctggcaacctcagtgttctataatagggaccaagaggaacaggcccaaaaaggaaaagcgagatcagagaaaggccacagccttagtcacggccctcaggcaaacaaaccttggtggttcagagaggacagaaaacagagcaggccaatcacccgagagggatacattagccaaagctggagctattatctacatgaatatggggaacaagttacccatttgttgtcccctacctgaagagggaataaaccctgaagtctgggcattggaaggacaatttggaaaagcaaaaaatgcccacccagtccaaatcaggctaaaagaccccaccacttttccttatcaaaggcaatatcccttaaggcctgaagctcataaaggattaaaggatattgttaaatatttaaaagctcaagccttagtaaagaaatgcagcagtccctgcaacagcccaattctaggagtacaaaaaccaaacagtcagtggagactagtccaagatcttagactcatcaatgaggcagtaattcctctatatccagttgtacccaacccctatatcctgctctctcaaataccagaggaagcagaatggttcactgttctggacctcaaggatgccttcttctgtattcccccgcactctgactcccagtttctttttgcctttgaggatcccacagaccacatgtcccaacttatgtggacagtcttgccccaagggtttaaggatagccctcatctgtttggtcaggcactggcccaagatctaggttacttctcaagtccaggcactctggtccttcagtacgtggatgatttacttttggctaccagttcagaagcctcgtgccagcaagctactctagatctcttgaactttctagctaatcaagggtacaagcgtttgctgactatggatccccggacacagcgagatagccaggcccctctatactctaatcaaggagagaaccagagagacaaaaagtcaaagaaagaagtacaaagagaggaagagacagacaaagagggagtcagaaagagagaaagagagagacaaaggagaagtcaaagagaaagaaagagagatggaacctcggtgtccactctggctgtgctcgaggagcccttcagcctgccgatgcgctatgggggcccctacctggggctggccaagaccagagctgactccctctgcttgtggggaggtgtggagggagaggcacgggtgggagctggggcttcgtgcagcactcgcaggccagtgcgggttccaggtgagcacaggctcggcaggccctgcactgggcatggccagccagcacctgctgggcttgatcgggggatgtgctccttctgggctgccagagtgcccgggctaggtggtgcaaagtcccacggcgactgccattga

SEQ ID NO: 149222 - DNA, 924 bp, Homo sapiens
ggagacggagtctcactctgttgcctgggctggagtgcagtggtgcaatctcagctcactgcaacttccgccttctgggttcaagcgattctcctgcctcagcctcccaagtggctgggactataggcgcatgctgccacgcctggctaattttttgtattttagtagacatgggatttcaccatgttgcccaggctggtcttgaactcctgagctcaggcaatccgcccgccttggcctcccaaagtgttaggattacaccatgcccggccagactattttctgataatgatctcagcgatagtaaacagaagatcctgagaatttctgtatgcactgatcctacacaaccatattcactggaaaatttgtagatgaacttttagaagagtcattccatctaatttactgcagtcttctccactccccatttacctggagtttctgtcccaattactgttgaacctgtaatttcacctccacacctatagtctgacaacaaatggcaccagtctacactgacttatatgccatggcacatggctcctttgcaggacctgggcaacagattcccctcaccagtgctaggaattatgtggatctcctgtggacaactgaacaaaattcacgttcacagaagcactggggattgtcacaactgcctcctttttatggtgacctctgacctgacaaaaatggcaccaggccccaatacaggaacacaaagcctggcagtctttactttgaggccttgggcagcaggccaattagagcaatacagaacaaagagctgtcttctgccatcacattgtcccttctgagtacagaaagtttgagatctccacaaaatctattcaccccttcatgctgacatcactattctgcttacaagtcattctatgcaatgaatagaacacccaagat

SEQ ID NO: 149223 - DNA, 1170 bp, Homo sapiens
tacaatagtaaaccaagtctttattctttgaagaatgtaccagagcatttagcaaaattgttttaaaatggagggaggtaaaaggcaaatgtaacttaaattcgggttatgctttcggagtatgaaccattgaggaaagaattatcaaaatcccaaatcaaatgcagtgtccctcttgtctcacttgtggctagcaaatacagcagcagccttgagaataaatacagatttgctgcctactagctaccagctggtcaagtttgaagatattgtgcattttcctcagaaaactactgaaaggatttttgcctttcttggaattcctttgtctcctgctagtttaaaccaaatattgtttgccacctctacaaaccttttttaccttccctatgaaggggaaatatcaccaactaatactaatgtttggaaacagaacttgcctagagatgaaattaaactaattgaaaacatctgctggactctgatggatcgcctaggatatccaaagtttatggactaaatgctgcaggtcagcagaaatttgcactaataatacttaccaacccactttgtggatatgaatcagaagagtttgtttattctttactgtgtgtgtgtgtgcgcacgcgagtatgtgttcaatgttgctcgcacagagagattgttctaaaaaatggcaccatatttggcctaacaggatttatttttatgtcatcacctcccttgcctttgtttctgaaaattttgtctgctaaaaagattctgctacagagaggtagatgaagttatatcatggggtcaggggagatgggaaaattttaagtttttgtctaactccccttcatctgtaactgtgctaatctatctagagacctcaaacactgctaaaggccttgcaattgctgctttacccacgcatctcttgctttcaagatggactacaaaagttccttatccttttgaaaaggtcttctgacacacttatcttgcacaaagaaaaagaaaatttcttttactgtgtttaatgttcagtgatatcactgaggaaatggtgaaagctcctatcagaactataggatttcttctgggaaatacagatggaaatacagaatgaatatgtttttttgaggtcggaaactgactttaaaagcctccttgaagttttttacg

SEQ ID NO: 149224 - DNA, 389 bp, Homo sapiens
aaagacaagctgtcagtcactctgtcacccaggctggagtgcagtggcacgatcatggctcactgcagcctgggaaaaagaatgagaacctgtctcaaaaaaaaaaaaaataaaataaaataaaataaaaaaatatagataacaaaactgccttaacgttcagtggctcacaaaacgattatgtagtttctcactcacaagtctacagactggctgggcagctcccacggaggctgtgcatggggtttaggtcagctccagcagcctctaatcctccttggaccagagactatgtggaatacattttcttcctggcaaataggagcagtgcaagagccaagccaaaccctgcaagcacacttaaggcctctgttctcagcacatctact

SEQ ID NO: 149225 - DNA, 1901 bp, Homo sapiens
ccaataaaattaagtgtaatgctaataaaattagtaaattacaaagaaattatagtttttggtgtgtttacatatgaactatatagtactaaggaagtttaatcaataagttttaactttttaaatttgtatacaactttttaattatttcatattattcattatggaatttcttgactttctttcctctaaaggtagctcaagtggagtacagaaggctgtaacaagaacaaaaaggtatggctaatttgagctttaataaagctggctacaatatgaaaattcaattattttataaattattaagtaatcaatattaaaaatgaattattttctagaatctcttcctgcattttaattgtgtgttccttttcattctaggccaggattgatgacaaagtactcaacatcaaagaaaataaaaccaaacaatcccaaacatacccttgatatattttttaagtaaacattgaacattttatcattaatttttaattgaaactagttattttataatcaatgaatttgttctttctgattttaagtttgcagatttatttagtgaaggcaagtgcaataatccttcctcagatgatgtttgcttttctaagatacatatactgattctgtgtatctttttttataaccatgagaattttacttccattatacatcaattggaaatcaatcctgttaagagataattcttaaaagggaaattaggaatgggataagaaggtgatttttttattatttttatactgaatataaaaacatttgtaagggctctcaaagattcacacatgcctatattatcataagaatttttcagcacttaactactttgttggcattgatcctagtgtctttaaatacttcatgagcattcataattaaaatttatcttaagttctatgagagagtattaatgtaactagcataagtggttgttcttcaggaaaataaatatccccagtattatctgtgttaaaatggtttttgcctaaaaaatataattttggatttggcttttcgttatttaaaattccattatcttatgaataagcactttgaatcagtttttaaaaatatttattttaagaggattcaaagtagttttattttaaaacaggacttttaaatggcagtatttcatttcttgtcaattatgttggtactttccacaaatctataaagaagggattaaattgtaccatcattttattataatcctcaagaggaaaatgtgtaattcaaaaggattaatgtgtattaaaacacattatggtatcttaggttacatttctatcagtacttttattaatatttgtgaaagagagacagcttaatagtagttagcttaagtagtttctccaagtacttttgtgctatcaatgagtttcttctcaaaaaaataattagttaggccagggcacaatgggctcacacctgtaatgccagccctttggggagggccgaatggggcaggatcacttggagggtccagggagtttgaggaccagccttcgccaacatgggtgaggaccctgtctcttacttaaaacgataaaaaaaaaaaaaaaaattagccaggcttggtggcacacgcctgtaaatcccagctacttcagatgggctgaggcaggagaactactttgaacctgggggaggttcaaagcttgcagttcagccaaggtctttggccactgtactccagcctgaagagcgagactctgtctcaataatataataatagttattatttaattgcaacatgaagttggaagccattttctgttacttctttaaggagctaaatcttttatatttttgttttctctccccttgcgtttcatattttagcttatgatctaaatatatattttgtatattataatatc

SEQ ID NO: 149226 - DNA, 447 bp, Homo sapiens
agatgcgcattttgatggttggattggatgctgctggcaagacaaccattctgtataaactgaagttaggggagatagtcaccaccattcctaccattgggtcttatttttgtggtagatagcaacgatcgtgaaagaattcaggaagtagcagatgagctgcagaaaatgcttctggtagatgaattgagagatgcagtgctgctactttttgcaaacaaacaggatttgccaaatgctatggccatcagtgaaatgacagataaactagggcttcagtctcttcgtaacagaacatggtatgttcaagccacttgtgcaacacaaggaactggtctgtatgaaggacttgactggctgtcaaatgagctttcaaaacgttaaatgaaattggatatctaaccaaggacatgtttgataaaattggtctaggcttgttacaacaaa

SEQ ID NO: 149227 - DNA, 593 bp, Homo sapiens
gtagagacagggtttcactctgttgcctggactggcctcaagtgatcctcgtatcatggcctcccaaagtgttggtgtttcaggcacaagccatagcacccggtcctgaaacctaccctttacaagaggtaatgcccctaaaaagggacctaattttattttgactgctaacttcccatttttattcttttttttttttttttaaatgtaaagacagggtctcactatgttccccaggctggcctcaaactcctgagctcaagcgatcctcccatctccgcctcccaaggtgctgggatttataggtgtgagccaccacgcccagccagaagtagctttaaatatgggagagttttgtgagatgcaagaggtgtgaaaagactcttaagtttgattaagaaagtttaaacactggtgttatatattaactttgttaatcaagtattttcttgtcttctctttacagtggtatgttcaagccacttgtgcaacacaaggaactggtctgtatgaaggacttgactggctgtcaaatgagctttcaaaacgttaaatgaaattggatatctaaccaaggacatgtttgataaaat

SEQ ID NO: 149228 - DNA, 1645 bp, Homo sapiens
gaattcctttttttttacgtattttatcattttattaggaataattccaaatgggttatgaagaaaatgtattcatcgaatttgatgagttttccaaaaactcttaatgaagatatgtctgcccaataaacaaaacatcagcagaactatcatatactgagcaaaaaatcaggctgataacaaaagcaacatgcaacataaaaaagacacaatatgggaagacaatctgctgagtattaaaaaccatctaaatatcaattctttgcaaccagcacagaactaattggctatcaaatccaaaccccaccaaggttaagtttggctgatgtaggccaggagtcaatgtagggggaaaaatttcctcagtgcaagagagctgagtagtgttttggatctttctctggctggtacaagcagtattagaaaatctttttggcaagggagagaaataaatacaaatggaatgctacatttttaaattagcaaactgtctcaggaatgataagggtatcagtaaagtagccaaggggataactttaaaacattatttggctggggctcaaaaaacactcaaaacaatttatttaaaggttgcacaagagctatgtccaggcatttacgcttatggggaagtaaaattaaaaggggatacttttttccccaagggagaatttctttaaaaccaagcacattgctaaatagcaacatttatactcggtaaacaataattggcaacaaaataagtttaatattctgccccaaaccagtccccagatactgtttaaataacccaagatacaaactaattttgttgtaacaagccctagacccaattttatcaaacatgtccttggttagatatcccaatttcatttaagcgttttgaaagctcatttgacagccagtcaagtcctgtcatacagaccagttccttgtgttgcacaagtggcttgaacataccatgttctgttacgaagagactgaagccctagtttatctgtcatttcactgatgggccatagcatttgggcaaatcctgtttgtttgtaaaaagtagcagcactgggatctctcaattcatctaccagaagcatttttctgcagctcatctgctacttcctgaattcctttcacgatcgttgctatctaccacaaaaataagaccctgggtatttctggaagtaatgcttccagagaggcctaattctatcttgaccaccaacatccccatactgtgaaacaaatgttcttatattctactgtttccacattaaaaccaatggtaggaatggtggtgactatctcccctaacttcagtttatacagaatggttgtcttgccagcagcatccaatccaaccatcaaaatgcgcatctgcttcttgccaaatagtcgggagaagagggaggagatagtgaggcccatggcggtagtggcacttgtgatgggcagaagcagaaggggtttggggcgaccccgtgctttctcctttcaagctcccaggcaaactaaacgagagggaagagaaagagcggaggaagaaagagggaggcagaaacgtctcagtggcccctgtgccgatgaagatccggcacaggaataagccggtagaggacctgctaggcgactggcgcggcagctccgc

SEQ ID NO: 149229 - DNA, 469 bp, Homo sapiens
ggcacgagtatttttagtagagtcagggttttaccatgttggccaggctagtctcaaaacccgacctcaaatgatccacccgcctcagcctcccaaagtgctgggattacaagcgtgagccaccacgtgagccaggggaagtttttaaatttaccactttttaacaattccacttaggaaagttcagttgagctgttggacttggacaacttcgcacctctcatctttgtccttgtcatctagtcatctataccattacctcctaagcagggacatcatgggtgccatgaagcattcatgcgtgatggcatttcttggcttctcatttcttcatgtgtttgacatttcccctagctccaaactgggccagctacctttcctatgaaatctagcagtagctgtgggattgacgtggttgctcttttcatctttttagattacccattgcttctcttgaaatcctagtacc

SEQ ID NO: 149230 - DNA, 479 bp, Homo sapiens; identical to SEQ ID NO: 147053

SEQ ID NO: 149231 - DNA, 2967 bp, Homo sapiens
ttcgtgatggattcagtactcctcaaccactcttcctaatgattggaacaaaagaaaaaaaaaagaaaaaaaagccatgttgtcagcgagagctaagacaccccggaaacctaccgtgaaaaagggtcccaaacgaaccttaaagacccagttgggatactgtagggtgcgactgggctttcctgatcaagagtgttgcatagaagtgatcaataatacaactgttcagcttcatactcctgagggctacagactcaaccgaaatggagactataaggagactcagtattcatttaaacaagtatttggcactcacaccacccagaaggaactctttgatgttgtggctaatcccttggtcaatgacctcattcatggcaaaaatggtcttctttttacatatggtgtgacgggaagtggaaaaactcacacaatgactggttctccaggggaaggagggctgcttcctcgttgtttggacatgatctttaacagtatagggtcatttcaagctaaacgatatgttttcaaatctaatgataggaatagtatggatatacagtgtgaggttgatgccttattagaacgtcagaaaagagaagctatgcccaatccaaagacttcttctagcaaacgacaagtagatccagagtttgcagatatgataactgtacaagaattctgcaaagcagaagaggttgatgaagatagtgtctatggtgtatttgtctcttatattgaaatatataataattacatatatgatctattggaagaggtgccgtttgatcccataaacccaaacctccacaatctaaattgcttcgtgaagattaagaaccataacatgtatgttgcaggatgtacagaagttgaagtgaaatctactgaggaggcttttgaagttttctggagaggccagaaaaagagacgtattgctaatacccatttgaatcgtgagtccagccgttcccatagcgtgttcaacattaaattagttcaggctcccttggatgcagatggagacaatgtcttacaggaaaaagaacaaatcactataagtcagttgtccttggtagatcttgctggaagtgaaagaactaaccggaccagagcagaagggaacagattacgtgaagctggtaatattaatcagtcactaatgacgctaagaacatgtatggatgtcctaagagagaaccaaatgtatggaactaacaagatggttccatatcgagattcaaagttaacccatctgttcaagaactactttgatggggaaggaaaagtgcggatgatcgtgtgtgtgaaccccaaggctgaagattatgaagaaaacttgcaagtcatgagatttgcggaagtgactcaagaagttgaagtagcaagacctgtagacaaggcaatatgtggtttaacgcctgggaggagatacagaaaccagcctcgaggtccagttggaaatgaaccattggttactgacgtggttttgcagagttttccacctttgccgtcatgcgaaattttggatatcaacgatgagcagacacttccaaggctgattgaagccttagagaaacgacataacttacgacaaatgatgattgatgagtttaacaaacaatctaatgcttttaaagctttgttacaagaatttgacaatgctgttttaagtaaagaaaaccacatgcaagggaaactaaatgaaaaggagaagatgatctcaggacagaaattggaaatagaacgactggaaaagaaaaacaaaactttagaatataagattgagattttagagaaaacaactactatctatgaggaagataaacgcaatttgcaacaggaacttgaaactcagaaccagaaacttcagcgacagttttctgagaaacgcagattagaagccaggttgcaaggcatggtgacagaaacgacaatgaagtgggagaaagaatgtgagcgtagagtggcagccaaacagctggagatgcagaataaactctgggttaaagatgaaaagctgaaacaactgaaggctattgttactgaacctaaaactgagaagccagagagaccctctcgggagcgagatcgagaaaaagttactcaaagatctgtttctccatcacctgtgcctttactctttcaacctgatcagaacgcaccaccaattcgtctccgacacagacgatcacgctctgcaggagacagatgggtagatcataagcccgcctctaacatgcaaactgaaacagtcatgcagccacatgtccctcatgccatcacagtatctgttgcaaatgaaaaggcactagctaagtgtgagaagtacatgctgacccaccaggaactagcctccgatggggagattgaaactaaactaattaagggtgatatttataaaacaaggggtggtggacaatctgttcagtttactgatattgagactttaaagcaagaatcaccaaatggtagtcgaaaacgaagatcttccacagtagcacctgcccaaccagatggtgcagagtctggaatgggaccgatgtaggaaacaaggtgttctgtgggctgtgggagatgaggagcaggttcccagctgggacctggatatcagcatcacggcacaacccaagcgcaaaaagccatgaaactgacagtcccagtactgaaagaacattttcatttgtgtggatgatttctcgaaagccatgccagaagcagtcttccaggtcatcttgtagaactccagctttggttgaaaatcacggacctcagctacatcatacactgacccagaataaagctttccctatggttccaaagacaactagtattcaacaaaccttgtatagtgtatgttttgccatatttaatattaatagcagaggaagactccttttttcatcactgtatgaattttttataatgttttttttaaaatatatttcatgtatacttataaactaa

SEQ ID NO: 149232 - DNA, 337 bp, Homo sapiens
  misc_feature (1)...(337): n = a,t,c or g
ggcacgagggtgcggggaggtagtagtttcttccgcgagggtgcgggagggccccggggcgcccttgggaaccgggctggaggcagagacaggcccggaggaccaggcggacgtaaggatcaggcctctggacgcaactgcggagccggaacagaccaggagggcgcggttgggcgggtacagccaggaagtgctcgtcgcgagcgcggcccgcggttcggccacagcgagaagcccgcgggtgccgggagtgctcggtcttctctcgatctctgcagggagtcactggccccgttcctttttatctgtctgaacatcacgccgaacttttaacagn

SEQ ID NO: 149233 - DNA, 533 bp, Homo sapiens
ccggagaactggccatgcgtcctcttgccagcctgtctgggggccagaagagccgagtggcctttgctcagatgactatgccctggtgaggcctcattttccagagctcttcccctcccatttccccttcttgcccagtagaaaactgtatcagaaggctttattttctctcaccgcaccccttcactgcccaccttcctggttctgccttccagccccaacttctacattctggatgaacccacaaaccacctggacatggagaccattgaggctctgggccgtgcctgcaacaatttcaggggtggtgtgattctggtgtcccacgatgagcgctttatcaggctggtgtgccgggagttgtgggtatgcgaaggaggcggcgtcacccgtgtggaaggaggatttgaccagtaccgcgccctcctccaggaacagttccgccgcgaaggcttcctctagggccaccaggctgaggactcgcccaggacatggactggtctctcagacccctgggccaccatgtaggccac

SEQ ID NO: 149234 - DNA, 1239 bp, Homo sapiens
  misc_feature (1)...(1239): n = a,t,c or g
gaatggactctaaagtaatgatacctgagtggtaggagtacaagccctttctaagttttctctgaacacatattactcgtgtaggaagttatttttttaagtaataaatctagtctacctcatctcttctcccaggcctgagctgaagcctgtggacaaggaatcagaggtcgtaatgaagttccctgatgggtttgagaagttctcgccgccaattctgcagctagatgaggtggatttctactacgatctgaagcacgtcatcttcagtcgcctctctgtgtctgctgatctcgagtctcgcatctgtgtggttggagagaatggggctgggaagtctaccatgctgaagctgcttttgggggacctggcacctgttcggggcatcagacacgctcacaggaatctgaagattggctatttcagccagcaccatgtggagcagctggacctaaacgtcagtgcatgtggaactgctgggcacgcaagtttcctggggcggcctgaggaggagtaccngtcaccagcatgggtcggtatgggcatctccggagaactgggccatgcgtcctctttgccagcctgtcttgggggccagaaggagccgagtggccttttgctcagatggactattgccctgccccaacttctacattctgggatgaacccacaaaccacctgggacatgggagagccattgaggctctggggccgtgcccttcaaacaatttcaggggttggtgtgattctggtgtcccacgaatgaagcgctttatcaaggctggtgtgccgggaagttgtgggtatgctaaggaaggcggcgtcacccgtgtggaaaggaaggattttgaccagtaccgcgccctcctccagggaacagtttccgccgcgaaggctttcctctagggccaccagggttgaggactcgcccagggacatgggactggtctctcagacccctggggccaccatgtaggctatccactcccaggccgtgggctttcccccaactttggggacagcctttatttcccaaatgtctctatccttttgactggagcatcttctgcacaaccttgggagcccatccaagggttggtgaggactggtctcccgggggtgggggtctggggggtaccctctggggttatagattcccccactgccccagctctgactggaccccaagtggctgctatgtaaattaaatctctccccgcgtctcctttgcctcatgtc

SEQ ID NO: 149235 - DNA, 353 bp, Homo sapiens
ttacctaggctggagtgcagtgggcagtggtgcgataccagctttggccaccacacccagctaatttttgtatttttaatagagatgggttttcaccgtgttgctcaggctggtcttgaactcctgggctcaagcaatccgcccgcctcagcctcccaaagtgctgggattataggcatgagccactatgcccggccagatgtatgtcctttttttatagatgtttcttcctgactagaaagcttcccttctgatttttctagatagctttcaggataatattcttaatattttcaacttcttgatttgtgtcttggttcttctagctacacccttgggcagattttcttctt

SEQ ID NO: 149236 - DNA, 339 bp, Homo sapiens
ggcacgaggcaggtcttcctaagcgcagtggaaaattccccccacgctcatgagggcgagtgtgaagaaggcaggtgctgtccgcttcggattatggtcatagcttgcactcgcggctcccctgcctggtctctgggacccccaggcatccccagacctccctggcctcagccagttcccgccgcttcaccatatggcagaacacatgcgcggccggccggctcacagatgggcgtacctgcgtccggcccacccgcctgcggtcctgtgtgctcaccctgccctggtctctgcctggactgtggatgggggtgagtggggcatggaggcgttctgcac

SEQ ID NO: 149237 - DNA, 1120 bp, Homo sapiens
ggacggtgacaatatactggtgacaactttcatatacatcaagtctgtgaccgaacttaacggcgacataatcaccaatgcaagctggaggtgctctgagcgtgtggctcccagcgcttgaagccagaggggaggtgaatcatggtgagtggcttacataccctaatgtcaccccttcaccctccaacccccaaacttctttcctgtggtcagtatctgtcagcacttactgaggatccatcatgtgccatgcagtttacacacattatcactaatcctttctgcttatcgcaaccaaccagccacagaggcctacacctgccctgcatgcccagggtgcttcataaatgcctttgcccatttaccgtttataaagagaatcccattcatggtcatattatggcagcttacaagcctggcacagtccagttatgcagtcagccttggtgcctggctgccagccacatcctataccctatttgggggtgaatggtgcagtgtttctccagcaggtatgtccccctgactcttctttgcccccagaatatgctttagggagtcacagacaacagaacactgcctcagggcgctgtcatcactctattcaaatggaaaaattcttaaactagagagagtgtgagcatcaaccacccaatgtgcagtttccacctccgccccagcacattcccaggagagcaggggagcaggagatgagctgtcctgcagtaagtcctggccaacgccctttgataggttccatctcacctaatcctcctgtctccttcgaggggagggctgggatgaggggatttcaataggacaggttgacctgttcccaagtcattcagctaattaaatgtttaaatccaggggcttcaaaccccattcaaggcagcaactattgcattgctgctggaaactgaggggctccttttcaccctgatgacatggtatgtcattccagcagtcttattcaagagaactgggcaggggtgggagggaaacatccttaaaaactcaaaagctgatggcttccactgtttttatatggtttcacagctataggaggacaattatgcactacccacttgcttccaggctgtgtgcctagatgtgtcca

SEQ ID NO: 149238 - DNA, 325 bp, Homo sapiens
ggcacgagggtgaacggctgggacatgaccatggtcacacacgaccaggcccgcaagcggctcaccaagcgctcggaggaggtggtgcgtctgctggtgacgcggcagtcgctgcagaaggccgtgcagcattccatgctgtcctagcagccaccaccatctgcgactcctgcctgccgcctctctgtacagtaacgccacttgcacactctgtccccatctggcttctgctgaccgctgggccccagctcatatggaccagctttctctcctggacaccgaggattgcacataatggcctggatctgcatagaagcctttctgg

SEQ ID NO: 149239 - DNA, 322 bp, Homo sapiens; identical to SEQ ID NO: 146437
  misc_feature (1)...(322): n = a,t,c or g

SEQ ID NO: 149240 - DNA, 1357 bp, Homo sapiens
aagacgcgcatgccattggtgtttattggaccaggacgcagggagggcgcgaccgcgggtactctgctgccggtttttcttagcggcgctgggcgatctaaattagggtcgagatgtcctacatcccgggccagccgggcaccgccgtggtgcaaagaggtgaaattcacaagctgcgtcaaggtgagaacttaatcctgggtttcagcattggaggtggaatcgaccaggatccttcccagaatcccttctctgaagacaagacggacaagggtatttatgtcacacgggtgtctgaaggaggccctgctgaaatcgctgggctgcagattggagacaagatcatgcaggtgaacggctgggacatgaccatggtcacacacgaccaaggcccgcaagcggcttcaccaagcgcttcggaggaggttggtgcgtctgcttggtgacgcggcagtcgcatgcagaaaggccgtgcagcagtccatgcctgtactagcagccaccaccatcttgcgactcctgcctgccgcctctctgtacagtaacgccacttccacactctggtccccatctggcttctgctgaccgctgggccccagcttcagaagggctataagctggtcccagaggcctgggctgggctttccttcccttctcccatccctgggcctgggggcttctgctgaccggctttctctcctggacaccgaggattggaaataagggcctggagctgagtagtagccagtctgctgtgaccacaggctcaggtccgaccctgctgcttggccacagcagtggctggggcaagtgggaaccactatctcttgggagcccccaaaagctgggaaatgctggaggaaccaggcctttcccgcttttgcctggctgcagggttcggctccgcccctgccccccagccctcgtgtgtccacaccgcagtgcctctgcccctcgggggactggacacacatcctgccagaggcgctacgaagctttgcccagatgaagccaggtgggctccgcgttcactcccactctcccgaggggtgctggcctccccagggtttgccttcttacggatttagacgaggttcgaggctcacctatcagggcagctctcaggattgtcattttcctctttgcctgtgggtttaacttttgtatttttttaatcacaagtttgatacaaaatgtttttatcgtactctttggagatgcccattctacttttgaatttagcttttactaattcgcatctggaagctcagcaagtgcacaagccttactttggttaccgtggaaaccactgccacccctccccgatgtggtgcgctcaataaaaatgctggaattc

SEQ ID NO: 149241 - DNA, 379 bp, Homo sapiens
  misc_feature (1)...(379): n = a,t,c or g
ggcacgagggcacatggctcccgtgaggaggtgaacgagacctgtggggagggagannnnnnnnnnnnnnnnnnnntggcctgccgcaaggggaatgtggccctggcacagctcctgatctggcaccgcgtggacgccatggcccgagatgcccacgggaacacagcgctgacctactcccggcaggcctccatccaggagtgcatccacgtgcttctgcactacggctgccccgacgagtgcgcgccgcatctgccctatttgactgcagtctccttagtgccaaaacccactgggaaaacttccggctacttacacatctctcagggaatcccaaactccacctcctatcaccacttccaaacctttccataaacct

SEQ ID NO: 149242 - DNA, 360 bp, Homo sapiens
  misc_feature (1)...(360): n = a,t,c or g
ntacaaagaagccacatagattatgtatgtatgtatgtatgtatgtatgtatgtatgtatgtatgtatgtatgtatatatttaatnnnnnnnnnnnnnnnnnnnnnnnnnnnnnnnnnnnnnnnnnnnnnnnnnnnnnnnnnnnnnnnnnnnnnnnnnnnnnnnnnnnnnnnnnnnnnnnnnnnnnnnnnnnnnnnngtaatttttaaatgatctaacaggcacacattaaaaaataaaaagaaatgagtgaaatttattttaatgtaatnnnnnnnnnnnnnnnnnnnnnnnnnnnnnnnnnnnnnnnnnnnnnnnnnnnnnnnnnnnnnnnnnnnnnnnncagtatatttctcgtgcc

SEQ ID NO: 149243 - DNA, 396 bp, Homo sapiens
ggcacgagcaaagttgtcatgaatactgacttgggcgtgggacccatccgagatgtgctggaccacatctacagtgcgctgtatgtggagctggtggtgaagaatcccctgtgcccgctgggccaaactgtgcaaagtgagctctttcgctcccgactggactcctatgttcgctctctgcccttcttctccgcccgggctggctgaagcaacctacctcaagtctcaggagaattcatgtctgcctggggcccttccgggaacccgagcccaaggagtgggggcggccccggagcgaggctcacactccctgccctgcagatgactgtccacaacctgtacctgtttgaccggaatggagtgtgtctgcactacagcgaatggcaccgcaagaag

SEQ ID NO: 149244 - DNA, 890 bp, Homo sapiens
ggcacgagaagaagggtgttgtgttacccactctatcgccatttcaagctggtgatgaaggcctacagggacactataaagatattgcaactgggtaaaagtgcagttttaaagtgtctcctggatattcacaaaatttttcaggaaaatgacccagcgtacatactgaatgatctctacatctcagactactgtgcgtggattcagaaagtcaaatccaaaaagttggcagctcttgcagaagccttaaaggaagtctcccttacaaaggcccagctggggttagaactggaagaactagaagcagcctctctgcttgtgcatgaggaagaaactgcattaaaagcagcccattcagtttctgggcagcagacactttgctccagctctgaggcaagtgattcggaggactcagacagcatcgtgtcatgtggaaacgaagactcaggctcatattctgaacaagatgaactcatagatagtccatctgagacagtcagttctttgcaagggccctttcttgaagaaagcagcgcctttcttattgttgatggtggagtacgcataaacacagccatccaggagtctgatgccagtcagggaaagccacttgcctcttcctggcctcttggagtggctgggcctctgataaaggagcttggggaacaactgaagactacagttcaggtttctgaacccaagggcaccactgctgtaaaccgcagcaatattcaggagagagacggctgtcatacaccaaataattgactcttaggtgggtttattcattgttgagaaatatggtagattgggtttcatttaccgaatgagaattcttcattttcactttgtaatttttcttagtatatagtcagcccactgtatttgtg

SEQ ID NO: 149245 - DNA, 661 bp, Homo sapiens
aaagacttgataaaagtagcctgttttcttttactggcagctattagccctcttcatatctctttacgtagttcaagtaaatgtagaagcagtatctcgaagaatggcaaatttagccttttgtatttggatagttgcttctagcctgatccttcttagtagtttattactgggtgatataattttgagttttgccaaatttctaattaaaggagctctagtaccatgttcttggaaacttatccagtcacctgttacaaataaaaagcattcagaatctctagtccctgaagccgaaagaatggaacccagtctttgtttaatcacagctctaaacagaaaacagttaatatttttcttgctgtcaaatataacaactggcctgatcaacctgatggtagatacattacacagcagtaccttgtgggccttatttgtggtcaatctctatatgttttccaactgtttaattgtatatgtactatatttgcaagataagactgtacaattttggtgatcagcaggagtaggatatataagtatttgggcaatatttaatgaggaatattaattgtaaagaaattgtgcttttggcaacagtgttaaccatattttattataaaatagtttcagtcatctaaacagcagtgatgcttaatta

SEQ ID NO: 149246 - DNA, 391 bp, Homo sapiens; identical to SEQ ID NO: 114142
  misc_feature (1)...(391): n = a,t,c or g

SEQ ID NO: 149247 - DNA, 689 bp, Homo sapiens
  misc_feature (1)...(689): n = a,t,c or g
ggggaanatttanannggaaaagttggccgnggaagccagttnaaagatnaatttagggaagntgganncggcngtaccgntcggantccgggtgaanaaaanaaanangcngttnngaagnagggattgcccttattnatttgaacngaatttagaagntttngtcaggaaangaaacagnggttngtttttaagnaggatggggaaaagtaagnnggcattcagantcaagtcccanggtattgtttttatccaagggacttttcctngggaatataattcntntcccagaggtatcaaggtatcccaagaanataactgntnttnggntcngtgtgngaagattgggggagaggatgtaaantaagngtatatagcaaaaaaaaaaaaaatttnnnnnnnnnngtatnaannnatnttgggagatggngtttcantcttatcacccaggctggacgacagtggtgcaatntcggctcacngcaacntntgcntcccaggttcaaacgattatntcgcntcagcntcccaagtagcngggattacaggcgcccacctaatttcngcatttttagtagagacggggtttcaccatgttggtcaggctggtctcaaactcctgacctcaggtgatccacctgcctcagcctcccaaagtgctgggattacaggtgtgagccaccgtgcc

SEQ ID NO: 149248 - DNA, 307 bp, Homo sapiens
cgacttttttttttttttgagacggtgtctcactctgtcacccaggctagagtgcacctgagccatcttggctcactgcaacctctgcttcccacgttcaagcaattctcttgcctcagcctcccaggtagctgagattacaggcgcctgctactacacccagctaatttttgtattttcagtagagacagggtttcaccatgttggtcaggctggtctcgaactcctgacctcaggtgatccacccacctcggcctcccaaagtgctgggattacaggtgtgagccaccgtgcctggccgtcgacg

SEQ ID NO: 149249 - DNA, 466 bp, Homo sapiens
gttccgaccgcgagccgtccagggtcttgctctgtctcccaggctggagtgcagtggctcagtcttggctcattgaaaccttcacctcctgggttcaagcgattctcctgcctcagcctcctgagtagctgggattacaaccgtatgccacaacgtccggctaattttgtaattttagtagagacagggtttcaccatgttggccaggctggtctcaaactcctgacctcaggtgatccgctcacctcggcctcccaaagtgctgggattacaggtgtgagccaccgcacctggcttaggggccatctttgagtcggccctggctctgctccccaggtctcagtgctgtgccccccccagagcctagaggatgtttcatgggatcccagccacgccgggcataggagcccctgggaacaagccggagctgtatgaggaagtgaagttgtacaagaacgcccgggag

SEQ ID NO: 149250 - DNA, 2285 bp, Homo sapiens
taaattgccggccgcgtcgactttttctttttttcttcttttttttgagacagagtctctgttacccaggctggagtgcagtggtgcaatctcggctcactgcaacctctgcctcccagatttaggtgattctcctgcctcagcctcctgagtagctgggactacaggcgcccaccaccacgcccggctaatttttgtatttttagtagagacaggctttcaccacgttggccaggctggtctcaaactcctgacctcaagtgatccgcccacctctgcctcccaaagtgctgagattacaggagtgagccaccgtgcctggccagtcctatcctccccccaaccttttttttttttttgacatggagtttcgctcttgctgctcaggctggagtgcagtaggcacgactcttggctcactgcaacctccacctcctgggttcaagcaattctcctgcctcagttctcccaagtagctgggattaacaggcacatgccccccaccgtgcccggctaattttttttgtatttttagtagagatggggtttcaccatgttggtcaggctggtctcgaactcctgacctcaggtgacctcaggtgatccacctgcctcggcctcccaaagtgctgggattacaggtgtgagccaccacacccagctgaaggggtcttttattcaacaaaacagacactgagcatgggatgctggaggcatgtaaaggacaagagctgctcctttgtgacatccatctcttcctcctgccccagtgcactgactttggccatcagcccctgcccagaccaccacaggccccctcacatgtttcaggtttggggtctacttggtgtgatgagtaatcaagaccagggttggcaaacaggttatatctcgtgccgacgtcagttagttggtagagacatcctggagggtggtggtggggattgtggagctgaagagaaggtacttgctgttcttcactctaggtgtgccctggcagcccgtcatgtgtcgaggctaagcctcctctcacagggcacagagcacaccagagccttcgtctgcttccttccactctccctcatttagtactctttggcactcgccttgtgccagattggtaagacacccacaggccgcccccctcaccgtgctcatggtctggagtgtgttatgataagggccttgtggaaggacacagtgagctctggaagccactctctgcctggggagcctgggcaggcttcagagatgcaagaccttcagctgaccttaaagtgtgagaaggagtttgctggatagggagggtgggaagagaaggtgggaggagcagctggggccaaggcatccagagagaaaaggcccagctggctgcagtggctgaagctctacaggctgggatggtggggatggtggggatggtggggatgggtgggagctgaggctgggaggtggttggcttggggctggttgcaaagcgcctgttgtgccaaggctgagctcagacttgatccagaaggcagtggggagccacaggaggcttccagcaagggatggggatgtcagatgggcatgggtgctgtggaataccacagggggctcgatgcttctgttgagcctgaggaaatggcccagagagcacccaggagagccctgaagagagagtatagaccagggcttctcaaacttttttttttttttaagacggagtcttgctctgtcacccaggctggagtgcagtggcatgatctcagctcactgcaacctccgcctcctgggctcaagcaattcttctgcctcggcctcctgagtagctgggactacaggtgcccgccaccatgcccggctaattttgtgtatttttagtagagacggggtttcaccgtgttggccaggatggtctcaaactcttgacctcaggtgatccgcctgcctcggcctccccaaagtgctgggattacaggcgtgagccaccgtgcctggccacacccagctaattttttgtatttttagtagagatggggtttcaccatgttggccaggcaggtctcgaactcctgacctcaagtgaatccacccgcctctgcctcccaaagtgctgggattacaggagtgagccactgcgcccggcctccccaaggagcacttttacagccaaacccacctctctcagctctcactcctgcttatatccctgcaacccaggagactgttttctatttgtaaaattttgccatttcaagacagttgtattaatgaaatcactgtgtgtgtcaaaaaaaaaa

SEQ ID NO: 149251 - DNA, 586 bp, Homo sapiens
ggcacgagccactgctgccttgggggcctggatgggatccagcgggtctgagtccagcctcgggagcccctgcggtggagctctgagtggggcaggggcctgggagatgccaggaggatgagagcggcgcccccctggtccaggggacagtaagaggcagccggtctcagagaagctaccccaaaactgttacccgtggtgtgcagagcgtcctgcaaccccagccctcaccaggatttcttgcgtttttcaggaaatcggttgtgattggcatgttccttaagcgtctgcaggaagccgaggcctttttggtatttcaggaggggttgctaacccccctccttgtaggatcggggtatcccagctgctaattcccctcctaacagccctgcagcgcctggattggaggtgtgacaggtggcatttttggcccgaagtccctaggcaggacgggttgctgtagcctgcgcgtttgtgtaaattaacctccctttttagttctgtgaagggagaacgtgattagtttaaaatcacctgcgtgaaagaggctcttgattagtttaaaaatcacccacgtgaaaggggc

SEQ ID NO: 149252 - DNA, 480 bp, Homo sapiens
ttttttttttttttttttttttttttaacgcagagtctcactcactctgtcacccaggctggagtgcagtggcgtgatctcagctcactgcaacctctgccttctgggttcaagcagttagcttgcctcagcctcctgagtagctgggactacaggtgccaaccactatgcacagctaatttttgtatttttagtagagatggggtttcaccatgttggccgggctggtctcaaactcctgacctcaagtgatctaaagtgctgggattacaggcgtgagccactgcgcccggccttctttcccttttacaagtacagaacaagtggacttcaaaagtccaaagcatttgattaaaaaaaaaaaaaaaaaaaaagaatcactgcttcaaatggaatgttctatttgtgtttaacccactccctccaggactggagcaggggttgtgagtggagacagtggccaatgacctacagagcagt

SEQ ID NO: 149253 - DNA, 430 bp, Homo sapiens
tttgagacagttttcgctcttgttgcccagggtggagtgcagtggcgcgatctcggctcactgtaacctctgcctcctgggttcaagtgattctcctgcctcagcctcccgagtaagtgggattacaggcacgcaccaccagacctggctaactttctttgtatttttagtagagatggggtttcaccatgttggccaggctggtctccaactcctgacctcaggtgatccgcccacctcggcctcccaaagtgttgggattacaggcgtgagccactgcgcccggcctcaactgaaaattcttgatgagattagtcccactgcataggtctcagcactgaggtttagagatgtgagactcagagtaggtttcagttccccggagtgaagggggcatagggaggggcagggcttcccagtgttaactgcc

SEQ ID NO: 149254 - DNA, 520 bp, Homo sapiens
ttttttttagtagagatggggtttcgccatgttggccagactggtctcaaactcctgacctcaggtgatccgcctcggcttcccaaagtgttgggattacaggcgtgacgactgcgcccagcgcccccaaatcctgtttctaacatcagagacatagggacaaatcccccacatccttctctaaaaaaaaaaaggactgaaatgagtaggattttttattttgttccacctggaaaaggcctgccaggtggtatttcccattaattcttttatgaatacacaaaaatatcattttacacaaatgagatctcatatgtgtggttttacttaagaatatctcttttctgcactctacttcttcccaactcggtatctaaacttcctcctgccctgctactgactcaggaaatctacaaaaaccatctagtgtggtttcttccatattcttctctttacccacataatcttacacagattttacacacacacacacccacatatcagggttggaagtttcttc

SEQ ID NO: 149255 - DNA, 577 bp, Homo sapiens
tccagcatcgacactttaggacggagggttgggcagccagcacctgggtcacctggggccagcaaccacctttgctgcgagtcttacccttggcagctactccaaccttgccctgtacaagcaggtgccagggctgagctagtgcctgtgcctgcccaccaccctggggacccggtgaagactgagccatagagagggggccaggcatcttccggctcctgcacgtgctggggctgccccacagctcaagctcaagctcagctcaagctcacccgcagcccccatgaggaaggagggaccaccgagcctttagtcagagaggacagggaggcccagcaggggagtgaccagtgcaggcagtgatggcgcccagcctgggtctgcatgacattcaccgtggcctgggattgtcttgttatctgttcgctatttgcaagaaacaataaaccacaggcccggaggcagacctacagggttcagctcctgaccccaccacttcctgccttggtttcttccattttaaagtgggtgtgataatattaatagtacctactgcacagagctgccgtctcgtgcc

SEQ ID NO: 149256 - DNA, 623 bp, Homo sapiens
tgtgatctgaattcccagccaaggtccacagatggcacgtttgatctgactgtccttagcaatgatggagttcacagcacagtcacgagcaacatccgagttttctttgctggattttccaatgccacagtggataacagcatcttacttcgtctcggcgtaccaacagtaaaggacttcttgaccaaccactatcttcattttttacgcattgccagctcacagctgacaggcttagggactgctgtgcaactgtacagtgcatatgaagagaacaatagaacgtttcttttgggcagctgtgaagcgaaaatcataatcagtatgtgaatcccagtgggcgtagccaccttcttttggaaaggcattcaaagagatccttctccggcagagtggagtaaaggtggaatctgtggatcatgactcctgtgtgcatggcccatgtcagaatggagggagctgtctacgaagattggctgtgagctccgtattaaaaagccgtgagagtcttccagtcatcatcgtggcaaatgaacctctgcagcctttcttatgcaagtgtctgccaggatatgcgggtagctggtgtgaaatagatatagatgaatgtcttccatcacctt

SEQ ID NO: 149257 - DNA, 446 bp, Homo sapiens
cttatgttaaggcccaggttgaagctgcaagagcctgtcccccatcatcacttgggctttcagtgcccctcatcacctctccttccacctgagcccaccaccccacaaggtggtgtagcccctgggcttccaggagggagggcagcattcttcatcgctcaactttgtggcccactccacccctgcaaaacctctcccggctgtgtttgtccttctctcccagcttcccatgcacattgcctctccagagtgattggtggggtgggtcttcgaaactgtacagttgtccccaccaggggaggaggctcccagctgccagcatggctcctgccatcactgattgttcctttgatagttcaccagtccccggtgtcctcgctccagcccatccgccatgacctgcagcccgccccaggtgacggcacgcattcatctgcgtattgtcc

SEQ ID NO: 149258 - DNA, 388 bp, Homo sapiens
ttcccatggctcatacgtgatgatatatcatgaccaagtagaatttatttcaggaatgaaacattggttaacaccaaaattcaaacaattatctattaaaagaatgaagagaaaaacaaaatgatcatttcaaccaatgcagaaaatggacatgacaaaatactactcccttttatgataaaaactcacatcacactaggaatatgagggaatgtccttattctgataacagggatccacaaacaatttttctggcaggggcaggggtgggggggcgcatgtgggggaggcagagtcttgctctttccccaagctggagtgcagtggtgggatcacagctcactgcagcctcaaccttcactgaattcatttagcaactcttccttgg

SEQ ID NO: 149259 - DNA, 423 bp, Homo sapiens
  misc_feature (1)...(423): n = a,t,c or g
nnnnnnnnnnnnnnnnnnnnnnnnnnnnnnnnnnnnnnnnnnnnnnnnnnnnnnnnnnnnnnnnnnnnnnnnnnnnnnnnnnnnnnnnnnnnnnnnnnnnnnnnnnnnnnnnatctacacatttatagtcaacctaaattcaggaaaggcaccaagaaaatacactgttgaaaagacagtgtcttccatcnnnnnnnnnnnnnnnnnnnnnnnnnnnnnnnnnnnnnnnnnnnnnnnnnnnnnnnnnnnnnnnnnnnnnnnnnnnnnnnnnnnnnnnnnnnnnnnnnnnnnnnnnnnnnnnnnnnnnntatgcagctaatacaagaaaacactgggaaatgcttcaggacattggttttggcaaagactacttgagtaagacctcaaaagcacaggcaacaaaacaaaaatagactcgtgccg

SEQ ID NO: 149260 - DNA, 269 bp, Homo sapiens
taaatacactgttgaaaaagacagtgtctttccatcaatgctgctggaaaaactggatatccatatgcagaaaaataaaactagactcctatctctcaccatatacaaaaatcaagtcaaagttgattaaaaacttaaaggtaagacctgaaactatgcagctaatacaagaaaacactgggaaatgcttcaggacattggttttggcaaagactacttgagtaagacctcaaaagcacaggcaacaaaaccaaaatagactcgtgccg

SEQ ID NO: 149261 - DNA, 405 bp, Homo sapiens
ctaaccttaaaacccaattcaggattccgtttcccatttcaggttgccaccagataaatcaaatacccaggaatacatccagccaaggaggtaaaagatctctacaggaagacctagaaaactctgttgaaaggaatcacagatggcccgaaccaatagaaaaccattcggggctcatggattgggagaatcaatatcactgaaatggccatattgcccaaagcaatctacaggttcaacactactcctatcaaactaccaatggcatttagtcactcaattagaaaagactatccaaaaattcatatggaaccaaaaaggggctcaaatagccaaaagaatcctaagcaaaaagaccaacagccaaacgtctcacattaccgtacttcagactataaggatatc

SEQ ID NO: 149262 - DNA, 694 bp, Homo sapiens
tttttttttttttttttgctttcttattattaggtttgttgcatcaaattccagatgtgtctccaacgggaaaatatacaaccctcttgcctttgatgattattcttatgatttcaggcattaaagaggttatatacatcataaatgacatggcagacaaaatagttaaggaacacaaaactgttatgacaagattcatgggacacgtttaagtggaaagaggtgaaatgtgggttgaacactgtgaaggccctcgaaatgggggagctcccttccctgcaagacacaagtcccgatgtgttcatatagcaacattctaatcccggatagagagacaaatgtaagacacggcagggctttgacagagaacagcttctgtatcagtgcagggacatccttcctcccaggcagcaagccttcaagcttcaaagcctcagggcccaaccctaaggctgggggctctccctgcaggcaggactgggcctggagggcctcctcatacttctggagctgagaccagaagcccgggttcggttctgctaccgggcgagcgctcttcaccatctggaaggccttcgccaggctcagggccgcggtgccgcatgaggtacgcggtgcaaacgggggccgagcggctgcggccgttcttgcagtagactaggcaggcgccgccggggcgcaccgcggcctccat

SEQ ID NO: 149263 - DNA, 524 bp, Homo sapiens
aaaaaaaaaaaaggaaaggaaaaggaaaaggacaccaagttaaaaaatgggcaaaagatgatagacacttcacaggagacaaaatcaaaatggttaataaaaacataaaaatatgctcaatctccttggtaattagctaaatgcaaattaaggccataactatacaccccaccagactggcaaaagtgaaatgtctgccaaggatgggaaggcaagggaattctgttttactgctggtgggcacgtaaactagaacaatatttagaaagatcttcataccctagaacccaggagtcagactcctgagtacaaaccctagaaaaatttgtgcaccatttgcaaaaaacacacgtgcatcagagacatggacaaaactgttgctagcagcattgtgtgtagttaccccaaactagaaacaaaccaactgtccatctacagcaggcatgtccaatcttttggcttccatggaccataccggaagaactgtctcgggtcacgcataaaatacactaccactaactata

SEQ ID NO: 149264 - DNA, 476 bp, Homo sapiens
  misc_feature (1)...(476): n = a,t,c or g
tgaatatagagactttannnnnnnnnnnnnnnnnnnnnnnnnnnnnnnnnnnnnnnnnaaaaaacggtttggttttgtgcccgggtggaagggcaggggcaaaatttgggttaatggaaacctcggcttccggggttaaagcattttccgggcctaagttcccaaggaaccggaaactcccagatggccccaccaaccccggttaattttggaattttaagaaaaaagggggtttccccttgtggcccaaaaggatctgaatctttggacctggggatccaccttcccgggcctccaaaagggcgggaataacgggtataacccacggggccgggccgaggtttaatttcaaaaaatggcggtgaaaaaacccagcccataggggggannnnnnnnnncccccaagggtttaagggttaaaaattcccggggctgggttggggaaaacccttttttcactaataaggcggggacct

SEQ ID NO: 149265 - DNA, 436 bp, Homo sapiens
  misc_feature (1)...(436): n = a,t,c or g
aaagttgatcatttttctatatactagcaatgagcaaagagaatttgaaattaaaaatacaataccatttacattagcaccccccaaaattaaatagttaggtacaaatctaacaaaatgtgatacaagagctatatgaaaaaatctataaaagtgtgatgaaaaacatcaaagaactaaataaatggagatcttcatatggtaagggtaagagcnnnnnnnnnnnnnnnnnnnnnnnnnnnnnnntggatattgcatgttcatggttaagaagacttaaaattgttaagatatcaggtcttcataatttgatctatagattcaatatagtccctatcgaaataccagaaacttatcttgtagatgtcaacaaactgattccacagtttatatggagaggcaaaagacacagaatagtcaacaagatagtggagat

SEQ ID NO: 149266 - DNA, 491 bp, Homo sapiens
caggatcccatgacttctttgacaagttgattctaaaatttatatggaaattcaagacccagaatagccaaaacaatcttgaaaaagaagaacaaagttggaggactcacactttgtgatttcaaaacttactacagagctacagtctgaatcaagacagtgtggtactgggataaattagacatatcatcaatggagtagaatcacaagtccagaaataaacccttatatttattgtcaattgattttcaacagatataccaagacaattcaataggaaataatagacttttcaacaaatgatgctgagacatgcgaagagtgaagtcggatcccttcctcacatatcatatatcataattaactagaaaatgatcatagatgtaaaagctatgattatgaaactccagaaggaaatacaggaatgagtctttctgactttggattacgcaaagccttagatgtgacaacaaaagtataagtggtaaagt

SEQ ID NO: 149267 - DNA, 442 bp, Homo sapiens
  misc_feature (1)...(442): n = a,t,c or g
ggtaatctaagttttcttttatgttatccttataggaggtttatagttttgtgttttacatttaggtctgtgacccattttgactttatttttgtgacggctgtaaggtctttgtttagattgannnnnnnnnnnnnaggggggctgtccaattgttccctcaccatttgttgaaaagactatcttttctccattggatttcctttgtcaaagatcagttgtctatttgggggctctctgttctgtcccattggactatttgggtcatcttttgccagtaccacactttttccccccacaccttttatgagcactgttaccatactggtttaattactccagcttttggggtaagtcttgatgtcaggtaatatcagtactctggttttattcttcagtattgggttggcttgtctggatcttttgcttttcattaaaattt

SEQ ID NO: 149268 - DNA, 396 bp, Homo sapiens
  misc_feature (1)...(396): n = a,t,c or g
aagaaaaaaaccaagaggactgatattacctggcatcaagacttaccccaaaagctggagtaattaaaccagtatggtaacagtgctcataaaaggtgtggggggaaaaagtgtggtactggcaaaagatgacccaaatagtccaatgggacagaacagagagcccccaaatagacaactgatctttgacaaaggaaattcaatggagaaaagatagtcttttcaacaaaaggtgagggaacaattggacagcccccctnnnnnnnnnnnnntcaatctaaacaaagaccttacagccgtcacaaaaataaagtcaaaatgggtcacagacctaaatgtaaaacacaaaactataaaactcctataaggataacataaaagaaaacttagattacc

SEQ ID NO: 149269 - DNA, 426 bp, Homo sapiens
  misc_feature (1)...(426): n = a,t,c or g
gaaaaggtccagaacaggccacccaataatgaagaataaaaccagagttcggatattacccgacatctaggctttccccaaaaactggagtaattaaaacagtatggtaacagtgctcataaaaggtgtggggggaaaaagtgtggtactggcaaaagatgacccaaatagtccaaagggacagagcagagagcccccaaataggccactgatctttggcaaaggaaattcaatggagaaaaaatagtcttttcaacaaatggtgaggggaccattgggcagccgccctnnnnnnnnnnnnntcaatctaaacaaagaccttacagccgtcacaaaaataaagtcaaaatgggtcacagacctaaatgtaaaacgcaaaactatacaactcctataaggataacataaaagaaaacttagattacc

SEQ ID NO: 149270 - DNA, 433 bp, Homo sapiens
agaaactgcagactttggcccgttggtgctagattcaatgatgattccgtggaccgggacattgcggaagccatccgggagtacctaaaggcaaagagtggagccgcacagaccggggctggcaggggccagccaggcgcagcccagccttccagggctgcaggcagtggcagtagatgtaagccagaactatctcacggcagtgccccgacttccgtgtgtccccccaaaacttgtacctggctcaggtggtggccctggcagccaggtgagatccagtgaggactagggttctgccttcccggtcagagcgagcagcaacgactccttcgagcagagcattaaggcggaaatagagcagcttctgaatgagaagagatagcatgcgacccccaaatgtgatggggtcaatagataaaaaaccagacccaaa

SEQ ID NO: 149271 - DNA, 445 bp, Homo sapiens
cggcacgagagcctatggagcagccctgatctgcaaggagcggcatctctggcgctgctgtgcacagctgcttccatgaaagctgctgcctaacaccaccagctcacccttgaatctttgggcaaatccaagaactctcccaggctaagccccagtcttggggcttgcctgtcctgcatcatctggcaaccagcaaagggacaaggacagcggagatggtggcaattggcagagaggcaagacagcagagacagagaggcagcaattggtggtgaaactgagtggacagccaagtgtccatagtacagctgcctcgtgtgggacccactgctctaacgagccagcctccgacacagaagctgagcacccccaagctggggaacctacagagacctgcacccggatcccacgtggaagactggctggtgccattttgtcttctgtg

SEQ ID NO: 149272 - DNA, 395 bp, Homo sapiens
tgttttttttttttttggtatttgtatccacttttaattatatgcaaatgaaggggcagtttatgcagacatttccagggtgagggtggtaacttctgggtgctgccagagccatggtgaactgacttgacacaggtcggtgtgtcctatggaaactagcatctgccctggacctattttagctagtgctcagtttggtctgagtgcctggcactggaggagtaaaaaatctctggatacctgatctaaggagcccagaggcaggacgatttcattctccgtgtcagtggacaggatgggctggaagccttgtgccagcattgtctctggaactgtggtaatctagaatacacaaactttactaagaggttaaagaagcaaggaccaaacatttg

SEQ ID NO: 149273 - DNA, 1372 bp, Homo sapiens
  misc_feature (1)...(1372): n = a,t,c or g
ggcacgagcagcctatggagcagccctgatctgcaaggagcggcatctctggcgctgctgtgcacagctgcttccatgaaagctgctgcctaacaccaccagctcacccttgaatctttgggcaaatccaagaactcgtcccaggcgtaagccccagtcttggggcttgcctgtcctgcatcatctggcaaccagcaaagggacaaggacagcggagatggtggcaattggcagagaggcaagacagcagagacagagaggcagcaattggtgagagacaagagacagcagttgcngttggcaagacagcaagagacggtgaagcagtctgtgattgaggatgtggtgaaactgattggacagccaagtgtccatagtacagctgcctcgtgtgggacccactgctctaacgagccagcccccgactcagaagctgagcacccccaagctggggaacctagagagacctgcacccgggtcccacgtggaagactggctggtgccattttgtcttctgtggatgggtgagatgtccctttgcacccttccccattaatatcaggctcaaaggaagggcacttctaccacaaccaatatcagtaaagctttggaagacctctgctacctatttaaaataattaactctcagccagaagagattaccacagtttcagagacaatgctggcacaaggcttccagcccatcctgtccactgacacggagaatgaaatcgtcctgcctctgggctccttagatcaggaagtagttacggaaaacagatctccgcccttctgcagcccccttaagattaaggaggagtatctaatctctgaagggggaatgaggcccttctgcaaggtattcctgctctttccaggaaccatcggcagctggtttggggaaagaagcaacgactccaagtgtgacctgacgttgcaaggatacaatgaggtgagccacgcacagggcttcacgtgccctttgagtgtccaacactccatcagcaagaaatcaaggccgcgcctcttccccgggaaactcgagtcccgaatttcctcggaaagcgccccagcggccacggccaacggatgtgacgaggctcatctgataccggggggaaagtttcgagaacccttaaaggggcagcgagggcctgaactagggccccggccccgcgcgcttgggggtccgcgggggtctattcgcccggcagtggcgggagcttccgggggtgactcggaggtcagatgctactggaacccgctgcctcccctggcacccagccctcaggccacctaccagctctctgcggactgtctaattaatactcgtttagccatagacgccaagacgcagaaatgcgttgagtaa

SEQ ID NO: 149274 - DNA, 9073 bp, Homo sapiens
aattctcgcgattactgcggtttttttttttttttaaattagccaagcttggtggtgcatgcctgtagtcccagctactcaggaggctgaggcaggaggatcacttgagctcaggagttcaaggctgcaatgaattacgattgtgccactgcactccagcatgtgcaacagagcaagaccttgcctcaaaacatattaagcacctactgcatgtcagggccttggtctaagcgctggtatgcaacagtcaactagacagagagagtcttggcttttacagagcctccccttataaggaagacagattgtcaaggaagtaaacagacttttagaggagtgctgtgagacagtgccatgtgggaaggggtattggtgaaagaatcctgctttataagggcggttatggaagacctctctgaggaggtgcaatttgagatgagattggcttgaggaggactgagccttcagaagttagggaaagcgtgtcccaggctgcagccagggaggtgaagacttgagggtgtcagggtgaggagtgagggtgtcagggtgactgagggtgccagggtgaggagtgagggtgtcagggtgaggagtgagggtgtccaggttgagtgagggtgtccaggatgaggaatgagggtgtccagggtgaggagtgagggagtccagggtgaggagtgagggagtccagggtgaggattgagggtgtcagggtgagtgagagtgtccagggtgaggagtgagggtatccagggtgagtgagggtgtccagggtgaggagtgagggtatccagggtgagtgagggtgtccagggtgagtgagggtgtcagggtgagtgaacgtgtccagggtgtgtgagggtgtccagggtgcagagtgaggtgtccagggtgaggagtgacggtgtctggggtgagtgagggtgtccagggtgaggagtgagggtgtcagggtgagtgagggtgtccagggttgagtgcacatgtgtggtgaggaggtgtttgcagtgcttcaggcgcagcaactctttcatctagtttaaaattgtgctctgaggttagattttagtagaacaaaggccttacaaagaatgtgaaaacattgtgcttccctgcttacaggcaattaaaaaggagaatcaagctgagggtgcctggtgtggggtggggtggagaagaccacagagactattgtgtgttttattcaacagtgtcctgggctgctttctccagaaatgtccctgacacatggatgtaagtgtggctagtttactgggagatgatcccagtgatgcaggacacgcgagccctaagattgaagcatagcccgggagggttcttagctttgcccaggaaggaactcaaggcaagccagtggtgttagcaacttttattgaagcggccggctgtgcacagcagcagcagaggcgctgctccttgcaaagcagggctgccctacaggctgtgcgcccacagtagcagctcagaggcagttctgcagtggtatttgtatccacttttaattatatgcaaattgaaggggcagtttatgcaagacatttcccagggtgagggtggtaaacttcctggggtgcctgcccagagcccatgggtgaaactgaacttgaacaacgggtcggtgtgtccctaagggaaaactaagcatctgcccctggaaccctaatttaagctagtgcctcaagtttgggtcctgaagtgccttgagccccccaacttcccaaaagttgaagtccccaccctccctaccctcaatcccccccttccagagattaagaatactccctcccttaaaccttaaaggggggctgcaagaaagggcggaagatctgttttccccgtaactacttccctgcctgaagtttatgggacgtagggccctgcctggggaactgggagggagtaaaaatcctctgggataccctgatcctaagggagccccagaggcaggacgatttccattcccccgtgtcagtggacagggtggggctggaacccttgtgcccagcattgtctcgtggaactgtggtaatctagaatacccaaactttatcaacaggttaaagcagcaagagacccatcttttgtaccaagtcagttgtcaaaggtcctagaagaggtgaaaaacaggtgagacttgggaaggcacttttgatggttgaccagatataggttggggcagtgccctggttatatctatgtaactaggtagcttgctcatagatcttttgaatgttaacctcaacctgtccagagttaatatatgtgcagcaggttttattaataactgcacaagaccaccaccttgttcagctagtaaataatccaatgctagtctgttatcaacaactacattttccagagtctggggaactcttgaattctctttaatgcctgatctccgttggtggctaaggattctaggatttgagccaagttctttagcgttaactcatggtaggcaaagcaccccagggtgctgctagtcctattgccaccctgattcctgccagaaataagtaagcaagcaacaggacaatgaactccatgttgcccagatcccactgagagtgaacgtgcagtcatgcccataaccgacacacatcccagtccatgtgggtcagtccttcatcaccctccctgccttctgacaacagcagactccagccattccattatcattcacagcccaacccaagcagtcagtggctgaagaaagagaatcaggtatactctatgtccacatataccttcctgccacagggcttcaccaactggcaggattccccccagcccccaactcctcctcatcccttgttcccaggcgggtcaattggagagtgagcagagatagatggcttgcagaagggtatgcaagatggggagactccaccagaccttagggagagaatggcatctttctccaccttttaagagagacagagcctccctgaggtctcaaagatttttcagggcaacacaagaaacgtttccaagcctcagctgcaggtgttcacctttccactctggggtgtgaggagatggtaagctgaggacaagtgtgttccagatgcaggccaactctgttctccaacagtttgaaccaacttggccttggggttccaagggtaggatgaagggtgtcacggcaggacggggcctggcgtgaggcaacagcaagcagagcgaggacacaacagtggcagcagtgtacagacacaggacgtcagcttcaaacgatgcaacagcagggatatcttgggcacggctctgattcgagccactcccaactctcttgcctccaggatggaggcactgtacatgcaacagtccagagaaagattctagccagtccaagcccaggcacatccagagaaggtgggagctcttcgggttgactccaccgaggaaaacaggcatttgggtatttcagattcccgctccacaataaggcaacttttaaaaaaatattatttccaaaaacaaaacaaaaattccagggggagggaattcagcggatcagtcttaagaggagcttttttttggagcgagaaatcatataaaataaaatgaaataaaacaaggaggaaggcaaccagctgttagggggaaaataaggcagataaaggagcggggagagaaattaattgccaaccaggaggagttgggctgtatttttcaaaggtggggagagtggagcacacaccttgaggaggaaagcgagaaagaaaagaaaaaagcaagtgaaggggggctcgcccaagaagggtgaagaagcgaagaaagtcgaggcgccgaggctcccaaagctggcagctccgggtggcggtgcaggggcgaaggggggggcggggggaacgtcggacatgcggctctggagttgggtgctgcacctggggctgctgagcgccgcgctgggctgcgggctggccgagcgtccccgccgggcccggagagacccgcgggccggccgacccccgcgccccgccgccggcccggccacctgcgccacccgcggcccgcggccgccgcgcctcgccgccgccgccgccgccgccgggcgtgcctgggaagccgtgcgcgtcccccggcggcggcagcagcgggaggcgaggggcgccaccgaggagccgagcccgccgagccgggcgctctatttcagcgggcgaggcgagcagctgcgagtcctccgggccgacctcgagctgccccgggacgcgttcacgctgcaagtgtggctgcgagcggaggggggccagaggtctccggcagtgatcacagggctgtatgacaaatgttcttatatctcacgtgaccgaggatgggtcgtgggcattcacaccatcagtgaccaagacaacaaagacccacgctactttttctccttgaagacagaccgagcccggcaagtgaccaccatcaatgcccaccgcagctacctcccaggccagtgggtatacctagctgccacctatgatgggcagttcatgaagctctatgtgaatggtgcccaggtggccacctctggggaacaagtgggtggcatattcagcccactgacccagaagtgcaaagtgctcatgttagggggcagtgccctgaatcacaactaccggggctacatcgagcacttcagtctgtggaaggtggccaggactcagcgggagatactgtctgacatggaaacccatggcgcccacactgctctacctcagctcctcctccaggagaactgggacaatgtgaagcatgcctggtcccccatgaaggatggcagcagccccaaagtggaattcagcaatgcccacggctttctgctggacacgagtctggagcctcctctgtgcggacagacattgtgtgacaacacagaggtcattgccagctacaatcagctctcaagtttccgccagcccaaggtggtgcgctaccgcgtggtcaacctctatgaagatgatcataagaacccgacggtgacgcgcgagcaggtggacttccagcaccatcagctggctgaggccttcaagcaatacaacatctcctgggagctggacgtgctggaggtgagcaactcctcccttcgccgccgcctcatcctggccaactgtgacatcagcaagattggggatgagaactgtgaccccgagtgcaaccacacgctgacgggccacgacggcggggattgccgccacctgcgccaccctgccttcgtgaagaagcagcacaacggggtgtgtgacatggactgcaactatgaacggttcaactttgatggtggagagtgctgtgaccctgaaatcaccaatgtcactcagacttgctttgaccccgactctccacacagagcctacttggatgttaatgagctgaagaacattcttaaattggatggatcaacacatctcaatattttctttgcaaaatcctcagaggaggagttggcaggagtagcaacttggccatgggacaaggaggccctgatgcacttaggtggcattgtcttgaacccatctttctatggcatgcctgggcacacccacaccatgatccatgagattggtcacagcctgggcctctatcacgtcttccgaggcatctcagaaatccagtcctgcagtgacccctgcatggagacagagccctccttcgagactggagacctctgcaatgataccaacccagcccctaaacacaagtcctgtggtgacccagggccaggaaatgacacctgtggctttcatagcttcttcaacactccttacaacaacttcatgagctatgcagatgacgactgtacggactccttcacgcccaatcaagtcgccagaatgcactgttacctggacctggtctaccagggctggcagccctccaggaaaccagcgcctgttgccctcgccccccaagttctgggccacacaacggactctgtgacactggagtggttcccacctatagatggccatttctttgaaagagaattgggatcagcatgtcatctttgcctggaagggagaatcctggtgcagtatgcttccaacgcttcctccccaatgccctgcagcccatcaggacactggagccctcgtgaagcagaaggtcatcctgatgttgaacagccctgtaagtccagtgtccgcacctggagcccaaattcagctgtcaacccacacacggttcctccagcctgccctgagcctcaaggctgctacctcgagctggagttcctctaccccttggtccctgagtctctgaccatttgggtgacctttgtctccactgactgggactctagtggagctgtcaatgacatcaaactgttggctgtcagtgggaagaacatctccctgggtcctcagaatgtcttctgtgatgtcccactgaccatcagactctgggacgtgggcgaggaggtgtatggcatccaaatctacacgctggatgagcacctggagatcgatgctgccatgttgacctccactgcagacaccccactctgtctacagtgtaagcccctgaagtataaggtggtccgggaccctcctctccagatggatgtggcctccatcctacatctcaataggaaattcgtagacatggatctaaatcttggcagtgtgtaccagtattgggtcataactatttcaggaactgaagagagtgagccatcacctgctgtcacatacatccatggacgtgggtactgtggcgatggcattatacaaaaagaccaaggtgaacaatgcgacgacatgaataagatcaatggtgatggctgctcccttttctgccgacaagaagtctccttcaattgtattgatgaacccagccggtgctatttccatgatggtgatggggtatgtgaggagtttgaacaaaaaaccagcattaaggactgtggtgtctacacgccccagggattcctggatcagtgggcatccaatgcttcagtatctcatcaagaccagcaatgcccaggctgggtcatcatcggacagccagcagcatcccaggtgtgtcgaaccaaggtgatagatctcagtgaaggcatttcccagcatgcctggtacccttgcaccatcagctacccatattcccagctggctcagaccactttttggctccgggcgtatttttctcaaccaatggttgccgcagctgtcattgtccacctggtgacggatgggacatattatggggaccaaaagcaggagaccatcagcgtgcagctgcttgataccaaagatcagagccacgatctaggcctccatgtcctgagctgcaggaacaatcccctgattatccctgtggtccatgacctcagccagcccttctaccacagccaggcggtacgtgtgagcttcagttcgcccctggtcgccatctcgggggtggccctccgttccttcgacaactttgaccccgtcaccctgagcagctgccagagaggggagacctacagccctgccgagcagagctgcgtgcacttcgcatgtgagaaaactgactgtccagagctggctgtggagaatgcttctctcaattgctccagcagcgaccgctaccacggtgcccagtgtactgtgagctgccggacaggctacgtgctccagatacggcgggatgatgagctgatcaagagccagacgggacccagcgtcacagtgacctgtacagagggcaagtggaataagcaggtggcctgtgagccagtcgactgcagcatcccagatcaccatcaagtctatgctgcctccttctcctgccctgagggcaccacctttggcagtcaatgttccttccagtgccgtcaccctgcacaattgaaaggcaacaacagcctcctgacctgcatggaggatgggctgtggtccttcccagaggccctgtgtgagctcatgtgcctcgctccaccccctgtgcccaatgcagacctccagaccgcccggtgccgagagaataagcacaaggtgggctccttctgcaaatacaaatgcaagcctggataccatgtgcctggatcctctcggaagtcaaagaaacgggccttcaagactcagtgtacccaggatggcagctggcaggagggagcttgtgttcctgtgacctgtgacccacctccaccaaaattccatgggctctaccagtgtactaatggcttccagttcaacagtgagtgtaggatcaagtgtgaagacagtgatgcctcccagggacttgggagcaatgtcattcattgccggaaagatggcacctggaacggctccttccatgtctgccaggagatgcaaggccagtgctcggttccaaacgagctcaacagcaacctcaaactgcagtgccctgatggctatgccatagggtcggagtgtgccacctcgtgcctggaccacaacagcgagtccatcatcctgccaatgaacgtgaccgtgcgtgacatcccccactggctgaaccccacacgggtagagagagttgtctgcactgctggtctcaagtggtatcctcaccctgctctgattcactgtgtcaaaggctgtgagcccttcatgggagacaattattgtgatgccatcaacaaccgagccttttgcaactatgacggtggggattgctgcacctccacagtgaagaccaaaaaggtcaccccattccctatgtcctgtgacctacaaggtgactgtgcttgtcgggacccccaggcccaagaacacagccggaaagacctccggggatacagccatggctaaggaaggacaagaagttgtcaaagaattcccaacgccaggacccacatccctttggtattgatttcacagtcagctgctcaacggaatggcctctccacaccagggatccttagcacccaaccggtctgcctttaattttacccaggaaggactcacattggggcgaatgaaccaagtttcgccatgctggatgatgaaatggattcccatcccaaagtctgagatggattgcatatacagtgtgcagtcccagagcctcctaaaattctagccatttgtcacacaaccacagcaaaaaaaaa

SEQ ID NO: 149275 - DNA, 257 bp, Homo sapiens
ggtagagacggggtcttgccatgctgcccaggctggccttgatctcctgagctcaagcaatctgcctccttggcctcccaaagtgctgggattacaagcaagggccactgcacccggcctgctgtttttttcttatgctaaaatatgtccttgtctaaccagctgtcaatatagcaaatgctaactaaaaggaacgttcagagcctgatgctaagaatgaaatctgttttgtttaagcatgttaggtaacaatattc

SEQ ID NO: 149276 - DNA, 462 bp, Homo sapiens
tgacctaccagagcttttctcctagccatatgcctctcaggggctatgatgtatggtagaccaccctgttccagaacccataacatggatagccaggcctacagcggttcccattagccaacatgctgtgtgggccctcaggctcccatcttgtcctgcttaagctgtaaagatctgtgaccctgaaccatcgagaggccctgatctgcctgccgcctgaatgatatgtggagccttcagggaccaagtgatattgcaggctggggtgagaccaaaggtactggtaatgacacagtcctaaatgtgtccttgctgaacgacatctccaaccaggagtgaaacaatcagcaccgaggacatgtgcggtagagctagatgagcactgacggactgcaggcctctgtgggggctctgtgatagtgatacgggggcccacattcctggtttatccaccacaggggg

SEQ ID NO: 149277 - DNA, 360 bp, Homo sapiens
gcacgaggtccacaaaggtcggagagatcttctcggcggccggcgccgccttcacgaagctcggggagctgacgatgcagctgcatcccgtggccgactcttctcctgcgggggcccagataaaggccactgtgaaacgcaaggtatatgaagattctggcatcccccttccagctgagtcacccaagaaagggcccaagaaggtggcatctggtgtcttgtcacctcctccagctgcccctcctcccagcagctccagtgtccctgaggccgggggtccccccataaagaaacagaaggctgatgtgacactcagtgctctgaacgactccgatgcccacagtgacgtggtggatatgg

SEQ ID NO: 149278 - DNA, 633 bp, Homo sapiens
gaggtggaattccggctcgcgtgtagcggcggcggcggcgtctccgtgaggaggcgcgcggggccatgacgtcagcgtccacaaaggtcggagaggtattattggagggcggcgccgccttcacgaagctcggggagctgacgatgcagctgcatcccgtggccgactcttctcctgcggggtacgtgagcccggactgggacgtggacgctgagagcgggcgcttggactcggtcacagacacggaccctctctagcacagggacagacattagtttccctttgtgcgtggcacagcacagagtcggtgttaataaatgatcgttgggtgagggaatgaatgacagataaaaatacagacaggcccatagcccagactcctgtttcacagttctccctgcatgctaacgggtcgaccacaaaccaccgccacttccaaccaccccagttcatggaattcccccagacggctgccggctgtgatgtgcgaagtggacggatacggatatagagatgctgagggctgctgtgaagccatttggggaccaactttatcaccttaactggggcattcagggaccggacagtggcccaaataaaggccactgtgaaacgcatggcatatgaatattc

SEQ ID NO: 149279 - DNA, 453 bp, Homo sapiens
  misc_feature (1)...(453): n = a,t,c or g
ctcagcctcccaaagtgctgggattacagacgtaagccaccacacncagccagagcataaacttttaaaaccttgtagccacttgtctctaggacactggggagatatttgaaatgagcaattgccatattatttgttgttttcttaggcaaggaattgttcctcctggtcttacagaaaatgaattgtggagagcaaagtacatctatgattcagcttttcatcctgacactggtgagaagatgattttgataggaagaatgtcagcccaggttcccatgaacatgaccatcacaggttgtatgatgacgttttacaggtatgttatgaatatgtagcaacagtgtgtttaccattacagaagctcaaagtatatttttgtatgtaaataattttgttgaaataagtattatttcataagtatatgaagtgacaaacaaggtaattagcttg

SEQ ID NO: 149280 - DNA, 660 bp, Homo sapiens
tttcgtcgtttccggtggcggcggaggctgcactgagcgggacctgcgagcagcgcgggcggcagcccgggggaagcgtccgggaccatgtctggagaactaccaccaaacattaacatcaaggaacctcgatgggatcaaagcactttcattggacgagccaatcatttcttcactgtaactgaccccaggaacattctgttaaccaacgaacaactcgagagtgcgagaaaaatagtacatgattacaggcaaggaattgttcctcctggttcttacagaaaatgaattgtggagagcaaagtacatctatgattcagcttttcatcctgacactggtgaggaagatgattttgatagggaagaatggccaggcccagggtttcccatggaacatgaaccattcacaggttgtatggatggacgttttacagggactacgccggctgtgctgttctggcagtggattaaccagtccttcaatgccgtcgtcaattacaccaacagaagtggagacgcacccctcactgtcaatgagttgggaacagcttacgtttctgcaacaactggtgccgtagcaacagctctaggactcaatgcattgaccaagcatgtctcaccactgataggaccgtttggtccctttgcttgcgtagctgg

SEQ ID NO: 149281 - DNA, 474 bp, Homo sapiens
ttttttttttagagatgggtgtctcactctgttgcccaggctgcagtgcggtggcgcaatcatggctcactgtaacctaaaactcttgggcccaagtgatcctcccacttcagtctccctgaagggcctgggactcctaggctcatgcccactaccacccagcctaatttttaaatttttttttgtagagacagggtcctcatctctcgatgttgccccaagatggtcttgaactccctggcctcaagcagtccctcccacctaggcctcccaaagtgatgggattacaggagtaagccaccacaccctggccctaaaggtatcctttttaaaatgaagtattttgaataataaactgaaaaagggattcatttcaaacgtacaaaataggccatctatatttttctgaaattaatacactttttggtgtagaatatctggaataccaaaaatacattttgtagcttttcccca

SEQ ID NO: 149282 - DNA, 1230 bp, Homo sapiens
atggccagctccaggcgaggcctcctgctcctgctgctgctgactgcccaccttggaccctcagaggctcagcactggtcccatggctggtaccctggaggaaagcgagccctcagctcagcccaggatccccagaatgcccttaggcccccagcgcgcggccgcaagacccgccacgacccgctggccaaatccaagatcgagcgagtgaacatgccgcccgcggtggaccctgcggagttcttcgtgctgatggagcgttaccagcactaccgccagaccgtgcgcgccctcaggtgtgcggccggggggaggtggccgcccgcgcgcgctggtgacggtccagtgggcggagagggaccaaaagaagaaacggtgaatgatttctggcggatgatctgggaacaaaacacagccaccatcgtcatggttaccaacctgaaggagagaaaggagtgcaagtgcgcccagtactggccagaccaaggctgctggacctatgggaatattcgggtgtctgtagaggatgtgactgtcctggtggactacacagtacggaagttctgcatccagcaggtgggcgacatgaccaacagaaagccacagcgcctcatcactcagttccactttaccagctggccagactttggggtgccttttaccccgatcggcatgctcaagttcctcaagaaggtgaaggcctgtaaccctcagtatgcaggggccatcgtggtccactgcagtgcaggtgtagggcgtacaggtacctttgtcgtcattgatgccatgctggacatgatgcatacagaacggaaggtggacgtgtatggctttgtgagccggatccgggcacagcgctgccagatggtgcaaaccgattctctcgtcccacctgacgagaaacatccacagatgcagtatgtcttcatataccaagcccttctggagcattatctctatggagatacagaactggaagtgacctctctagaaacccacctgcagaaaatttacaacaaaatcccagggaccagcaacaatggattagaggaggagtttaaggactttgacacctctctgctacaatccacctgccctgttcatttcaagatcaggtaccaggaaactcgggacatccctatgctgcagaactcactgaaattattcaaactagccagtcctaaacatgcttaccctgccttgcccattccttccgctgaaaccacataa

SEQ ID NO: 149283 - DNA, 1013 bp, Homo sapiens
aaaactttttttttttttttttttgtgttccaacaaaactttattacaaaaaacaggaaagcaggcacgtttggccctcagactgtaatcttcccatcactactcttaatgatactcagatgacctggctgcctgagggggctgtggccctgttctgattctctgtgagatggaaaccactctagggtctcctgggtgcgctgaggctgttcacacccggcagaacagggcacgtgcgtttgggaagtttctgaccaagtgggtgacagcagaggggcaaaaccgtgaaaggcttgtgctgggataaggcttgaaccttcctcattaaggcaacaccaacttgcttttatttccagggttcaggggccaacttttttccgccatggattacattacatgggtccctgggggcggggcacttgtccttactggggcccttagggagtccctggcgttgtgggcctgaaccaccagcccctctctaggtgatgggccagttgtagttcttcccgggagtaccaatgctgcttccaaaccgtgcctccaggtttctctcgggtgatgaagtttttcaccttctttcctggcagctgcaagcacttccccgctcctctgcgctgcgccccaggcctgcacctctttcggccttgcgggcttgcctccaaacgccctgccgctgatcctggttcccgctcctcctgccgcagcctcgctaatccgcagctcgtgcagccgccggttctccggcctggttcccaggccatcacgctcgcggtgctcggcggctgtccttcagcggccttgcgcgtccgccagaaaccccggctcgggcctcgtgcaccttcctctgcacctcggacacgaactccatcctgagggcgcgcacggtctggcggtagtgctggtaacgctccatcagcacgaagaactccgcagggtccgacgcgggcggcatgttcactcgctcggatcttggatttggccagcgggtcgtggcgggtcttgcggccgca

SEQ ID NO: 149284 - DNA, 447 bp, Homo sapiens
aagaagtttgtcattcctgattttgaggagttcacgggccatgtggatcgcatctttgaggatgtcaaagagctcactggaggcaaagtggcagcctacatccctcagctggccaagtcaaacccagacctgtggggtgtctccctgtgcactgtggatggtcaacggcactctgagggccacacaaagatccccttctgcctgcagtcctgtgtgaagcccctcacctatgccatctccataagcaccctaggcactacgtgcacaagtttgtgggcaaagagccaagtggcctgcgctacaacaagctctccctcaatgaggaaggaatcccccataaccccatggtcaatgctggtgccattgttgtcagctccctgatcaagatggactgtaacaaagcatagaagtttgattttgtgttgcagtatctcaacaaaatggctg

SEQ ID NO: 149285 - DNA, 4299 bp, Homo sapiens
accagcttggccaatatggtgaaaccccatctctactaaaaaaaaaataagaatacaaaaagtagccgggcatggtggcaggcacctgtaatcccagctactcaggagtctgaggcagaagaatctcttgaaccccaggaggcagaagttgcagtgagccgagattgcgccactgcactccagcctgggtgacagagcgagactctgtctcaaaaaaaaaaaaaaaaaaaaaagagaaagaaagaaagaaaaaaaaggccgggtgtggtggctcacgcctgtaatcctagcactttgggaggcggaggcaggtggatcacttgaggtcaggagttcgagaccagcctggccaacatggtgaaaccctgtctctactaaaaaaaaaaaaaaaaaatacaaaaagttagctgggcgtggcgtggtggtgcatgcctgtaatcccagttacttgggaggctgaggcaggagaatcgcttgaacctgggaggcgaaatttgccaagtgagccaagattcgtgccactgcacaccagtctgggcaacaagagcgaaactccatctcaaaaaaacaaaacaaaaaaacaccaaaaaaacccccaaacctgaagaaattcagatacacgtgtgtaatgttagtgatgtgagaacaaggagcaggggtgcatttgtgttgtgttcgggttggggatgggtttaggagctccaggttgggagcagtgacagagagtcatggccgtggtgagggtgaatcccaagtggatggctcaggacgggtatggaaacccttcattcctcataggtactgggaagtccatttgcaagctgagcgccaggcctggggaggaagaggcttgggctgcagatgcacgcacatttgtttttcactgatagtttttacaaaaagcttggtttaagttatggaattttatgtccctgggagtagaatttacatttgttaaattgaccactgtttaagatcagtatacattctctagtctgtgatgtctggagctagttttgagggtgaaccacactttatccaacatacaaactttcccatgcagcttctctggtgcgcagttggttttgaccgtgggactaggtgcttctgcaggttttaagtaattaacttaaaagcttctcctctgagaaacatttctgttgcgctactgactctccttctccacatttgttgtgttcctagggcttctctatagtgcacattaggacgtttcatttgttgctgaatgctttccagaattatttattccatagggtttctctcctgtgcagctctctcatgggtaatggggcgtgttttcttgccaaaggcggttccaccctcgtgattgtatagggctcttctcctgtatgaactctgagatcagtgagctctgatctccaagggaaagttttcctgcatttgctgttttctcatgtctctcccagtgtgaattctctggcttctagctgaaaacttttccacagttttacattcatgtggttttctccactgtgaactctgtgattcagaatcagaagcagttcttagtagaggcatttctacactgattgcactgaggatatctccccagtgtgaagtttctggcatagagtcctggcttcccgcagacgactttcacactctgccatgttcatgcctgtgggcctctctggcaggaactctgatgcaccgcgaggcccatgtactcctgtggctttctcacattcggtctacttgcagggtatctccacagcatgcaccattctgggtacagggggacatcctctgttactgaagatgttgtcatatttagtaccttcacaaggtttctctccttccagaattttctgatgtacacaaataactgacttccacaagagggcttttccacactcggtgtgtgcatacagtttctgcctgtgatcatttctttatgttattattttattttttcgagatagggtcttgctcaatttcttaggctggagtgcagtggcacgatcatagctcactgaagtttcgacctgggctcaagcaatcctcccgcttcagcctcctgagtagctggtgcgcacgaccatacccagctaatgttttattttttgtagagacgaggtctcactatgttgcccaggctggtctcgaacttctgagctcgagcgatcctcctgcctccacctcccaaagtgttcggattacaaacgtgagccaccacacccggccccagagtaatggtttcttgactttctgtagcccttgttccttagtctgctgtgatatttatgttgacctttatcattttctattctgaacccctcttagcatttaatgtgaaatctaagaaattagaagtagaatggcttttattgttttgacacctttgaaattattattaataatttttccagagcaaaaaagcaaacacgctcaataagactaaacaaaacaaaatataaatgtacatcatttaatgtcccagtggctctattctacctgtaagaaaatgatacaaaaccacctaagatattttgaagcctgacaaatcagcttcatggaaaaaggtaaaaaatgcatttttcaaccgaaagggcagatccaatagaagacccgctccttaaataaacataaaatgtaaaaagttggaaaattaagagtaatgttccatctggaaactgaacttttgtccttgaacttgtgttggcaccaagcctcatacacagtgagctcaataactgttgggacaaaggaaggaaggacaaaatgtgtaaccttcccccagcatctgggagatgcctgtcctccttgcccctcacctgagtgttcccttttcctttgcctcctcatgtcattcccctgagaacaatgaattcctgggacaggctaaacatcatgatgaagtttcttaaacagactttccttagtggaaatcccatttagatctgggtgtgctctatggggagtgctgacgtcaaagagcaaatgtctataaggggcccttttaaaatgaacattttcctcattgagcaagctgggattctctaatgtagaaatcaagccatctttataatttcacttcagatgtttatgtttttgttttttttgtctccaatgatggtaaaaataaaacactacgcattacttaaaggagtttccctcacatgtaaacactgttaggaagtctggattaagttgaaagtcctgttttaactttttttctctcatataccaaacactctgtatttctcttaaagaagccctttaagagaaagccctaattttattatctgacagtaaagtttgctgcaagtgtatgagttcaaacacatcccttgttttctgtccctaggggaaaagtcatgtagttttagcttggctccagtgttaatattatattcagtagcagccttagaagagtggtctaagacttgaacctggagcaattttatagcacagaatcctacgaagataggactgtgaacatttggtttctttttcgtgtgtgtcaaactaactggtttttgctttaccaataaaatgtcctcggcagagtaaaattttaaacgtgaaaattatagatcttgatattgaatccatcagtgattcaagagatacacctatttgcctaaaacaacctaagatgtattggttatggaatcatgtgttggataggttcttaagacctgtttcctcaaatcttgacacagttttcaagggtggcttattgaccttgcacggttgggcagataatccagatttacctaagattgggtaaaaaagtcatctgtgactttgctggcagggcatttgctaagtggagtacaggatctaaaagggttttcttagaaagggcaatattgtccaatgaagtaagcagaaggactctgggttagaagcatctgcacaaaaactggtgagacctactctcccactgctctgcagctggatggctgatggcaggctgagcagtggggaagcaggttttaacaacagggagtccttccaggtcactgtatattgagaagaaacataaaactattgtctgttacattccgaggtcagccttcttcttaacgttttataatatgcaaatgccagcttctggaaagcaagtatcatcatgtaccaaatgctttatacaccatcacaattcatgaattttttagcatggtcagaacttgtgtaaatatgtctcttaggatgattttgggggaggatgtgatttattttccataatttccaaaatgcattttccatttcaaataaagttatctattgagacaaccgaaaaaaaaaaaa

SEQ ID NO: 149286 - DNA, 396 bp, Homo sapiens
  misc_feature (1)...(396): n = a,t,c or g
accagatttcaccaaataggcacactaatttaaaaaatcactgagttgtagtcataacttgtacccagttaggagcaggggtagataactttatttatatggggatagacagttgctctgatgttggtttgagaacgtaaactccaagagcgggttctgggttctcttttaattcaaggccaagcttgtaaattaggctgccttaaagaaaaaagcattgcagataaaggaagggaatgggaaaaataaacnnnnnnnnnnnnnnnnnnnnnnnnnnnnnnnnnnnnnnnnnnnnnnnnnnnnnnnnnnnnnnnnnnnnnnnnnnnnnnnnnnnnnnnnnnnnnnnnnnnnnnnnnnnnnnnnnnnnnnnnnnnnnnnnnnnnnnnnnnnnnnnna

SEQ ID NO: 149287 - DNA, 2850 bp, Homo sapiens
tgattattaaattgagatgagtccaggataaaactcagataccaaggataaatgaaacttatttagggataaaagtgggctgggcgcagtggctcactcctgtaatcccagcactttgggaggctgagacgggcggatcacaaggtcaggagatcaagaccatcctggctaatgcggtgaaacctcatctctactaaaaatacaaaaaattagctgggtgtgatgacaggtgcctgtagtcccagctactcgggaggctgaggcaggagaatggcgtgaacccgggaggcggacttgcagtaagccgagatcgcaccactgcactccagcctgggcgacagagcaagtctcaaaaaaaaaaaaaaaaagtgatagaatcagagagtttttcctctaaccaaactgccaaagttggttttggctaagaatttcccaataatatttatgctgctgctcatttttttagttttctgagacaggggtctccctctgtcacccaggctggagtgcagtggtgacagatcactgcagcctccaactcctgggctcaagtgatcctcccacctcagcctcctaagtaactgggactacatatgtgcatcaccacgtccagttaatttttttttaagtagaggtgggggttttgctatgttgcctatctggtcgtgaactcctggcctcaagggatcctctggcatgccttggcctcccaaagggctaggatcacaggcaaaagccaccgtgtgtttatttttcccattcccttcctttatctgcaatgcttttttctttaaggcagcctaatttacaagcttggccttgaattaaaagggaaccccagaaccccgctcttgggagtttacggtctcaaaacccaacatcagagcaactgtctatccccccatataaataaagttatcttacccctgctccttaactgggtacaagttatgacctacaactcagtgattttttaaattagtgtgccctatttggtgaaatcctgtgaacttaatccaaggacaacccacacatgtccaattacctaaacattttaaaatatatttcctaaacaggaatgggcccgactcagtcacagtaactgttgatctccattagtagagcgaaccccacaaagaccagaactgatttttttccccataatccaggggtgaaaaatatacaacttgtttctgaacccaaaaccacaatttcctgcagttttaaaatgtttcactgctaatatggccctgggtaggaaattatgtagtggatttttcttctttaaaaaaaaaaaaaattaaaaaaatttcctaaggacactaaatcctcaatctgggaatgtaggattctgaggcaccaaagcaggctccggttaaccctaaaaaattaaagaaaaaattccccattcacctgtcctcaagtagggcctggaaaggaggagaagtagtgtggggaacccctggctttgggtatggagaggtcacggccccttgaccccagacccgagaccggtgaggtagccattagctggttgcttctctcagggataaacctcggatgtaggaagtttcaccctcatgagagccggaatttgggtggtcatccaagtttacgcagggcatatttccatgtcttcttttcctgagatactccgacccatcccccactccatccttctgcacatcagcataacagacgatccccagcttctcggcatgtgatccttccaggtcctgcccagctgcctgacggaggaagtcctaggcatggagaacataagaaagcccacatccttcagctatgttaactgccctgttaagagccagcaatacctatggtcccttctccatgatcacttaaatcctgagggtccccaaatcataaaccttgataagggacatgaaatcagaaaagagcactgaagtatgtgtggtaaatgaaccactttgagaagctggttttaagttcatcttccagagaccaggccttttcaacagagcaagaagtccatcccattacaggtttagtatctttgagaattcatagcctctttctttgtcctttaaaatcaatgccaaactcctaatactttgagttccaattttttccattatgaaatttaacagtaccaattatttattgcttgacagggtttcaccaggacatgggaattttgaaaccagacatgaaataaccaaagagtagctgaaggtaacaacacaacaacaaaaaatctaaagtttgttttcttgtaggtatgaatgcccaactatacagagtacctcttaaaagatcaccaacattcttcaatacagtgggggggaaggtaagactcagatgctaaaaactagtcgggagtcatacagccctacctgatgtcatgaaagggaaatgtgctcatgctctcaaaggctgtgtttaccgctcacagctcaggactgcagccatttcctaatagttttctaagcaggatttcagagcagcatggagagaaaaaaagataatggtatgacatcctgaaggagggaatagagttctggggttaaaaaattacaaagggacacaagataggcagatactgagagtatcactcttaagcacatgggagtatgctgtgattgtgtgacattcacatcttaaaaaggtgccaggctcctcgatttatttcattccaccagggccctaaaactcccatgcaatatgcagaaggccccaggtctttccagtgtgttaatattttgaagatagataaacctcccagtttagcatttcatcacttataaacactagacagaaatagtctatactttccaataaaatctctaagactcttaagttacggggttt

SEQ ID NO: 149288 - DNA, 512 bp, Homo sapiens
ggtacaaccagaaagtggatctcttcagcctgggaattatcttctttgagatgtcctatcaccccatggtcacggcttcagaaaggatctttgttctcaaccaactcagagatcccacttcgcctaagtttccagaagactttgacgatggagagcatgcaaagcagaaatcattcatctcctggctgttgaaccacgatccagcaaaacggcccacagccaccgaactgatcaagagtgagcttgctgcccccaccccagatgggaggagtcagagctggcatgaagtgctggcaccacacgctggaccaacgtgggatggggaagggccttaccgcaccattgatgggcccagatcttttcggcagcgcatctcccctgccatcgattacacctatgaccagcgacattcctgaaagggcacctcttcaatccgggcaagccaaattgctgcatcttgtgcgagaaaccatgatccggatctgtacaagacatggggcttgtcagacgcg

SEQ ID NO: 149289 - DNA, 382 bp, Homo sapiens
gaagaaagcatccttggggaagttggagaagctttaacttcagctggtgaagaattaaaaattgacagatttttttgaattgtggaaggcctacggcacaattcaagtcaactgaacgtaactagtatgcagctcatcaatgccctggatacatctcctgatgatttggatttcaggcttcacatcataaatgaattcatgcgttgtggattgaaagagatattgccacatttataaggcattaagaatgatggcctggatatgcaacttaaagactttgatgagcataacgaagaagacttgcttgagtgtatcccatcgccttgaagatattagagctgagcttgatgaatcatatgatgttcacaacatgttgtggagc

SEQ ID NO: 149290 - DNA, 472 bp, Homo sapiens
ggcatcatgctacctgatctcaaatatatacgacatagctatggtagccaaatcagcatggtattggcacaaaaatggacataaagtcctatggaacaaaatggcgcagaatacatttatggtcaactggtctttgtcaaggtgccgaagtacacacaatggggtaaaggcagcctcttcaatgaatggaaccaggaaaatgatatccgcatgcagaagaatgaaattagacccttatgtcaagtacaaaaatcaactcaaaatggattaaagcctataccataagactgaaactgtaaaactcctagaagaaaatatagggaaaaagcttattgacattgacctgggtgatgatttttggccttagccccgcaaacacaggcaacaaaagcataaatagacaaatgggattttatcaaagtaaaaaccttttgcacagcaagagaaacagtcaacacagagaagagacatc

SEQ ID NO: 149291 - DNA, 345 bp, Homo sapiens
  misc_feature (1)...(345): n = a,t,c or g
gtcctgaanatggtttnggctcnatgtcccccacacaaatgtgatttgaattgtaatcccccacgtgttggagnaggggtctggtgaaaggtgattgaatcatgggggcagactttccccttgctgtnctcgtgacagtgaatgagttctcacaagatctggttgtttttaaattgtgtagcgcttccccctttgctcttttcctcctactctgccatgtgaaggtatttgcttcccctttgcccttctgccatgactgtaagtttcctgaggccttcccaaccaggcttcctgtagagcctgcagaattgtgagtcaattcaacctcttctcttcataaattac

SEQ ID NO: 149292 - DNA, 398 bp, Homo sapiens
  misc_feature (1)...(398): n = a,t,c or g
cnnnnnnnnnnnnnnnnnnnnnnnnnnnnnnnnnnnnnnnnnnnnnnnnnnnnnnnnnngaaaaaggggcttggcttggccccccgggcggaagggcggggcggaatcttgggccaccggaaccctcccccccgggggttaaacaaataaccccccctaactttccaaggaaccgggacccccgggggnnnnnnnnnnnnntaagtaaatttgggaatttttggaaaaaacggggcccccccaggtggccaaggggggcccaaaaccccgggcccaaaggaatgggccggcctggccccccaaaagggcgggaccaccgggctggaccccttaggcccacccaaaaagggctttaataaccacccagggggcattagggaattccccgggaattaaca

SEQ ID NO: 149293 - DNA, 389 bp, Homo sapiens
  misc_feature (1)...(389): n = a,t,c or g
nnnnnnnnnnnnnnnnnnnnnnnnnnnnnagtagaatcttttttacaaagtactccagtctgctgggtttttcagcatggaccacgaagatgatgttgatttcctggccaggttttctcagctggtcacaggaaagagacagtcactgatagttagctggactacgtgaattcagaatggggatatcaagaatgctcaagaggcactagaagctgctgaaacaaggatggcactgacgctgcggtgactagctcctgatgacgggacctcctctaagatactggcttttgctgtgattatgttcagattttgaaacatcttagatcagcagaaagccggtgcagcggcaatcatgtcagttgccacaaaggaacttatgatgaagaccc

SEQ ID NO: 149294 - DNA, 774 bp, Homo sapiens
atggcggcgcagggcgtagggcctgggccggggtcggtggcgcccccggggctggaggcggcccggcagaagctggcgctgcggcggaagaaggtgctgagcaccgaggagatggagctgtacgagctggcgcaggcggcgggcggcgctatcgaccccgacgtgttcaagatcctggtggacctgctgaagctgaacgtggcccccctcgccgtcttccagatgctcaagtccatgtgtgccgggcagaggctagcgagcgagccccaggaccctgcggccgtgtctctgcccacgtcgagcgtgcccgagacccgaggcccagcacctgcagggcccatccgtgggctctgctcctgggcttcgctgccagccttaggaggcacgtccaggttgcgtttattggcttatctctgggggttggtgctctcccttgtttccatggaaactgcctggccccaggaggcccaagcagctttgagctccaagggcaggaccatgcaggccatcgctgccctgccgcttagccacagggcacgatttctgactcggtttattagagacatagtgtggcagtctctagaccccacagtcgggctggcatctggggacaggaccaacacccccacaccccagaggcgaactgtggaacacagtggcctacagcgccatggccatccttactgcccacagggccactggggagcaagcatgcatcctggactcaagcagggtgaggaggatgaccccaggagcctcacttcctgcatctga

SEQ ID NO: 149295 - DNA, 418 bp, Homo sapiens
ctgaagtggttctcagtctcaggacttggggctgatgcagggcctctagctgaagggactttgatggaaatgtgcagacacaaatgttgcccaaggaccacgagtacagcaggtgctgcagttacggggcacgcccattcctaatcattgtgctttgtgtctcctcagggagaaacaaaggcagctctgccctcgggggagcaatggccctggcggaacgcagcaagccgcgaaggatccagccagaggatgccacgccagcccaagcgctaccaaggctgcccaaggggggcgggcctgggaagagccctacacggggcaagcacctaggatggggcagagacttgtttgcatctttgtccccagcaaaggctacatgtttacctccttcaattgataataaacctttctgagatgc

SEQ ID NO: 149296 - DNA, 787 bp, Homo sapiens
ccgcgtcgacttttttttttttgacctggaccctctgcatctcagaaaggtttattatcaattgaaggaggtaacatgtagcctttgcttcgggacaaagatgcaacaagtctctgcccactcctaaggtggtgccccgtgtagggctctttcccaggccccgccccccttgggcagccttggtagcgctgggcttggcgtggcatcctctggctgggatccctcgtggttgctgcgttccgcacaggcacaatgctccccccgagggcaagcgcttgccatttgtctctccctcgggtcatcgggcacgctcgacgtgggcagagacacggccgcagggtcctcggggctcgctcgctagcctctgcccggcacacatggacttgagcatctggaagacggcgaggggggccacgttcagctttcagcaaggtccaccaggatcctggcggggacagacgcggggccggtgagccctctccgcccggcgcggccacctccctgaagacccgacaaggacgggggcgggggctcctcccgaccagcgggccgggcgtacccggaaagcagaggtcggggggtgtctggctagcatgcggcccccacccgccccgctcacttgaacacgtcggggtcgatagcgccgcccggcgcctgcgccagctcgtacagctccatctcctcggtgctcagcaccttcttccgccgcagcgccagcttctgccgggccgcctccagccccgggggcgccgccgaccccggcccaggccctacgccctgcgccgcc

SEQ ID NO: 149297 - DNA, 382 bp, Homo sapiens
  misc_feature (1)...(382): n = a,t,c or g
aggataacaggaatactgggaataactttatgcctatacattttaaaacagagatgaattggacgaattttttgacagacacatactaccaaacttcactcaagaagaatatacaacctgaaataaccctgtatctgttaaagaaattgaatttgtgattacaatatttccacaccaaaaaaaaacccaaaataaacttcagacccagatgacttcacaagtaaattctgttaaacgtttaaggaagaattaataccagttctatacaaacacttccagaaaattgtagaggaagaagtacttcctcacttattttgtgagctcagcattaccttcttactcaaactagacagacgttgtgaggtaagaagactacacagan

SEQ ID NO: 149298 - DNA, 389 bp, Homo sapiens
gaaccgtaaacgcattgagctgacacgaaaagtcctgtttgaactgaagcatatgcgggatgtgcagaatgaacacctgaccaggtttgtgggagcctgcaccgacccccccaatatctgcatcctcacagagtactgtccccgtgggagcctgcaggacattctggagaatgagagcatcaccctggactggatgttccggaactcactctccagtgacatctgctagggcatgctgtttatacacaatgcggcttctgctgacatggtaacctcaactcttttaatagcgtgctaattcgtgatctatcacgctttaattaattctctttttctagtgagtctccagttaactgtatccagattattgtgatcatcatttctccact

SEQ ID NO: 149299 - DNA, 555 bp, Homo sapiens
caccaaagctcccaagtatataaagcaaacactaatagatccaaaaggagaggtagactacaatatgataatagtaggagagctaataccccactctcaaaaacagacagatcatccatacagtaaatcaacaaagaaacagtggagttaaacctacatactagatctaataggcctaactgcaatttacagaacatttcacccaacggctacagaatattcttttcatcagcacatggaacactctccagaataaactatactttaggccccaaaccaggctgtgaaaaaattgtaaaacatagaaattatattaagtatccttttctgaacacaatagaactagaaatcaataacaagaggaacctcagaaaatacaaacacatgtaagttaaacaacatgttcctgaaagactaatggatcaatgaagaaattaagaaggaaatttaaaaattgcttgaaacgaatgaaaatggcaatacaatgtaacaaaatttatgggatatgacaaaagcagtactaagaatgaagtttataacataaacacctatgtc

SEQ ID NO: 149300 - DNA, 373 bp, Homo sapiens
atgccgcattctgtccctggtcgtgatgtcgcctgggataattccaccaacaggtctgacagcagccgctgcagcagctgctgctgctaccaatgcagctattgctgaagcaatgaaggtgaaaaatatcaaattacaagccatgagcaactatcatgccagtaataaccaacatggagcaaactctcaacacggggacatgatttcaagggtcgctctggatctccctctttcgattctccccaacctctacactatgccactcgtcctgcagcactcgcaccctacatataaccatttaacatactcatagctacataacctgcagacgataccttagataaatctagatcagagagctccctccttaccc

SEQ ID NO: 149301 - DNA, 417 bp, Homo sapiens
ttttttagagaaaacatgtgtcttaaaccttacattctggtagggagagacaagcaatagacaagtaagtataaaaaatgactttagagggtggtaagtgctatgaaagaagcagtgatgggtggagatagctgcaaatttaaataggatggtcaggaagtcttttttgaggaggtgacattagaactcagaattgaatggtaaggaagcagccttgcaaaaatgattctggaaagggaaataggagttgaaaaggccctgaatgtacaaaaaggccgtgtaagtgagtccttgaaattactagctaataggccgggtatggtggctcacgcctgtaatcccagcactttgggaggccaaggtgggtgggtggatcatcaggtcaggagttcgagaccagccctgaccacatggtga

SEQ ID NO: 149302 - DNA, 432 bp, Homo sapiens
  misc_feature (1)...(432): n = a,t,c or g
tttatttttatgtgtgcatttctaagtatatagaaatagtgtaattttgtaattttatgttcattttgtattttgcaatcttgctgaactgacttatttttgtttgtttgtttgagactgagttttgctctcagttgcccaggctggagtgcaatggtttgatctcggntcaccgcaacctccgcctcccaggttcaagcgattctcctgccttagcctcctgagtagctggaaccacaggtgcacgccaccacgcctggttaatttttgtatttttggtagagatgggtttcaccatgttggccaggatggtctcgatctcttgaccttgtgatctgcccacctcggcctcccaaagtgctgggattacgaggcgtngantgccgcacgcagctgacttattaattctaaaaattttctgtagattccttg

SEQ ID NO: 149303 - DNA, 390 bp, Homo sapiens
aatacagaattccctactacgtgtctacagactgtgaaaaccttctcaaacgtttcctggagctaaatccagttaaacgcctgactctaaagcaaatcatgaatgacaggtggatcaatgcccggcatgaagaagatgaactcaaaccatttgctgaaccatagctatgacatcttagaccaaaaaggaatatatattatcgggggaatgggatattcacaagaagaaatttgggaatctcttactaagatgaaatacgatgaaatcacagctacatatctgctattggggagaaaatcttcacatctggatgctagtgattccacatctagcaccaatctttcactagctaaaggtaggccgagcactgatttcaacaacagtactggc

SEQ ID NO: 149304 - DNA, 445 bp, Homo sapiens
gcaccatgagcttcccctggggacactgaggttgcgttctttttattttttattttatttttttgaaacaggagctcactctctcacccaggctggagttcagtggcgtgatctcagctcactgcaacctccgcctcccggggttcaagtgattctcccgcctcagcctccagagcagctgagattacagctgcgtgccaccacgcctggctttttgtatttttttttggtagaagcggggtttaaccatgttgaccaggctggtctccaactcctgacctcaagtgatccccccgccttggcctcccaaagtgctgggattacaggcatgagccaccacacccagccgcattccattgttttataacaaacttttattccatttcctttggtcaaagtcctaaaaggaaaattactgggtcaaagaatacaaacgtgccaggct

SEQ ID NO: 149305 - DNA, 397 bp, Homo sapiens
ctttgattctaatttaggaatgaattttttaaaatgcatataaccagctcaaggtctgtgcttcatcatcaccctggctttttttttgtgctaatttttcctcttactacttctatgactcccacaatgttatccaaggctagaacatgacatactgcactgtatgtgatacttattaataacaggctcccttagtgcccacttaaagaatatgtccctgaaacgaattatgaagtcataccgtagtggagcagagtctgcgacagaagaaccatttacaatcctgtatgaatcccagttcagtgttggtggaaatgagctggattttcaagtcaagaccctgtccctgccagaggtggtgatcgttcatggcagccaggacaacaatgcgacggct

SEQ ID NO: 149306 - DNA, 371 bp, Homo sapiens
gctaaacacggtgattgctaatggagttgctatggcctctaggccataccagcccacccacgttaacgtgcacatccaccaggaatcaactttgacacatctgctgaaagctggaggtactctgaagaagaccctttttcaccctggggacactgtgtcttccacagccacgattggttatgagcagctagctctatgggtgactcagatattgctggggcgttgagaggcgtgatcttggagtgtgtgctgatcttggggccctggactgcgctgagtgcctcacgctgtgccttctgggcggagtctgtggagatcgtaccacgagctggggccattgtccatgacaagcagccggtcaaacttgctgg

SEQ ID NO: 149307 - DNA, 441 bp, Homo sapiens
aaggttttgaagacaaggtattctatgtctggtttgatgccactattggctatctgtccatcacagccaactacacagaccagtgggagagatggtggaagaacccagagcaaccctaggagctgaggataactataccttggtcagccacctcattgctacagagtacctgaactatgaggatgggaaattctctaagagccgcggtgtgggagtgtttggggacatggcccaggacacggggatccctgctgacatctggcgcttctatctgctgtacattcggcctgagggccaggacagtgctttctcctggacggacctgctgctgaagaataattctgagctgcttaacaacctgggcaacttcatcaacagagctgggatgtttgtgtctaagttctttgggggctatgtgcctgagatggtgctcacccctga

SEQ ID NO: 149308 - DNA, 409 bp, Homo sapiens
ctgcataacccgagacctcaaatggggaacccctgtacccttagaaggttttgaagacaaggtattctatgtctggtttgatgccactattggcttatctgtccatcacagccaactacacagaccagtgggagagatggtggaagaacccagagcaagtggacctgtatcagttcatggccaaagacaatgttcctttccatagcttagtctttccttgctcagccctaggagctgaggataactataccttggcgaaactcttggatctaaagaaacagttggctgtagctgagggaaaccccctgaagcccctaaaggcaagaagaaaaagtaaaagaccttggctcatagaaagtcactttaatagatagggacagtaataaataaatgtacaatctctatatac

SEQ ID NO: 149309 - DNA, 3096 bp, Homo sapiens
atgacagtaaaagggacagaaattggtgttgaacaaggctccttcatagcagtacaggagacttcctcactgtggcagtgccctgtatttgcatctctggggatcttagagtgcctcgggaagctgtggtcctgtgggttgcctgtggctggagaaaggaatgtgctcatcaccagtgccctcccttacgtcaacaatgtcccccaccttgggaacatcattggttgtgtgctcagtgccgatgtctttgccaggtactctcgcctccgccagtggaacaccctctatctgtgtgggacagatgagtatggtacagcaacagagaccaaggctctggaggagggactaaccccccaggagatctgcgacaagtaccacatcatccatgctgacatctaccgctggtttaacatttcgtttgatatttttggtcgcaccaccactccacagcagaccaaaatcacccaggacattttccagcagttgctgaaacgaggttttgtgctgcaagatactgtggagcaactgcgatgtgagcactgtgctcgcttcctggctgaccgcttcgtggagggcgtgtgtcccttctgtggctatgaggaggctcggggtgaccagtgtgacaagtgtggcaagctcatcaatgctgtcgagcttaagaagcctcagtgtaaagtctgccgatcatgccctgtggtgcagtcgagccagcacctgtttctggacctgcctaaggtattctatgtctggtttgatgccactattggctatctgtccatcacagccaactacacagaccagtgggagagatggtggaagaacccagagcaagtggacctgtatcagttcatggccaaagacaatgttcctttccatagcttagtctttccttgctcagccctaggagctgaggataactataccttggtcagccacctcattgctacagagtacctgaactatgaggatgggaaattctctaagagccgcggtgtgggagtgtttggggacatggcccaggacacggggatccctgctgacatctggcgcttctatctgctgtacattcggcctgagggccaggacagtgctttctcctggacggacctgctgctgaagaataattctgagctgcttaacaacctgggcaacttcatcaacagatggcagcaggtgtctctggctgaaggggataggttcctactgcttcgaaagaccaactccgactggtggttggcaagacgcctagaagctccctccacctctcgacccatcttcgtcccagcagcctatatgatagaggaatccatcccttcccagagtccaactaccgtcatccccggccaattgctctggactcctgggccgaagttgtttcatggttccctggaggagttgtctcaggccctcccaagcagggctcaggctagctcggagcagcctcctccacttccccgcaaaatgtgtaggagcgtcagcactgacaatctgagccccagccttctgaagcctttccaggaaggaccaagcggaagatccctctcccaggaagacttgccgtcagaagccagtgccagcacagcaggcccccagcccctcatgtcagagccccctgtgtactgtaacctggtggaccttcgccgctgtcctcggtccccacccccaggccctgcatgccccctgctgcagaggctggatgcctgggagcagcacctggaccccaactctggacgctgcttctacataaattcactgactggctgcaagtcctggaagcccccgcgccgcagtcgcagcgagacgaaccctggctccatggaggggacacagaccctgaagaggaacaatgatgtcctgcaacctcaggcaaagggcttcagatctgacacagggaccccagaaccgcttgacccacaggaggtggaaaagtcgggtctgctcaacatgaccaagattgcccaaggggggcgcaacgtcaggaagaactggggcccgtcttgggtggtgttaacgggtaacagcctggtgttctaccgagagccaccgccgacagcgccctcctcaggctggggaccagcgggtagccggcccgaaagtagcgtggacctgcgcggggcggccctggcgcacggccgccacctgtccagccgccgcaacgtcctgcacatccgcacgatccctggccacgagttcctgctgcagtcggaccacgagacagagctgcgagcctggcaccgcgcgctgcggactgtcatcgagcggctggatcgggagaaccccctggagctgcgtctgtcgggctctggacccgcggagctgagcgccggggaggacgaagaagaggagtcggagctggtgtccaagccgctgctgcgcctcagcagccgccggagctccattcgggggcccgaaggcaccgagcagaaccgcgtgcgcaacaaactaaagcggctcatcgcgaagagaccgcccttacaaagcctgcaggagcggggtctgctccgagaccaggtgttcggctgccagttggaatcactctgccagcgggaaggagacacggtgcccagctttttgcggctctgcattgctgctgtggataaaagaggtctagatgtggatggcatttatcgggtgagcgggaacttggcagtggtccagaagcttcgctttctggtggacagagaaggtcggttagatttggacagtactgagtgggatgacattcatgtggtcaccggagccctgaagctttttctccgggagctgccccagcctctggtgccaccactgctgctgccccatttccgtgctgcccttgcactctccgaatcagagcagtgcctctctcagatacaagaattaataggctcaatgccaaagcccaaccatgacactctacggtacctcctggagcatttatgcagggtgatagcacactcagataagaatcgcatgacaccccacaacctgggaattgtgtttggaccaaccctgtttcggccagagcaggagacatctgacccagcagcccatgctctctacccagggcagctggtccagctgatgctcaccaacttcaccagcctcttcccctga

SEQ ID NO: 149310 - DNA, 2788 bp, Homo sapiens
cggcgaaatgagactgttcgtgagtgatggcgtcccgggttgcttgccggtgctggccgccgccgggagagcccggggcagagcagaggtgctgatcagcactgtaggcccggaagattgtgtggtcccgttcctgacccggcctaaggtccctgtcttgcaggtggatagcggcaactacctcttctccactagtgcaatctgccgatatttttttttgttatctggctgggagcaagatgacctcactaaccagtggctggaatgggaagcgacagagctgcagccagctttgtctgctcccctgtactatttagtggtccaaggcaagaagggggaagatgttcttggttcagtgcggagagccctgactcacattgaccacagcttgagtcgtcagaactgtcctttcctggctggggagacagaatctctagccgacattgttttgtggggagcccaatacccattactgcaagatcccgcctacctccctgaggagctgagtgccctgcacagctggttccagacactgagtacccaggaaccatgtcagcgagctgcagagactgtactgaaacagcaaggtgtcctggctctccggccttacctccaaaagcagccccagcccagccccgctgagggaagggctgtcaccaatgagcctgaggaggaggagctggctaccctatctgaggaggagattgctatggctgttactgcttgggagaagggcctagaaagtttgcccccgctgcggccccagcagaatccagtgttgcctgtggctggagaaaggaatgtgctcatcaccagtgccctcccttacgtcaacaatgtcccccaccttgggaacatcattggttgtgtgctcagtgccgatgtctttgccaggtactctcgcctccgccagtggaacaccctctatctgtgtgggacagatgagtatggtacagcaacagagaccaaggctctggaggagggactaaccccccaggagatctgcgacaagtaccacatcatccatgctgacatctaccgctggtttaacatttcgtttgatatttttggtcgcaccaccactccacagcagaccaaaatcacccaggacattttccagcagttgctgaaacgaggttttgtgctgcaagatactgtggagcaactgcgatgtgagcactgtgctcgcttcctggctgaccgcttcgtggagggcgtgtgtcccttctgtggctatgaggaggctcggggtgaccagtgtgacaagtgtggcaagctcatcaatgctgtcgagcttaagaagcctcagtgtaaagtctgccgatcatgccctgtggtgcagtcgagccagcacctgtttctggacctgcctaagctggagaagcgactggaggagtggttggggaggacattgcctggcagtgactggacacccaatgcccagtttatcacccgttcttggcttcgggatggcctcaagccacgctgcataacccgagacctcaaatggggaacccctgtgacccttagaaggttttgaagacaagggtattctatgtctggtttgatgccactattggctgtctgtccagtcacagccaactacacagaccagtgggagagatggtggaacgaacccagagcaagtcgacctgtatcagttcatgggccaaagacaatgttcctttccatagcttagtctttccttgctcagcccttaggagctgaggataactataccttggtcagccacctcattgctacagagtacctgaactatgaggatgggaaaattctctaagagccgccgtgtgggagtgtttggggacatgggcccacgacacggggatccctcctgacatctcgcgcttctatcttgctgtacattcggcctgagggccaggacagtgctttctcctggacggacctgctgctgaagaataattctgagctgcttaacaacctgggcaacttcatcaacagagctgggatgtttgtgtctaagttctttgggggctatgtgcctgagatggtgctcacccctgatgatcagcgcctgctgggccatgtcaccctggagctccagcactatcaccagctacttgagaaggttcggatccgggatgccttgcgcagtatcctcaccatatctcgacatggcaaccaatatattcaggtgaatgagccctggaagcggattaaaggcagtgaggctgacaggcaacgggcaggaacagtgactggcttggcagtgaatatagctgccttgctctctgtcatgcttcagccttacatgcccacggttagtgccacaatccaggcccagctgcagctcccacctccagcctgcagtatcctgctgacaaacttcctgtgtaccttaccagcaggacaccagattggcacagtcagtcccttgttccaaaaattggaaaatgaccagattgaaagtttaaggcagcgctttggagggggccaggcaaaaacgtccccgaagccagcagttgtagagactgttacaacagccaagccacagcagatacaagcgctgatggatgaagtgacaaaacaaggaaacattgtccgagaactgaaagcacaaaaggcagacaagaacgaggttgctgcggaggtggcgaaactcttggatctaaagaaacagttggctgtagctgaggggaaaccccctgaagcccctaaaggcaagaagaaaaagtaaaagaccttggctcatagaaagtcactttaatagatagggacagtaataaataaatgtacaatctctata

SEQ ID NO: 149311 - DNA, 490 bp, Homo sapiens
  misc_feature (1)...(490): n = a,t,c or g
nnnnnnnnnnnnnnnnnnnnnnnnnnnnnnnnnnnnnnnnnnnnnnnnnnnnnnnnnnnnnnnnnnnnnnnnnnnnnnnnnnnnnnnnnnnnnnnnnnnnnnnnnnnnnnnnnnnnnnnnnnnnnnnnnnnnnnnnnnnnnnnnnnnnnnnnnnnnnnnnnnnnnnnnnnnnnnnnnnagtagaaaatggtaataattcacttacaataatgaatagaagagccagacagaaaatcaataaagaaaacagctgacttgtaaaatactatgaatcaaatggacctaacagacatagacggaactttctacccaaaggcagaatatacattcttctcgagcaaatgtggaacattctagaggacagatcacatgttaggtcacaaaacaagttcttgacaaatttaagaaaatcaaagtcattcaaaattatctttttaatcataatggagtgaaattagaaatcaataacagcaagaaaatgagaaaattc

SEQ ID NO: 149312 - DNA, 405 bp, Homo sapiens
caagaatctaaataatagactttttatttttccttgaattaaagaagaaatcaaaaggcaaattaggaagtagtttgaatggaatgaaaaggaaaagacaatataccagaatttgtgggatgcacctaaagcaaaacttaaagaaaagtgtatagtgctatatgtggaaagaagaaacttctcaaatcactgacctcagcttccaccttaagacaccagagaaagaggagcacgtaaagcccaaagtaaacagaagaatggaaataataagaatcagagcagaaatcattgcagtgaaatacagaaagccaacagaaaccaatgaaaccaaaagctggtcctttgagaatttcagtaaaattgacacacctttaatcaaaatgatcagaaaaaaaaaagtcgacg

SEQ ID NO: 149313 - DNA, 486 bp, Homo sapiens
ctgactatgaacgctttattgggattgcaagcgttacaaggttaaagacaaaacccaagcatgggattttgccggaaatattagcgttaaaggagttgagttgagtcaaacacgggccgcaaggtggaccgaggcggcaggcacaggtgacattcagtgtttggcgtgggggtcttcaggtgatggcagaggaggggacccaagaggcggactggcatggacgacccccggggtcatgccagccccgtcaccaggacccagaagcctcaggcctctagactgctagtcgggctgcgtgcaggggggctgagctgggggcacaagtgggggcgaggtaaacctcccagaggccgagtccctgccgcagccctaggcgccgctgtggtggctgctatggcatcaccagacccgtgggctccggggcccaagcaacctggtcgatgggcagacctggcagctcttctgctctgtgggctcagacccgcc

SEQ ID NO: 149314 - DNA, 438 bp, Homo sapiens
  misc_feature (1)...(438): n = a,t,c or g
ttttgacttttaatgctttattgggattgcaagcgttacaaggttaaagacaaaacccaagcatgggattttgccggaaatattagcgttaaaggagctgagttgagtcaaacacgggccgcaagtggaccgaggcggcaggcacaggtgacattcagtgtttggcgtgggggtcttcaggtgatggcagaggaggggagggtggatgtgtgctgaccacaggtaagtgttgctggctgtaggggagccgcagagcccattcctacctctccccaacgccacatttggatccctgtgactgactgcatcaaggagtcaccaactctgcagagctgtggctgtggggtaaatgctcctcctgggattcatgtgggcaggtgatcaatgggggtcgtgggttttatttatttataacgtttccaantcttccagctcgtg

SEQ ID NO: 149315 - DNA, 1699 bp, Homo sapiens
  misc_feature (1)...(1699): n = a,t,c or g
ccctttttttttttttttttttcatgacttttaatgctttatttgggattgcaagcgttaccaaggttaaaagacaaaaccccaagcatgggattttgccggaaatattagcgttaaaggagttgagttgagtcaaacacgggccgcaaggtggaccgaggcggcaggcacaaggtgacattcaagtgtttggcgtgggggtccttccaggtgaatggccagaggaggggacccaaaaagggggccccccactgaagacattggggacacggggacggagacaagattggagagccaccgactagggcaccggaggttcaggacagggcagcccgggcccagggatggtttagttgggcccgggggagagcttgcaaaaccttggggaccgccaagggggcttggtccggcaagttgccccccggggaacaccccactcccggcgaggccagaatattaacacttgggttgggtgggttgtccttgacgaatggggcagggtaatttgggggtgccctcgaagccgtttttggatcttcaggcccaaatgtgggttccacaaattgtgacaattttggctcctttgggctttctgtcccaatgtttccgaatggcccaattcaaagggcgcttttcgagggagacctctgggacttagggcgaactgggcatggaacgacccccgggggtcaatgcaagcccctgtcaccaggacccaaaaagcttcagggcctctagacttgctagtccggncttgcgttgcaagggggctgagccttggggcacaaagtggggggcgaggtaaacctcaagagagcgagagtccctgccccaacccctaggcccccccggtggttggctgctatggcatcaccagacccgtgggcttccggggcccaagccaacctggtcgatgggcagacctggcagctcttctgctctgtgggcttagaacccgcctgaacttcctaattgccccggcctcaccccaaccttgtccccaagaggtcccacagagcttcggacctcctggagtacgaggcaggggtttaaagggcgggcaagattgtcaccgagggagaggggagggttcctcaaagtgtgcgcaaggcggccaccctgccccagcctgatggaaccctcttgtttacacacctgctagcccctttcccttccggccagcctcaggcaagccaaggagcccccttcctgtggcctccgagcaccctcctgacacctgaggagaccttgcttaacaccccccttccgccctcaaggacttttggggtccagcccctgtccccaaaagccagcgccggacagtggccttctccactcccctctgacttctccaagggggctcagtggccagtgcaaccccaggaggctccaccctcaactcaaccaaagcaacagggacagatgaaaaacaaaatccaatcagggcgataaatggcggggggcaggacgtggtggtctccaggctggcttcgtgcgttcttgcttttgtcactgcccccctgttacatggggggggggtttaatttggtttctgagcgcataaagctaaggaggggtaaaaaaaaaacaaaaaaaaaaaaaaaaaggaaaaatgccccaagaaacaaagagggggaatagatcaattgacatgaaatttgggggttcctaatttctctatgtaattctgcaagtctgc

SEQ ID NO: 149316 - DNA, 413 bp, Homo sapiens
cggcacgaggaaagaacaacaggaattctgacctcggttggcctagcctcagacacgtcgctgatttgtgttatagaagatttctttgacactgcattgattatttccaggagtagtagtgaagggaaaattcagatgttggattccttcctacttagcttatgattgctggtgacagaagagactgtaaatcatttgcttcaacaggaggatagaccttgcatggacactcttgactgtgggtgcaggttgctatttctgaagcgctgcgtagactgacgactagtaaatcaagggatgatcttgttcatatatggtatgatgatgaatctattgtctgatactgtcttatagcttaacgatcgtgatactttggacatatagtcaaggtctattaaatttgcataaagccg

SEQ ID NO: 149317 - DNA, 398 bp, Homo sapiens
  misc_feature (1)...(398): n = a,t,c or g
acctgtcttaaacttacctagacttacctttgcctgggttttgcatttatgatttttccctcctttctcttcaagtgaatgctttatttttgttttcatggtgtgtttttttcttgctttcattttatctttttctcnnnnnnnnnnnnnaaattccttttttgatctattttttcttgcccttccacagttgcccactttgaggggtttatttgtataggccctattccaaatcctgtcttgggtggtctttcctgttaaattttccctggggtgcgttttttacctttttttccaattcatttttaaacaattggccttttttcatcatgtttaggaaacctttagtcctgttttcctcatttgcaaatattgggatgattaaacctatttttccc

SEQ ID NO: 149318 - DNA, 453 bp, Homo sapiens
  misc_feature (1)...(453): n = a,t,c or g
aactggaaggcaagaattattcatcatcaatcagcataatgcnnnnnnnnnnnnnnnnnnnnnnnnnnnnnnnnnnnnnnnnnnnnnnnnnnnnnnnnnnnnnnnnnnnntaccctttcataataataacattcaacacactaggagtagcaggaaactgcctcagttaacatacaccatataataaatgcccacagctaacatcatactcaaaaaactgaaagctttttctctaagataaagaacaagaacgatgcccacagagcatttaggcaagaagaataatataagacatccaaattgctaaggaagatgtaaaattatatctcttcacagatgacatgatcttgtatgtagaaaaccctgaagagtccacacaaaaagacctattagaataaagtcaacaaagtttcaggatataacatcaacatgataatcaggtgcatttctatg

SEQ ID NO: 149319 - DNA, 462 bp, Homo sapiens; identical to SEQ ID NO: 148271

SEQ ID NO: 149320 - DNA, 1909 bp, Homo sapiens
atggctctaacgcggccggtgcggctcttttccctcgtgactcggttgctcctggcgccgcgacggggcctcacggtccgcagtcccgacgaacccctgccggtggtgcgcatcccagtggctctacagcggcagttggaacagcggcagagcaggcggcggaacctcccgaggccggtgctggttcgacccggaccgctgctggtttcggcgcggcggccggagttgaaccagccggcgcgcctcacactgggccgttgggagcgcgcgccgctagcctctcaaggctggaagagtcgacgcgcgcgtcgggaccacttctccatcgagcgcgcgcaacaggaggcgccagcggtgcgaaagctctcgtctaagggcagctttgctgacctgggcctggagccccgtgtgctgcacgcactacaggaggctgcgcctgaagtcgttcagcccacaaccgtgcagtctagcaccatcccctcactacttcgcggccgccatgtcgtttgcgccgcagaaaccggcagtggcaagactctcagctacctcctgccgctgcttcaacggctcttgggccagccaagcctggactcccttcctatccccgcgccccgaggcctggtccttgttccttcccgagaattggcccaacaggtgcgggctgtggcccaacccttgggccgctccttgggcctgctggtgcgggacctggagggaggccacggcatgcgtaggatcaggctgcagctgtccagacagccttcagcagatgtgcttgtggccactccaggggctctgtggaaggccctgaaaagtcgactgatcagtctggagcaactctccttcttggtgttggatgaggcagacacactgctggatgaaagcttcctggaactggtggactacatcttagagaagagccacatagcagaaggcccagctgacttggaagaccccttcaatcccaaagctcagttagtgctggtaggagccacatttcccgagaggtgtaggccagttgctgaataaagtcgccagcccagatgctgtcaccaccatcaccagctccaagctccactgtatcatgcctcatgtgaaacagacatttctgagactgaagggagcagataaggtggccgagctggtgcacatcctcaagcatcgtgacagagcagaaaggactggtccctcaggaactgttctggtgttctgtaatagctccagcactgtgaactggctgggatatattctggatgaccacaaaatccaacacctaaggttgcaggggcaaatgccagccttgatgagggtaggaatcttcccagtccttccagaagagctcccgagacatacttctctgcacagacatagcctcttcggggcctgggacagcactggtgtgggagctggttgtcaattattgatttccccccaacgcttgcaagattacatccacagagcaggggagagtggggccgtgtggggagcgaggtgccaggcaccgtcatcagttttgtgacccatccctgggatgtgagcctggttcagaagattgagcctgcggctcgccgaaggagaagtcttccaggactagcatcctcggtgaaagagcctttgccgcaagcaacctgattttgacaaatctgattaaaatgtgatgctagaacagggatctttcccagtatcttgagtgggtgaccacacttgtcagtgggaggctctgggctgccctgtcggctccttgagggcgggatgaactgctttgtgacttggaaaggtacgctgctggccagcattggagaagaagctgctgagcatggctttctgtagtctttagcaagacacaagtggattttgactttgtatcatgtcatgatttctaacaataaatgatgtttttatgtgcaaa

SEQ ID NO: 149321 - DNA, 410 bp, Homo sapiens
acaggaacaagtggcagccaagctatctcaatacttcctaagtatacatctagattactcttatctttctttgcctagattgtgtattgggtagaggtagagaatcgcgaccattatgctgcttacttagggtgggaggaagccccgtactctgacagggcctatgcaccgcaggaaaaagacctgggcccgatggacatcaggattggactgctgtagaagaactggatcccactacaggatgacctgtacccagtggacatgctgcacacgagtgttggatgagagatggaaatactgaataactgccgcaaccaaggagtctaacgtatgagcaaggataggagagaaacactagaaacatatcagcagctgcataacttttacagaccagccctttatacttggct

SEQ ID NO: 149322 - DNA, 564 bp, Homo sapiens
aacctcgggcaaaaagtggctcctacgggtaccgtgcaacagagcacacagtgaactcaggaaaggggggaagccatccaggccaaactgcagaaccaaagccatctcagatgtcatctagatccacccagtcatgtactggaaaagaacacagagacctaggcaggaagagtgactcgcctagaccacaattctggcctggggtgattatctcagtttggaaaactctaggtccggccctaactagctctgattgctctctggatgcacagtgcaatcatttggcctggactggaacgggcttctgaagtaggacagcctgacaagacttcctgctctctgttccctgcagttggggaggaagcgtggagaccatcaccataatttatgactgcgaggggcttggcctcaagcatctctggaagcctgctgtggaggcctatggataggtgaggggcaggggtggggaggaaggggacagagggaaggggaggaggagtagacccctctcttaggctgtcctgtgggatgggtgaggcaatgggggcagattctgagcctgct

SEQ ID NO: 149323 - DNA, 364 bp, Homo sapiens
tttctgtccttcaatgggaacttcatgcaacaaaatttcatatgacttagctctgtattcccgagaattgagactggcagtattctttggacgaataacagcaacatatgcatcttctatgttttctggatttcccattgctggggcaactagatgtggagatggttcagtctcccacctccgttttccctcgctggagtcgaacttgctcctcctgtttcccgaagatcaccgagaggtcccacccgtacgggctgccgcgagtgcctctctggccgctacattcaactgctctttactgtccttccctctcctcgcacctcagcaccattcacccctcaccctctcccgaaactacggggtc

SEQ ID NO: 149324 - DNA, 1807 bp, Homo sapiens
tctcctagtcgcctgccaccagcccctgagagactgcaggtccagtgaaaaggagcaggaacggcagcagcccggccgccgacccggaagctctttcaccgccaaccgcgaggctgcaaagggtgactgtcccacccatttagttgaatgtagcggccagagaggcactcgcggcagcccgtacgggtgggacctctcggtgtccttcgggaaacaggaggagcaagttcgactccagcgagggaaaacggagattttgttgcatgaagttcccattgaaggacagaaaaaaaagagaaagaaagttttattggaaacgaaacttcaaggcaacagtgaaataacacaaggcatattggattacgtagtagaaaccaccaaaccaatttctcctgcaaaccagggtatcagagataatactaaatacacatataccccaggatgcccaattttttactgcttacaagatattatgcgagtctgtagtgaatccagtactcattttgctacacttacagcaaggatgttaatagccttggataagtggttagatgaacgtcatgcacaatctcactttattccagctttattccgaccttctcctcttgagcggataaaaactaatgtcataaatcctgcatatgctactgaatcaggtcagacagaaaactcactacatatgggctatagtgcactagaaataaagagtaaaatgttagccctagagaaagcagatacctgtatttacaaccctttgtttggatcagatcttcagtatacaaatcgggtagataaagtggtaataaatccatactttggtctaggagctccagactactcaaaaatccaaatacctaaacaggaaaaatggcagagaagcatgagcagtgtcacagaagacaaggaacgacagtgggtagatgattttcctctccaccgaagcgcctgtgaaggagattcagaattactaagccgtcttctcagtgaaagattttcagtcaaccagttagatagtgaccactgggcacccattcattatgcatgctggtatggaaaagttgaggccactcgcatattgttagagaaaggaaagtgcaatccaaaccttttaaatggacaacttagttctcctcttcattttgctgctggaggaggacatgctgaaatagtacagattctcctaaaccacccagaaacggatagacatataacagaccaacaaggaagatctccattaaatatttgtgaagaaaacaaacaaaacaactgggaagaagctgcaaaattgttgaaggaagcaattaacaaaccaattgaagacccactagctattcttattctctttgatgaagccagatataatttattgaagggcttttatacagctcctgatgctaagctgataacattggcaagtctgcttttgcaaatagtctatggaaattatgagagtaaaaaacacaagcaaggtttcctaaatgaagaaaatctaaaatccatcgtacctgttaccaaactgaaaagtaaggcacctcactggacaaatcgcatacttcatgaatacaagaatctcagtacaagtgaaggtgtcagtaaagaaatgcatcaccttcagcgcatgttcttacagaattgctgggaaattcctacttatggagcagcatttttcacaggacagatatttacaaaggcaagccccagcaatcataaagtcatccctgtgtatgtaggagtgaatataaaaggacttcatctcctcaacatggaaactaaggacttccagtacttccagtactatgttgattaa

SEQ ID NO: 149325 - DNA, 636 bp, Homo sapiens
gctgaggtgcgaggagagggaaggacagtaaagagcaggtttttggctttcatcgctttttctacatgtttttagcctcaccagaagtctttcatctcggtggtccaactcaggatctcagcctcattattttcttacccttctggagtgcatatgtgcctttacagtttctgtttgcaaacgctgtctagcatactaagaggatgttagcaaacctgttccatggacactaaatggcagttgtacatctcccctcatcagtcatagtgacaaccagaaatgccctccatattttccagtgatcccagcaatgggaaatccagaaaacatagaagatgcatatgttgctgttattcgtccaaagaatactgccagtctcaattctcgggaatacagagctaagtcatatgaaattttgttgcatgaagttcccattgaaggacagaaaaaaaaaagagaaagaaagttttattggaaacgaaacttcaaggcaacagtgaaataacacaaggcatattggattacgtagtagaaaccaccaaaccaatttctcctgcaaaccagggtatcagaggaaaacgagttgtactaatgacaaaaatttcctctggatggagagaggatgggcagtgtatt

SEQ ID NO: 149326 - DNA, 562 bp, Homo sapiens
cacggtttttggctttcatcgctttttctacatgtttttagcctcaccagaagtctttcatctcggtggtccaactcaggatctcagcctcattattttcttacccttctggagtgcatatgtgcctttacagtttctgtttgcaaacgctgtctagcatactaagaggatgttagcaaacctgttccatggacactaaatggcagttgtacatctcccctcatcagtcatagtgacaaccagaaatgccctccatattttccagtgatcccagtcttcaatgcgtctgtctcataatttgtaaacgtttattatcttgaagtcattgttaatctgtggtgaaaagtaattgctaaatagaaattctgagaagaaaaaggcctcatccttttcacatgatgttggaaggtctgttgcatgagcaatgggaaatccagaaaacatagaagatgcatatgttgctgttattcgtccaaagaatactgccagtctcaattctcgggaatacagagctaagtcatatgaaattttgttgcatgaagttcccattgaaggacagaaa

SEQ ID NO: 149327 - DNA, 627 bp, Homo sapiens
tttttttttttttttctgtccttcaatgggaacttcatgcaacaaaatttcatatgacttagctctgtattcccgagaattgagactggcagtattctttggacgaataacagcaacatatgcatcttctatgttttctggatttcccattgctggggcaactagatgtggagatggttcagtctcccacctccgttttccctcgctggagtcgaacttgctcctcctgtttcccgaaggacaccgagaggtcccacccgtacgggctgccgcgagtgcctctctggccgctacattcaactaaatgggtgggacagtcacctggcgagggggggcagggaccgtcaccgctttctcattcctccttccctcctcccaggcacagcagcccggcccagcttcctgtggcagaaaaaccctcagtcgccaaaagaaagccgtcttgagggttcccccgcgctcccacccgcgccccaaaagctcaggtctctggagtcggagaccctcctgcccacctgctctttactgtccttccctctcctcgcacctcagcaccattcacccctcaccctctcccgaaactacggggtcccaggtcttcaaaggccttagctttccactccgccg

SEQ ID NO: 149328 - DNA, 610 bp, Homo sapiens
gatcgacatttaacaatgaaccttaaccagaaaagcaagagcaaaacaaacacaaaattagaagaaaacaaataataaaaattagagcataaataaataaaattgaaataaaaatcaatgcaaaagaacaatgaaacaaaaggttgctttttttcaaaagttaaacaaaactgacaagcctttagcaagactgagaaaaaagagacaagatacaaatcagaaatgaaaaagacattacaactgacactgcagaaattcaaaggatcattaggggctactatgagcaactctatgccaataaattggaaaatctagaagaaattgacaattcctagacacatacaacctactgagacttggaccaggaagaaatccaaaacctgaacagactaataacaagtaacaaggttgaagccataataaaaagtctcccagtaaagaaaagcttgggacctgatggtttcactgctgaattctaccaaacatttaaagaagaactaataccaatcctactcaaactattctgaaaagtagaggaagaaagagtacttccaaactaattctatgaggccagtattaccctgatgccaaaaccagacaaagacacatc

SEQ ID NO: 149329 - DNA, 504 bp, Homo sapiens
ttggctcactgcaacatctgcctcctgggttcaagcaattctgcctcagtctcacaagtagctgggattacaggcgggtgccactacacccagctaatttttctatttttagtagagatggggtttcaccatgttggccaggttggtcttgaactcccgacctcaggtgatctgcccgccttggcctcccaaagtgttgggattacagccgtgagcccactgtgccccacccgaattatatttttcgaagcggagtcttgcctttgttggcccgggtggtctcccaaccctgggctcaagcaatccccctgccttggcttccctgaagtgttgggattaccagcctgatcttaccatgcccagctgattttatttgttggagcttgagataaaatttggggttcatgtgttatggaaaagctttctgattaagattgagaattattactgttagaatatcttacaaatattttgtttgtttgttttttgagactgtcccccccc

SEQ ID NO: 149330 - DNA, 418 bp, Homo sapiens
aaagaggagtgtaataaagaggaaaaagaaagtagagagaaaaagaagagaaagaaaagatagagtaaaaagaagaagaggtaagaaaagaagagaaaaaaagtttaaataaggataaagacaagaaaaggagaaaaagggaaaagggagagggaaggaagaaagaggaagggatattaaaggtgaaaaaggatggaaacccttcgaatgggcatgcaagaatgcccaaagagaggtgactgtatgatgtcagagggacaaaacctcattcctcagatcatggtgatactgccatttttcaaacatgcattctatgaagagctgtgtaacttgactacatgtatgcagatcctaactaactcacttttccttacccccaatctttctcccccacaccttggagaaccttggtactcta

SEQ ID NO: 149331 - DNA, 200 bp, Homo sapiens; identical to SEQ ID NO: 6573

SEQ ID NO: 149332 - DNA, 403 bp, Homo sapiens
  misc_feature (1)...(403): n = a,t,c or g
tgtaattgtccatgttagctgcataattgctgaataattctaacgctgagtcgtttatcatatggtgatggttcttctcaaggttgttatttgccatcattttctaacactctttttttccttcaggtctctcattctgtacttattttttattttattcatgatctccttatatttgtcttgttttttatacaattttctttttatctcnnnnnnnnnnatcttttctattatttgttttttaatgattattgttttgatttaattttttttctatgccttatttattattatcattttcaatcctattattttatatcttaatttatctattatctctttttcttatcgagtctttatttgattattacttatgccttatttctttcgtcattttctattc

SEQ ID NO: 149333 - DNA, 569 bp, Homo sapiens
atgtgcaggggcaggagccactgactgcttccatgttggttgcagcaccccccaggaacagaagcagatgctgggagaacgcttgttcccactcatccaaacaatgcattcaaatctggctgggaagatcacgggaatgctgctggagatagacaactctgagctgctgcacatgttagagtcccccgagtctctccgctccaaggtggatgaagctgtagcagttctacaggctcatcatgccaagaaagaagctgcccagaaggattcaaaagccaaataaccccttatggaattcaactcaaggtttgaagacttcctagcttgtcctatggacctcaacaccaaggattacaaattgcaaatttaataggtcattttgtatcaaaaaggtcaattatgaagcacctagaatttttcaattatacgaatatgttctttgggttctgctgtggcccagacagtgttaactttttttttattgtgggttttgattttttcccccagaaattggttttatttgatgtacccaagtcttacgtttcccaataaagaaaaaaaatctccat

SEQ ID NO: 149334 - DNA, 1249 bp, Homo sapiens
cttatagcgggcagccagtgcttcctcttctgttgggaccaaataatgtgctcattcagctgtttgagcctccaggtcacttccgcatccaatgacctattggatccttggctgctctgcaagatgattggtacattaatgcaggaaataacttcaacttacagatcggatgttcagcttcaaagatgtaaagtgtgtgtaggaggtgaaggggttgaacctagagcttagattttctaagctgtaacttgctgtctctagacctgtgctctagatgcaactagtttgtttcagagcctaatagcaatttgctgtggaggtgtcaccctaagccttcaggcccataagctgcttaggagattactctttaactgtcctgtctcatactctctaagttggggatttcctagaacttgatgctatgtaaaataccttttctttgcaaggctttgactagcattgacgttgcatgttgaccgtttttaagcatttgatacaaaaacatttggtagaattaaggtgatgtggaatgtaattataaatgtgttgatatttactccctttgatccaatctgcactgagatttaccctaaaggaaaactaattttcaggaaaaggttatatacaagtgtttacccttatttatatcaaggcttttcattcttgagtaactttgggtgtattaaggaaatgtcagaaaatgcttgcctagcactataggtttgttttattatttacgtttcacttcgctttctgatagcatgccattttcattgtaattggttgtgtttatgtccataccactctgttcctcaacacacccctcaatccttcaaggactgaaattagttcctttagagcaaggacagccacctcctctcctctttcacatagtcagatgttcagatattgaacaggcactcaaccaccatcaggtgttgtcctttcctcagtgctaacccactgcctttcctggttcccaggcaccccagcctgcggtccatgtgcaggggcaggagccactgactgcctccattgctgggctggagcacccccccaggaacagaagcagatgctgggagaacgcttgttcccactcatccaaacaatgcattcaaatctggctgggaagatcacgggaatgctgcttgagatagacaactctgagctgctgcacatgttagagtcccccgagtctctccgctccaaggtgagctggggctcagaccctgcagcttcagttctcatg

SEQ ID NO: 149335 - DNA, 3142 bp, Homo sapiens
gcagcctgaggaaaaaaagagaaaaagataaaaaaaatctgaaaacgcttcaaaatcctgaaaaaaaaaaggaaaagaaaaaacgaatcctcggagaacccgcggggaagtcactttcgtacgcttccggcctgccccgcgcccgccgccgcagcgcttggcgtccgtcggtctccgtccgtcggtccgggggtgagccgcccgcccggcccgccgtgccctccccccgctcgggccccgagccccgcgccccggcctgccccggcgcaccacgtgtccgtgctgcccttcgccgcccgcccggggtcgccgagtcggcgcccacaaagatttggtttccctctgcccggcggttgtaatcttaaaccgccggagcccgaggcctatatttatagagaaacgcgtgtccccgaggcccgccgtgggcagcgtccggtcgcctcttaaaggatttttacccttcggaaggggattccccgtttaatttttttcctactttgattttttgaaatttggagccttcgcaccaggaccgcggagaagtgcaaagtcgcggggagggccgtattgtgcggagagccttttgtctgcggtgctgcggccgtgggagccggcccccgcctcccgtttccgtcccgtctccaagcccgccgactccagctcgtcctcgccgcgccggtgccacctgtgagccggcgcgggcccgggctccggctccgaaggcgcccctttgtcctgcggcgggcccgataagaagtcctctggcggggctcggggtggtggggggcggggagatgaacgctgcggccagcagctaccccatggcctccctgtacgtgggcgacctgcattcggacgtcaccgaggccatgctgtacgaaaagttcagccccgcggggcctgtgctgtccatccgggtctgccgcgatatgatcacccgccgctccctgggctatgcctacgtcaacttccagcagccggccgacgctgagcgggctttggacaccatgaactttgatgtgattaagggaaagccaatccgcatcatgtggtctcagagggatccctctttgagaaaatctggtgtgggaaacgtcttcatcaagaacctggacaaatctatagataacaaggcactttatgatactttttctgcttttggaaacatactgtcctgcaaggtggtgtgtgatgagaacggctctaagggttatgcctttgtccacttcgagacccaagaggctgccgacaaggccatcgagaagatgaatggcatgctcctcaatgaccgcaaagtatttgtgggcagattcaagtctcgcaaagagcgggaagctgagcttggagccaaagccaaggaattcaccaatgtttatatcaaaaactttggggaagaggtggatgatgagagtctgaaagagctattcagtcagtttggtaagaccctaagtgtcaaggtgatgagagatcccaatgggaaatccaaaggctttggctttgtgagttacgaaaaacacgaggatgccaataaggctgtggaagagatgaatggaaaagaaataagtggtaaaatcatatttgtaggccgtgcacaaaagaaagtagaacggcaggcagagttaaaacggaaatttgaacagttgaaacaggagagaattagtcgatatcagggggtgaatctctacattaagaacttggatgacactattgatgatgagaaattaaggaaagaattttctccttttggatcaattaccagtgctaaggtaatgctggaggatggaagaagcaaagggtttggcttcgtctgcttctcatctcctgaagaagcaaccaaagcagtcactgagatgaatggacgcattgtgggctccaagccactatatgttgccctggcccagaggaaggaagagagaaaggctcacctgaccaaccagtatatgcaacgagtggctggaatgagagcacttcctgccaatgccatcttaaatcagttccagcctgcagcgggtggctactttgtgccagcagtcccacaggctcagggaaggcctccatattatacacctaaccagttagcacagatgaggcctaatccacgctggcagcaaggtgggagacctcaaggcttccaaggaatgccaagtgctatacgccagtctgggcctcgtccaactcttcgccatctggctccaactgggtctgagtgcccggaccgcttggctatggactttggtggggctggtgccgcccagcaagggctgactgacagctgccagtctggaggcgttcccacagctgtgcagaacttagcgccacgcgctgctgttgctgctgctgctccccgggctgttgccccctacaaatacgcctccagtgtcgctgcagccctcatcctgccatacagcctctgcaggcaccccagcctgcggtccatgtgcagggggcaggagccactgactgcctccatgctggctgcatgcaaccccccaagaaacagaagcagattctgggagaacgcttgttcccacttcatcccaacaatgcattccaaatctggctgggaaagatcacgggaatgctgctggagatagaccaactctgagctgctgcacatgttagagtcccccgagtctctccgctccaagggtggatgaagctgtagcagttctacaggcttcatcatgcccaagaaagaagctgcccagaaggtgggcgctgttgctgctgctacctcttagacccgcgaaaaaccgattcaaaagccaaataacccccttatggaattcaactcaaggtttgaagacttcctagcgttgtcctatggacctcaacaccaaaggattacaaattgcaaatttaataggtcattttgtatcaaaaggtcaattatgaaggcacctagaatttttcaattatacgaatatgttctttgggttctgctgtggccccagacagtgtttaacttttttttttattgttggggttttgatttttttcccccagaaattgggttttatttgatgtacccaagtcttacgtttcccaataaagaaaaaaaatctccataaaaaaagtcgagcggccgcgaattccagctgagcgccggtcgctaccattaccgttggtcttggtgtcaaaa

SEQ ID NO: 149336 - DNA, 365 bp, Homo sapiens
cgctagctatacacccgtcatcccccctcaccgtcctgtatcatgaccgcttgcttcggttctcacataagataccgatcggattaggtgcccacgccagtattacgcccagctgtaatccgcagcgttggaggtggggactgttcagagcgcctcgggttaaggccgagacccattcggaactcggaccccacacccctacccgcccgccaccaccaccttggcagaacgtgcagcgggcagaccctgtggccgtcacgccctgccgctccagggaagggagccaggctgagcctctgccacgtgggagaggggctgtttccagttccactacacgcccagggctcccagcccccaaccgtccc

SEQ ID NO: 149337 - DNA, 2770 bp, Homo sapiens
gcggagggtgcgtgcgggccgcggcagccgaacaaaggagcaggggcgccgccgcagggacccgccacccacctcccggggccgcgcagcggcctctcgtctactgccaccatgaccgccaacggcacagccgaggcggtgcagatccagttcggcctcatcaactgcggcaacaagtacctgacggccgaggcgttcgggttcaaggtgaacgcgtccgccagcagcctgaagaagaagcagatctggacgctggagcagccccctgacgaggcgggcagcgcggccgtgtgcctgcgcagccacctgggccgctacctggcggcggacaaggacggcaacgtgacctgcgagcgcgaggtgcccggtcccgactgccgtttcctcatcgtggcgcacgacgacggtcgctggtcgctgcagtccgaggcgcaccggcgctacttcggcggcaccgaggaccgcctgtcctgcttcgcgcagacggtgtcccccgccgagaagtggagcgtgcacatcgccatgcaccctcaggtcaacatctacagtgtcacccgtaagcgctacgcgcacctgagcgcgcggccggccgacgagatcgccgtggaccgcgacgtgccctggggcgtcgactcgctcatcaccctcgccttccaggaccagcgctacagcgtgcagaccgccgaccaccgcttcctgcgccacgacgggcgcctggtggcgcgccccgagccggccactggctacacgctggagttccgctccggcaaggtggccttccgcgactgcgagggccgttacctggcgccgtcggggcccagcggcacgctcaaggcgggcaaggccaccaaggtgggcaaggacgagctctttgctctggagcagagctgcgcccaggtcgtgctgcaggcggccaacgagaggaacgtgtccacgcgccagggtatggacctgtctgccaatcaggacgaggagaccgaccaggagaccttccagctggagatcgaccgcgacaccaaaaagtgtgccttccgtacccacacgggcaagtactggacgctgacggccaccgggggcgtgcagtccaccgcctccagcaagaatgccagctgctactttgacatcgagtggcgtgaccggcgcatcacactgagggcgtccaatggcaagtttgtgacctccaagaagaatgggcagctggccgcctcggtggagacagcaggggactcagagctcttcctcatgaagctcatcaaccgccccatcatcgtgttccgcggggagcatggcttcatcggctgccgcaaggtcacgggcaccctggacgccaaccgctccagctatgacgtcttccagctggagttcaacgatggcgcctacaacatcaaagactccacaggcaaatactggacggtgggcagtgactccgcggtcaccagcagcggcgacactcctgtggacttcttcttcgagttctgcgactataacaaggtggccatcaaggtgggcgggcgctacctgaagggcgaccacgcaggcgtcctgaaggcctcggcggaaaccgtggaccccgcctcgctctgggagtactagggccggcccgtccttccccgcccctgcccacatggcggctcctgccaaccctccctgctaaccccttctccgccaggtgggctccagggcgggaggcaagcccccttgcctttcaaactggaaaccccagagaaaacggtgcccccacctgtcgcccctatggactccccactctcccctccgcccgggttccctactcccctcgggtcagcggctgcggcctggccctgggagggatttcagatgcccctgccctcttgtctgccacggggcgagtctggcacctctttcttctgacctcagacggctctgagccttatttctctggaagcggctaagggacggttgggggctgggagccctgggcgtgtagtgtaactggaatcttttgcctctcccagccacctcctcccagccccccaggagagctgggcacatgtcccaagcctgtcagtggccctccctggtgcactgtccccgaaacccctgcttgggaagggaagctgtcgggagggctaggactgacccttgtggtgtttttttgggtggtggctggaaacagcccctctcccacgtgggagaggctcagcctggctccccttccctggagcggcagggcgtgacggccacagggtctgcccgcatgcacgttctgccaaggtggtggtggcgggcgggtaggggtgtgggggccgtcttcctcctgtctctttcctttcaccctagcctgactggaagcagaaaatgaccaaatcagtattttttttaatgaaatattattgctggaggcgtcccaggcaagcctggcatgtagtagcgagtgatctggcggggggcgtctcagcaccctccccagggggtgcatctcagccccctctttccgtccttcccgtccagccccagccctgggcctgggctgccgacacctgggccagagcccctgctgtgattggtgctccctgggcctcccgggtggatgaagccaggcgtcgccccctccgggagccctggggtgagccgccggggcccccctgctgccagcctcccccgtccccaacatgcatctcactctgggtgtcttggtcttttattttttgtaagtgtcatttgtataactctaaacgcccatgatagtagcttcaaactggaaatagcgaaataaaataactcagtctgc

SEQ ID NO: 149338 - DNA, 831 bp, Homo sapiens; identical to SEQ ID NO: 136337

SEQ ID NO: 149339 - DNA, 647 bp, Homo sapiens
atggataaggatgcagagcatgaaacatacatcctctgcctcctttgtacctctgttgctgctcagtaccgggagcacgcagtatccattttattttcccaatttgttacctttgtcctggtggcactgaccttcttccttgtcctcgacatcttcttacgttccccaatatcaactccaagcccatcaccattgcctcgaaccccgacttccactccagtccacgtgaagcaaggcactgccggctctgttattaataatccttatgttatcatggacaagcagccggggcaggtgattggagccaccactcccagtacaggtgtgtattagatccatatttgtaccatctaaagggtttgatctttattaaaaatgtaatcctgccatgacttggtagccatgtaattggagaatgaaatctcccgtaaacgagaagcgagaataagtaaaaggaaagccaatactctttctctgaggggagatttactctgtaaaagttgcattttttagaatttacttgagttttcttttaatttctaaaagttcaaaataagccataatgaatgttcttaaaagaatagttgattttggtttcatttggaagacttacgcttttggggacttgtaagcaatgtgggtacttc

SEQ ID NO: 149340 - DNA, 4464 bp, Homo sapiens
gcggggcggaacgcgccgggcgggctccaccgcgccgtgtgcttccgcaggttgcgggggtcgctggggccttgtggcggggcagctccgcggggcttcgcccgctctctcacctcgccgtgctctctcgcggcggccggcggggcccgcgctgcagccggagacccggagaaaggtgaagaactgaatgtcatcatgtctggaatcaagcgaaccatcaaagaaaccgaccctgattacgaggatgtatctgtggcccttccaaataagcggcataaagcaattgagaattcagctcgagatgctgctgtgcagaagattgagactattatcaaagaacagtttgctcttgaaatgaagaataaggaacatgaaattgaagtcattgaccagcgactgattgaagcaagaaggatgatggataaactgcgtgcctgcattgtagcaaactactatgcttctgcaggtcttctaaaagtttctgagggatcaaagacatgtgatacaatggtttttaatcatcctgctatcaagaaatttttggaatcaccatctaggtcatcatctcctgccaatcagagagcagaaacaccatcagccaatcattcagaaagtgattctttatctcagcacaatgacttcttatctgacaaagataataacagcaatatggatatagaggaaagactctcaaacaacatggagcagagaccaagccgaaatactggaagggatacttctagaattactggctcccataaaacagaacagcggaatgctgatctcacagatgagacttcacgactttttgtaaagaaaacaatagtagtgggcaatgtgtccaagtatatacctccggataagagggaagaaaatgaccagtcaactcataagtggatggtatatgtccgagggtcccgtagagaacccagcattaatcattttgtcaagaaggtttggttcttccttcatcctagctataaaccaaatgaccttgtggaagttagagagcctccttttcacctgaccagaagaggctggggtgagtttcccgtcagagttcaagttcattttaaggacagccagaacaagcggatagatatcatacataatctgaagctggatagaacttatactggcttgcagactcttggagcagagacggtagtggatgttgaactccatcgccattctctcggagaagactgtatctatcctcagtcctcggagtctgacatctctgatgcccctccatctttgcctttgaccattccagccccagtgaaagcttcttcaccaataaagcagtcacatgagccagtacccgatacctctgtggagaaaggattcccagctagcactgaagctgaacgacacactccgttttatgctttgccatcttcattggaaagaacacccaccaaaatgactacatcccagaaagttaccttttgttcccatggcaattcagctttccagccaatagcatcaagctgcaaaattgttccacaaagtcaggttcctaatcctgagtcacctggaaaatccttccagcccatcaccatgagctgcaagattgtgtcaggttccccaatatcaactccaagcccatcaccattgcctcgaaccccgacttccactccagtccacgtgaagcaaggcactgccggctctgttattaataatccttatgttatcatggacaagcagccggggcaggtgattggagccaccactcccagtacaggaagtcctacaaacaagatctccacggcttctcaggtctcccaaggaacaggttcccctgttcctaaaattcatggaagtagttttgtaacatctactgtcaagcaggaggattctttgtttgcatctatgccacctctttgcccaattgggagtcaccctaaggttcaaagccccaaacctataacaggaggacttggagctttcacaaaagtgatcatcaaacaggaacctggtgaagcccctcacgtgcccgcaacaggagctgccagccagtcaccactcccgcagtatgtgactgtgaaagggggtcacatgatagctgtgtcccctcaaaaacaggtcataactcctggagaagggattgcccagtcagcaaaggttcagccctccaaggttgtcggggtaccagttgggtctgctttaccttcaacagtgaagcaggctgtggcgatcagtggtggccagatcctggtagccaaggccagctcttctgtctccaaagcagttgggccaaagcaagttgtaacccaaggagttgccaaagcaattgtgagtggaggtggaggaaccattgttgctcagccagtgcagaccttaaccaaggcccaggttactgccgctggtcctcagaagagtggatcccagggttcagtaatggcaacgttgcagctaccagccactaatttggccaacttggcaaatttgcctcctggcactaaactctacctaactacaaacagcaagaacccttcaggaaaaggaaaactgctgctgatccctcaaggagccatcctgcgagctacgaacaatgctaatctccagtctggctcagctgccagtggtgggagtggtgccggaggaggaggaggaggaggaggaggaggcggcagtggcagcggtggaggcggcagcacaggaggaggaggaggaacagcaggaggaggaactcaaagtactgctggccctggagggatatctcagcacctgacttacacatcttacatcctcaagcaaactccccagggcacatttttagttggccagccatcaccccagacttctggaaaacaactcaccactgggtcagtggtccaaggaacactgggagtcagcacatcttctgcacaaggacaacaaacgctaaaagtcatctctggacagaaaaccacattgtttacacaggcagcccatggaggacaggcatctctaatgaaaatatccgatagcaccttgaagactgtgccagccacctcacagctctcgaagcctggaaccacaatgctgagagtagcaggaggggttatcacaactgccacttcccctgccgtggccctctcagcaaacggtcctgcacaacagtctgaaggaatggctcccgtgtcttcatctacggtcagttctgtaacgaaaacttctgggcagcagcaagtgtgtgtgagccaggccaccgtgggaacctgcaaggctgccacccccaccgtcgtcagcgccacgtccctcgtgcctacaccaaaccccatctctgggaaagccacagtatccggactgttaaagattcactccagtcagtccagtccgcagcaggccgtcctgacgattcccagccagctcaaaccactcagcgtaaacacatctggaggggtgcagacgatcctgatgcctgtgaataaagtggttcagtcattttctaccagcaagccacctgccattctgcctgtagctgccccaactccagttgtccccagctctgctccagcagctgttgcaaaagtgaagactgaaccagaaacacctggaccgagttgcctctctcaggagggtcagacagcagtgaaaacagaagaaagttctgagctgggaaactatgtcattaagatagaccatttagaaactatccagcaactcctaactgcagtagtaaagaagattccattaatcactgcaaaaagtgaagatgccagctgcttttctgcaaagtctgtggagcagtactatggctggaacattggaaaaaggagagccgctgagtggcaaagagcaatgacaatgcgaaaagtcttacaagaaatcctggagaagaatccgagatttcaccacctgactcccctcaaaaccaagcacatcgctcactggtgccgctgtcatggctacaccccaccggaccctgagagcctgaggaatgacggggactctatcgaggacgtgctgacccagatcgacagcgagcccgagtgcccatcatcattctcctctgctgacaacctctgccgcaaactggaggacctgcaacagttccagaaaagggaacccgagaatgaggaggaggtggacatcctcagcctctccgagccagtgaagataaacatcaagaaggagcaggaagagaaacaagaggaagtcaagttctacctgccaccaaccccagggtctgaatttattggggatgtcacacagaagattgggatcaccctgcagcccgtggcactccacaggaacgtgtatgcgtccgtggtggaggacatgatcctgaaggctacagaacagctggtgaatgatatcctgagacaggctttggcagttggataccagacagcttctcacaacaggattcccaaagaaattacagtgagtaatattcaccaggccatttgcaacattccttttctggacttcctcacaaacaaacacatgggaatattgaatgaggaccagtga

SEQ ID NO: 149341 - DNA, 734 bp, Homo sapiens
gtcgaccacaacagaaagagaaaactacaggccaatattcctaatgaacacagatggacgaattctcagcataatactaccaagccaaatctaatgatgaatgaaaaagataatataccatgatcaagtgggatttatcccaggaatgcaaagatggctcaacgtacacaaaatcaatgcatgtgatacatcacatcaacaagatgaaaggcaaaaactatctgatcatctcagcagatgcagaaaaatcactcggtaaaacttaccattgcttcatgatgaaaactctcaacaaattaggcatagaaggaacacttcaacataagaaaaggcatatatgactaatctacagctaacatcctactcactgggaaaaattgaaaagcctttcctctaagaactggaataagacaaggatgcccactttcaccactcttattcaacacagtatgggacatccaagccaaagtgatcagacaagataaacaaataaaaggcatcgaaaatggacaagaggaagtcaaattgtctcactttgcagatgacataatcttatacttgtaaacagaaaaacctaaagactccaccaaaaaactcttaaaatgggtaaattaggctgggcatggtagctcatgcctgtaatcccagcacattgggaggccaaggtgggcgaatcacctgaggttgggagtttgagaccagcctggccaacatggcgaaaccctgtctctaca

SEQ ID NO: 149342 - DNA, 677 bp, Homo sapiens
tccgcgattccgtctggatatgtggcggctgctgctagagctggagcatttgccgggttggtggctcctgcacatttttacagtcctccagtccttctctttcgtcagtataaaagattaaactctacagaagaatgcaatcaagtgatggcttttcctttagaatttgaatatggaggctacaggaacagatgaagttgacaagctaaaaaccaaatttatatctgcttggaacaacatgagatatagttgggtgttgaaaacaaagacgtattttagtagaaattctcctgtattattgcttggaaaatgttaccattttaaatatgaagatgaagataaaacgttacctgcagagtcgggatgtacaatagaggatcacgtaattgcgggaaatgtagaagaatttccgtaaagattccatttctagaatatggctgacctacagggaagaattccctcaaatagaaggctcagctttgacaacagactgtgggtggggctgcacattgagaactggccagatgctcttggctcaaggactcatactacactttcttggtagagcttggacctggcctgatgctttgaatattgaaaagctcgaactctgaatcatggacttcccacactgtcaaaaatatactggatctttgagcatcactttcaggggaaga

SEQ ID NO: 149343 - DNA, 359 bp, Homo sapiens; identical to SEQ ID NO: 145125

SEQ ID NO: 149344 - DNA, 16004 bp, Homo sapiens
gcacaatgaagtgggtaacctttatttcccttctttttctctttagctcggcttattccaggggtgtgtttcgtcgagatgcacgtaagaaatccatttttctattgttcaacttttattctattttcccactaaaataaagttttagtaaactctgcatctttaaagacttattttggcatttatttctaaaatggcatcgtattttgtatttgtgaagtcttacaaggttatcttattaataaaattcaaacatcctaggtaaaaaaaaaaaaaggtcagaattgtttagtgactgtaattttcttttgcgcactaaggaaagtgcaaagtaacttagagtgactgaaacttcacagaatagggttgaagattgaattcataactatcccaaagacctatccattgcactatgctttatttaaaaaccacaaaccctgtgctgttgatctcataaatagaacttgtatttatatttattttcattttagtctgtcttcttggttgctgttgatagacactaaaagagtattagatattatctaagtttgaatataaggctataaatatttaataatttttaaaatagtattcttggtaattgaattattcttctgtttaaaggcagaagaaataattgaacatcatcctgagtttttctgtaggaatcagagcccaatattttgaaacaaatgcataatctaagtcaaatggaaagaaatataaaaagtaacattattacttcttgttttcttcagtatttaacaatccttttttttcttcccttgcccagacaagagtgaggttgctcatcggtttaaagatttgggagaagaaaatttcaaagccttgtaagttaaaatattgatgaatcaaatttaatgtttctaatagtgttgtttattattctaaagtgcttatatttccttgtcatcagggttcagattctaaaacagtgctgcctcgtagagttttctgcgttgaggaagatattctgtatctgggctatccactaaggtcgtcactggtcacatggctattgagtacttcaaatatgaccagtgcaactgagaaacaaaaacttaaattgtatttaattgtagttaatttgaatgtatatagtcacatgtggctaatggctactgtattggacagtacagctctggaacttgcttggtggaaaggactttaatataggtttcctttggtggcttacccactaaatcttctttacatagcaagcattcctgtgcttagttgggaatatttaatttttttttttttttaagacagggtctcgctctgtcgcccaggctggagtgcagtggcgcaatctcggctcactgcaaactccgctcccgggttcacgccattctcctgcctcagcctcccgagtagctgggactacaggcgcccgccatcacgcccggctaatcttttgtatttttagtagagatggggtttcaccgtgtgccaggatggtctcaatctcctgacatcgtgatctgcccacctcggcctcccaaagtgctgggattacaggagtgagtcaccgcgcccggcctatttaaatgttttttaatctagtaaaaaatgagaaaattgtttttttaaaagtctacctaatcctacaggctaattaaagacgtgtgtggggatcaggtgcggtggttcacacctgtaatcccagcactttggaaggctgatgcaggaggattgcttgagcccaggagtacaagaccagcctgggcaagtctctttaaaaaaaacaaaacaaacaaacaaaaaaattaggcatggtggcacatgcctgtagtcctagctacttaggaggctgacgtaggaggatcgtttggacctgagaggtcaaggctacagtgagccatgattgtgccactgcactccagcctgggtgacagagtgagactctgtctcaaaaaagaaaaaggaaatctgtggggtttgttttagttttaagtaattctaaggactttaaaaatgcctagtcttgacaattagatctatttggcatacaatttgcttgcttaatctatgtgtgtgcatagatctactgacacacgcatacatataaacattagggaactaccattctctttgcgtaggaagccacatatgcctatctaggcctcagatcatacctgatatgaataggctttctggataatggtgaagaagatgtataaaagatagaacctatacccatacatgatttgttctctagcgtagcaacctgttacatattaaagttttattatactacatttttctacatcctttgtttcagggtgttgattgcctttgctcagtatcttcagcagtgtccatttgaagatcatgtaaaaattagtgaatgaagtaactgaatttgcaaaaacatgtgttgctgatgagtcagctgaaaattgtgacaaatcacttgtaagtacattctaattgtggagattctttcttctgtttgaagtaatcccaagcatttcaaaggaattttttttaagttttctcaattattattaagtgtcctgatttgtaagaaacactaaaaagttgctcatagactgataagccattgtttcttttgtgatagagatgctttagctatgtccacagttttaaaatcatttctttattgagaccaaacacaacagtcatggtgtatttaaatggcaatttgtcatttataaacacctctttttaaaatttgaggtttggtttctttttgtagaggctaatagggatatgatagcatgtatttatttatttatttatcttattttattatagtaagaacccttaacatgagatctaccctgttatatttttaagtgtacaatccattattgttaactacgggtacactgttgtatagcttactcatcttgctgtattaaaactttgtgcccattgattagtaacccctcgtttcgtcctcccccagccactggcaaccagcattatactctttgattctatgagtttgactactttagctaccttatataagtggtattatgtactgtttatctttttatgactgacttatttcccttagcatagtgcattcaaagtccaaccatgttgttgcctattgcagaatttccttcttttcaaggctgaataatattccagtgcatgtgtgtaccacattttctttatccattaatttgttgattgatagacatttaggttggttttctacatcttgactatcatgaatagtgttgcaatgaacacaggagagctactatctcttagagatgatatcatggtttttatcatcagaaaacacccactgatttctatgctaattttgttacctgggtggaataatagtacagctatatattcctcattttagatatctttgtatttctacatacaataaaaaagcagagtacttagtcatgttgaagaactttaaacttttagtatttccagatcaatcttcaaaacaaggacaggtttatctttctctcaccactcaatctatatatacctcttgtgggcaaggccagtttttatcactggagcctttcccctttttattatgtacctctccctcacagcagagtcaggactttaactttacacaatactatggctctacatatgaaatcttaaaaatacataaaaattaataaattcbgtctagagtagtatattttccctggggttacgattactttcataataaaaattagagataaggaaaggactcatttattggaaagtgattttaggtaacatttctggaagaaaaatctctatatcttaatagtcacttaatctatgatggattgtgttactcctcagttttcaatggcatatattaaaacatggccctctaaaaagggggcaaatgaaatgagaaactctctgaatgtttttctcccctaggtgaattcacctgctgcttagaagcttattttctcttgatttctgttataatgattgctcttaccctttagttttaagtttcaaaataggagtcatataactttccttaaagctattgactgtctttttgtcctgttttattcaccatgagttatagtgtgacagttaattcttatgaaaattatatagagatggttaaatcatcagaaactgtaaaccaacgattgggaggggaagcggatttttaaatgatttcctgaccaagcttaaccagtatattaaatcctttgtactgttctttggctataaagaaaaaaggtactgtccagcaactgaaacctagctttcttccatttagcataccctttttggagacaaattatgcacagttgcaactcttcgtgaaacctatggtgaaatggctgactgctgtgcaaaacaagaacctgagagaaatgaatgcttcttgcaacacaaagatgacaacccaaacctcccccgattggtgagaccagaggttgatgtgatgtgcactgcttttcatgacaatggagagacatttttgaaaaagtaagtaatcagatgtttatagttcaaaattaaaaagcatggagtaactccataggccaacactctataaaaattaccataacaaaaatattttcaacattaagacttggaagttttgttatgatgattttttaaagaagtagtatttgataccacaaaattctacacagcaaaaaatatgatcaaagatattttgaagtttattgaaacaggatacaatctttctcaaaaatttaagatagacaaattctttaatgtattccgcagatatgtatatatggttgttataattgatttcgttttagtcagcaacattatattgccaaaatttaaccatttatgcacacacacacacacacacacacacttaacccttttttccacatacttaaagaatgacagagacaagaccatcatgtgcaaattgagcttaattggttaattagatatctttggaatttggaggttctggggagaatgtcgattacaattatttctgtaatattgtctgctatagaaaagtgactgtttttcttttttaaaatttagatacttatatgaaattgccagaagacatccttacttttatgccccggaactccttttctttgctaaaaggtataaagctgcttttacagaatgttgccaagctgctgataaagctgcctgcctgttgccaaaggtattatgcacacgaatagaaaaaaagagtttattatccaacctgattttgtccattttgtggctagatttagggaccctgagtgtctgatacaaactttcccacatggtcaaaaaagccttccttttatctgtcttgaaaatctttcatctttgaaggcctacactctcgtttcttcttttaagatttgccaatgctgatctgtcagaggtaatcactgtgcatgtgtttaaagatttcaccactttttctgctggtgatcactatagtgaaatactgaaacttgtttgtcaaattgcacagcaaggggacacagttcttgtttatcttttcatgataatttttagtagggagggaattcaaagtagagaattttactgcatctagatgcctgagttcatgcattcattccataaatatatattatggaatgctttattttcttttctgaggagtttactgatgttggtggaggagagactgaaatgaattatacacaaaatttaaaaattagcaaaattgcagcccctgggatattagcgtactctttctctgacttttctcccacttttaaggctctttttcctggcaatgtttccagttggtttctaactacatagggaattccgctgtgaccagaatgatcgaatgatctttccttttcttagagagcaaaatcattattcgctaaagggagtacttgggaatttaggcataaattatgccttcaaaatttaatttggcacagtctcatctgagcttatggaggggtgtttcatgtagaatttttcttctaattttcatcaaattattcctttttgtagctcgatgaacttcgggatgaagggaaggcttcgtctgccaaacagagactcaagtgtgccagtctccaaaaatttggagaaagagctttcaaagcatggtaaatacttttaaacatagttggcatctttataacgatgtaaatgataatgcttcagtgacaaattgtacatttttctgtattttgcaaagtgctgtcaaatacatttctttggttgtctaacaggtagcactctaatagaggtcaaaatcagaatatcaatgacaatttgacattatttttaatcttttcttttctaaatagttgaataatttagaggacgctgtcctttttgtcctaaaaaaagggacacatatttaagttctatttatttataaaatcttggactcttattctaatggttcattatttttatagagctgtaggcatggttctttatttaattttttaaagttatttttaatttttgtggatatagagtaggtatacatatttacggggtatatgagatattttgatctaagtatacaacatatataatccctttatttaattttatcttccccccaatgatctaaaactatttgcttgtccttttctgtcttatagttaaattcagtcaccaactaagttgaagttacttcttatttttgcatagctccagctctgatcttcatctcatgtttttgcctgagcctctgttttcatattacttagttggttctgggagcatactttaatagccgagtcaagaaaaatactagctgccccgtcacccacactcctcacctgctagtcaacagcaaatcaacacaacaggaaataaaatgaaaataatagacattatgtatgctctctagaaactgtcaattgaactgtatttgctcatcattcctaccatctacaccaccaaaatcaacccaatttatgaaaaaaaaaccgccccaccatacaattctacacagataaacaggctatgattggttttgggaaagcagtcacctttacctgatttaggcaactgtgaaatgactagagaatgccgaaaattagacgtttacatcttgtcatagactttgcagatagtgctggatctttctttttataagtaagatcaataaaaactccctcattctgtagaagttatgatttcttttctaagagacctttagaagtcagaaaaaatgtgtttcccttgcgaaaaaagataactggagtttgtgtagtacttcccagattataaaatgcttttgtatgtattatctaatttaatcctcaaaacttcttcaatttagcatgttgtcatgacactgcagaggctgaagctcagagacgctgagccctctgctaacaagtcctactgctaacaagtgataaagcccgagctggaagtcacatctggactccaaacctgatgcttctcagcctgttgccccttttagagttcctttttaatttctgcttttatgacttgctagatttctacctaccacacacactcttaaatggataattctgccctcaggataagtgattaccatttggttcacaactcgaactaatgaattttaaaaattatttctgtatgtccattttgaattttcttatgagaaatagtatttgcctagtgttttcatataaaatctcgcatgataataccattttgattggcgattttctttttagggcagtagctcgcctgagccagagatttcccaaagctgagtttgcagaagtttccaagttagtgacagatcttaccaaagtccacacggaatgctgccatggagatctgcttgaatgtgctgatgacagggtaaagagtcgtcgatatgctttttggtagcttgcatgctcaagttggtagaatggatgcgtttggtatcattggtgatagctgacagtgggttggattgtcttctgtgctttcgtctgtcctatcttcaatctttccctgcctatggtggtggtacctttctgtttttaacctgctataaattaccagataaacccattcactgatttgtaactcctttcagtcatgctctaactgtaaatgaaggcttaaactgaagtagaacagttacaaggttttacttggcagaacatcttgcaaggtagatgtctaagaagatttttttttctttttttaagacagagtttcgctcttgtttcccaggctggggtgcaatggtgtgatcttggctcagcgcaacctctgcctcctgggttcaagtgattttcatgcctcagcctcccaagtagctgggattacaggcatgcgccaccacacctggctaattttgtatttttagtagaggcggggtttcaccatattgtccagactggtctcgaactcctgacctcaggtgatccacccgccttggcctcccaaagtgctgggattacaggcatgagccaccttgcccagcctaagaagattttttgagggaggtaggtggacttggagaaggtcactacttgaagagatttttggaaatgatgtatttttcttctctatattccttccctaaattcactctgtttgttagatgtgcaaatatttggaatgatatctcttttctcaaaacttataatattttctttctccctttcttcaagattaaacttatgggcaaatactagaatcctaatctctcatggcactttctggaaaatttaaggcggttattttatatatgtaagcagggcctatgactatgatcttgattcatttttcaaaaatcttctatattttatttagttatttggtttcaaaaggcctgcacttaattttgggggattatttggaaaaccagcattgagttttaatgaaaaaaacttaaatgccctaacagtagaaatataaaattaataaataactgagctgagcacctgctactgattagtctattttacttccgtgggaatgtttttgtagtcctatctccatctccaggtttaggagcaaacagagtatgttcatagaaggaatatgtgtatggtcttagaatacaatgaacatgttctgccaacttaataaaggtctgaggagaaagtgtagcaatgtcccttcgtgttgaacaatttccaccaacttacttataggcgccccttgccccgtatatctgtgaaaatcaagattcgctctccagtaaactgaaggaatgctgtgaaaaacctctgttggaaaaatcccactgcattgccgaagtggaaaatgatgagatgcctgctgacttgccttcattagctgctgattttgttgaaagtaaggatgtttgcaaaaactatgctcaggcaaacgatgtcttcctgggcatgtacgtagataagaaattattcttttatagctttggcatgacctcacaacttaggaggatagcctaggcttttctgtggagttcctacaatttccctgctgcccacaatgtttcttcctccttccctttcccacgctttcccaatttttgacatcgttaattcgttgaatacattgtcataacataatacatgttcacggcaaagctcaacattccttactccttaggggtatttctgaaaatacgtctagaaacattttgtgtatatataaattatgtatacttcagtcattcattccaagtgtatttcttgaacatctataatatatgtgtgtgactatgtattgcctgtctatctaactaatctaatctaatctagtctatctatctactctatgcaatgatagcaaagaagtataaaaagaaatatagagtctgacacaggtgctttatatttggtgaaaagaccagaagttcagtatcctggcaatatggtaggcaactcaattacaaaataaatgtttacgtattgtcagaagttgtggtgataaactgcatttttgttgttggattatgataatgcactaaataatatttcctaaaattatgtaccctacaagatttcactcatacagagaagaaagagaatattttaagaacatatctctgcccatctatttatcagaatccttttgagatgtagtttaaatcaaacaacctgttaataaaaataacaagtatcattcatcaaagacttcatatgtgccaagcagtgtgtgttttgtgtagattatgtcatatagttctcataatccaccttccgagacagatactatttattttttgagacagagttttactcttgttgcccaggctggagtgcaatggtgccatctcggctcactataaccttcgcctcccaggttcaagcgattctcctgcctcagcctcctgggattacaggcatgcaccaccatgcctggctaattttgtatttttactagagatggggtttcaccatgttggtcagactggtctcaaactcctgacctctggtgatatgcctgcctcagcctcctaaagtgctgggattacaggcatgagccactgtgcccagccgacagatactattattatttccattctaccgagaaggagactaaggctctgatcatttaaataagttgcctaaggtgatgcagtgatataagtagcagagctaggaattgagccttggtaactttaactctggaccccaagtccttagctactaagctttactgcatggggtttagtcaaattaagacttttggaatatgcgttacttttgagattagctttgtgatattttttgtgctcatttgtccaacaaagtctattttattttcatcttaattcgctttttgtatgaatatccaagaaggcatcctgattactctgtcgtgctgctgctgagacttgccaagacatatgaaaccactctagagaagtgctgtgccggtgcagatcctcatgaatgctatgccaaagtggtaggtttattgttcgcaaaaaatgtagttctttgactgatgattccaataatgagaaagaaaaataatgcaagaatgtaaaatgatatacagtgcaatttagatcttttcttgagatcgtttcaattctggaatcttaaacatgaaagaaaaagtagccttagaatgattaacaaaatttagactagttagaatagaaagatctgaatagagcaatctctacacacttttgatctttttttctctttttcacaatcctgagaacaaaaaaaaattaaatttaaatgttaattagaagatatttaacttagatgtaaagtgagttaacctgattccaggattcatcacgtactagaattagtatcttatggtaaattatagaacctatccctttagaatattttcaaatctttttgaggatgtttaggaatagttttacaagaaattaagttaggagaggaaatctgttctggaggatttttagggttcccactagcatatgtaatggtttctgaactattcagaatcagagaaaactcatttttcctgctttcaagaagctactgtatgccaggcaccatgcacaaacaatgaccaacgtaaaatctctcattttggagagcctggaatctaactggaaaggtgaactaataataatactatgtacaatcatagccatcatttattaaacttttcttctatgcaaggcactgtttaatttccttagcttacctggtttacagagcagctctatgagatgagtgccatctttgcccctattttagggataaggattccgaaatgtggagatggtaagtcaaattgcacaactgaagcatgacttacatgacttggctcaaatactggtcattgaactccagagcctgaatattcttaaccacttacatgatgcaagctgaccaaataaatagttcgaatgtattgtgacagagcggcattgatattcatctattcatgtggctttgagtaggaagaagaaaggatatcattctgaccagagcggtgaaaaacaacctgcatctgatcctgaggcataatactattaacacaattcttttatgtttcagttcgatgaatttaaacctcttgtggaagagcctcagaaatttaatcaaacaaaattgtgagctttttgagcagcttggagagtacaaattccagaatgcgtaagtaatttttattgactgattttttttatcaatttgtaattatttaagacttaatatagagccacctagcatagaacttttcagaatgaaaatacattgcatatttctaatcactctttgtcaagaaagataggagaggagagataaaatagttgatggggtggagaggtctatatttgwatgtagtctaaaaattgttctcttaagattggaagtatgtaggctgggagggtaaataccaaatcttggtatatcagaactgagcatgtcccttgacggttaagaaatagttaatgggcaaatagagcatggcaatattttgtagagcagcaagtagtaggccttgaatagatgtcgctcaaaaagtaatatgtaagctgaacacaaaaatgtaacaaatgaatttagatacatatttgaatattaaattcaggttgtttgggagatgcacctagtctttgatggttaaacctttccctccatagaagagacagagacagaatggcttgctggactaatgtcccaattcaatagagtcttatctacgaaggttaaaaacaagaagagacatattatacagtagatatttcttgtgtggctcatacacatggtgctcttctgattatggattttagagataataacagtgaacaagacatagtttctttcctcgagtagattaaagtcctacattgacttttaatggtgactggcattcttaatacatgattattatatattaggtactatgtcacattaattataatactttactatttttaatttaacccttgaactatccctattgagtcagatatatttccttccattttctacttgtatctttcaagtttagcatatgctgatacatatgaagctctctccaggttttattgaaagaagaaattaatcaatttattactgtccctgaattaggcaactcactttcccaagattatgcccgtggtacaggtggaactcaaagccaagtttaactagttgttcaggagaatgttttctaccctccactaacccactactctgcagatggagataatatgatgaatggaacatagcaacatcttagttgattccggccaagtgttctctgttttatctactatgttagacagtttcttgccttgctgaaaacacatgacttctttttttcaggctattagttcgttacaccaagaaagtaccccaagtgtcaactccaactcttgtagaggtctcaagaaacctaggaaaagtcagcagcaaatgttgtaaacatcctgaagcaaaaagaatgccctgtgcagaagactatgtgagtctttaaaaacatataataaattaataatgaaaaaattttccctttagatattgctaatgctacctttcataagcagaaggaagtaatgtgtgtgtgtgcatgttttgtgcatgtgtgtgtgcatgcacgtgtgtgtatgtgtgatattggcagtcaaggccccgaggatgataattttttttttttttttgagacggagtctcgctttgttgtccaggctggagtgcagtggtgccatctcggctcactgcaacctccgcctcccaagttcaagccattctcctgcctcagcctcccaagtagctgggactacaggtgcatgccaccatgcctggctaattttttgtatttttagtagaaaattttcagcttcacctcttttgaatttctgctctcctgcctgttctttagctatcccgtgggtcctgaaccagttatgtgtgttgcatgaggaaaacgccagtaagtgacagagtccccaaaatgcttgcacagaatccttgggtgaacagggcgaccatgctttttcagctctgggaagttcgatggaaacattacgttccccaaaggagttttaattgcttgaaaacatttcacctttccatggcaggatattatggcacacttttcttgaggaagggaggaggaccaattcaagaaacaaacgtgaggagtatttcattactgcatgtgtttgtagtcttgatagcaagaactgtcaattcaagctagcaactttttcctgaagtagtgattatatttcttagaggaaagtattggagtgttgcccttattatgctgataagagtacccagaataaaatgaataactttttaaagataaaatcctctgttataatattgctaaaattattcagagtaatattgtggattaaagccacaatagaataacatgttagaccatattcagtagaaaaagatgaccaattaactgataaatttgtgcacatggcaaattagttaatgggaaccataggagaatttatttctagatgtaaataattattttaagtttgccctatggtggccccacacatgagacaaacccccaagatgtgacttttgagaatgagacttggataaaaaacatgtagaaatgcaagccctgaagctcaactccctattgctatcacaggggttataattgcataaaatttagctatagaaagttgctgtcatctcttgtgggctgtactcctcgtctaggcttaagagtaatattgcaaaacctgtcatgcccacaccaatctctccctggcattgttgtctttgcagatgtcagtgaacgcgacccagcagctcccatgagtttgcatagccttattttctatagcctccccactattagctttgaagggagcaaagtttaagaaccaaatataaagtttctcatctttatagatgagacccattttaaataaagtccaagataattaaatttttaaggatcatttttagctctttaatagcaataaaactcaatatgacataatatggcacttccaaaatctgaataatatataattgcaatgacatacttcttttcagagatttactgaaaagaaatttgttgacactacataacgtgatgagtggtttatactgattgtttcagttggtcttcccaccaactccatgaaagtggattttattatcctcatcatgcagatgagaatattgagacttatagcggtatgcctggcccaagtactcagagttgcctggctccaagatttataatcttaaatgatgggactaccatccttactctctccatttttctatacgtgagtaatgttttttctgttttttttttttctttttccattcaaactcagtgcacttgttgagctcgtgaaacacaagcccaaggcaacaaaagagcaactgaaagttgttatggatgatttcgcagcttttgtagagaagtgctgcaaggctgacgataaggagacctgctttgccgaggaggtactacagttctcttcattttaatatgtccagtattcatttttgcatgtttggttaggctagggcttacggatttatatatcaaaggaggctttgtacatgtgggcccgggatcttattttacacacaattgtcttacaaaatgactaaaacagcactttgtttttatctcctgctctattgtgccatactgttgaatgtttataatgcatgttctgtttccaaatttgtgatgcttatgaatattaataggaatatttgtaaggcctgaaatattttgatcatgaaatcaaaatattaatttatttaaacatttacttgaaatgtggtggtttgtgatttagttgattttataggctagtgggagaatttacattcaaatgtctaaatcacttaaaatttccctttatggcctgacagtaacttttttttattcatttggggacaactatgtccgtgagcttccatccagagattatagtagtaaattgtaattaaaggctatgatgcacgtgaaatcactttgcaatcatcaatagcttcataaatgttaattttgtatcctaatagtaatgctaatattttcctaacatctgtcatgtctttgtgttcagggtcaaaaacttgttgctgcaagtcaagctgccttaggcttataac

SEQ ID NO: 149345 - DNA, 359 bp, Homo sapiens
  misc_feature (1)...(359): n = a,t,c or g
agtgtgaggaaaccatggttagctattgccttattggaataaagactaaaatgtgaatatttgagaataaagtgtaactcacttaaatctggccataagttttatgtgacgtagttgaannnnnnnnnnnacttactaaattttatgcttttatttcatagatattatgccttaaaagtctcatatttcaaatcctctttggatcgcaaattgcttgagctgttgtggaataaatactgggtgaatacgttgagttcttctagcttgcttactgtaagtactatacttgtaaagaatgcatttgaattttatctaagcttcatagccgtttaatatctgaaacactgtttcacagaaag

SEQ ID NO: 149346 - DNA, 356 bp, Homo sapiens
  misc_feature (1)...(356): n = a,t,c or g
aactggactttgtaaacattaaaaaaaatcttctctttgaaagacgctattaagagaataaaaatacaatctgtgcgctggaagaaaatatttgcaaagcatacatctgataaaggagttgaatccaaatatatataaagaactctcataaatcaataagannnnnnnnnnnnnnnnnnnnnnnnnnnnnnnnnnnnnnnnnnnnnnnnnnnnnnnnnnnnnnnnnnnnnnnnnnnnnnnnnnnnnnnnnnnnnnnnnnnnnnnnnnnnnnnnnnnnnnnnnnnnnnnnnntaccactacacatctattagagtggctaaaatgaaaaagactgattatgtcacatcttggtgagg

SEQ ID NO: 149347 - DNA, 386 bp, Homo sapiens
  misc_feature (1)...(386): n = a,t,c or g
ttagtacccaaacgagcatgatattggcataaaaacacannnnnnnnnnnnnnnnnnnnnnnnnnnnnnnnnnnnatctacacatttatagtcaacctaaattcaggaaaggcaccaagaaaatacactgttgaaaagacagtgtcttccatcnnnnnnnnnnnnnnnnnnnnnnnnnnnnnnnnnnnnnnnnnnnnnnnnnnnnnnnnnnnnnnnnnnnnnnnnnnnnnnnnnnnnnnnnnnnnnnnnnnnnnnnnnnnnnnnnnnnnnntatgcagctaatacaagaaaacactgggaaatgcttcaggacattggttttggcaaagactacttgagtaagacctcaaaagcacaggcaacaaaacaaaaatagactcgtgccg

SEQ ID NO: 149348 - DNA, 419 bp, Homo sapiens
tttagaaggagtctcgctctgtagctcaggctggagtgcagcggcgccatcttggctcactgcaagctccgcctcgcgggttcacgccattttcctgcgtgagcctttctgctagctgggaccacaggagcccgctaccacgccctgctaatttttttgtatttttagtagagacggggtttcacgtgttagccaggatggtctcgatctcctgaccttgtgatcggcccaccttcgggcttccaaagtactgggaatacaggcgtgagccaccgcacctggcccctacttttataaaggatttctcatctttttctttatagacatctttacacgtctctttctctctactatagctttcctgttggtgtatttttgtttctctgttaactataaagttttagagtatttcttttatt

SEQ ID NO: 149349 - DNA, 380 bp, Homo sapiens
  misc_feature (1)...(380): n = a,t,c or g
aattcttggaagaatataacccaccaaaagtgagtcaggaagaaatagnnnnnnnnnnnnnnnnnnnnnnnnnnnnnnnnnnnnnnnnnnnnnnnntgagtagtgacattgaatcagaattaaaaatacatcttccaacaacaataaaaaaaacccaggcccagatggattcactgccaaattctaccaaatgtagaaagatgaactaatatcaaccctcctaaaaattatttcaaaaaatttcactctaactcattctgtgagtgacaaacaacaagataatttgctatcagcattacttggagagcaaaaccagacaaggacacaccacaaaaagaaccctacagactgatatccttgatcaacatacactcgtgccg

SEQ ID NO: 149350 - DNA, 369 bp, Homo sapiens
ccagctttaccctaataaaaaaaaccaaagatattataagaaaagcaaactacaaaacaatgtctctcaggaaaatagctgcagtaatactcaacaaaatattagcaaattaaattgaacatgtataaaaagaattatacaccacaaccaaattagatttatctaggcacgcaagtctggttaaacatttaaaaatgaattaatgtaacccatcacatcaacagactgaagaagaaaaattacatgataatattaatatatgaagaaaaaacatttgacaaaatcaaacacccattcatgataaattcttagtaaactaggaacagagaactttttcaagttgataaagcatatctggagaaagatctg

SEQ ID NO: 149351 - DNA, 373 bp, Homo sapiens
  misc_feature (1)...(373): n = a,t,c or g
tattacctgacatcaagacttaccccaaaagctggagttatttaaccagtatggtaacagtgctcataaaaggtgtggggggaaaaagtgtggtactggcaaaagatgaccccaatagtccaatgggacagaacagagagcccccaaataggcaactgatctttgacaaaggaaattcaatggagaaaagatagtcttttcaacaaatggtgagggaaccattggacagcccccctnnnnnnnnnnnnntcaatctaaacaaagaccttacagccgtcacaaaaataaagtcaaaatgggtcacagacctaaatgtaaaacacaaaactataaaactcctataaggataacataaaagaaaacttagattacc

SEQ ID NO: 149352 - DNA, 345 bp, Homo sapiens
ataaattcaacaacctagatgaaatggataaatttgctgacagacagaaactaccatatcttgctcaggaagaaagacaaaaccttaattgccttatctattaaagaatttgaatgttcaaaaccttcctataagtaagacttctgccccagatgaattaatttgcaaattctatgaaacatttaaaaatgagataatattattactatgcagcctcttccagaaaatggaactttctcaacacattcatgattccaatttgaccctgacacaataaaatctgaaaatgatatcgtacggaagaaaactacagagatatatccctcataaacacatatgcaaaaa

SEQ ID NO: 149353 - DNA, 355 bp, Homo sapiens
  misc_feature (1)...(355): n = a,t,c or g
cgcactcttgccatatcagagtggccttccctgaccacaccctccttggtggtcactctcctcctccccacccagccagcactcttttctcccttcccctgcttacatgccctcaccctctggtaactccatgtttacttgtcaccctctcgtggaatgtgagctcccagcaggcagggccctagttctttccatcagctgtgtcccaagtgcctgaaagggtgctgggcacggcacatgcccagcaaataggggtggaatggtaacccttttcctgtaagtctgaactatccttgggctaggaatcgaccatctcttcttactcactttgtgatgtgggaggctccacggcctn

SEQ ID NO: 149354 - DNA, 515 bp, Homo sapiens
  misc_feature (1)...(515): n = a,t,c or g
accaggcgaccaccgtgaaggncnctatgatgaagcgtttaggcatgtttaacatccagcactgtaagaagctgtccagctgggtgctgctgatgaaatacctgggcaatgcaccgccatcttcttcctgcctgatgaggggaaactacagcacctggaaaatgaactcacccacgatatcatcaccaagttcctgggaaaatgaagacagaaggtctgccagcttacatttacccaaactgtccattactggaacctatgatctgaagagcgtcctggggtcaactggggcatcacttaaggtctttcagcaatggggggctggacctcttccggggttcacagagggagggcacccctngaaggttttccaagggccgtgcattaaggctgtgcttgaaccattcgacgagtaaaggggattgaaggtggttgggggcctgtttttagagggccttaccctgtctattnccccccnaggttcaagtttaacanaccttttgtntttcttaatg

SEQ ID NO: 149355 - DNA, 1498 bp, Homo sapiens
  misc_feature (1)...(1498): n = a,t,c or g
gacaatgccgtcttctgtctcgtggggcatcctcctgctggcaggcctgtgctgcctggtccctgtctccctggctgaggatccccagggagatgctgcccagaagacagatacatcccaccatgatcaggatcacccaaccttcaacaagatcacccccaacctggctgagttcgccttcagcctataccgccagctggcacaccagtccaacagcaccaatatcttcttctccccagtgagcatcgctacagcctttgcaatgctctccctggggaccaaggctgacactcacgatgaaatcctggagggcctgaatttcaacctcacggagattccggaggctcagatccatgaaggcttccaggaactcctccgtaccctcaaccagccagacagccagctccagctgaccaccggcaatggcctgttcctcagcgagggcctgaagctagtggataagtttttggaggatgttaaaaagttgtaccactcagaagccttcactgtcaacttcggggacaccgaagaggccaagaaacagatcaacgtatacgttgggaaggggtcctcaagggaaaaatggtggtttgggtaaagaagctagacagagacacagtttttgctctggtgaattacatcttctttaaaggcaaatgggaccagaccctttgaagtcaaggacaccgaggaagaggacttcccacgtggaccaggcgaccaccgtgaaggtgcctatgatgaagcgtttaggcatgtttaacatccagcactgttaagaagctgtccagctggggtgctgctgattgaaatacctggggcaatgccaccgccatcttcttcctgcctggatgaggggaaactacagcacctggggaaaatgaacttcacccacggattattcattcaccaagtttcctgggaaaattgaaggacaggaaggtcttgcccagctttacattttacccaaaactgttccatttacttgggaaccctattgatcttgaaggagcgttcctggggttcaactgggggcatcacttaagggtctttcagcaaatgggggctgaccctctccgggggtcacagagggaggcacccctgaaagctcttccaaaggcccgtgcataaggctgtgcttgaccatcgacgagaaaggggactgaagcttgcttggggccatgtttttagaggccatacccatgtctatcccccccgaggtcgaagttcaactaaaccctttgtcttcttaatgattgaccaaaataccaagtctcccctctctcatgggaaaagtggtgaatcccacccaaaaataacgtgcctctcggtcctcaacccctcccctccatccctggccccctccctggatgacattaaagaaggggttgagctggaaaaaaaaaaaaaaaaaaaaaaaaaaaaaaaaaaaaaanggggggggggccttttaaaaaaatccttgggggggccaaattttaccgggggtgggaaatta

SEQ ID NO: 149356 - DNA, 368 bp, Homo sapiens
ctttttctgaggtcttaaaagcctcattaactgactattagctgtgtaccccagggagcagaccacactagaagaagttatgagggacccgtgggtgaacagtggtcaggagttgcctttgacaacatgaataacaaatcctggaccacctgaatcccgaaacaacccagcttttggtggccatgggattccaggctgataacctatctgtggcagtcagggagcaattattcagttatgccatggccacctaccttgatttggaacacactttactgaagaagcggtccactatcagatcacagacccttcctcctggggatcccacttggcctctctacattgaagtttgcacctttcgtctttcc

SEQ ID NO: 149357 - DNA, 353 bp, Homo sapiens
ctgagtcacagggaggggtgggcagggcatgcggatgagctggactgagggaggaaggggctgttccagagtgggtggaggtgattccctggtggattcttctcagtcactgtgctgtggtagatgtgtggctccctacagtgtggtcattgtcccctgccgggggctgagtgacccagtgttgctggcaggcctaggaggaaggggggaggaaggcagcctgcccaaactcgagctgtgggcattgctgggactgagcctcctttgtattacttggggctttggggaccggttggggtggaccagggaagctggctggctgctacccctgtcctctgtctgggtttccctgc

SEQ ID NO: 149358 - DNA, 363 bp, Homo sapiens
  misc_feature (1)...(363): n = a,t,c or g
agagaattgtcaaataaataacctaaggttccaccttaggaaaccaaaaaaagaagagtacactaaacctacagcaagcagaaggaaataaatagtaaatattagaatagaaagaaatggaatagagcagaaaaacaatagagnnnnnnnnnnnnnnnnnnnnnnnnnnnnnnnnnnnnnnnnnnnnnnnnnnctcacattcaggtaaatggatggtaggagaggnnnnnnnnnnnnnnnnnnnnnnnnnnnnnnnnnnnnnnnnnagtgacagagaaagagagactagactcattaaaatttagaatgaaagaggagacatcactgctgatcttacagaaattaaataactattagggaaan

SEQ ID NO: 149359 - DNA, 363 bp, Homo sapiens
  misc_feature (1)...(363): n = a,t,c or g
nnnnnnnnnnnnnnnnnnnnnnnnnnnnnnnnnnnnnnnnnnnnnnnnnnnnnnnnnnnnnnnnnnnnnnnnnnnnnnnnnnnnnnnnnnnnnnnnnnnnnnnnnnnnnnnnnnnnnnnctggagagactttaaaacaaaaactgttatcagagcaaaataaggatatttgataataacagggtgaaaccatcaagaagatacaacagttataaacatgtatgcatccaaaaacagcccccaaaaaatacatgaagcaaaaactaacagattggaagagagcagtagttcaaaaacaacagctggagaccttaacatactacttttaataatggataaaactaagcagaagatcaacagggta

SEQ ID NO: 149360 - DNA, 440 bp, Homo sapiens
ctgcccagccattatgatgcctatcagtatgaagcccagatgagagttctttatactcgagccttatctcccctgtgagattccctaaacctacccccaagggccaggatttatccctgtgcccccattacctgtatccccccattgtgggaagccagggcccccctgtccctgtaaggtcctgccttaataaatgccttgttaaaatggagaattcccagtggggaggacagggagccatgagggagagactgggaaaaagaaaaggaggttagctcgaagaagggagagagagaggagggaagggggaaggagggaagagaaggaacaaaggaaggaaagaagggagggaggaaaggggtaagggagaaagagaagaaggctatattatgtgtattcatgggatcgggaacagaagccttgctgtcctcggtgcttag

SEQ ID NO: 149361 - DNA, 355 bp, Homo sapiens
atgaggtgctaatcaataaaaaataggaaaacattagcatgactctactcatttgggaataaataccctgtataatatctaggctttttatagaaaaataattacttaaaagagtataccaggtaacccaggcctgtgaactatatgcctggaacaacccaaatgaccaatgcttacctcctcctttagtaaggcctgttcagcatagaggagcataccctggtgaagactggcaaatagactatactcagatgcccccgtgtaaagggtttaaatattgattagtattcattgacacctttaccgtatggattgaggcttttcctaccaagattgagaaggcaatcaaggttcg

SEQ ID NO: 149362 - DNA, 372 bp, Homo sapiens
  misc_feature (1)...(372): n = a,t,c or g
agaacatcaaaatcggaaaggaagaagtcaaattatccttgtttgcaggtgatgttatatttggaaaaacctaaagactccaccaaaaaactattagaactgataaattcagtaaagttgcagcatactaaatcaacatacagaaatcagtagcatttctatatgccaacagcgaataatctgaaaaagaaatcaggaacataatcccatttacaatagctacannnnnnnnnnnnnnnnnnnnnnnnnnnnnnnnnnnnnnnnnnnnnnnnnnnnnnnnnnnnnnnnnnnnnnnnnnnnnnnnnnnnnnnnnnnnnnnnnnnnnnnnnnnnnnnnnnnnnnnnnnnnnnnnnnnnnnnnnnnnatattgtt

SEQ ID NO: 149363 - DNA, 487 bp, Homo sapiens
taacccctgagaaccactgatttgtcctccatttgaaaaatttgtcataagagtgtcatataaatggagtcgtagaaatgtaaccttttcgattggcctttttgctcagcgtaatgttcgctctgttttgttgctgagtggtctccgtggtgtgggtggactcagcttatttatccatggtgagaaacacacattcacccgtccacacccaaagactgggcttggagacacacagaacagcagaaatgagacttttttctttctctctctttttttttttgagacagagttttgctcttgtcacccagcctggagtgcagaggtgtgatcttggcttgctgcaacctccgtctcctgggttcaagtgattttcctgcttcagtctcccgagtagctgggattacaggcatgcgccaccacgcctggctaattttgtatttttagtacagacggggtttctccatgttggccacgctggtctcgaact

SEQ ID NO: 149364 - DNA, 436 bp, Homo sapiens
ggggacagaagcagagcaacccagctaccagccgggccttgagctccctcagggtgaccaggaagaacctgtgactggctgggaagacagggctggggccgaggttccccaggacgacaggagggagccaaggcactctgctagaggttgagggcctgagtcactcccccttccagtcaccaggaattcctggagagtttgagaaagcaagaaagattctttaagctggttcctgacacaacagctgttaggccactgaagcctgggggagcggccgggtggcatttgtggggtcagctcatcggtgtccacacaggggcctatgccatagtgcggccaacagggaaactgagccctggagagttgcaggggcccagccactgctgcgttgtcagagcaaagtccagccagccccagttctcgtgccgctcgtgcc

SEQ ID NO: 149365 - DNA, 437 bp, Homo sapiens
ccaggtttaagtgtttaatagaggaaactagatatatttaaaagttgattgttcagtcaagaggatacagattaagacagctccaagctccccccacccacccatagaacaaaaagaggaaaaaaaatatgtcatttacttaggtttttttggaattcaaaactgttaactgctgacatgaatggtgtgctatgacctagttatacaagacaaagatggattccaagtcataaggaaaaatccagatctttttaaaaagtcttctccagtcttccaactgtgagtccttgggcctgttgacaaatgttaaacacactgagacgtcctgaactggatggtagagtcaaaggaaaaacattccccatttgcaacaaaggaaaaacccacttggccatttaattccattgcagaaaaatggcttccctcatctgttggcc

SEQ ID NO: 149366 - DNA, 587 bp, Homo sapiens
  misc_feature (1)...(587): n = a,t,c or g
tttcgtggagaggccaacagatgagggaagccatttttctgcaatggaattaaatggccaagtgggtttttcctttgttgcaaatggggaatgtttttcctttgactctaccatccagttcaggacgtctcagtgtgtttaacatttgtcaacaggcccaaggactcacagttggaagactggagaagactttttaaaaagatctggatttttccttatgacttggaatccatctttgtcttgtataactaggtcatagcacaccattcatgtcagcagttaacagttttgaattccaaaaaaacctaaagcagtaaacagtcctcagcgaagccgcctttttgcctacccaaccctgggaaagtttgcagaagtggaaggagcagaacgtgagggtgtaacttacaaaaaggttctgggccggagaaggggcgacgtttcgggcacccccccgaatggacaatctttccttctgttcaacggcaggggcaggcctagtttgactctgacagtcctcccactaacggaattcctggtgaatggaagggggantgacatcaggccctcaaccctctaagcaggtaaag

SEQ ID NO: 149367 - DNA, 1165 bp, Homo sapiens
  misc_feature (1)...(1165): n = a,t,c or g
ttgcgctggcaacgcgaagaaggacaaaaggccggcgtccatgttggcaccatgacgcagcatctccgcccgcagcccggagctgctgtcctcccggccgcgctcgctcctcctcccaaacaccagttttctttacaggcttcgagcccgtcgcggctgggccgggctggtctggcaggcgggcccagccgggcagggctgctttgctaatggcggcggctctctttccttccttcctcctttcctccgtccccccggtcgtggggagcccggagcaggaggcgggcccgcggccaggtcgggccccgagagcccgcggggcgcagcgctggcgaccggggtgtcgggggccggttcgggggcccgttggccctttccttttttgcaacaggtttattgagagccagttgtgctccagctttccaggaggtcacagtcttagggaaagcagtgcaatggaggttggaaccaggggaaccctttactgaaggctgagcgctggctggcacactaggcctgggaaaacattganagggcaggcagggaaagtaggggtgggggtaacccagcctggcaaatgcacggcagctaggaaaacctcttcaggttctggggtggctgggccatgtagaggggaggccaggcagggctgtcaaggtaaccggggtcagatcatggagttgcctgccaggctccacaggagtcggggacagaagcagagcaacccagctaccagccgggccctgagtttccctcagggttgaccagggagaagctgtgactggctggggaggcagggctggggcccgaggttccccaggacgacaggagggagccaaggcactctgctagaggttgagggcctgagtcactcccccttccagtcaccaggaattccttagtgggaggactgtcagagtcaaactaggcctgcccctgccgttgacagaaggaaagattgtccattcggggggtgcccgaacgtcgccccttctccggcccagaacctggccgcgggcccgcctcctgctccgggctccccacgaccggggggacggaggaaaggaggaaggaaggaaagagagccgccgccattagcaaagcagccctgcccggctgggcccgcctgccagaccagcccggcccagccgcgacgggctcgaag

SEQ ID NO: 149368 - DNA, 389 bp, Homo sapiens
  misc_feature (1)...(389): n = a,t,c or g
gaagaaactctacccctatttgcagatgacatgatcctttatattattaaaaaaaaacaaaaaacaaaaaaaaccactaaggaatctactaaaagatattagaactaataaatgagacgtgtttggaaaggttgcgggatacaaagtcaacacacaaaaatctataaattagcaatatacaatctaaaaagtgaaactaannnnnnnnnnnnnnnnnnnnccaaaagaacaaaataggaataaatttaacaaaagaaatacaaaatgtatactctgaaaactacaaaacattgaaagaaattaaagatctaaataaataggaaagcataccatgctcacagatcagaagatttaacattgttaagatgacagtgctccttaaattaatc

SEQ ID NO: 149369 - DNA, 346 bp, Homo sapiens
cgtgcctgcctgtagttccagttacttgggaggctgaggcagggggatggcttgagcctgggaattcgaggatgcagtgggccaggatggcaccaccacagcccagcctgggcaacagagaaagaccctgtctcaaaaacaaacaaacaaaacataaaacaccaagaaaaagccctctgtccagagatgaaaaaattctcagggagaaaagggaagaggaaaagatattagcttatcactacctagaaaaatctgctatttatagtattagttttttttttttaactaaacatatactgaatactccagtatgctggttctcatcagaacatataatctatttttc

SEQ ID NO: 149370 - DNA, 468 bp, Homo sapiens
ctttccttccctcccttccttcttttcaagatttctgttttgcattatcactgtgatgtgtctaggtgttagatccactttcattatcctacttgacactcattttgattcctcatcttaaaattgagtttaattttgaaaagttgtaaaccactttttcttctgatgcttctcctcctctttctcctcttatgacacctattagatgtgtcttgggcccttttattttcttccatgtctcagtttctcatctgtatttcactttttatctctgtgctgcattataggtaatctcttcagatatatctttaagttcattaattttgagctgtgcttgttatgttctctatacttaagatcttttttatttctagaaattttctctggttattttttaaatctactgattctttttaagtattatgctttcattatgagtttttttccatttaaaacatttcatattct

SEQ ID NO: 149371 - DNA, 375 bp, Homo sapiens
caagaaatctgaaactaataagtgagtattgcaagatttcaggataaaaggttaatatagaaaatcaatgttttcctatatatcagcaatggacaagtggaatttgaaattaaaaacacaataccattgtgagcacacacctaaaaaatgaaatacttagatataaacgtaacaaaatatgtacaagatccatatgaagaaaactacaaaattctgatgaaaaaaatcaaagaacagatggagatattccatgtttatagatagaagattgaataccaagacgtcagttcttcccaacttggaataatagattactgcaatcccaataaaaattccagcaagttattttgtagacacaaactgattatgaagttt

SEQ ID NO: 149372 - DNA, 755 bp, Homo sapiens
gaagaaagcatccttgaagaaagttttagaagctttaacttcagctggtgaagaaaaaaaaattgacagatttttttgtattgtggaaggcctccggcacaattcagttcaactgcaagtagcttgtatgcagctcaacaatggcctgggtacatcttccggagaattggaattcaagcttcacatcaaaaatgaatttatgccttgtggattgaaagaaatattgcccaatttaaaatgccttaagaatgatggcctggatatccaacttaaaggctttgatgagcataaaaaagaagatttggttgagttatcccatcgccttgaagatattagagctgaacttgatgaagcatattatgtttacaacatggtgtggagcacagtttaagaaactagagccgagggatattttatttctattcttcagcatcttttgctgattcgaaatgattattttataaggcaacaatacttcaaattaattgatgagtgtgtatcccacattgtattgcatagagatggaatggatccagacttcacatatcgaaaaagactaaatttagatttaacccagtttgtagacatttggcgtagatcaagccaaaactaaaagagtttgaagagaaagcattagaactttacaagaaatttgaaaaagagtttacccgacccccaagaaaactcacgctgaaattgcgcaaaaaaagaggcccagatttatgggccttttaacccaaattccaaaactttta

SEQ ID NO: 149373 - DNA, 591 bp, Homo sapiens
ctctaaagtagaagtcctgcgattgggcagaaaggttagtaaccctagtcggaatcgtactttaaaaatctatcaaacagttactacaagcagctgtcaccgatgggaggctatttgaatagttgggcgcacactcttactgagtggatcatagataacatactggaccagctcatcttccccaagctgcaaaaggaggtgggatgagagtcatgggaaacagtcgtcatcactaatcacagggacttgttcagtctgtggcttcattatctcagtgctgttaaaacgcctggaattaacggaatttgtcaacacaactattgacctatagtgttaattccagcctttttctcagcactttttcccccaagccaccctcaggagggaattcattttcttgattttgtcactaaaattagaattgtgctgtttctgagatgtaatcaaatggatgggcatatttgtttggcaatgtacaaaggactgtgggcctcagagagcacagggcctccttcaggggcagctcttgcctttatccacacaggggtgttatgtgactgccccacaggcgacatgatcctgtttctcctg

SEQ ID NO: 149374 - DNA, 375 bp, Homo sapiens
gatgtcatccccattgccaagcccttggtccccttgtctcctcccgggccaagcccctgggcccacacttcctgtcccgccagctgagaccctttcagtttctcctgcctgttttctccgccttcctatcaatcccagtcccagccagtgagccccggcctggagacagctcactgctgactggggaggtcacagcgccctggggcttccaggctgtcctgggccctcaatacacatggccctcacactcagcatctcacctcctacctcaaaggaaccaggggccacccatgcttggatacgctcatcttccaggccacctacccacaaacgtgctgccaagtgggcacacccctgccctggagcgccccaagt

SEQ ID NO: 149375 - DNA, 461 bp, Homo sapiens
ggcagagtcttgctctgtcgcccaggctggagtgcagtggtgcgatcttggctcactgccacttctgcctcctgggttcacgtgattcttctgcctcagcctcccgagtagctgggactacaggagcccgccaccaacgcccagctaatttttgtatttttagtagagatggggtttcaccatcttggccaggcgggtctcgaactcctgaccttgtgatccgcacaccttggcctcccaaagtgctgggattacaggcatgaaccaccacgcccagctcagagaccaaaattaaagaatctcaagtaattaactactgtagccaggtttacaatatagtaccagagtctcagggatggaaggaattcatcatacaagatcctggtcaccttaacctggcctcacaaaagccatcttttcaaaattgaaccatcactataaaaagaaaattggtgtcagtg

SEQ ID NO: 149376 - DNA, 365 bp, Homo sapiens
  misc_feature (1)...(365): n = a,t,c or g
ctggcgcttacgggtactggctacattcccctaccaagccttggcgaatcggctccttgaaatagttacgagacgagcagcagcatgggggaccctggacgagccctttgtctcgtcctcccacggggaaacgggccagagggaggagtgcctgtccccagctcacgcactgacctggaactgcagccaggaaaggagccagccctggaaggtccagggccctagctctccccactaggtgtcctggcccagcctgtggtgggagggagccgagactgcaggcgaggggcgtccccagtgaatcccacccagaagaggaccccatggggctccctcagggctaccaccagggcctgtgggttgcn

SEQ ID NO: 149377 - DNA, 345 bp, Homo sapiens
gcaaaagaggaacgcctcttgcaggtgaaatggccgaaggccactgtctcctgcttgcccctgggaactgaatatctcactgtataacccgattgttcatttgttcaactctgagataggataaaagctgccctgtggcgataggtgagacatgtttacagtattactgcctcgatattctttactccactgagatgtttgtgtggagagaaacatatatctggcctacgtgcacgttcaggcatagtactttcccttgaacttaatcatggcatagattcttttgctcacatgtaatcctgtgaccttatccttattatcaaccctgctctcctactacatctc

SEQ ID NO: 149378 - DNA, 464 bp, Homo sapiens
taaaagaggaaagcctcttgcaggtgagatggaggaaggccactgtctcctgcttgcccctgggaactgaatatctcagtgtaaaacccgattgtacatttgttcaactctgagataggagaaaagctgccctgtggcgggaggtgagacatgtttacagtaatactgcctcgttattctttactccactgagatgtttgggtggagagaaacataaatctggcctacgtgcacgtccaggcatagtactttcccttgaacttaatcatggtatagattcttttgctcacatgtaatttgttgaccttctccttattatcaccctgctctcctactacattccttttcgctgaaataatgaaaaataataatcaataaaaactgagggaactcagaggtcggtgccggtgcaggtccttggtgtgctgagcgccggtcccctggacccactgttgtttctctaa

SEQ ID NO: 149379 - DNA, 339 bp, Homo sapiens
cagaggtctgttaaaatatccatctctgagaatggaaattctcatatggaaattgtttctttctcccttatattctgtcaatttttgcttcatgtattttgtagtatacacatttatgactgttatatcttcctgttgatttgatatcctattaataggcaatgcctctttgcatactaatacagtgatattaaattctactctgatattaatatagctacttcttatgcttactatgtatgtctttttatccactttcaacctgtatttatatgggtttggtctttatattttaaatgcatctcatgtagatagagcacatggttaggtctttttatc

SEQ ID NO: 149380 - DNA, 896 bp, Homo sapiens
aggccggtggcccacgcagcccaccagcttgcagggagggcagaccctgggggatgtgagggaggctttctcacgcagaccctaaaacggtgagcgccagggagccccgcctgcttgtcccctccccagatccctcgggctctggagaccttgcgggccccctgtccgtgaccacctgaaacaggtcctggagctgctactgctggcttaggctggttggtggaaaggatccagggctgttgtgaaggccttggggagtccagaagccgcctggcaccttctgggtccagacgctgcccttcagccctgccatttcagccagcctcagcgtcgctgtagaggcaggccgccctttctgccactgtctggctgggctgggccgtgggagtgctggccaacgtgccaggcagggaggacctgaattcctgaaggtggtggtggcagctgttagggtccacaggttaatgatctccaacgtcacacagaagagaatgtgctgaggtgtgacctccctcaccctgccttggctgcgtggggcaccgtctctccaggactcaccctgccccccaatagactgaagtctgaagatcagcccagtcttccttcaggcctcaatgccctctcacttccccagcccgagggactcctggctcttctcggaggctgctctgtggggtccctcccttgggcctttgctaatgctgtgccctctgcctgtgccagaggtgggcctgggcccgtttctcagggagctcctgaacaccaagaaattgaattgctttgtaaataaacaaaaagtgccaaacaagcctgcctgtcacttgggagatggcccgtctctgccccaccaaatttgctaatcaaacaaataacctaaaatagaatagaaagaactc

SEQ ID NO: 149381 - DNA, 626 bp, Homo sapiens
ctcaattaccatggtacatttttatctgaaatgcttgacctttattttgatttcataaaattcatagttggagaagtagattcacatatccaagttgttccaattatataatagttttccaaaaactgagatgggtgtccattttttaagtaagtaaagatgcaggtctggttatgttgaccaagttgctgggttgttttgttttgttttgagacagagtctcacctttgtcacccaggctggagtgcagtggcatgacctcagctcactgcaacctctgcctcccaggttcaactgattctcttgcatcatcctcctgagtagctgggactacaggtgtatgccaccatgcctggctaattttggtatttttctcagagacggggtttcaccatgttgggcatgctggtcttgaactgctgacctcaggtgatccgcccacctcggcctcccaaagtgctggtattacaggcatggggccaccacacctggggctcagctgttcaattaaaaagtaaatacaacttaaaattctatgtttccattggcagtagtgcaacattaatactggagtagccacatgtgattagtggctatggtattggacagggaaggtacagaatact

SEQ ID NO: 149382 - DNA, 367 bp, Homo sapiens
ggctcacttttgccacttctgttcaacataatattggaagttttagctaaagcaatcaggcaagaaaaaagcatccaaaatgaaaaggaaaaagtataattatctctgctgacagatcacatgatctcatgtaaaaccctacagttaaaaagttaactacctgaaagctataaaatgttgctgaaaggaaattttaaaagacataaagacatcctgtattcatggataggaagactcactattgatgtcagttttattgtatattgatgtcagttttatctatagccctcagtgcactctcaaagcagtcaattattttgtggatggtgaccccattactataaaaattattatggaatctcgtgca

SEQ ID NO: 149383 - DNA, 516 bp, Homo sapiens
gcaaaatccatgtatttctgaacgacagtactgctgtgagaagctgccattagagagatccagcaggccccaggactcagctggccagccggtgacactgctcactgctcattgtcctcaactgtggacctctgtccccctctgctggccactcacagaatttcctgctggcactgacaagatgaagtccaaggaggaagagactgctgtcgataagggagacctggtggccctgagcctccccgccggccatggtgacaccgacggccccatcagcctggacgtgcccgatggggcaccggacccccagcggaccaaggccgccattgaccacctgcaccaaaagatcctgaagatcaccgagcagatcaagattgagcaggaggctcgcgacgacaatgtggcagagtatctgaaactggccaacaacgcggacaagcaacaggtgtcacgcattaagcaagtggtccagaagaagaacccagaagcagctcagaccatcggccagctggacaa

SEQ ID NO: 149384 - DNA, 406 bp, Homo sapiens
tctggcccatagaaaggactctggataaactgaagctgtcaccaaacgtaggcctaaattcaatgcataggaactcagaggcagcatctacaaaagctgagggtgcacaggtttctaagtgggttctaagagggttctaagaggacccagtaatgcactgatatccaaggttatccagggtctcgctctgtcgcccaggctggagtgcagtggcacaatcttctgcctcagcctcccaagtagctgggactacaggcgcccactgccacgcccagctaattttttgtatttttaggagagacggggtttcaccgtgttagccaggatggtctcaatctcctgaccttgtgatccgcccgcctcagcctcccaaggtgctgggattacaggcgtgagccaccgcacc

SEQ ID NO: 149385 - DNA, 429 bp, Homo sapiens
gctcgacttgagactaattctcgctctgtcgcccacggtggagtgcaatgccatgatctcagctcacagcaacctccgcctcccgggttcaagggattctctggcctcagcctcccaagtagctgggactacaggcgtccaccgccatgcccacgctaattttagtatttttattagagacggggtttcaccgtgttagccaggatggtctcgatctcatgaccttgtgatccgcccgccttggcctcccaaagtgctgggattacaggcctgagccactgcgcccggcagagagggagtctcactctatcgccccgggctggagggcagtggttccatctcggctcactgcaacctccgcctcccaggttcaagtgattctcctgcctcagcctcccgagtagctgggatcacaggtgcccagtcgac

SEQ ID NO: 149386 - DNA, 1787 bp, Homo sapiens; identical to SEQ ID NO: 144180

SEQ ID NO: 149387 - DNA, 1553 bp, Homo sapiens; identical to SEQ ID NO: 144181

SEQ ID NO: 149388 - DNA, 1862 bp, Homo sapiens; identical to SEQ ID NO: 147222

SEQ ID NO: 149389 - DNA, 1295 bp, Homo sapiens; identical to SEQ ID NO: 144182

SEQ ID NO: 149390 - DNA, 1149 bp, Homo sapiens; identical to SEQ ID NO: 148133

SEQ ID NO: 149391 - DNA, 9234 bp, Homo sapiens; identical to SEQ ID NO: 145209

SEQ ID NO: 149392 - DNA, 2372 bp, Homo sapiens; identical to SEQ ID NO: 148135

SEQ ID NO: 149393 - DNA, 411 bp, Homo sapiens
tttttttttttttgagaaagagtctcggtctgtcaccaggctggagtgcagtggcgcggtctccgctcactgcaacctccgcctcccaggttcaagcgattctcctgccttagcctcctgagtagctgggactacaggtgtgtgccaccacgcccagctactttttgtatttttagtagagatggggtttcaccacgttggccaggatggtctccatctcttgaccttgtgatccgcctgcctcggcctcccaaagtgctgggattacaggcataagccaccgcgcccagcctattaagtattaactcacatgatcacaaggtcccataataggccatctgcaagctgaggtgcaaggagagccagtccaagtcccgaaactgaacctggagtctgatgttggaaggcaag

SEQ ID NO: 149394 - DNA, 2114 bp, Homo sapiens
gcacgaggttcgagagcgcgcagagtccagactggcggcagggcccgaggggccgacccgcagcgtccctggtctctccagccctcactcggaaccgcactgacaataccctcccctcccttgggctggacccctctctacagctaggagccaatggcagaagacaaaaccaaaccgagtgagttggaccaagggaagtatgatgctgatgacaacgtgaagatcatctgcctgggagacagcgcagtgggcaaatccaaactcatggagagatttctcatggatggctttcagccacagcagctgtccacgtacgccctgaccctgtacaagcacacagccacggtagatggcaagaccatccttgtggacttttgggacacggcaggccaggagcggttccagagcatgcatgcctcctactaccacaaggcccatgcctgcatcatggtgtttgatatacagaggaaagtcacctataggaacctgagcacctggtatacagagcttcgggagttcaggccagagatcccatgcatcgtggtggccaataaaattgatgacataaacgtgacccaaaaaagcttcaattttgccaagaagttctccctgcccctgtatttcgtctcggctgctgatggtaccaatgttgtgaagctcttcaatgatgcaattcgattagctgtgtcttacaaacagaactcccaggacttcatggatgagatttttcaggagctcgagaacttcagcttggagcaggaagaggaggacgtgccagaccaggaacagagcagcagcatcgagaccccatcagaggaggtggcctctccccacagctgaggggctggggctaggggtgggtggagcccttttaaaatacccttcccttcaacaactctccagctctgaatggagaaactctctaggccatcccctcttctacctcctgcaacccacccatcctattagcctcccacattcaaggcccgtgatacagggatgaggtcagcaccagcaaactctggactggtggaagaattccccaccagatctccttgaagcagaattagggatcagcatcattaacaccttccccaccccctccccccaggcagacagtgaagagaatcagaaaacatgattatgtgtcactttaatacaggaaatttaggtgttttttggtgtttttgtttttgtttttgtttttgttttctttccaaagctcacctcggggacaattccttgggcttctcctgaggtaatgatttacccccccacccacagctgagtctgtgaggccccatcctttccctacgttttctcccatcttttttcctcttcagtctcccagtcatctggtttgtttgtttctttgttcgttctgagacggagtctcgctctgtcgccaggctggagtgcagtggcgcagtctcggctcgctgcaacctctgactccctggttcaaacgattctcctgcctcagcctcccgagtggctggcatcaccacgcccagctaatttttgtatttttagtagagacggggtttcaccatgttgcccaggatggtctcgatctcctcacctcgtgatccgcccgcctcggcctcccaaagtgctgggattacaggcatgagccaccgcgcccggccccaatcatctgtttttaaacaatcgtttttgagcagatagctattcattccagattttcgtgtacccattctgtttcaggagctcttctaggtaaagctgagatcacaggaacagcaggtgacaggcctagctatagttaggaatacacaagccgtaaaatcgagtccttacagccataccacaaggtacgtccatttggactacaagaagagcttcctttaaagttcctatttcagcataaagaggctgtcctttttttttgaggaatagtttggaccttgtgcctcctgtgggaggctgaggactgcaagaggagagctagcagatatgcctgttcacccctctctggtacttgtggcttgctagtatgtttttatgataatctcgggcattgtttgcattgtgtttattaatagggttttgtttttattgtttccttttttacagtaaaggctgaattacat

SEQ ID NO: 149395 - DNA, 1401 bp, Homo sapiens
gggaaaagagtaaaccttgccatatgggatacggcaggtcaagagagattccatgcattgggtccaatttactacagagattcaaatggagcgattttagtttatgacataacagatgaagattcttttcagaaggtaaaaaactgggtcaaagaattacggaaaatgttgggaaatgaaatctgtttatgtatagttggtaataaaatagacttggaaaaggagagacatgtttccattcaagaagcagagtcgtatgcagaatctgtgggagcaaaacattatcatacttcagccaaacagaacaaaggaattgaggaactctttcttgacctttgtaaaaggatgatagaaacagcacaagtggatgagagagcaaaaggcaatggctctagtcagccgggaactgcaaggcgaggtgtacagattattgatgatgaacctcaagcccagaccagtggtggagggtgctgttcttctggataactgttcacgcctaagaaattaaaagacagaacaaaactgtggatcattgccctcaacatgaagactgccatattccaagtcacattattttaccaatggaattatagaattaacagtattttaaattacgtttataacactgcagagaccttaagtgctaaacttagtggagtttgtgaccagagaattggcattttctacaaatgtttttttttgttttttttttgtttttttttgtttttttttgagacggagtctcgctctgtcacccaggctggagtgcactggcttgatctcggctcactgcaagctccacctcccaggttcacgccattctcctgcctcagcctcccgagtagctgggactataggcgcccaccacgacgcccggctaattttttgtatttttagtagagacggggtttcaccaggttagccaggatggtctcgatctcctgaccttgtgatccgcccgcctcggcctcccaaagtgctgggattacaggcgtgagccaccgtgcccggcctacaaatgttaacaaagcaattaccaatggcctttttacatattttttctttaatgaggaataatatgcatgtaggaaaagacctactttaaagtcttcatttatattctttcaaatcaaatctttattttaataacttatatatgttgttggaatgggttacattttttgcaggcccttgtattttgtgggtagttttaaattgtattcacttcttaaacagcaaactgtttttgtttttaattagcagatatctgaagtactatttttgcagggtttgcacaggcccgtaactgtctactactttgatataatctgtatacatcctgtatgctgagctggtaaaatacattgtaaattacatattaaatattttatctgcttttac

SEQ ID NO: 149396 - DNA, 9802 bp, Homo sapiens
  misc_feature (1)...(9802): n = a,t,c or g
cagtaaaaatatagcacagggccgggcgcggtggctcaggcctgtgatcccagcccaggctggcggatcacctgcggtcaggagttcaagaccagcctggccaacatggtgaaaccccgtctctactaaaaatacaaaaaatttaggtgggcgtggtggtatacgcctgtaatcccagctactcgggaggctgaggcaggagaattgcttgaacctggagaaggaggttgcagtgagccgagtttctgccactgcactccagcctggggaaagagtgtgaccgtctcaaaaaaaaaaaattatatatatataaatatgtgtgtgtatatatgtatattatatatgtatgtattatatgtatgtatattatatatatatagtacacaaggttataagtggtgcacccgaagaggagggcacttaccatgaatggagcttgctgagctggaagttgccctggttgagtcggtgactgaatgtgaaggcctcagacattacactactggagactttataatctgtacacctaggctacactaaatttataaaaatatatttttcttcagaataaatcaaccttagcttactgtaactttataaactttttacttcgactgttgtaataatacttagcttaaaacaaacacattatttagctgtacgtaaatattttctctgcttatctccttatttataagttttctattttaaaattttttaatttttttcttaaaaaatttttttttgttaactaagacacaaacacagcacacacagtagccttgacctacacagggtcaggatcatcaagacatcactaggagataggaatttttcagctctgttataatcttatgggggccaccatcacatacgcagtctgtacttgcaaaacattatgtggcatgtgactgtaattgtagacctaaaatccatttcctacctgccctaatttcggtctttattttaaacccttgtttcatttattcttggggaaaattcccaaatcctgtgtttgtttttttagtaattattttgccaaagaaacataagaagaaaaaggagcggaagtcattgccagaagaagatgtagccgtgagtagtaatgtgtttgacttcactttgactaaaaagaaagtttacttaaataacaaactaaaggaaagaagtgtttttaaaggtttccaaggaatgggccagcattggtagtcattgtgtagattcgaaaaagcactgaaatgacacagccccagacagtccaagtgtccttcaggcatagcttactaaatggtgctggccttaccaactgctgtctctgaatttgtcttccttatgccacccacagacccgccatccccctttctctttaaatgtttggacccatcttagtgacatttcacttcccctctgtactcctggttcatttcttctctctctttcccttggaggtcccagtgaaaaggcataggaagccttgttttctgtttaaaaggcatacatttccatggcagtaatggaattgttcaaaatcgggtgggaagtttaataggttatatttctgtcctgtcgaaggaaatacaacacgctgaagaatttcttatcaaacctgaatccaaagttgctaagttggacacgtctcagtggccccttttgctaaaggtatgtggttaaaatcgtgcatcagatgaatgcctgcttttacgttatttccaagtgttaaacaattgattgagaatgcttactgctggcatccttgactttgggaagtgcccactgatacagtttaaagcaggattccttaaggtatctgaaatgagaaccaagtttttaaaaaattggcagtgcactcaacactgttgtagaacacatgtccccacaatgttaaattgctgagtttgtcaacagttctcagtttttgtacttagtccatcttgcagacctatgccagtttgtgggccacatagtggtactgactctttttttacatgtgctcacgacatggtattttgttttgtgttgtgtcgttgctttgtagaattttgataagctgaatgtaaggacaacacactatacacctcttgcatgtggttaaaatcctctgaagagagagattggggactatatcaggtaagtgttgggaggaggcactgtgcaaacttactttcttttgaaaatgctttcacatcagctattcaggaaggcagtggcatgccagaatagctttgtcttgaatatataacctgtacccgcagtgaattatttttctttttaacttttcagatttgttgtttcactggagcattaagagtgggtgatacattaattttttttttttccattccaggacaggtttcattaatcttgacaagccctctaacccctcttcccatgaggtggtagcctggattcgacggatacttcgggtggagaagacagggcacagtggtactctggatcccaaggtgactggttgtttaatcgtgtgcatagaacgagccactcgcttggtgaagtcacaacagagtgcaggtatgtgggagagggagggaaggactggctagagtgaaaagctttctgtatttcccttctatgttttgtctgctggaaactatttcttcattaagaaaaaaaaaaatcctaaagcaaggatattgttttggtttctgtgtacgttctgtcccctgccagatcttggtggtccgcgctttttggaattccacatactaagcatgtattcatcaagctgactggatccatttgtccgggttcagctctcagcttgtcactccaggcttctcactctgtgctaccgcttctgcctaaagtatccttcgttcatttttatctgagaaaagcctgcttatcttgcaaggctttttccacgcagcttctacactgagtactcccaactgtccctgttagtacattgaattcccagtgagaaagtgtcttcattctttcccacatcatcaccatgaaatctctcttaatgcaaattttatagaaacacaaggtcaaactgccgcttttcctgctgtgcaaaatgggagtgactgagcatataagaaatatggaaaacagaaaactcagtggccacacctgactactcttttgtcatttttcaggcaaagagtatgtggggattgtccggctgcacaatgctattgaaggggggacccagctttctagggtaagtctgcaattgtagggaggacaccctttgttgacttggatctctgagcccctaaacatctggagatgggttagctgtcctgactgactccttttgtccccttttcagtcggctgctgcagccagcctggaccagtgactgcacatgtacattctgatgaggtgtttgttttcatttgtgtttgttcttaggccctagaaactctgacaggtgccttattccagcgacccccacttattgctgcagtaaagaggcagctccgagtgaggaccatctacgagagcaaaatgattgaatacgatcctgaaagaagattaggtgagtcattaggcctgtgagtgggtatgaacacattcttcaggattctgttctcttattaaaagtagatgcccttgaagttgaagactttctaaaacctgccctacagctgggatattgtctgtgggcgatagtttttgttatcttttgttgaaaaagtgaacagtgcctagtaaagtgagatggcttttacaccttttatgatgactgcttctgctggagttgaaatgttttcattctgcatttgtgtagttcggtgctttgttcaaaggtaagtgttttcaccaaagtatgttttgcatgtgttttttatttgctgcaattttgactgcttagaagtttctgttgtcagaagtaaatttaagacaatgccaattttcctcccatccatgaaacataccatgctgaatatacctgcaacttaagtgttaaaaattctgctaatatcagaattacagatctttttttttttttttttttttttgagacggagtctcgctctgtcgcccaggctggagtgcggtggcatgatctcggctcactgcaaactctgtctcccgggttcacaccattttcctgcctcagcctcccaagtagctgggactataggcgcccgccatcatgcccggctaattttttgtacatttagtagagacggggtttcaccatgttagccaggatggtcttgacctcctgacgtcgtgatccacccgcctctgcctcccaaagtgctggaattacaggcgtgagccaccgtgcctggccagaattacagatctttacagcaaatgcttatattttaagaagtgtgtctgtcacctctagtcttggtggctcagatgaaggataactgcatttctcaaccagtgatgtatttacagtaggtgctgcttttcttttgtgtgtgtgtatcttaggaatcttttgggtgagttgtgaggctgacacctacagtcggacattatgtgtgcaccttggtttgttattgggagttggtggtcagatgcaggagcttcggagggttcgttctggagtcatgagtgaaaaggtatgtgttacggggctagaagttttagagctggttcttaccatctgccagcctttgatggcactccacttgcttcatgtcgtgggaaagatgctttccaaagtgttgagttcagtccagggcagcttccctgttctgttaattaaactttgggacattaaaatgggctaagggagatgattgggtagaaagtattattctattcatttgcctcccagcctacaaaaatgcctgcttggggtctaatacttcaacggttaaagatgcctggaagagggcgcggtggctcacgcctgtaatcccagcactttgggaggccgaggcgggtggatcatgaggtcaggagatcgagaccatcctggctaacaaggtgaaaccccgtctctactaaaaatacaaaaaaaattagccgggcgcggtggcgggcgcctgtagtcccagctactcgggaggctgaggcaggagaatggcgtgaacccgggaagcggagcttgcagtgagccgagattgcgccactgcagtccgcagtccgaacctgggcgacagagcgagactccgtctcaaaaaaaaaaaaaaaaaaaaaaaaagatgcctggaagagccaggactgaagaggctgaaaacataatgagcttggactagtaaacaagtgacattcagttttaggaagtttggggtctgatgggctgagatacaaataaactgaattattttcatacatggctgcttttcaggaccacatggtgacaatgcatgatgtgcttgatgctcagtggctgtatgataaccacaaggatgagagttacctacggcgagttgtttaccctttggaaaagctgttgacatctcataaacggctggttatgaaagacagtgcagtaagttccgggttaggagtttatatttggaaagaacgtactccaaagatgacgcttgctctttttattgttttccttgggttttattttatttttttcaagtccaaaccaagtatattaatttaaagtaaaagtttaatggtaggcatacttaaaaataaggcacattaggccaggcacagtggctgatgcctataatcctagcactttggcaggctgaggcaagaggatcacttgagtccaggaaggagtttgagaccagcttgagcccaggagatcaaggctgtgagctgtgtttttatgatgatcagagagttggccttttataaattaaaacattgtctttttctctaacttgagggataaaaatttctggatatttaaaatgtttgtagttggtaattatttatattcaaatcttgtatagatgttcacattttttgtatgtgtataggctgtaataaatactgaaagatggcaccataatagttgaaaaaactcagtcacaaaacagtggacaacataaatgtgatgtcctctccttatcaaaccattggcttctgggtgaatgtaaagggaggggagaatgtgatcaaaagaggtctaggtgagtggagatggtatgaggcagatgggtgcattgggtaccattgaacctctggagaggtagccttaacttgtacccactgacctataaattctgcaccaagacttttgtgtgattggttcaacagggctcagtaatcttgttctcaagttctttaagagcctgttattgcctggatctccagtaaatctgttctttctcctcataaggaggagagaggagtaattaaggaatgccaaggctatttttatgtttcaaatgaaaatatggaccacgtgcggtggctcacacccataatcccagcgctttgggaggccgggccaggcaaattgcttgagctcaggagtttgagaccagcctgggcaatatggtgaaaccctgtctctattaaaaatacaaaaattagctgggcgtggtggcacgtgcctgtaatcccagctactcgggaggctgaggcaggagaatggcgtgaacccgggaggcggagcttgcagtgagccgagatcgcgccactgcactccaccctggacaacagagggaggttctgcctgaaaattaaaaaaaaaaaaaaaaaaaagaaaatacttgtgagtctctagaacctgaaaacctgaaagtcttctttactacttttgagtcgtgtgtaatgtgcggagagtggtacctatagcacagtgaggtggctcttctgagtaccactcatgccccttgcagctagtgggctataagtgtcatccctgtttcctggtgtcaggccccactcccttgttgtcctcctttactctggtgtgggagtggggtggagggcagcagctgggccccttacacttggtgccatctctgcaggtaaatgccatctgctatggggccaagattatgcttccaggtgttattcgatatgaggacggcattgaggtcaatcaggagattgtggttatcaccaccaaaggagaagcaatctgcatgggtnagaggggatgtttatttcccaaattctaaatgtttgtggttacatactaggtgtatatatttatggggttcatgagatgttttgatacaggcatgcaatacataataatcacatcatggagaatggggcatccatcttaagcatttatcctttgtgttacaaacaatcctattttactgttagttatttatcaccttagttattttaaaatatacacttaagttattattgattatagtcaccccgttgtgctattaaatagtctcactcttcttgttcattcttttggttttttggtggtggtgttttttttttttttttttttttgagacagagtcttgctctgtggccgtggcccaggctggagtgcagtggcacaatctcggctcactgccaagctccgcctcctgggttcacccaccattctcctgcctcagcctcccgagtagctgggaactacaggcgcccaccaccacgcccagttaattttttttttttttttcatttttagtagagacggggtttcaccatgttaagccaggatggtcttcgatctcctgacctcaggtgatctgccccgcctcggcctcccaaagtgctgggattacagggcatgagccaccgcgtccggcagggaccacacaatttattaaccaaccaggttaataaattcttttttttttttttggagacggagtctcactcttgtcacccaggctggagtgcagtgacacgatctcggctcactgcaatctccgcctcctgggctcaagcgattctcctgcctcagcctcctgagtagctaggattacaggctcctgccaccacaccccacacattttttgtatttttagtagagaacgggaattcgccatgttggccaggctggtcttgaactcctgatctcaggtgatccgcccgcctcggcctccctaagtgttgggactacaggcgtgagccaccatgcctggccccaaccagaacacttctgagcgtggaagaggatgctgttaattactcaagaccaaaaggcataaaaggagacatatgtccacccaagtgataaggcagtttgggaaactacatttcccagtatgccctgccccttgaaagttaaaaatcttaactggcacagagcaccctgggacacctgtggttagcaccatttaagaagtaaaaggtatagggttgggttctgacgtgaaggctttccccttccatgggacacttaaccagacacaggacacaacacctgaggtgaaatttcaatgggtattaagtctggggtagagcttctctctccccaaatctagcttccaaagatgtggagctggtggagctgtccattggtccactgccctgtttctcctgggtgctgcctctgcctcctcatatcaccagcgtccccactgccactagtctgtagggggattccgggctaggtgctcttcccactcgacttcaaccaacttatatagctccatggtggcctgggcatcttccacagaggaatgtccgctcttcccaacctggatatcccggtttagcagcttcttggtgagatgcttcagagacatggtggcattctccgggcagtcagccttccggttgaggggggggatatgggaggtgtcacgggtgagggacttggggtgaaagtactgaagggctttgaagtcgttgtggatggcatgccccaccactatcttccctgtgagtatcttcaagatctctccatccttgaaatgctcactcccacaagttttctttcttctggaatccaccttcctcttccacaggtgatttccatggtataccctgtttggactcatactgccagtggctccttaccttcttattgatctccaccccatgacattaatttgccttcagtcctaaatgacactcatgtttgagatgtccatgtatttagttcagttctggcttgctacatgaagtcctttaactattaccattatgttggccttagacacatggctgggacccgggctccagggaggctaacaaaagcccaaaattacatgcaattagatgtgtatgggtactagaggaagagaatctgtggctttcatcaaattctcagagtctacaaaccgtaaaaaattaagaatcacatataaactaaagttgcagaagcaaccttattcacactagttttggaaccaagtaaaataaaaataacttctcaatatttcaggaaactgttttttttttttgagatggagtcttgctctgttgcccaggctggagtgtactggcgcgatcttggctcactacaacctccgcctcccgggttcaagcgtttctcctgcctcagcctcccaagtagctgggactactggcacctgccaccatgcctggctaagttttgtatttttagtagagacggagtttcaccatatgggccaggctggtcttgaactcctgatcttgtgatctgccccgcttcaggctcccaaagtgctgggattacaggtgtgagccactgtgcccggcctagagccctgtgattaatccactcatttcttcttggtttggtctccccacaaatatttattaaaaacctcttggacaaggtccccacaagaccttgagaggactccacaaggcagggacacagtcaccaacttgacagagtggatgggaggcccaggtgggcagacacacggccgagctggggtgagaatgaggcatggagagccctgcctgaggatccgaattccaccacactggctatggtactcgaaannngnnnnnngcatggaca

SEQ ID NO: 149397 - DNA, 391 bp, Homo sapiens
  misc_feature (1)...(391): n = a,t,c or g
nnnnnnnnnnnnnnnnnnnnnnnnnnnnnnnnnnnnnnnnnnnnnnnnnnnnnnnnnnnnnnnnnnnnnnnnnnnnnnnnnnnnnnnnnnnnnnnnnnnnnnnnnnnnnnnnnnnnnnnnnnnnnnnnnnnnnnnnnnnnnnnnnnnnnnnnnncataccacattcatacattagaaaattctacagttttaagatggcaattctctctcccaattaatctacagcatcaatgcaatctcaaagaaaatcaaatgagcttttttaaaaaaaactgatgagctgattttaacgtttatatagaaaggcaaagaatctgtactagataaaccaattttgaaaaagaaaaacaatattgtaggacttaaaatatgtgattttgagacttactat

SEQ ID NO: 149398 - DNA, 506 bp, Homo sapiens
agcggccgcggcattttcctgcaggcaacaaggaagagggccgcggaagtcaagaccactgagcccggaatagcccagcactcgaggagagacttgggttcgagtcccgatgctgcacttgccgttcgccttcgggcctcagttttcccatttctaaaatgaggacttgaataaaatcacatgcaaggcttccattcttaccttcagtgctggaattaggacaacctcttcattccgtggggttgattctaagatttcagcctcgcttcagtcctgcggtggggagattgtgggtagtcttggtccaaatccgccgggccaggaaacctttggctttaaaacgaggggtgattacctgctctaaggtcgacaccacgcttgcttgatagttgaccgtgccttagttttcccgtcagtcaagtgggaagagcagcccatttcctgccgctccccgggccctgtcccgcctggacgcctccctccaggagcctgcgccccggccccgg

SEQ ID NO: 149399 - DNA, 735 bp, Homo sapiens
  misc_feature (1)...(735): n = a,t,c or g
cttgacacacccagccggggcgcgaccggtgcttttgaccactccggagagctttgagggcccctgctttgggactccgcacggacagtcactgtctcagagtgcattctccaggggccactctcttggggacactgtaggggtcacagggcaggtgggcagcctctctcggggggcggcgtgagagccggagagcagggggcgggggcggggccggcttcggctcacgtcttgcgttgaaagccgctggggaaaggggagagaaaccgagagaaccggttcccccgccttgacagcggaggcccccacaccaaggncccttggacttaagcggggcagggacagcctccaggtagagcttgttcgccggggcgcctgcagagcccgcatcccaacccttgaccccggggccggggcgcaggcttcctggagggaagcgttccaggcgggacagggcccggggagcggccaggaaaatggggctgctcttcccacttgactgacgggaaaactaaggcacggtcaactatcaagcaagcgtggtgtcgaccttaagagcaaggactgaagcgaggctgaaatctttagaatcaaccccacgggaatgaagaggttgtcctaattccagcactgagtgtaagaatggaagccttgcattgtgattttattcaagtcctcattttaagaaatgggaaaactgaggcccgaaggcgaacggaaaatgccgcggccgct

SEQ ID NO: 149400 - DNA, 389 bp, Homo sapiens
  misc_feature (1)...(389): n = a,t,c or g
catttcaagacctaataaaaagataaaaagctacaataatcaaaacattatggtattgacataagaatagatatatatagaccaacagaatagaattgagaacccaaacacagactctcacacctgatttttgacaaaggtaccaggaccattcaatagggagggagcagttnnnnnnnnnnnnnnnnnnnnnnnnnnnnnnnnnnnnnnnnnnnnnnnnnnnnnnnnnnnnnnnnnnnnnnnnnnnnnnnnnnnnnnnnnnnnnnnnnnnnnnnnnnnnnnnnnnnnnnnnnnnnnnnnnnnnnnnnnnnnnnnnnnntattcctgatattggatttcacaatgatttcttaaatatgacaccaaaggcacaggcaacaacaaaaaag

SEQ ID NO: 149401 - DNA, 450 bp, Homo sapiens
  misc_feature (1)...(450): n = a,t,c or g
gggtcgaggtcgacggtttcgataangtttttttttttttttttttttttttgagacggagtctcgctcttttgcccaggctggagtgcagtggcacaattgtatttttagtagagacggggtttcaccatgttagccaggatggtctcgatctcctgacctcgtgatctgcctgccttggcctcccaaagtgctgggattacaggcgtgagccaccgcgcccggccggcctcctttaatttcttaaccataaatatcctccccccacttttattatggacgttctgaagcacataaaaatagggagcatagtataataaatttgtacatatttaacactcagcttctataattagaaacaaatggcccatctggtttcatctaggcctctttgctatcctttcatctccaactagattattttacagcaaattctagatgacattctgc

SEQ ID NO: 149402 - DNA, 336 bp, Homo sapiens; identical to SEQ ID NO: 147991

SEQ ID NO: 149403 - DNA, 671 bp, Homo sapiens
ttttttttttagacagagtctcgctccgtcacccaggctggagtgcagcattttacacctatctctgttatagcacatttcacaacacgacaggagctatttacaagtgctactggcctcatataagacagcaagcttcctttttttttttttgagacagagtcttgctctgtcacccaggctggagtgcagtggcgtgatcttggctcactgcaagctccacctcccgggttcacgccattctcctgccctcagtcccccaagtagctggtagctgggattacaggcgcccgccaccacgcccagctaattttttttgtatttttatagtagagaaggaatgtttcaccctgttggccaggatggtctcgatctcctggcctcgtgatctgcccgcctcggcctcccaaagtgctgggattacaggcatgagccaccgcgcccggcctgcacaggtgtcttgaatatgtatatacgcgactccagtatggttggaaatgatttgatttgttgtctatggaattgcacaacctggagccttcctaacatcagcggcttcatactggcatttccattgtggtgcagcaacaatctgagtgagcctccgtctctaagccacatcatttgacaaccggtcccagaaggtaactggaagtcatgatgacaactcc

SEQ ID NO: 149404 - DNA, 337 bp, Homo sapiens
aaaaaattaatctctggattcaatgtaatcccaatcaaaaccccagcaaatccttgtgtgaaaattgacaagttgattctaaaatttatatggcactgcaaagcacgtagaataggcaaggcaatgtggaataagatcaaatatgggggacttatacaataagatctcaagatttgccataaagttagaataattgagatagtgtggtattagctccagggaagacaaaagatcaagggaacaaaacagagtccagaaatagatccaaacatatatagtcacttaacatatgacaaaagccccactgcaatccaaaggaggaaaatatacccttttc

SEQ ID NO: 149405 - DNA, 350 bp, Homo sapiens
ccaaaaactataaaacattgctgagagaaattaagaagaactaaattaatggaaagacataccacgtttatggcttagaagactcaatattgttaagatgtcttttctttcaaattcatctatagattagactcaatccctatcaaaatcctagcaggcatttgtttttgtaaaaattgattctaaaacagattctaaaatttatatgggaaggcaaaggacctgggatagccaaaacaattttgaaaaagaacaaatttggaggatttacactacttaatttcaatacatacaataaagcagcaaatagtagagtactagtgttaggataagcatgtagatcacagaac

SEQ ID NO: 149406 - DNA, 340 bp, Homo sapiens
  misc_feature (1)...(340): n = a,t,c or g
ggattaacagacttaatatttttacgatggcaatattctccacgttgatctacagattcaacacaatccctatcaaaattcctgctggctttgtggaaatggacaagctgatcttaaaattagtatggaaattcaaggcacatggaataggcaaaacaaccttgaaaaagaacagagtccctaattccaaagctnnnnnnnnnnnnnnnnnnnnnnnnnnnntactggaatgaggatagaaatataaatcagtggaattgaattgataatctcaaaataaacccatgtgtctgtggtcaactaattttcaacaaggatgccaagactaatgaggaaagac

SEQ ID NO: 149407 - DNA, 375 bp, Homo sapiens
  misc_feature (1)...(375): n = a,t,c or g
tggaacctnactttcagctgggaaccagtggctcatgccctataatccccagccactttgggaaggcccgaggttgggccggattcatgaggtccaggagatcgagaccatgctggcttaaccatggtgaaaccccccgttttctaccttaaaaattactggatcatgaggtcaggagatcgagaccatcctggctaacaaggtgaaaccccgtctctactaaaaatacaaaaaattagccgggcgcggtgcgggcgcctgtagtcccagctactcgggaggctgaggcaggagaatggcgtgaacccgggaagcggagcttgcagtgagccgagattgcgccactgcagtccgcagtccggcctgggcgacaga

SEQ ID NO: 149408 - DNA, 551 bp, Homo sapiens
  misc_feature (1)...(551): n = a,t,c or g
tttcaaagccctgcgcctgttaccacggnaattccacagggcctgggcagttgctgtggcgacaggaagagctaatcttcagagagctcagactctctaatgatgctgaaggagcaaaggctgagtcagaaacacacttaagagaaaaggattggccgggcgcgtgtgtcacgcctgtaatcccagcactttgggaggccgaggcgggtttgtatattggttgaaactgttatcacttatatatatatatacacacatatatataaaatctatttatttttgcaaaccctggttgctgtatttgttcagtgactattctcggggccctgtgtagggggttattgcctctgaaatgcctcttctttatgtacaaagattatttgcacgaactggactgtgtgcaacgctttttgggagaatgatgtccccgttgtatgtatgagtggcttctgggagatgggtgtcactttttaaaccactgtatagaaggtttttgtagcctgaatgtcttactgtgatcaattaaatttcttaaatgaaccaatttgtct

SEQ ID NO: 149409 - DNA, 273 bp, Homo sapiens
ttttttttttttttttttgggacggagtctcgctctgtcgcccaggccggactgcggactgcagtggcgcgatctcggctcactgcaagctccgcttcccgggttcacgccattctcctgcctcagcctcccgagtagctgggactacaggcgcccgccaccgcacccggctaattttttgtatttttagtagagacggggttgtgcaaacataacgaaaaatccccactatctgtacagggacgcatttacgtgctccgaaaccagaaaggc

SEQ ID NO: 149410 - DNA, 231 bp, Homo sapiens
aaccgtgataagcctttctggtttcggagcacgtaaatgcgtccctgtacagatagtggggattttttgttatgtttgcactttgtatattggttgaaactaagaaagggggcctgaatggtgtggacatctactcgctggtgactgaaaacattcagtggcccaatggcatcaccctagatctcctcagtggccgcctctactgggttgactccaaacttcactccatct

SEQ ID NO: 149411 - DNA, 198 bp, Homo sapiens
tgttttatatatttattcatctgggaggcagaacaggcttcggacagtgcccatgcaatggcttgggttgggatgtccccgttgtatgtatgagtggcttctgggagatgggtgtcactttttaaaccactgtatagaaggtttttgtagcctgaatgtcttactgtgatcaattaaatttcttaaatgaaaaaaaaa

SEQ ID NO: 149412 - DNA, 1231 bp, Homo sapiens
  misc_feature (1)...(1231): n = a,t,c or g
gcagggctcntcacccacnatcnttggggaagctccaaaaggaaatgcccagttcaaagcaancccaagagagggatggaccncaagaaaaaatgcaatgcaaggncaaaagnaacctggactctccagaanggaaattataggaaatagggaatccgggactccagaaanaggggntttagaaaaggaacacccggggccccagaacacttctaacatctgccaggagctnttagaaataaaaaattatgcgcgagaaatgaaaagctcaaatagaataggaacatgaatttgagaaaatctattaggaagtagagaaaataataaaatcaaaggatcaacccaggaagtccaacttataaatactaggagttcagaaggaaagaagaggaaaggaattacaaagatattcaagaaaatttcccggccgggcgcggtggctcacgcctgtaatcccagcactttgggaggccgaggcgggtggatcatgaggtcaggagatcgagaccatcctggccaacaaggcgaaaccccgtctccactaaaaatacaaaaaattagccgggcgcggtggcgggcgcctgcagtcccagctactcgggaggctgaggcaggagaatggcgtgaacccgggaagcggagcttgcagtgagccgagattgcgccactgcagtccgcagtccggcctgggcgatagagcgagactccgcggacgacccggagcgggtacacaagcttcatcccaaacctaaggaacgtggtcgctctgaacacggaggggccaagcaatagaatctactggtctgacctgtcccagagaatgatctgcagcacccagcttgacagagcccacggcgtctcttcctatgacaccgtcatcagcagggacatccaggccccngacgggctggctgtggactggatccacagcaacatctactggaccgactctgtcctgggcactgtctctgttgcggataccaagggcgtgaagaggaaaacgttattcagggagaacggctccaagccaagggccatcgtggtggatcctgttcatggcttcatgtactggactgactggggaactcccgccaagatcaagaaagggggcctgaatggtgtggacatctactcgctggtgactgaaaacattcagtggcccaatggcatcaccctagatctcctcagtggccgcctctactgggttgactccaaacttcactccatctca

SEQ ID NO: 149413 - DNA, 4036 bp, Homo sapiens
gccccgagtgcaatcgcgggaagccagggtttccagctaggacacagcaggtcgtgatccgggtcgggacactgcctggcagaggctgcgagcatggggccctggggctggaaattgcgctggaccgtcgccttgctcctcgccgcggcggggactgcagtgggcgacagatgtgaaagaaacgagttccagtgccaagacgggaaatgcatctcctacaagtgggtctgcgatggcagcgctgagtgccaggatggctctgatgagtcccaggagacgtgcttgtctgtcacctgcaaatccggggacttcagctgtgggggccgtgtcaaccgctgcattcctcagttctggaggtgcgatggccaagtggactgcgacaacggctcagacgagcaaggctgtccccccaagacgtgctcccaggacgagtttcgctgccacgatgggaagtgcatctctcggcagttcgtctgtgactcagaccgggactgcttggacggctcagacgaggcctcctgcccggtgctcacctgtggtcccgccagcttccagtgcaacagctccacctgcatcccccagctgtgggcctgcgacaacgaccccgactgcgaagatggctcggatgagtggccgcagcgctgtaggggtctttacgtgttccaaggggacagtagcccctgctcggccttcgagttccactgcctaagtggcgagtgcatccactccagctggcgctgtgatggtggccccgactgcaaggacaaatctgacgaggaaaactgcgctgtggccacctgtcgccctgacgaattccagtgctctgatggaaactgcatccatggcagccggcagtgtgaccgggaatatgactgcaaggacatgagcgatgaagttggctgcgttaatgtgacactctgcgagggacccaacaagttcaagtgtcacagcggcgaatgcatcaccctggacaaagtctgcaacatggctagagactgccgggactggtcagatgaacccatcaaagagtgcgggaccaacgaatgcttggacaacaacggcggctgttcccacgtctgcaatgaccttaagatcggctacgagtgcctgtgccccgacggcttccagctggtggcccagcgaagatgcgaagatatcgatgagtgtcaggatcccgacacctgcagccagctctgcgtgaacctggagggtggctacaagtgccagtgtgaggaaggcttccagctggacccccacacgaaggcctgcaaggctgtgggctccatcgcctacctcttcttcaccaaccggcacgaggtcaggaagatgacgctggaccggagcgagtacaccagcctcatccccaacctgaggaacgtggtcgctctggacacggaggtggccagcaatagaatctactggtctgacctgtcccagagaatgatctgcagcacccagcttgacagagcccacggcgtctcttcctatgacaccgtcatcagcagggacatccaggcccccgacgggctggctgtggactggatccacagcaacatctactggaccgactctgtcctgggcactgtctctgttgcggataccaagggcgtgaagaggaaaacgttattcagggagaacggctccaagccaagggccatcgtggtggatcctgttcatggcttcatgtactggactgactggggaactcccgccaagatcaagaaagggggcctgaatggtgtggacatctactcgctggtgactgaaaacattcagtggcccaatggcatcaccctagatctcctcagtggccgcctctactgggttgactccaaacttcactccatctcaagcatcgatgtcaatgggggcaaccggaagaccatcttggaggatgaaaagaggctggcccaccccttctccttggccgtctttgaggacaaagtattttggacagatatcatcaacgaagccattttcagtgccaaccgcctcacaggttccgatgtcaacttgttggctgaaaacctactgtccccagaggatatggtcctcttccacaacctcacccagccaagaggagtgaactggtgtgagaggaccaccctgagcaatggcggctgccagtatctgtgcctccctgccccgcagatcaacccccactcgcccaagtttacctgcgcctgcccggacggcatgctgctggccagggacatgaggagctgcctcacagaggctgaggctgcagtggccacccaggagacatccaccgtcaggctaaaggtcagctccacagccgtaaggacacagcacacaaccacccggcctgttcccgacacctcccggctgcctggggccacccctgggctcaccacggtggagatagtgacaatgtctcaccaagctctgggcgacgttgctggcagaggaaatgagaagaagcccagtagcgtgagggctctgtccattgtcctccccatcgtgctcctcgtcttcctttgcctgggggtcttccttctatggaagaactggcggcttaagaacatcaacagcatcaactttgacaaccccgtctatcagaagaccacagaggatgaggtccacatttgccacaaccaggacggctacagctacccctcgagacagatggtcagtctggaggatgacgtggcgtgaacatctgcctggagtcccgcccctgcccagaacccttcctgagacctcgccggccttgttttattcaaagacagagaagaccaaagcattgcctgccagagctttgttttatatatttattcatctgggaggcagaacaggcttcggacagtgcccatgcaatggcttgggttgggattttggtttcttcctttcctgtgaaggataagagaaacaggcccggggggaccaggatgacacctccatttctctccaggaagttttgagtttctctccaccgtgacacaatcctcaaacatggaagatgaaagggcaggggatgtcaggcccagagaagcaagtggctttcaacacacaacagcagatggcaccaacgggaccccctggccctgcctcatccaccaatctctaagccaaacccctaaactcaggagtcaacgtgtttacctcttctatgcaagccttgctagacagccaggttagcctttgccctgtcacccccgaatcatgacccacccagtgtctttcgaggtgggtttgtaccttccttaagccaggaaagggattcatggcgtcggaaatgatctggctgaatccgtggtggcaccgagaccaaactcattcaccaaatgatgccacttcccagaggcagagcctgagtcaccggtcacccttaatatttattaagtgcctgagacacccggttaccttggccgtgaggacacgtggcctgcacccaggtgtggctgtcaggacaccagcctggtgcccatcctcccgacccctacccacttccattcccgtggtctccttgcactttctcagttcagagttgtacactgtgtacatttggcatttgtgttattattttgcactgttttctgtcgtgtgtgttgggatgggatcccaggccagggaaagcccgtgtcaatgaatgccggggacagagaggggcaggttgaccgggacttcaaagccgtgatcgtgaatatcgagaactgccattgtcgtctttatgtccgcccacctagtgcttccacttctatgcaaatgcctccaagccattcacttccccaatcttgtcataaaatctatttatttttgcaaaccctggttgctgtatttgttcagtgactattctcggggccctgtgtagggggttattgcctctgaaatgcctcttctttatgtacaaagattatttgcacgaactggactgtgtgcaacgctttttgggagaatgatgtccccgttgtatgtatgagtggcttctgggagatgggtgtcactttttaaaccactgtatagaaggtttttgtagcctgaatgtcttactgtgatcaattaaatttcttaaatg

SEQ ID NO: 149414 - DNA, 778 bp, Homo sapiens
  misc_feature (1)...(778): n = a,t,c or g
ttgaangcctttgaagccggtacgcctgcaggtaccggtccggaattcccgggtcgacccacgcgtccgcggagtctcgctctatcgcccaggccggactgcggactgcagtggcgcaatctcggctcactgcaagctccgcttcccgggttcacgccattctcctgcctcagcctcccgagtagctgggactgcaggcgcccgccaccgcgcccggctaattttttgtatttttagtggagacggggtttcgccttgttggccaggatggtctcgatctcctgacctcatgatccacccgcctcggcctcccaaagtgctgggattacaggcgtgagccaccgcgcccggccgggaaattttcttgaatatctttgtaattcctttcctcttctttccttctgaactcctagtatttataagttggacttcctgggttgatcctttgattttattattttctctacttcctaatagattttctcaaattcatgttcctattctatttgagcttttcatttctcgcgcataattttttatttctaanagctcctggcagatgttagaagtgttctggggccccgggtgttccttttctaaancccctntttctggagtcccggattccctatttcctataatttccnttctggagagtccaggttncttttgnccttgcattgcattttttcttgnggtccatccctctcttgggnttgctttgaactgggcatttccttttggagcttccccaangatngtgggtgangagccctgc

SEQ ID NO: 149415 - DNA, 521 bp, Homo sapiens
ttttttttttttttttttgggacggagtctcgctctgtcgcccaggccggactgcggactgcagtggcgcgatctcggctcactgcaagctccgcttcccgggttcacgccattctcctgcctcagcctcccgagtagctgggactacaggcgcccgccaccgcacccggctaattttttgtatttttagtagagacggggtttcaccttgttagccaggatggtctcgatctcctgacctcatgatccacccgcctcggcctcccaaagtgctgggattacaggcgtgagccaccgcgcccggccgcctattacattttttaaagtgtgaatatcttaagaatttttatgtgtttgctaaagtgtttctttctgcttttgaaagtgaggttatacccacgtcattagaataatggcagcttctgtgaaattaaatttgtatgaaaccattttcctcacataaaaacccgccaaaggatttttcctgggagtgaaacaacagaaaaaaaggggcgccgcgg

SEQ ID NO: 149416 - DNA, 665 bp, Homo sapiens
ccgcggcgcccctttttttctgttgtttcactcccaggaaaaatcctttggcgggtttttatgtgaggaaaatggtttcatacaaatttaattccacagagcttgcctttattctaatgacggggtataacctcactttcaaacgcagaaagaacccctttggcaaccacataaaatttcttaagatattcacactttaaaaaatgtaataggcggccgggcgcggttgtcacgcctgtaatcccagcactttgggaggccgaggcgggtggatcatgaggtcaggagatcgagaccatcctggctaacaaggtgaggggaagagaggcagcttcttgaagtttcaagaggtgtccggtgccccaaacaaattttcctggattcttcccctataagaaaggcactgtgggccgggcgcagtggtcacgcctgtaatcccagcactttgggaggccgaggcgggtggatcatgaggtcaggagatcgagaccatcctggctaacaaggtgaaaccccgtctctactaaaaatacaaaaaattagccgggcgcggtggcgggcgcctgtagtcccagctacttgggaggctgaggcaggagaatggcgtgaacccgggaagcggagcttgcagtgagccgagattgcgccactgcagtccgcagtcc

SEQ ID NO: 149417 - DNA, 9848 bp, Homo sapiens
  misc_feature (1)...(9848): n = a,t,c or g
gacgtgggccccgagtgcaatcgcgggaagccagggtttccagctaggacacagcaggtcgtgatccgggtcgggacactgcctggcagaggctgcgagcatggggccctggggctggaaattgcgctggaccgtcgccttgctcctcgccgcggcggggactgcagtgggcgacagatgcgaaagaaacgagttccagtgccaagacgggaaatgcatctcctacaagtgggtctgcgatggcagcgctgagtgccaggatggctctgatgagtcccaggagacgtgcttgtctgtcacctgcaaatccggggacttcagctgtgggggccgtgtcaaccgctgcattcctcagttctggaggtgcgatggccaagtggactgcgacaacggctcagacgagcaaggctgtccccccaagacgtgctcccaggacgagtttcgctgccacgatgggaagtgcatctctcggcagttcgtctgtgactcagaccgggactgcttggacggctcaaacgaggcctcctgcccggtgctcacctgtggtcccgccagcttccagtgcaacagctccacctgcatcccccagctgtgggcctgcgacaacgaccccgactgcgaagatggctcggatgagtggccgcagcgctgtaggggtctttacgtgttccaaggggacagtagcccctgctcggccttcgagttccactgcctaagtggcgagtgcatccactccagctggcgctgtgatggtggccccgactgcaaggacaaatctgacgaggaaaactgcgctgtggccacctgtcgccctgacgaattccagtgctctgatggaaactgcatccatggcagccggcagtgtgaccgggaatatgactgcaaggacatgagcgatgaagttggctgcgttaatgagacactctgcgagggacccaacaagttcaagtgtcacagcggcgaatgcatcaccctggacaaagtctgcaacatggctagagactgccgggactggtcagatgaacccatcaaagagtgcgggaccaacgaatgcttggacaacaacggcggctgttcccacgtctgcaatgaccttaagatcggctacgagtgcctgtgccccgacggcttccagctggtggcccagcgaagatgcgaagatatcgatgagtgtcaggatcccgacacctgcagccagctctgcgtgaacctggagggtggctacaagtgccagtgtgaggaaggcttccagctggacccccacacgaaggcctgcaaggctgtgggctccatcgcctacctcttcttcaccaaccggcacgaggtcaagaagaatgacgcggacccggagcgggtacacaagcttcatcccaaacctaaggaacgtggtcgctctgaacacggaggggccaagcaatagaatctactggtctgacctgtcccagagaatgatctgcagcacccagcttgacagagcccacggcgtctcttcctatgacaccgtcatcagcagggacatccaggcccccgacgggctggccgtggactggatccacagcaacatctactggaccgactctgtcctgggcactgtctctgttgcggataccaagggcgtgaagaggaaaacgttattcagggagaacggctccaagccaagggccatcgtggtggatcctgttcatgggaagcatcgcccctgcacctgcccggtgtactctgtacctgtcaggtgacatctgctacctaagacgtgagagctacaatcaggaggtgaatgttgggtttccacagagaacactggagaaggcacacttggtgtctggaagggaaaagcaggaagagagcatcatcagatgcctgcgggtgaaggtgtggcttacgtacgagatgcaagcacttaggtggcggatagacacgactatagatcactcaagccaagatgaacgcagaaaactggttgtgactggaggaggacaaagtattttggacagatatcatcaacgaagccattttcagtgccaaccgcctcacaggttccgatgtcaacttgttggctgaaaacctactgtccccagaggatatggtcctcttccacaacctcacccagccaagaggagtgaactggtgtgagaggaccaccctgagcaatggcggctgccagtatctgtgcctccctgccccgcagatcaacccccactcgcccaagtttacctgcgcctgcccggacggcatgctgctggccagggacatgaggagctgcctcacagaggctgaggctgcagtggccacccaggagacatccaccgtcaggctaaaggtcagctccacagccgtaaggacacagcacacaaccacccggcctgttcccgacacctcccggctgcctggggccacccctgggctcaccacggtggagatagtgacaatgtctcaccaagctctgggcgacgttgctggcagaggaaatgagaagaagcccagtagcgtgagggctctgtccattgtcctccccatcgtgctcctcgtcttcctttgcctgggggtcttccttctatggaagaactggcggcttaagaacatcaacagcatcaactttgacaaccccgtctatcagaagaccacagaggatgaggtccacatttgccacaaccaggacggctacagctacccctcgagacagatggtcagtctggaggatgacgtggcgtgaacatctgcctggagtcccgcccctgcccagaacccttcctgagacctcgccggccttgttttattcaaagacagagaagaccaaagcattgcctgccagagctttgttttatatatttattcatcctgggaggcagaacaggcttcggacagtgcccatgcaatggctttggggttgggattttggtttcttcctttcctcgtgaaggataagagaaacaggcccggggggaccaggattgacacctccatttctctccaggaagttttgagttttctctccaccgtgacacaatcctcaaacatggaagatgaaagggggaggggatgtcaggcccagagaagcaagtgggcttttcacacacaacagcagatgggcaccaacgggaccccctgggccctgcctcatccaccaatctctaagccaaacccctaaactcaggagtcaacgtgtttacctcttctatgcaagccttgctagacagccaggttagcctttgccctgtcacccccaaatcatgacccacccagtgtctttcgaggtgggtttgtaccttccttaagccaggaaagggattcatgggcgtcggaaatgatctgggctgaatccgtggtggcaccgagaccaaactcattcaccaaatgatgccacttcccagaggcagagcctgaggtcaccggtcacccttaatatttaattaagtgcctgagacacccggttaccttggccgtgaggacacngtggcctgcacccaggtgtggctgtcaggacaccagcctggtgcccatcctcccgacccctacccacttccattcccgtggtctccttgcactttctcagttcagaagttgtacacttgtgtacatttggcatttgtgttattattttgcactgttttctgttcgtgtgtgttggggatggaatcccaggccagggaaaagcccgtgtcaatgaatgccggggacagagaagggcaggttgaacggggacttcaaaagccgtgatcgtgaatatcgagaaactgcccattgtcgtctttaatgtccgcccacctagtgctttccacttcttatgcaaaatgcctccaagccattcaacttccccaaatctttgtcgttgatgggtatgtgttttaaaaacattgcacggttaaggccggggcgccaagttgtcacgcctgtaatccccagcactttgggaggcccgaggcgggccggatcatgaggtcaggagatcgagaccatcctggctaacaaggtgaaaccccgtctctactaaaaatacaaaaaattagccgggcgcggtggtgggcacctgtagtcccagctactcgggaggctgaggcaggagaatggtgtgaacccgggaagcggagcttgcagtgagccgagattgcgccactgcagtccgcagtccggcctgggcgacagagcgagactccgtctcaaaaaaaacaaaacaaaaaaaaaccatgcatggtgcatcagcagcccatggcctctggccaggcatggcgaggctgaggtgggaggatggtttgagctcaggcatttgaggctgtcgtgagctatgattatgccactgctttccagcctgggcaacatagtaagaccccatctcttaaaaaatgaatttggccagacacaggtgcctcacgcctgtaatcccagcactttgggaggctgagctggatcacttgagttcaggagttggagaccaggcctgagcaacaaagcgagatcccatctctacaaaaaccaaaaagttaaaaatcagctgggtatggtggcacgtgcctgtgatcccagctacttgggaggctgaggcaggaggatcgcctgagcccaggaggtggaggttgcagtgagccatgatcgagccactgcactccagcctgggcaacagatgaagaccctatttcagaaatacaactataaaaaaaataaataaatcctccagtctggatcgtttgacgggacttcaggttctttctgaaatcgccgtgttactgttgcactgatgtccggagagacagtgacagcctccgtcagactcccgcgtgaagatgtcacaagggattggcaattgtccccagggaccaaaacactgtgtccccccccagtgccagggaaccccgtgataagccctttctgggttccggaagccacgtaaaatgcgtccctgtacagataagtggggatttttttggttaagtttgcactttgtatattggttgaaactgttatcacttatatatatatatatatatatacacacatatatgtgtgaccgggaatatgactgcaaggacatgagcgatgaagttggctgcgttaatgtgacactctgcgagggacccaacaagttcaagtgtcacagcggcgaatgcatcaccctggacaaagtctgcaacatggctagagactgccgggactggtcagatgaacccatcaaagagtgcgggaccaacgaatgcttggacaacaacggcggctgttcccacgtctgcaatgaccttaagatcggctacgagtgcctgtgccccgacggcttccagctggtggcccagcgaagatgcgaagatatcgatgagtgtcaggatcccgacacctgcagccagctctgcgtgaacctggagggtggctacaagtgccagtgtgaggaaggcttccagctggacccccacacgaaggcctgcaaggctgtgggctccatcgcctacctcttcttcaccaaccggcacgaggtcaggaagatgacgctggaccggagcgagtacaccagcctcatccccaacctgaggaacgtggtcgctctggacacggaggtggccagcaatagaatctactggtctgacctgtcccagagaatgatctgcagcacccagcttgacagagcccacggcgtctcttcctatgacaccgtcatcagcagggacatccaggcccccgacgggctggctgtggactggatccacagcaacatctactggaccgactctgtcctgggcactgtctctgttgcggataccaagggcgtgaagaggaaaacgttattcagggagaacggctccaagccaagggccatcgtggtggatcctgttcatggcttcatgtactggactgactggggaactcccgccaagatcaagaaagggggcctgaatggtgtggacatctactcgctggtgactgaaaacattcagtggcccaatggcatcaccctagatctcctcagtggccgcctctactgggttgactccaaacttcactccatctcaagcatcgatgtcaatgggggcaaccggaagaccatcttggaggatgaaaagaggctggcccaccccttctccttggccgtctttgaggacaaagtattttggacagatatcatcaacgaagccattttcagtgccaaccgcctcacaggttccgatgtcaacttgttggctgaaaacctactgtccccagaggatatggtcctcttccacaacctcacccagccaagaggagtgaactggtgtgagaggaccaccctgagcaatggcggctgccagtatctgtgcctccctgccccgcagatcaacccccactcgcccaagtttacctgcgcctgcccggacggcatgctgctggccagggacatgaggagctgcctcacagaggctgaggctgcagtggccacccaggagacatccaccgtcaggctaaaggtcagctccacagccgtaaggacacagcacacaaccacccggcctgttcccgacacctcccggctgcctggggccacccctgggctcaccacggtggagatagtgacaatgtctcaccaagctctgggcgacgttgctggcagaggaaatgagaagaagcccagtagcgtgagggctctgtccattgtcctccccatcgtgctcctcgtcttcctttgcctgggggtcttccttctatggaagaactggcggcttaagaacatcaacagcatcaactttgacaaccccgtctatcagaagaccacagaggatgaggtccacatttgccacaaccaggacggctacagctacccctcgagacagatggtcagtctggaggatgacgtggcgtgaacatctgcctggagtcccgcccctgcccagaacccttcctgagacctcgccggccttgttttattcaaagacagagaagaccaaagcattgcctgccagagctttgttttatatatttattcatctgggaggcagaacaggcttcggacagtgcccatgcaatggcttgggttgggattttggtttcttcctttcctgtgaaggataagagaaacaggcccggggggaccaggatgacacctccatttctctccaggaagttttgagtttctctccaccgtgacacaatcctcaaacatggaagatgaaagggcaggggatgtcaggcccagagaagcaagtggctttcaacacacaacagcagatggcaccaacgggaccccctggccctgcctcatccaccaatctctaagccaaacccctaaactcaggagtcaacgtgtttacctcttctatgcaagccttgctagacagccaggttagcctttgccctgtcacccccgaatcatgacccacccagtgtctttcgaggtgggtttgtaccttccttaagccaggaaagggattcatggcgtcggaaatgatctggctgaatccgtggtggcaccgagaccaaactcattcaccaaatgatgccacttcccagaggcagagcctgagtcaccggtcacccttaatatttattaagtgcctgagacacccggttaccttggccgtgaggacacgtggcctgcacccaggtgtggctgtcaggacaccagcctggtgcccatcctcccgacccctacccacttccattcccgtggtctccttgcactttctcagttcagagttgtacactgtgtacatttggcatttgtgttattattttgcactgttttctgtcgtgtgtgttgggatgggatcccaggccagggaaagcccgtgtcaatgaatgccggggacagagaggggcaggttgaccgggacttcaaagccgtgatcgtgaatatcgagaactgccattgtcgtctttatgtccgcccacctagtgcttccacttctatgcaaatgcctccaagccattcacttccccaatcttgtcgttgatgggtatgtgtttaaaacatgcacggtgaggccgggcgcagtggcctcacgcctgtaatcccagcactttgggaggccgaggcgggtggatcatgaggtcaggagatcgagaccatcctggctaacaaggtgaaaccccgtctctactaaaaatacaaaaaattagccgggcgcggtggtgggcacctgtagtcccagctactcgggaggctgaggcaggagaatggtgtgaacccgggaagcggagcttgcagtgagccgagattgcgccactgcagtccgcagtctggcctgggcgacagagcgagactccgtctcaaaaaaaacaaaacaaaaaaaaaccatgcatggtgcatcagcagcccatggcctctggccaggcatggcgaggctgaggtgggaggatggtttgagctcaggcatttgaggctgtcgtgagctatgattatgccactgctttccagcctgggcaacatagtaagaccccatctcttaaaaaatgaatttggccagacacaggtgcctcacgcctgtaatcccagcactttgggaggctgagctggatcacttgagttcaggagttggagaccaggcctgagcaacaaagcgagatcccatctctacaaaaaccaaaaagttaaaaatcagctgggtatggtggcacgtgcctgtgatcccagctacttgggaggctgaggcaggaggatcgcctgagcccaggaggtggaggttgcagtgagccatgatcgagccactgcactccagcctgggcaacagatgaagaccctatttcagaaatacaactataaaaaaaataaataaatcctccagtctggatcgtttgacgggacttcaggttctttctgaaatcgccgtgttactgttgcactgatgtccggagagacagtgacagcctccgtcagactcccgcgtgaagatgtcacaagggattggcaattgtccccagggacaaaacactgtgtcccccccagtgcagggaaccgtgataagcctttctggtttcggagcacgtaaatgcgtccctgtacagatagtggggattttttgttatgtttgcactttgtatattggttgaaactgttatcacttatatatatatatatatatacacacatatatataaaatctatttatttttgcaaaccctggttgctgtatttgttcagtgactattctcggggccctgtgtagggggttattgcctctgaaatgcctcttctttatgtacaaagattatttgcacgaactggactgtgtgcaacgctttttgggagaattttttttttttttttttttttgagacggagtctcgctctgtcgcccaggccggactgcggactgcagtggcgcaatctcggctcactgcaagctccgcttcccgggttcacgccattctcctgcctcagcctcccgagtagctgggactacaggcgcccgccaccgcgcccggctaatttttttttttgtatttttagtaaagacggggtttcaccttgttagccaggatggtcctcgatctcctgaccttattgatccacccgcctcggcctcccaaagtgctgggattacaggcgtgagccaccgcgcccggccattactttgcaattttaattaatgatgtgatctagtctccatctctctattccatttgggaaaaatcaattagatcaatgttaaaataaattttaaaataacagaattctatacataaaatgaaatgtctttcttatctttaaagaataagaatataaacattccctcatttcatgtttttaattttgacctttcctgtctcttccctaccctgcattttaataactttaataaataaattttataaatgaacttttttgaatgaaaaatctgataactttctccttctccaactctattctctaccttcacccctgcacacttccc

SEQ ID NO: 149418 - DNA, 361 bp, Homo sapiens
  misc_feature (1)...(361): n = a,t,c or g
cnnnnnnnnnnnnnnnnnnnnnnnnnnnnnnnnnnnnnnnnnnnnnnttcaacttcatatccaatcactggttcccatgcctttttgtgaccacaaaatgtcgtcgacgcagaaactaactcataacatattaataacgtaaatttaagacttaaaattataaaacttctagaagaaaacacagaaaaaaattgtcatgacctgggattgtcaacagattattacatgtgacaccaaaagcatgagcaacaaccacaaaaatatgataaattggaactcataaaaataaaaaacttttgcacatcaaaggatattacctataaagtgaaaagactacttataggaaataatatttgcaaat

SEQ ID NO: 149419 - DNA, 346 bp, Homo sapiens
  misc_feature (1)...(346): n = a,t,c or g
ggaaaagagtagtctcttcaacaaatggtgctgggacaaatggatatctacaggcaaaagaatgaagttggtccccccctacatcnnnnnnnnnnnnnnnnnnnnnnnnnnnnnnnnnnnnnnnnnnnnnnnnnnnnnnnnnnnnnnnnnnnnnnnnnnnnnnnnnacagaaaaaaattgtcatgacctgggattggcaacagattattacatgtgacaccaaaagcatgagcaacaaccacaaaaatagataaattggaactcataaaaataaaaaacttttgcacatcaaaggatattacctagaaagtgaaaagacaacttataggagaaaatagttgcaaat

SEQ ID NO: 149420 - DNA, 356 bp, Homo sapiens
  misc_feature (1)...(356): n = a,t,c or g
ggaaaagagtagtctcttcaacaaatggtgctgggacaaatggatatctacaggcaaaagaatgaagttggtccccccctacatcnnnnnnnnnnnnnnnnnnnnnnnnnnnnnnnnnnnnnnnnnnnnnnnnnnnnnnnnnnnnnnnnnnnnnnnnnnnnnnnnnacagaaaaaaattgtcatgacctgggattggcaacagattattacatgtgacaccaaaagcatgagcaacaaccacaaaaatagataaattggaactcataaaaataaaaaacttttgcacatcaaaggatattacctagaaagtgaaaagacaacttataggagaaaatagttgcaaatcatttatgtg

SEQ ID NO: 149421 - DNA, 376 bp, Homo sapiens
gtgagacctcatcacacaaacaaaaagagagttagattaagatgagggtcaacatcaaggtcagggacaaagtcagcacagaggtcaaagataagatcaagaaccaggctgcagtgatagtcaagcttggtgtgcagatcaaggctgggccatgggtcagggttaaggactgggttaggctggaggtcaagattaaaaacagagaccaggtcaggggagaggctgaggtcagaagaataggtcagcaattaagaacaaaaactaggcccaaactaaatgtccatccaaagaggaatggttcaataaactgaaatattcacacagtggaatgctactcaacaataaaaaagcaataggcgaacgcggagagcacgcc

SEQ ID NO: 149422 - DNA, 323 bp, Homo sapiens
ccagtgcgtggcacagagcagagcaacaagagctgggcttcaggcctgcagccaggatggggcagagcagagcaattggcctggggctcattcaatctgtccaaatggccatctgggggaggggacccacagcccatccttctgtccagggtccagaacatgggaaggctggcacggtgagaggctccctgccaaccacagccccagctcccgagtcggaggagctcacctgtcccgcatcagcacctactccccctgccatccctgtggggcttctctctccccagctttggcctggcccccgccgcccccctccaggtcca

SEQ ID NO: 149423 - DNA, 2407 bp, Homo sapiens
  misc_feature (1)...(2407): n = a,t,c or g
ttttttcttttttttttttttgtattacatgttcaagttttattacaaagtatgatcgggcagaaaatacggtaattttttnatacagggggctgaaacagaatggaaggggtgaaaattaggtttaatttacttaggaaacaagaaatagaaagtcatagctataacactccactttcaggtgcccatgaagtagccttcaatgggagattccccatagttgtttcacagacacagtgttaaaattttattacaagcccctgtggtaccaatcagccccgtggaaaatatttattaaaaggaaaaatattacaggtacagttctgccagggggccagctttctctacaacttgaccgtgggatggccacaaaacctattaatataggaggggaaagtttaaatatataacaaggaaatgaagttcagacatactaggctaaagggacaccagaaaagggatcagttagagccttaacatttccagagcaaggaaatctcccattttcctacatagaggtttatactaatcatgctacaaaattcactctgggtggggtgggggaaggaaggtcactgacaagaggggtagtaaaatacacaggaaccaaagcaagtgagtcagactcaactaaatcgattcaaatgcttcagctcaacaattttcataacacatggtataccacaatcaacccaaggtgagaacatttcttttaaatagtagatatcacatgttcataatcatctgggttgtcccccaaaaggtggggtgcctataaactttccagctgttacatagactgtcaaacacctttccttccttgaagtttaaaactttcctttaaccttatttgtttcctccgttgggaataatacccagtcccaaccctctttggggaaaggcacctgccatgtttcccatattttaaaaaatgaacatcccagaaagtaagcctgagaggaccctggccccatccccatgtggcccacacatttgactttgaccattagcagcagtgacactgtgagagggggagaaggtgcaggtgggtgaagtgggcaagggtctgcaacacgagacgctctcaggaggctggcccaggccagggcctggcccagggttcacagtgactatgctatgctccgccctcttccctgggaaaaccaatctaagtatcaagcatgatcttccttcttcgtccctggagtacacacagtaaagggaaaagtctgctttgaggcttcctactttcaatggttttccccttaccccaaaaccccngaattgaaaggggctgcccaatattctcaaagtggggaaggcaagagggaacagtacttgggcttgcccttcccacggtgtggtaaaaccctgcagcttgcttacattgtcttcaacagccccaggaattccaaggccccaggtggcaagccaggaagaaacagtggaaaagcaagggcaagagaaaagagaaaaaggagcgggaaagtctgcatagctgtcataacctctgcttctcctgatctgtagcgaacccacaaccaggaagagtcatggtctggaacaatcatgggaccccaaacgcctgtaggttttttacctaccaaacatcacccatggctgctctaagctgtcattttgttcccacagttacctcagcattcacggatgcccaatttatggcccaggaagagctgacccaggctaagggcagtctcactccacagccatgcaatggacagtctgaatgtttccctaccccagaccttcactgacctctactatttcctcctctgatataaagaaaacactttaattttctcctgcatcctacatctcctcctaaaattttggccctaattgtcatcaaaaccttgtaggattctgaattttttgtttcttcctgaatcttagccagttctctcagagccaatcctggatttataaggaattttcacctattttttttttttttttattttttgagacggagtcttgctctgtcgcccaggctggagtgcagtggcacgacctcggctcactgcaagctccgcctcccgggttcacgccattctcctgccttagcctcccaaatagctgggactacaggcgcccgccagccaccacgctaggctaatttctttttttctatttttagtagagatggggtttcaccatgttagccaggatggtctcgatcttctgaccttgggatctggccacctcagcctcccaaaatgctgggattacaggtgtgagccaccacacccatcctcgcccagttattaaataccttccctcttcaagtcctaaccttgcaggctaattcctccctggaaagaagaagattcccaatgctccctgaacataaaaaattcaggtccttgaatgacgtggaacccattct

SEQ ID NO: 149424 - DNA, 273 bp, Homo sapiens
cggccgcgtcgacgctacccacattcctggtggttcctccatggaggtggccatcttcacgttgatcgagaaagtcgtgttttactattcacaccggctctttctccacccggcattttacaaaaaaatccgcaagatacaccataagtggacagctcccattggcgtgatctctctataggcccacccaatagagcatgcagtttccaacatgctaccggtggatcctgtgaacctgcgccagtctatccgcacagttcttttccaccaatg

SEQ ID NO: 149425 - DNA, 536 bp, Homo sapiens
aggatcacgtgagcccaggagttcaagatcaggctgggcaatacagcaagacccctgtctctacaaaaacaaaaacaaaaaacaaataggcatggtagtgcatacctgtggtctgagctgcttgggagtctgaggcaggaggatcacttgaacccaggagttcgaggctgcagtgagttattattgggccactgcagtccagcctgggcagcaaagtgagaccctgtctgttaaaaaaacaaaaccaaaaacttgattgctgggggccaccctaggagtttctggattcagtaggtctggcggtggggatggtggggcctgggtaattttgcctttctaacaagcgtccagggtaattgccccagctgctggtcccagggaccacactttgcagattattactctgagaagagcactaactgttgacgttgggattccttctgttcctgcattagtgaatttattttgggggagattatttcaatcttcgtagatccgcatttacttagctgtggaagtggaggttaatgcaacct

SEQ ID NO: 149426 - DNA, 373 bp, Homo sapiens
  misc_feature (1)...(373): n = a,t,c or g
taagctgggcttcattaaaattaaggacttctcctctgtgaaggacaatgtcaagggaatgagaagacaagctacagactgggagaaaatatttgcaaaagagacgtctgataaaggactattatccaaaatatactaaaaacccttcaagctcagcaaacaacccaattaagnnnnnnnnnnnnnnnnnnnnnnnnnnnnnnnnnnnnnnnnnnnnnnnnnnnnnnnnnnnnnnnnnnnnnnnnnnnnnnnnnnnnnnnnnnnnnnnnnnnnnnnnnnnnnnnnnnnnnnnnnnnnnnnnnnnnnnnnnnnnnnnnnnnnnnnnnnnnnnnnnnnnnnnnnnnnnnnnnnnnnnnnnnnnnnnnnnnnnnnn

SEQ ID NO: 149427 - DNA, 341 bp, Homo sapiens; identical to SEQ ID NO: 68400
  misc_feature (1)...(341): n = a,t,c or g

SEQ ID NO: 149428 - DNA, 389 bp, Homo sapiens
  misc_feature (1)...(389): n = a,t,c or g
gggaaacaatttcaaagctagacaggtactgtaatcaagatagcatggtattaacataaagacagacatatggatcaatgaaatagaatcaatagttcagaaacaaaccctaacatttagtcaaaagtgcaaagaccatttcattggaggannnnnnnnnnnnnnnnnnnnnnnnnnnnnnnnnnnnnnnnnnnnnnnnnnnnnnnnnnnnnnnnnnnnnnnnnnnnnnnnnnnnnnnnnnnnnnnnnnnnnnnnnnnnnnnnnnnnnnnnnnnnnnnnnnnnnttcatacaaggaaacactggcataaatcttactgactttgggttaggcaacgttttcttagatatgacaccaaaagcacaagcaaaagaagnnnnnnnnnncagt

SEQ ID NO: 149429 - DNA, 379 bp, Homo sapiens
  misc_feature (1)...(379): n = a,t,c or g
ggtaatattttcnnnnnnnnnnnnnnnnnnnnnnnnnnnnnnnnnnnnnnnnnnnnnnnnnnnnnnnnnnnnnnnnnnnnnnnnnnnnnnnnnnnnnnnnnnnnnnnnnnnnnnnnnnnnnnnnnnnnnnnnnnnnnnnnnnnnnnnnnntctatcccaggtattcaaagttggttcaacattcaaaaatcaatcaatgtattttatcatattgtcatactaaatacgcaacatcgannnnnnnnnnnnnnnnnnnnnnnnnnnnnnnnnnnnnnnnnnnnntattaattaatgataaaattcccaacaagttaggaatagaaggaaatttccttattctaataaaggctatccatggaaaacctacagtgaaccactg

SEQ ID NO: 149430 - DNA, 479 bp, Homo sapiens
  misc_feature (1)...(479): n = a,t,c or g
gtagagatgaggtctcaccacattgcccaggctggtctcaaactcctggcctcaagcaatcctcctgccttggcctcccaaaatgttaagcttacaggcatgagccacttggcctcaatcctgttttttcattaggctacccaagaaacacaagctagggctggatggagctatgcatctcatttcgtagatgagaggactgaggctcagagggctaagggacttgtccaaggtcacacgccaactatgtgctggaagatctaatttgtgtgttattttgagatagagtctgctctgtcgcccaggctggagtgcagtggcacgatctcagctcactgcaacctccgcctcccgggttcaagtgattctcctgcctcagtttnccaagcagctgggattacaggngttttgccaccacggccagctaaattttggnattttaagtagagatgggggttcgccattttgccaggttggtt

SEQ ID NO: 149431 - DNA, 165 bp, Homo sapiens
ggtaaaagatatactcgaagtgatgaattacagaggctcagaagagcgcatacagggtgagaagaaattagtttgtccagaatgttcacaacgctctatgagaagtgaccgccttaccggccatattaggtcacaccagaataaaaaaggtattcactagagcag

SEQ ID NO: 149432 - DNA, 608 bp, Homo sapiens
gcgtcgacaagaaccatacattatcgttactctgccagcccagtcatggagactgtagtagattctcagcaagtacatgtttgatacgttcacgtttccattttaatttcaatacatttaaaatattttgaaaattaggtgacagtatgttgactgctgtctctgtggccagagattgtggaatgattctacctcaggataaagtgattattgctgaagcattacctccaaaggatgggaaagttgccaaaataaattggcattatgcagactccctcacgcagtgcagtcatccatcagcaattgacccagaggctattccggttagattggtccatgatagcttagaggatcttccaatgactcgttatcattttgcaatgaatgggaaatcattctcagtgatactgggggcattttcaagacttggttcctaagggaagtaatttgggtgtatgtgtgtgctcacatgaatgcatcgcaacagtattttaaaaaaatttgtattattgtttccagttgatgttgcatggcaccgtgtttgcccgtatggcacctgatcagaagacacagttgatagaagcattgcaaaatgttgagtaagtatg

SEQ ID NO: 149433 - DNA, 381 bp, Homo sapiens; identical to SEQ ID NO: 107755
  misc_feature (1)...(381): n = a,t,c or g

SEQ ID NO: 149434 - DNA, 381 bp, Homo sapiens; identical to SEQ ID NO: 107755
  misc_feature (1)...(381): n = a,t,c or g

SEQ ID NO: 149435 - DNA, 321 bp, Homo sapiens
  misc_feature (1)...(321): n = a,t,c or g
aaaagcagttctaagaaggaaatttatagcaacaaatacttaaataaaaataaacatctcaaataaagaacctactcaagaaactacaagagaagaacaaatttaagcccaaagttagcagaaggaaaacaattcaaagatcagagcagaaataaatacagactagaaaaccaggggaaaaaatcaacaaaacaaagagnnnnnnnnnnnnnnnnnnnnnnnnnnnnnnnnnnnnnnnnnnnnnnnnnnnnnaaagagaagacttaaatcaaattggaaatgaaagagaagatattacaactggcaccactgaaatacaaa

SEQ ID NO: 149436 - DNA, 290 bp, Homo sapiens
cttaccttaaaatattctgttttgagactgtgtttgggcttgcagtttaattagaacgccttagttcctggaagaaggcaagagtaacctcttgaaacatgtttgaggaggacaaatatatcaggcagtgattagtaacatctgagtaataatgaatttatcagattttttttttttctcctgagatggagtctcactctgtttcccaggctggagtgcggtggagcaatctcctcttcactgcaccctctacctcccgggttcaaacgattctcctgcttcagcctgct

SEQ ID NO: 149437 - DNA, 1450 bp, Homo sapiens
  misc_feature (1)...(1450): n = a,t,c or g
ctttaactctactctccaactgggaggaaaccccaagggggcgcccgcacccctttgggcagaggagctgggctttgtgtgaaggagtggggcagacagtctgcctggccacgtcacccccaggccaaggccctttagggccggnggggtgatcctagagagcaggctgggggcctgccccctctggtttgatctccaatcctgcctgaggtctcaggaccccgtgcttcggctgcccctgggccccttgcccactgccccactgaggaggcagcagggaggggcggactcagaggaggggaggggagcaagaacaacagcagaagaatctcgtctgtacagtacgggccgtttgagtcattattattacaatatactttgacaaaaatagaatctcatttcatatcaatacaacaacaacaaaaaaaaaacagtttcctggactgttacaccgctaacgttttccaaaggtcgctatttacaattacagtagccaagagggaaaagtgggatgcagccctggaggtggtgggaacaaggaggtagccagagacaataggggcgccaagagcaaaggaggtggggtcaggagcagaaggagctaaccaggagaagctagggagaggggccccagaggaaattaaggagggagggaccttctacggacccactccgtaggcccttccaccccacagaccatcccagtgttgactcccccaggttagtgtgcgtgcaagactcaagacgtcccctcaccacactcgccccaatgaaagagctctggcctggagcaccccaaggaagtccaggccgactctcgccccagccacctcactgaagaccctctccccattctccctgcacactgtggccagctttacagggctggcgtcaactgaggggtggggagctattgcactgtatatcttagagaaaaactggggaagggaggggctcaatttgccccctgcctagcccttctgccctcctcagccctctcctcatggctctcttgtctttccctccaaatgtgcttccagagaggcccccacctcaaacccctgtctccagcctcagattcccaggctgccttcccggcccaaagctcagccagcacccacacaccttgggggtgcagcacacacaagaatcagcgcaggtgtggcacgtgtgtgtgcaggggcatttgggggccaggcttaagtattctgctccatgtgcctatggctacatgaacacaaaaacagagacccttttcagaacctctgcctcactttccccttgaaacacaaacccacccatcaagcccactttggggtttcagtctagagtgtgggtttctgttgtttggtagttttttggttatttccctctatctgggagcggcacatggttggtgatcctatgagtctgctcatacgtacggtgctgggttgagcaacagcaacct

SEQ ID NO: 149438 - DNA, 328 bp, Homo sapiens
cgaaaaaataaggcttcttccagaaatacataattagttctttcaaaagccattgtcccagaaacagactcccatctatctacaatgtcatttgatttttgacaaaagacaccaatgcaatccaatggggaagaaagaagtcttttcaacaaactgtgctggaacaattatataataatgtgggaaaaaattaacctggacttctatattttacactacgcacaaaaaattaatgtgagatagatctagacctaaacaaaaaagcagtaactagaaatcttccagaagaaagcacaggaagatattctgcaagtagctgaagttttct

SEQ ID NO: 149439 - DNA, 454 bp, Homo sapiens
tttttttttttgtagatatggggttttgccatatcgcccaggctggtcttaaactcctaggctccagtcatctgccagcctcagcctcccaaagtggtaggattataggcatgaaccatgatgaccagctggataaattgtttcaggaagggttgagatgatgttgaacatcatgccctccacatcaatttacggggaaaaaaattcatcttgtttctgccgattcaagagggactgacaagaggcaggaaacaataggccaacactgtgggtcattttcaactgggtttcaggctttacaaaatttctggacttgaaaaattaaagttgagcaagctttccactcaatggctgttaaaaccctttgcacccagatcagctgtagacaagagcagagcttttgggataggaaagtctagacaagtacgatcaagatcctgaagcacttattcga

SEQ ID NO: 149440 - DNA, 643 bp, Homo sapiens
gagagacagtcggtgcctggcttcaaggcttcacaggataggctgactcttctggtaagggcctataccaaccagtaacttaagttgaggccattgctcattttcccattttgaaaatcctagggctcttaagaattgtgcttattcaactctgtctgtgctctgtcagtggaacaacaaagcctggatgtcagcacatcctctttacgggatggcttactaagtattttaagctcaccattgagacctactgctcagaaataaacgactccttttaaaatattactgttcattgacaatttagctggtcacccaagagctctgatggagatgtagaaagaaatgaatgttttcatgcctgctaagacaacatccattatgctgccactgatcaagtagtttcaactcttattatttaagaaacagaatccatagaacatttgtggtagtagcgcagagttggttacaatgtcctaccacagcaatttctgacattcaaattgggcctgtagcaatgggactccttttgattccttcagctttcgtattatgttggttatctatacagcaggtttctaaattgaaacactttcactcacatcactcatatttccttcgtttttggagactaacagcttgatct

SEQ ID NO: 149441 - DNA, 6055 bp, Homo sapiens
gaaggagatcctgcaggaatacctggagattagcagcctggtgcaggatgaggtggtggccattcaccgggagatggctgcagctgctgcccgcatccagcctgaggctgagtaccaaggcttcctgcgacagtatgggtccgcacctgacgtcccaccctgtgtcacattcgatgagtcactgcttgaggagggtgaaccgctggagcctggggagctccagctgaacgagctgactgtggagagcgtgcagcacacggtgcagctgctgggcaagaggcaagtgctgcaagaagcactgcaggggctgcaggtagcgctgtgcagccaggccaagctgcaggcccagcaggagttgctgcagaccaagctggagcacctgggccccggcgagcccccgcctgtgctgctcctgcaggatgaccgccactccacgtcgtcctcggagcaggagcgagaggggggaaggacacccacgctggagatccttaagagccacatctcaggaatcttccgccccaagttctcgctccctccaccgctgcagctcattccggaggtgcagaagcccctgcatgagcagctgtggtaccatggggccatcccgagggcagaggtggctgagctgctggtgcactctggggacttcctggtgcgggagagccagggcaagcaggagtacgtgctgtcggtgctgtgggatggtctgccccggcacttcatcatccagtccttggatggctcacgccccctcagaatggaggctgctgaccccgggtcccctgccctgcagaacctgtaccgactggaaggggaaggctttcctagcattcctttgctcatcgaccacctactgagcacccagcagcccctcaccaagaagagtggtgttgtcctgcacagggctgtgcccaaggacaagtgggtgctgaaccatgaggacctggtgttgggtgagcagattggacgggttccccagcgagggtcaaactcccagagagcctgggtgaggggtccgaacacgggggcccctcacccaggggtaggaagcagaatgggtaggaagcggagaagagaactgcgggactgggaaggccgtggtaggagcccaagaccgtttcaggggaactttggcgaagtgttcagcggacgcctgcgagccgacaacaccctggtggcggtgaagtcttgtcgagagacgctcccacctgacctcaaggccaagtttctacaggaagcgaggatcctgaagcagtacagccaccccaacatcgtgcgtctcattggtgtctgcacccagaagcagcccatctacatcgtcatggagcttgtgcaggggggcgacttcctgaccttcctccgcacggagggggcccgcctgcgggtgaagactctgctgcagatggtgggggatgcagctgctggcatggagtacctggagagcaagtgctgcatccaccgggacctggctgctcggaactgcctggtgacagagaagaatgtcctgaagatcagtgactttgggatgtcccgagaggaagctgatggggtctatgcagcctcagggggcctcagacaagtccccgtgaagtggaccgcacctgaggcccttaactacggccgctactcctccgaaagcgacgtgtggagctttggcatcttgctctgggagaccttcagcctgggggcctccccctatcccaacctcagcaatcagcagacacgggagtttgtggagaaggggggccgtctgccctgcccagagctgtgtcctgatgccgtgttcaggctcatggagcagtgctgggcctatgagcctgggcagcggcccagcttcagcaccatctaccaggagctgcagagcatccgaaagcggcatcggcctaggtgcagctcctcagcggctccagctcatatgctgacagctcttcacagtcctggactcctgccaccagcatccacactgccggcaggatgcagcgccgtgtcctctctgtgtccctgctgctgccagggcttcctcttccgggcagaaacaataaaaccacttgtgcccactgaacactcctggcatgtgcactcctctggaaggcaggtctcagaaggcacaagtgccggaaacatagagcaggcacggaaaggaaagggactcgaggaatgcgctgtaccgacaggaggcagcacccctttgcccgaggggcgcaacgacagagacctaaggctacctgggccggagccggcttcagaggctggcggacccgcgcggggccggcgcacggagcgctccggctgccccggggcccagcttggaccgcggcagcggcccccggagcaaggggctacgggtgagcgtgcgcccgccttcgcctgcgtcgctgcctgcacgcgggccgccgtccccgggcgtgtgtgtgtggaggccagtatgaagctgaaaaagcaggtgacagtgtgtggggctgccatcttctgtgtggcagtcttctcgctctaccttatgctggaccgagtgcaacacgatcccacccgacaccagaatggtgggaacttcccccggagccaaatttctgtgctgcagaaccgcattgagcagctggagcagcttttggaggagaaccatgagattatcagccatatcaaggactccgtgctggagctgacagccaacgcagagggcccgcccgccatgctgccctactacacggtcaatggctcctgggtggtgccaccggagccccggcccagcttcttctccatctccccgcaggactgccagtttgctttggggggccggggtcagaagccagagctgcagatgctcactgtgtcggaggagctgccgtttgacaacgtggatggtggtgtgtggaggcaaggcttcgacatctcctacgacccgcacgactgggatgctgaagacctgcaggtgtttgtggtgccccactctcacaatgacccaggctggatcaagacctttgacaagtactacacagagcagacccaacacatcctcaatagcatggtgtctaagctgcaggaggacccccggcggcgcttcctctgggcagaggtctccttcttcgccaagtggctggtgggaaacgggcagctggagattgcgacaggaggctgggtgatgccagatgaggccaattcccactactttgcattgattgaccagctcatcgaaggacaccagtggctggagagaaatcttggtgcaaccccccgctctggctgggcagtggacccctttggatacagctccaccatgccttacctgctgcgccgtgccaacctcaccagcatgctgattcagagagtgcactatgccatcaagaagcactttgctgccacccacagcctagagttcatgtggaggcagacatgggactcggactccagcacagacatcttctgtcacatgatgcccttctacagctatgacgtcccccatacctgtggcccagatcccaagatctgctgccaatttgatttcaaacgcctgcctggtgggcgcatcaactgcccttggaaggtgccaccccgggccatcacagaggccaacgtggcagagagggcagccctgcttctggaccaataccggaagaagtcccagctgttccgaagcaacgtcctcctggtgcctcttggagatgacttccgatatgacaagccccaggagtgggatgcccagttcttcaactaccaacggctctttgacttcttcaacagcaggcctaacctccatgtgcaggcccagtttggcactctttctgactattttgatgccctgtacaagaggacaggggtggagccaggggcccggcctccagggtttcctgtgctgagcggggatttcttctcctatgcggaccgggaggatcattactggacaggctattacacttcccggcccttctacaagagcttagaccgagtcctggaagcccacctgcggggggcagaggttctgtacagcctggctgcagctcacgctcgccgctctggtctggctggccggtacccactgtctgatttcaccctcctgacggaagctcggcgcacattggggctcttccagcatcacgatgccatcactggcacggccaaggaggctgtggtggtggactatggggtcaggcttctgcgctcccttgtcaacctgaagcaggtcatcattcatgcagcccactatttggtgctgggggacaaggagacctaccactttgaccctgaggcgcccttcctccaagtggtggggtgggaggaggctgagcccatgatggttcttcccttccggctcactgaattccaggatgacactcgcttaagtcacgacgccctcccagagcgcacggtgatccagctggattcctcgcccaggtttgtggtcctattcaacccactggaacaggagcgattcagcatggtgttcctgctggtcaactctccccgcgtgcgtgtcctttcggaggagggtcagcccctggccgtgcagatcagcgcacactggagctctgccaccgaggcggtccctgacgtctaccaggtgtctgtgcctgtccgcctgccagccctgggcctgggcgtgctgcagctacagctgggcctggatgggcaccgcacgctgccctcctctgtgcgcatctacctgcacggccggcagctgtccgtcagcaggcacgaagcgtttcctctccgtgtcattgactctggcaccagcgacttcgccctcagcaaccgctacatgcaggtctggttctcaggccttactgggctcctcaagagcatccgaagggtggatgaggagcacgagcagcaggtggacatgcaggtccttgtctatggcacccgtacgtccaaagacaagagtggagcctacctcttcctgcccgatggcgaggccaagccctacgtccccaaggagccccccgtgctgcgtgtcactgaaggccctttcttctcagaggtggtttcgtactatgagcacattcaccaggcggtccggctttacaatctgccaggggtggaggggctgtctctggacatatcatccctggtggacatccgggactacgtcaacaaggagctggccctgcacatccatacagacatcgacagccagggtatcttcttcacagacctcaatggctttcaggtgcagccccgacggtatctgaagaagctccccctccaggccaacttctaccccatgccagtcatggcctatatccaggacgcacagaagcgcctcacgctgcacactgcccaggccctgggtgtctctagcctcaaagatggccagctggaggtgatcttggaccggcggctgatgcaggatgacaaccggggcctaggccaagggctcaaggacaacaagagaacctgcaaccgtttccgcctcctgctagagcggcgaaccgtgggcagtgagcctgactttttctccaaactggcagccatgtttaggggcttgatctttcacagcagcaggagcggtaaccgagaggtccaagatagccactctaccagctacccatccctcctcagccacctgacctccatgtacctgaacgccccggcgctcgctctgcctgtagccaggatgcagctcccaggccctggtctgcgctcatttcatcctctggcttcctcactgccctgtgacttccacctgctcaacctacgtacgctccaggctgagcactgcctctgggcagaggcgctgctgcatctccgatctctgaaagccctgcgcccacttccctgggcactgtctgtcatccaggaggacaccctaccctcggcggagaccgcactcatcttacaccgcaagggttttgactgcggcctggaggccaagaacttgggcttcaactgcaccacaagccaaggcaaggtagccctgggcagccttttccatggcctggatgtggtattccttcagccaacctccttgacgttactgtaccctctggcctccccgtccaacagcactgacgtctatttggagcccatggagattgctacctttcgcctccgcttgggttag

SEQ ID NO: 149442 - DNA, 6609 bp, Homo sapiens
atgggcttctcttctgagctgtgcagcccccagggccacggggtcctgcagcaaatgcaggaggccgagcttcgtctactggagggcatgagaaagtggatggcccagcgggtcaagagtgacagggagtatgcaggactgcttcaccacatgtccctgcaggacagtgggggccagagccgggccatcagccctgacagccccatcagtcagtcctgggctgagatcaccatccaaactgagggcctgagccgcttgctgcggcagcacgcagaggatctgaactcagggcccctgagcaagctgagcctgctcatccgggaacggcagcagcttcgcaagacctacagcgagcagtggcagcagctgcagcaggagctcaccaagacccacagccaggacattgagaagctgaagagccagtaccgagctctggcacgggacagtgcccaagccaagcgcaagtaccaggaggccagcaaagacaaggaccgtgacaaggccaaggacaagtatgtgcgcagcctgtggaagctctttgctcaccacaaccgctatgtgctgggcgtgcgggctgcgcagctacaccaccagcaccaccaccagctcctgctgcccggcctgctgcggtcactgcaggacctgcacgaggagatggcttgcatcctgaaggagatcctgcaggaatacctggagattagcagcctggtgcaggatgaggtggtggccattcaccgggagatggctgcagctgctgcccgcatccagcctgaggctgagtaccaaggcttcctgcgacagtatgggtccgcacctgacgtcccaccctgtgtcacgttcgatgagtcactgcttgaggagggtgaaccgctggagcctggggagctccagctgaacgagctgactgtggagagcgtgcagcacacgctgacctcagtgacagatgagctggctgtggccaccgagatggtgttcaggcggcaggagatggttacgcagctgcaacaggagctccggaatgaagaggagaacacccacccccgggagcgggtgcagctgctgggcaagaggcaagtgctgcaagaagcactgcaggggctgcaggtagcgctgtgcagccaggccaagctgcaggcccagcaggagttgctgcagaccaagctggagcacctgggccccggcgagcccccgcctgtgctgctcctgcaggatgaccgccactccacgtcgtcctcggagcaggagcgagaggggggaaggacacccacgctggagatccttaagagccacatctcaggaatcttccgccccaagttctcgctccctccaccgctgcagctcattccggaggtgcagaagcccctgcatgagcagctgtggtaccatggggccatcccgagggcagaggtggctgagctgctggtgcactctggggacttcctggtgcgggagagccagggcaagcaggagtacgtgctgtcggtgctgtgggatggtctgccccggcacttcatcatccagtccttggatggctcacgccccctcagaatggaggctgctgaccccgggtcccctgccctgcagaacctgtaccgactggaaggggaaggctttcctagcattcctttgctcatcgaccacctactgagcacccagcagcccctcaccaagaagagtggtgttgtcctgcacagggctgtgcccaaggacaagtgggtgctgaaccatgaggacctggtgttgggtgagcagattggacgggttccccagcgagggtcaaactcccagagagcctgggtgaggggtccgaacacgggggcccctcacccaggggtaggaagcagaatgggtaggaagcggagaagagaactgcgggactgggaaggccgtggtaggagcccaagaccgtttcaggggaactttggcgaagtgttcagcggacgcctgcgagccgacaacaccctggtggcggtgaagtcttgtcgagagacgctcccacctgacctcaaggccaagtttctacaggaagcgaggatcctgaagcagtacagccaccccaacatcgtgcgtctcattggtgtctgcacccagaagcagcccatctacatcgtcatggagcttgtgcaggggggcgacttcctgaccttcctccgcacggagggggcccgcctgcgggtgaagactctgctgcagatggtgggggatgcagctgctggcatggagtacctggagagcaagtgctgcatccaccgggacctggctgctcggaactgcctggtgacagagaagaatgtcctgaagatcagtgactttgggatgtcccgagaggaagctgatggggtctatgcagcctcagggggcctcagacaagtccccgtgaagtggaccgcacctgaggcccttaactacggccgctactcctccgaaagcgacgtgtggagctttggcatcttgctctgggagaccttcagcctgggggcctccccctatcccaacctcagcaatcagcagacacgggagtttgtggagaaggggggccgtctgccctgcccagagctgtgtcctgatgccgtgttcaggctcatggagcagtgctgggcctatgagcctgggcagcggcccagcttcagcaccatctaccaggagctgcagagcatccgaaagcggcatcggaaacatagagcaggcacggaaaggaaagggactcgaggaatgcgctgtaccgacaggaggcagcacccctttgcccgaggggcgcaacgacagagacctaaggctacctgggccggagccggcttcagaggctggcggacccgcgcggagccggcgcagcggagcgcgccggctgcccggggcccagcgggagagctgcagcagcgcgcggagcagggggctacgggtgggcgggcgcccgccttcgcctgcgtcgctgcctgcacgcgggccgccgtccccgggcgtgtgtgtgtggaggccagtatgaagctgaaaaagcaggtgacagtgtgtggggctgccatcttctgtgtggcagtcttctcgctctaccttatgctggaccgagtgcaacacgatcccacccgacaccagaatggtgggaacttcccccggagccaaatttctgtgctgcagaaccgcattgagcagctggagcagcttttggaggagaaccatgagattatcagccatatcaaggactccgtgctggagctgacagccaacgcagagggcccgcccgccatgctgccctactacacggtcaatggctcctgggtggtgccaccggagccccggcccagcttcttctccatctccccgcaggactgccagtttgctttggggggccggggtcagaagccagagctgcagatgctcactgtgtcggaggagctgccgtttgacaacgtggatggtggtgtgtggaggcaaggcttcgacatctcctacgacccgcacgactgggatgctgaagacctgcaggtgtttgtggtgccccactctcacaatgacccaggctggatcaagacctttgacaagtactacacagagcagacccaacacatcctcaatagcatggtgtctaagctgcaggaggacccccggcggcgcttcctctgggcagaggtctccttcttcgccaagtggctggtgggaaacgggcagctggagattgcgacaggaggctgggtgatgccagatgaggccaattcccactactttgcattgattgaccagctcatcgaaggacaccagtggctggagagaaatcttggtgcaaccccccgctctggctgggcagtggacccctttggatacagctccaccatgccttacctgctgcgccgtgccaacctcaccagcatgctgattcagagagtgcactatgccatcaagaagcactttgctgccacccacagcctagagttcatgtggaggcagacatgggactcggactccagcacagacatcttctgtcacatgatgcccttctacagctatgacgtcccccatacctgtggcccagatcccaagatctgctgccaatttgatttcaaacgcctgcctggtgggcgcatcaactgcccttggaaggtgccaccccgggccatcacagaggccaacgtggcagagagggcagccctgcttctggaccaataccggaagaagtcccggctgttccgaagcaacgtcctcctggtgcctcttggagatgacttccgatatgacaagccccaggagtgggatgcccagttcttcaactaccaacggctctttgacttcttcaacagcaggcctaacctccatgtgcaggcccagtttggcactctttctgactattttgatgccctgtacaagaggacaggggtggagccaggggcccggcctccagggtttcctgtgctgagcggggatttcttctcctatgcggaccgggaggatcattactggacaggctattacacttcccggcccttctacaagagcttagaccgagtcctggaagcccacctgcggggggcagaggttctgtacagcctggctgcagctcacgctcgccgctctggtctggctggccggtacccactgtctgatttcaccctcctgacggaagctcggcgcacattggggctcttccagcatcacgatgccatcactggcacggccaaggaggctgtggtggtggactatggggtcaggcttctgcgctcccttgtcaacctgaagcaggtcatcattcatgcagcccactatctggtgctgggggacaaggagacctaccactttgaccctgaggcgcccttcctccaagtggtggggtgggaggaggctgagcccatgatggttcttcccttccggctcactgaattccaggatgacactcgcttaagtcacgacgccctcccagagcgcacggtgatccagctggattcctcgcccaggtttgtggtcctattcaacccactggaacaggagcgattcagcatggtgttcctgctggtcaactctccccgcgtgcgtgtcctttcggaggagggtcagcccctggccgtgcagatcagcgcacactggagctctgccaccgaggcggtccctgacgtctaccaggtgtctgtgcctgtccgcctgccagccctgggcctgggcgtgctgcagctacagctgggcctggatgggcaccgcacgctgccctcctctgtgcgcatctacctgcacggccggcagctgtccgtcagcaggcacgaagcgtttcctctccgtgtcattgactctggcaccagcgacttcgccctcagcaaccgctacatgcaggtctggttctcaggccttactgggctcctcaagagcatccgaagggtggatgaggagcacgagcagcaggtggacatgcaggtccttgtctatggcacccgtacgtccaaagacaagagtggagcctacctcttcctgcccgatggcgaggccaagccctacgtccccaaggagccccccgtgctgcgtgtcactgaaggccctttcttctcagaggtggttgcgtactatgagcacattcaccaggcggtccggctttacaatctgccaggggtggaggggctgtctctggacatatcatccctggtggacatccgggactacgtcaacaaggagctggccctgcacatccatacagacatcgacagccagggtatcttcttcacagacctcaatggctttcaggtgcagccccgacggtatctgaagaagctccccctccaggccaacttctaccccatgccagtcatggcctatatccaggacgcacagaagcgcctcacgctgcacactgcccaggccctgggtgtctctagcctcaaagatggccagctggaggtgatcttggaccggcggctgatgcaggatgacaaccggggcctaggccaagggctcaaggacaacaagagaacctgcaaccgtttccgcctcctgctagagcggcgaaccgtgggcagtgagcctgactttttctccaaactggcagccatgtttaggggcttgatctttcacagcagcaggagcggtaaccgagaggtccaagatagccactctaccagctacccatccctcctcagccacctgacctccatgtacctgaacgccccggcgctcgctctgcctgtagccaggatgcagctcccaggccctggtctgcgctcatttcatcctctggcttcctcactgccctgtgacttccacctgctcaacctacgtacgctccaggctgagcactgcctctgggcagaggcgctgctgcatctccgatctctgaaagccctgcgcccacttccctgggcactgtctgtcatccaggaggacaccctaccctcggcggagaccgcactcatcttacaccgcaagggttttgactgcggcctggaggccaagaacttgggcttcaactgcaccacaagccaaggcaaggtagccctgggcagccttttccatggcctggatgtggtattccttcagccaacctccttgacgttactgtaccctctggcctccccgtccaacagcactgacgtctatttggagcccatggagattgctacctttcgcctccgcttgggttag

SEQ ID NO: 149443 - DNA, 414 bp, Homo sapiens
atggagaaagatgaatgagaggcgaagagttatcggggactccttcagtctggggaccgcttgggcccacatggtgccccggtgcccttgatctgctggccttgcccccacaggtgcagccccgacggtatctgaagaagctccccctccaggccaacttctaccccatgccagtcatggcctatatccaggacgcacagaagcgcctcacgctgcacactgcccaggccctgggtgtctctagcctcaaagatggtgagtagggcccaggagttctgcagagggtatcagacaaaaagaagcccgtccccaccctcaagggctccccgctctgttggcctcccttgcctctttctggactgcatcacctccatgcttggagagggggcaagccattcagagctcttggcacag

SEQ ID NO: 149444 - DNA, 791 bp, Homo sapiens
  misc_feature (1)...(791): n = a,t,c or g
cttgacggccggcaactgtccgtcagaggcacgaagggttcctctcggtgtattgactctgcacaagcgaactcgccctcagcaccgtacatgcaggtctggttctcaggccttatgggctcctcaagagcatcngaagggtggatgagaggcacgagcagcaggtgnacatgcaggtccttgtctatggcacccgtacgtcaaaagacaagagtggagcctacctcttcatgcccgatggcgaggcaaagccatacgtccccaaggagccccccgtgctgcgtgtcactgaaggccctttcttctcagaggtggttgcgtactatgagcacattcaccaggcggtccggctttacaatctgccaggggtggaggggctgtctctggacatatcatccctggtggacatccgggactacgtcaacaaggagccttcatttcagcttcaattaatagggaagaatttatgatagctctatagatgctgaaaaggtatttcgtaagatttaaaatccatcccttattaaaactctttagtaaattaagtctggaaagaaacaccctaatctagataaaggtctgtttcagaaaccaacagtgatggcattctaaagagtcagacgccacaggcattcccattaaagtcagaaactagccaagggcaagctattattcagcagtgtcccggcactactaacccctgcaacaagccagatgaggaacataaggaagaattataattgtcattatttgtagacaataaaactgcctacctgtaaaacctaagaatc

SEQ ID NO: 149445 - DNA, 4950 bp, Homo sapiens
ggcagctcggccgactgggcccggagcggcgcggaggccgggcgctgacggtgtgtgtggaggccagtatgaagctgaaaaagcaggtgacagtgtgtggggctgccatcttctgtgtggcagtcttctcgctctacctcatgctggaccgagtgcaacacgatcccacccgacaccagaatggtgggaacttcccccggagccaaatttctgtgctgcagaaccgcattgagcagctggagcagcttttggaggagaaccatgagattatcagccatatcaaggactccgtgctggagctgacagccaacgcagagggcccgcccgccatgctgccctactacacggtcaatggctcctgggtggtgccaccggagccccggcccagcttcttctccatctccccgcaggactgccagtttgctttggggggccggggtcagaagccagagctgcagatgctcactgtgtcggaggagctgccgtttgacaacgtggatggtggtgtgtggaggcaaggcttcgacatctcctacgacccgcacgactgggatgctgaagacctgcaggtgtttgtggtgccccactctcacaatgacccaggctggatcaagacctttgacaagtactacacagagcagacccaacacatcctcaatagcatggtgtctaagctgcaggaggacccccggcggcgcttcctctgggcagaggtctccttcttcgccaagtggtgggacaacatcaatgtccaaaagagagcggcagtccgaaggctggtgggaaacgggcagctggagattgcgacaggaggctgggtgatgccagatgaggccaattcccactactttgcattgattgaccagctcatcgaaggacaccagtggctggagagaaatcttggtgcaaccccccgctctggctgggcagtggacccctttggatacagctccaccatgccttacctgctgcgccgtgccaacctcaccagcatgctgattcagagagtgcactatgccatcaagaagcactttgctgccacccacagcctagagttcatgtggaggcagacatgggactcggactccagcacagacatcttctgtcacatgatgcccttctacagctatgacgtcccccatacctgtggcccagatcccaagatctgctgccaatttgatttcaaacgcctgcctggtgggcgcatcaactgcccttggaaggtgccaccccgggccatcacagaggccaacgtggcagagagggcagccctgcttctggaccaataccggaagaagtcccagctgttccgaagcaacgtcctcctggtgcctcttggagatgacttccgatatgacaagccccaggagtgggatgcccagttcttcaactaccaacggctctttgacttcttcaacagcaggcctaacctccatgtgcaggcccagtttggcactctttctgactattttgatgccctgtacaagaggacaggggtggagccaggggcccggcctccagggtttcctgtgctgagcggggatttcttctcctatgcggaccgggaggatcattactggacaggctattacacttcccggcccttctacaagagcttagaccgagtcctggaagcccacctgcggggggcagaggttctgtacagcctggctgcagctcacgctcgccgctctggtctggctggccggtacccactgtctgatttcaccctcctgacggaagctcggcgcacattggggctcttccagcatcacgatgccatcactggcacggccaaggaggctgtggtggtggactatggggtcaggcttctgcgctcccttgtcaacctgaagcaggtcatcattcatgcagcccactatctggtgctgggggacaaggagacctaccactttgaccctgaggcgcccttcctccaagtggatgacactcgcttaagtcacgacgccctcccagagcgcacggtgatccagctggattcctcgcccaggtttgtggtcctattcaacccactggaacaggagcgattcagcatggtgtccctgctggtcaactctccccgcgtgcgtgtcctttcggaggagggtcagcccctggccgtgcagatcagcgcacactggagctctgccaccgaggcggtccctgacgtctaccaggtgtctgtgcctgtccgcctgccagccctgggcctgggcgtgctgcagctacagctgggcctggatgggcaccgcacgctgccctcctctgtgcgcatctacctgcacggccggcagctgtccgtcagcaggcacgaagcgtttcctctccgtgtcattgactctggcaccagcgacttcgccctcagcaaccgctacatgcaggtctggttctcaggccttactgggctcctcaaggggtcagggctgtgttttttggcagagcatccgaagggtggatgaggagcacgagcagcaggtggacatgcaggtccttgtctatggcacccgtacgtccaaagacaagagtggagcctacctcttcctgcccgatggcgaggccaagccctacgtccccaaggagccccccgagctgcgtgtcactgaaggccctttcttctcagaggtggctgcgtactatgagcacattcaccaggcggtccggctttacaatctgccaggggtggaggggctgtctctggacatatcatccctggtggacatccgggactacgtcaacaaggagctggccctgcacatccatacagacatcgacagccagggtatcttcttcacagacctcaatggctttcaggtgcagccccgacggtatctgaagaagctccccctccaggccaacttctaccccatgccagtcatggcctatatccaggacgcacagaagcgcctcacgctgcacactgcccaggccctgggtgtctctagcctcaaagatggccagctggaggtgatcttggaccggcggctgatgcaggatgacaaccggggcctaggccaagggctcaaggacaacaagagaacctgcaaccgtttccgcctcctgctagagcggcgaaccgtgggcagtgaggtccaagatagccactctaccagctacccatccctcctcagccacctgacctccatgtacctgaacgccccggcgctcgctctgcctgtagccaggatgcagctcccaggccctggtctgcgctcatttcatcctctggcttcctcactgccctgtgacttccacctgctcaacctacgtacgctccaggctgaggaggacaccctaccctcggcggagaccgcactcatcttacaccgcaagggttttgactgcggcctggaggccaagaacttgggcttcaactgcaccacaagccaaggcaaggtagccctgggcagccttttccatggcctggatgtggtattccttcagccaacctccttgacgttactgtaccctctggcctccccgtccaacagcactgacgtctatttggagcccatggagattgctacctttcgcctccgcttgggttagggcttcttgtggcctgaagagaaagttcattcacagagactgcctcttaacatgaagatcattggacaagccacacgggtatcccatcccgatctgcctcccagaactgtgacacactgggctctgccctcattttctgtttattgctgctgctgtgttttcggcgcaacccacaaacccagtgatgggtaaatagggcagacgccagtgagatcagggagagaaggcccttggtcagagtgggcagtgccaggctctgctttgggttgtgagtggacacccaactgggcacaggctcaggcacccatcctttttccaaacagggatatagaagtggtggaagcagacagaagaggtaagggaggctaagtgggtaacagcccagcatcagggtcactgtggcaacagcaggctctaggggaatcctgtggttatgtagagactccatgtcctggtgtgatgagcaggatcagagtgactctgggaggacaggggtggggacccagagttagcagtggggatggagcagtagaaggaatcactgtttctcctaggagtctgaaggcctcgctgctttctgtgatggctttgcagtaagtgccgcctggcctgcatgcattggctaacaggctgcagaatggcaggaaggactcgctagagattgtcatggccagagatcataggtcacttcaggtagcaagacccctggcaaactgggcacttggcctatgtactgatttgtgggatggtggcaggggtgtggggtccttcaccctgcctgaattctctttggcttctgtgctctgtatgctgctgtccccaagggctctttcttattatggcagggagtggggattggtcctactttctttctctggaaaggaaagcctccaagactccatgtgcttgggcagcttgagaaggcgttcagcaccacgcctagcaggcagaccttgaagcctcacctttagtctatctgcagaggtattcagttcctggcacaggggactaggggcatgtagagtatatgaggaggcagtatggctgtgcaggagccttcatttcagcttcaattaatagggaagaatttatgatagctctatagatgctgaaaaggtatttcgtaagatttaaaatccatcccttattaaaactcttagtaaattaagtctggaaagaaacaccctaatctagataaaggtctgtttcagaaaccaacagtgatggcattctaaagagtcagacgccacaggcattcccattaaagtcagaaactagccaagggcaagctattattcagcagtgtcccggcactactaacccctgcaacaagccagatgaggaacataaggaagaattataattgtcattatttgtagacaataaaactgcctacctgtaaaa

SEQ ID NO: 149446 - DNA, 438 bp, Homo sapiens
tttcgtaccagccaaggttgcgggggccgcagagccggacgaagacggagggcggagccggcttcgggactgcggagactacacaccgagcgagcgcctgggcccgaagggagcgatgctgtggttccagggcgccattccggccgccatcgcgacggccaaaaggagcggcgcggtcttcgtggtgttcgtggcaagtgatgatgaacagtctacacagatggctgcaagttgggaagatgataaagttacagaagcatcttcaaacagttttgttgctattaaaatcgataccaaaagatgcatttgctaaaaagtgaaacatcagtagcaaatggcagtcagtcagaaagttcagtgtctactccatctgcgtcatttgaacctaacaacacttgtgaaaactctcagtccagaaatgcagagctttgtgagata

SEQ ID NO: 149447 - DNA, 1611 bp, Homo sapiens
atgcaagatgttaatttatggtacattcttgctgtggaaagctatgcatctgttagagaatacttcagcagtctccatgccagtcagatcacccattataaggtatttctgtcatgggcacagctcctcccagcaggaagcacccagaatccagacgagaaaacagtgcagtgctaccggcgactcctcaaggccctcaagactgcacggcttcagctcatggtcatcctgcaccaccagaccctccctgccagcaccctccggagaaccgaagcctgtgctgacgtcttcgccgactatgccacattcgccttccactccttcgaggacctagttggggatctggttcaccttcatgacttggaggaagtgatcaaggagcttcaccaccaggaatcaagagcgtcacaactccagaccctcagtgatggccacagaagagcctatgagatttaccacgaaagctatgcttttcaggctggaccaccaccgccacctggtggggggatggtgatgatgcagctcagtgtaccaaacaatccacaatcttgtgcccactcacccccgcagtggaaacaaaacaaatattactgtgatcaccagagaggacagaagtgtgtagaatttagcagtgtagacaatattgtccagcacagccctcaactcagtagccccattatttcaccagctcagtcgccagcaccagctcagctgtccaccctgaaaactgtacgtccctctggaccaccactttccatcatgccccaattttctagaccttttgtccccgggcaagagtataaatcaacctgtattttggtctctactgccatgatgcatttgctaaaaagtgaaacatcagtagcaaatggcagtcagtcagaaagttcagtgtctactccatctgcgtcatttgaacctaacaacacttgtgaaaactctcagtccagaaatgcagagctttgtgagataccacccacttctgatacaaagtcagatactgcaacaggtgatgatgaacagtctacacagatggctgcaagttgggaagatgataaagttacagaagcatcttcaaacagttttgttgctattaaaatcgataccaaaagtttctttattggagacagtggaattcccttggaagtaatagcaggaagtgtttctgcagatgaacttgttacaagaattcacaaggtccgacagagagaaattaagaaggaaattgagaggagaaaaactggaaaagaaatgttggattataaaagaaaacaagaagaagaattaacaaaaagaatgctggaggaaagaaacagagagaaagcagaagatagggcagctcgagaacgtataaaacagcagattgcattggaccgtgcagagagagctgctcgttttgcaaagacaaaggaagaagtagaggctgccaaagctgctgccttgctagcaaaacaggcagaaatggaagtcaagagggaatcttatgcaagagaaagaagcactgttgcaagaattcaattccgtcttcctgatggttcttcctttacaaatcagttcccttctgatgctcctctagaagaggcaaggcagtttgctgcacagattgcttag

SEQ ID NO: 149448 - DNA, 3120 bp, Homo sapiens
atggcgccggaatggcgccctggaaccacagcatcgctcccttcgggcccaggcgctcgctcggtgtgtagtctccgcagtcccgaagccggctccgcctccgtcttcgtccggctctgcggcccccgcaaccttggctggttcggcccccacctccggctccgcacaagcgcgcacgcccgtcagcggcacccgaaaacgcgcgctagcgcgcgcgagaacacctcacgtcacagtcgcaacccgtcggtgtccgtgccccaggaccttctctcgttggcgagtcgatgtgctggcagtattcctataaccctggagagctgccttcctgtgggcctttccaaggatgtctggccactgaccattgagccaaaagtgaaagttttcatcttcaacctaaaactcccagactgcccctccaccatgaagaacccagccagtctgctcttcagcctttttgaaggtgagtgggccattgctgaagaggttttgagtgacatctggtgcactggtgtgctagccataaataaagaccaagtgctcaccattgggtttgatattaatgagtttctgagttgttcatcaagttccaagaaaagcatgtcttgttctctgactggcagcctggcccttcagcctgaccagcagcaggaccacgagaccacggactcctctcctgcctctgcctatcagagaatctgggaagcatttgccaatcagtccagggcggaaagggatgccttcctgcaggatactttccctgaaggcttcctctggggtgcctccacaggagcctttaacgtggaaggaggctgggcagtgggtgggagaggggtccaacctaaacatgtgaaggaagctttccggttactgaataaatcaatcatccgtgtggaaacacctgatgtcaatctagatcaagaggaagagatccagatggaggtagatgagggtgctggtggcatcaatggtcatgctgacagccctgctcctgtgaacgggatcaatggctacaatgaagacataaatcaagagtctgctcccaaagcctccttaaggctgggcttctctgagtactgccgaatctctaaccttattgtgcttcacctcagaaaggtggaagaagaagaggacgagtcagcattaaagaggagcgagcttgttaactggtacttgaaggaaatcgaatcagagatagactctgaagaagaacttataaataaaaaaagaatcatagagaaagttattcatcgactcacacactatgtagaatacttcagcagtctccatgccagtcagatcacccattataaggtatttctgtcatgggcacagctcctcccagcaggaagcacccagaatccagacgagaaaacagtgcagtgctaccggcgactcctcaaggccctcaagactgcacggcttcagcccatggtcatcctgcaccaccagaccctccctgccagcaccctccggagaaccgaagcctttgctgacctcttcgccgactatgccacattcgccttccactccttcggggacctagttgggatctggttcaccttcagtgacttggaggaagtgatcaaggagcttccccaccaggaatcaagagcgtcacaactccagaccctcagtgatgcccacagaaaagcctatgagatttaccacgaaagctatgcttttcagggatggcttgctttcacccacatgtctcagaccttagcaaacaagatcagagtgaggggcatggctcaggagagctgttcacatggctcttcagtaggttacctgcaacatccaggatcagaacaagtacaatttcctcgaaccacttcaccatgcagttcccagcagcttcaaggccaccaatgtacagctggaccaccaccgccacctggtggggggatggtgatgatgcagctcagtgtaccaaacaatccacaatcttgtgcccactcacccccgcagtggaaacaaaacaaatattactgtgatcaccagagaggacagaagtgtgtagaatttagcagtgtagacaatattgtccagacttcattaaactgtacagatcctgtagtgtgtgttccatccagtttcttttattggagacagtggaatccctttggaagtaatagcaggaagtgtttctgcagatgaacttgttacaagaattcacaaggtccgacagatgcatttgctaaaaagtgaaacatcagtagcaaatggcagtcagtcagaaagttcagtgtctactccatctgcgtcatttgaacctaacaacacttgtgaaaactctcagtccagaaatgcagagcttttgtgagataccacccacttctgatacaaagtcagatactgcaacaggaggagaaagtgcaggccatgccactttcctcttcagggagcctagtggatgctcagatcagagacctgcagaggacctcaacatccgagtggaaagactaacaaaaaaaacttgaagaaaggagagaagagaaaagaaaagaggaagaacagagagaaattaagaaggaaattgagaggagaaaaactggaaaagaaatgttggattataaaagaaaacaagaagaagaattaacaaaaagaatgctggaggaaagaaacagagagaaagcagaagatagggcagctcgagaacgtataaaacagcagattgcattggaccgtgcagagagagctgctcgttttgcaaagacaaaggaagaagtagaggctgccaaagctgctgccttgctagcaaaacaggcagaaatggaagtcaagagggaatcttatgcaagagaaagaagcactgttgcaagaattcaattccgtcttcctgatggttcttcctttacaaatcagttcccttctgatgctcctctagaagaggcaaggcagtttgctgcacagacttcagtgagagtaacatcgtcagaacccccaaaccctgcatcatctagcaaatcagaaaaaagggaaccagtgagaaaaagagtgctggaaaaacgtggagacgactttaaaaaggaggggaaaatttatagattaaggactcaagatgatggtgaagatgaaaacaacacttggaatggaaattccactcaacagatgtag

SEQ ID NO: 149449 - DNA, 849 bp, Homo sapiens
ctggggcccggggcacccccttcctgtcaccagcttctgtggagtccagtgttttgctttgcttgcttgtcccccatcctgtcctgagccggggccccccagcctcgcctccctcctcctaccatccctcacttggacctgggggtgtggacagtgacccctccctgaatatggacttgaatcttctgagcagaactagggcctctcccctggtgaagacccagggaacccaggagggcccttctggggaagtgggctctgcagggtcactcatggaggcctaggggaacaagcgagatgccccaccacctcctggcgagtccttcctgttcagctccctgtgcgaccctccagggatgcaggggatccaggattctctgccctgtcacacggcgagtcagaagggaggggcctttcccttcggacccatggccccaggcagagttttgcaccagcaaggacccctttgagggccttcaaggctctcccaggagtccccctctgccggccccccaatgccccagcttccctcttgggtcctgtgccaagtccgccccagggcctggggctgttgggagcccaagggcccccctggtactcagttccctccacgattccccgatccatcgggcacaccctgcccccctggttatttggaaatatttctattggacccaattcctcctcggaattggctggcacctctggctgccgcagctcagtgatgacgtgggggaggtgggagatgccgatggctttgcctaggggtgggttgcccttgtatacatgatccagtctgtgactaccagccaaccatgaataaagcgggttttataaacacaaaaaaag

SEQ ID NO: 149450 - DNA, 1029 bp, Homo sapiens; identical to SEQ ID NO: 140796

SEQ ID NO: 149451 - DNA, 894 bp, Homo sapiens
atggcattggagcaaagactcaaaggtggctcaggagcagccttgagaagcaaggcattcccggcagagggtactgccggtgcaaaggccctggggcaggagagtgactggagcattggaggagcagtgagcaagccagtgtttgtgcagtcagtgagggagcttgttgcagatccttgtgccagcaacccttgtcaccatggcaactgcagcagcagcagcagcagcagcagcgatggctacctctgcatttgcaatgaaggctatgaaggtcccaactgtgaacaggcacttcccagtctcccagccactggctggaccgaatccatggcaccccgacagcttcagcctgttcctgctactcaggagcctgacaaaatcctgcctcgctctcaggcaacggtgacactgcctacctggcagccgaaaacagggcagaaagttgtagaaatgaaatgggatcaagtggaggtgatcccagatattgcctgtgggaatgccagttctaacagctctgcgggtggccgcctggtatcctttgaagtgccacagaacacctcagtcaagattcggcaagatgccactgcctcactgattttgctctggaaggtcacggccacaggattccaacagtgctccctcatagatggacgaagtgtgaccccccttcaggcttcagggggactggtcctcctggaggagatgctcgccttggggaataatcactttattggtagccagcagtcctgtcccgagctcttcctggggagggatggccaggttcctaaccatgataaatcaactccacctccacaccgccagctgcttctcttacaaaatcttttcatccttcagaaacaagatgtaccttttgcaatctttgcggaagcctga

SEQ ID NO: 149452 - DNA, 3193 bp, Homo sapiens
atgcagccccgccgcgcccaggcgcccggtgcgcagctgctgcccgcgctggccctgctgctgctgctgctcggagcggggccccgaggcagctccctggccaacccggtgcccgccgcgcccctgtctgcgcccgggccgtgcgccgcgcagccctgccggaatgggggtgtgtgcacctcgcgccctgagccggacccgcagcacccggcccccgccggcgagcctggctacagctgcacctgccccgccgggatctccggcgccaactgccagcttgttgcagatccttgtgccagcaacccttgtcaccatggcaactgcagcagcagcagcagcagcagcagcgatggctacctctgcatttgcaatgaaggctatgaaggtcccaactgtgaacaggcacttcccagtctcccagccactggctggaccgaatccatggcaccccgacagcttcagcctgttcctgctactcaggagcctgacaaaatcctgcctcgctctcaggcaacggtgacactgcctacctggcagccgaaaacagggcagaaagttgtagaaatgaaatgggatcaagtggaggtgatcccagatattgcctgtgggaatgccagttctaacagctctgcgggtggccgcctggtatcctttgaagtgccacagaacacctcagtcaagattcggcaagatgccactgcctcactgattttgctctggaaggtcacggccacaggattccaacagtgctccctcatagatggacgaagtgtgaccccccttcaggcttcagggggactggtcctcctggaggagatgctcgccttggggaataatcactttattggttttgtgaatgattctgtgactaagtctattgtggctttgcgcttaactctggtggtgaaggtcagcacctgtgtgccgggggagagtcacgcaaatgacttggagtgttcaggaaaaggaaaatgcaccacgaagccgtcagaggcaactttttcctgtacctgtgaggagcagtacgtgggtactttctgtgaagaatacgatgcttgccagaggaaaccttgccaaaacaacgcgagctgtattgatgcaaatgaaaagcaagatgggagcaatttcacctgtgtttgccttcctggttatacatggagagctttgccagtccaagattgattactgcatcctagacccatgcagaaatggagcaacatgcatttccagtctcagtggattcacctgccagtgtccagaaggatacttcggatctgcttgtgaagaaaaggtggacccctgcgcctcgtctccggtgccagaacaacggcacctgctatgtggacggggtacactttacctgcaactgcagcccgggcttcacagggccgacctgtgcccagcttattgacttctgtgccctcagcccctgtgctcatggcacgtgccgcagcgtgggcaccagctacaaatgcctctgtgatccaggttaccatggcctctactgtgaggaggaatataatgagtgcctctccgctccatgcctgaatgcagccacctgcagggacctcgttaatggctatgagtgtgtgtgcctggcagaatacaaaggaacacactgtgaattgtacaaggatccctgcgctaacgtcagcttgtctgaacggagccacctgtgacagcgacggcctgaatggcacgtgcatctgtgcacccgggtttacaggttatagagtgcgacattgacataaatgaatgtggacagtaaccccttgccaccatggtggggagctgcctgggggaccagcccaatggttataacttgccactgcccgcatggttgggtgggagcaaactgtgagatccacctccattgggaagttccgggcacatgggcggagagcctcaccaacatgccacggcacttccctcttacattcattcattgggagcccttcttgcgtgggcctttccatccttatgctgatcatcctgatcgtggggatttgccgcatcagccgcattgaataccagggttcttccaggccagcctatgaggagttctacaactgccgcagcatcgacagcgagttcagcaatgccattgcatccatccggcatgccaggtttggaaagaaatcccggcctgcaatgtatgatgtgagccccatcgcctatgaagattacagtcctgatgacaaacccttggtcacactgattaaaactaaagatttgtaatctttttttggattatttttcaaaaagatgagatactacactcatttaaatatttttaagaaaataaaaagcttaagaaatttaaaatgctagctgctcaagagttttcagtagaatatttaagaactaattttctgcagcttttagtttggaaaaaatattttaaaaacaaaatttgtgaaacctatagacgatgttttaatgtaccttcagctctctaaactgtgtgcttctactagggtgtgctcttttcactgtagacactatcacgagacccagattaatttcttgtggttgttacagaataagtctaatcagaggagaagtttctgtttgacgtttgagtgccggctttctgagtaaagttaggaaaaccacgtcaccgaaccatatgatgtataatagagtattcccgttactttaaaaagaagttctgatatgttcgttctgtggaaaagaaactagttaaatttactattcctaaccccgtatgaaattagcccttggcccttattcctgtgcaaggggtaagtaacttatttccggcactgttttgtggaactttgtggaaacattctttcgagtttgtttttgtcatttttcgtaacaggtcgtcgaactagggcctcaaaaacatacgtaaccgaaaaggcctagcgaggcaaattctgattgatttgaatctatatttttctttaaaaagtcaagggttctatattgtgagtaaattaaatttacatttgagttgtttgttgctaagaggtagtaaatgtaagagagtactggttccttcagtagtgagtatttctcatagtgcagctttatttatctccaggatgtttttgtggctgtatttgattgatatgtgcttcttctgattcttgctaatttccaaccatattgaattaatgtggtccaaacaagggaaaaaaaaaaaaaaaaaaaaaaaaaaaaa

SEQ ID NO: 149453 - DNA, 1130 bp, Homo sapiens
acgatttcgtgcccagcggtccggtccaggcgcccgcgcagaatcagctgtctgagctgcccaggcggcggtggagcagcgagcgggcttcagcgagccgcaggaggcacaggcctgtcctgggtccccgcaggtctgcgcgtctgttgttcccagcgctcttggaggcctgcaaaggaagagcaacctgtccagactccccgcaggacaggaaaaggaggggaaatctctgacatggaaaaaccctacaataaaaatgaaggaaacctggaaaacgagggaaagccagaagatgaagtatagcctgatgatgaaggaaagtcatactaggaagaaaagccatacgcgtaggggaatacagaatgcgagggaaagctaaaggctgatggagagccaggtgatgagggacaactggaagataatggaagccaggaaaagcagggcaagtccgaatgtgagggcaagccacaaggcgagggcaagccagcctcccaggcaaagccagagagccagccgcgggccgccgaaaagcgcccggcttgaagattatgtggccccggaaaggcaaaaaagaaaaaccggaccagggggaccggacgattttcccccaaggactctcaggaggacttacaggaaaggcatctgagcagtgaggagatgatgagagaatgtggagatgtgtcaagggctcaagaggagcttaagggaaaaaaacagaaaatgggtggttttcattgggatgcaaagagatgtacaggatccatttcgccccaaggggacaacggggtgtcaggggagtgaggggtggaggtaggggccagaggggcttacacgatatcccatacctttaatgcctttggccttccattctgatttctctgatgagaatattgctggccctgctttccccggaagggtattagccaggccccaatgctttaaccttaagctgatatttttgctttagatgtcaatctcgttaccagcagccttttgacccaactacagcgctctatattttagtagaggattttcacccatgtgcatggaaaagatgttcatggtacattgtaaaaaaataaaattaaaattaaaaaaagtttgcagaaccgcaaaaaaaaaaagtcgac

SEQ ID NO: 149454 - DNA, 1157 bp, Homo sapiens
ctgtggctgcacttggggacccttgtggacccatggggtgtggctagggaacccccttaaagtttcaagactaaaggaaaagatcctgggtgatgcatggctttttgcttctttcttctgcccttcccacctcagcttgtaagcggggatgtgtgtatgtctggggagaggaggtgtagggtgcgtatgtccatggggggaggggcttgtgtgtgcagtcattgttccaaggtgtttccagtagcgacttctgtccccctatccccaccctggtccccactttgcgcccccgggctccctgcctttggtgcacacaggatcctgcccgccccccttgccagagccagagaagggggttggggccattccaaggaggcaggactgaaaccctcaccagggttactccccaacatccttttgcctgagtcaccctctaagcgctttaaccacgggcagctgcctgttccccagacagtttttggtgggggggggtccaggggtccccctttgctggtacctccctcactccctctttttgtttttccattttgtggctgtttcctttcacagcccaggggacacagaagcccaccttcttccccttaggaggagggatagtcaacacccctgctgtctgtctgtcactcacacactgatttatggggtctgagctgggctgttcctgcaggatggacaggacccagcgccctcttctccccacaggctgtaaatagacttccaatcaccaggccagcccccacacaccctcactcattccccagggaagccccaggtaggtggtgaaccccgctgcccacgtcctatcagtccctcctgttttatggcaaagatttacctgtaaagtagatttctttcccctccctcccccattcttttaattgtaaatattgtcctcctaaatgtgtaacatattataaagaatttataaggatttttaaagatgttttgctcatttaccaaaagtgttgtaacagtgttggacaaagccttccaccccatgtccgcatggctcctttcactgtgtccttgacacacctctctggcaacaactaaaatttcctgcttctgaaaagtcctgtcttaaaagtacagtctatatcttggaaataaatagctttcctcaaaaaaaaaaaaaa

SEQ ID NO: 149455 - DNA, 723 bp, Homo sapiens
gattatcttttcaactgtggcccagcattttcactttccttatggtaccatttgataaacaaccattctcattttaagttttttaattttacttttcagttggtactttaaaaaatcgttgccaacattagagaaggtcacaaagatattttagtagctatttaaaaaaatcttttaattttaagatctatattccatatcatattgatatttacatatgggatgtgctaaaggtcaagattaattatttttctatgtgaagaatatacaatatcctcacttcttaagagatttctccattttattatctttgtcaaatatcaaatgactagatatatgtaaatctgtttctgaactttctattatcttccattagtctattcatatttgcatatatagcacacttttaattactgcaaatacataaaatgtcttgatgtcttatcgcataaacccacctctttctattttcttttgatgttttggttattcttgactgttgcttttgtttacagattttagactcagcttgccagttttcaccaaaaaactgctgagaattttattaaatatatagattattcaaaggagcactgatagctttacaacattgaattgtccagtatctgaatagcaccacatattttaaattttcattgaagtataaatatatgtagaaaaatgtatatgtcatatgtgtcatgattgtttaattttcaacac

SEQ ID NO: 149456 - DNA, 394 bp, Homo sapiens
ctggggaattatgggggatgcagagcagctgaggctccgtttggcaccacccctttgagggtgccctccgaggccccatcccaggggctgcggggaaaccgggcctggggaccccctcccaccctgggctgagcccacaccccgctgcctgtgctgcctgtccccggcttccaggtctctgctcctgcgcgccaggcagcgctccacttccgcggcttcgcccttgacagcgccctgtggatcttccgattcggtaccccgaacccctgtagacgtggcctagggagccccggaccgccggcccctgcggctcccaaagccgaataacttcttcaaggtggtgagttcttctcagacccccaaccactggctcctgagccgcggcagctccgtg

SEQ ID NO: 149457 - DNA, 342 bp, Homo sapiens
attatctggggtttgtactgtacatatccggggtgtgtgtgtgtgggctgggggcaacccttctggtacagagcttcctggccccctccccccccgcccctctgcttcccctccccacccaccacctcaagggtagggagttgctcttcctacctgttttattttgttttctcgttctccctccccaccccactcccaaccttatctatcccccctgcactgtccccttttccccactcccagccccatttgcctttttttgctggtagtgtgtggtgaaacagaaaaaaacatgtttaataaacgggagattgttcttttaaaaaaaaaaaaaaaaaaaaa

SEQ ID NO: 149458 - DNA, 543 bp, Homo sapiens
ctgctctcaaagtggataattataactccctcgggggcgggaagcggggatcctcccccagccgcaagtccacgaagaaagcaacgaatgaaaattatgaagacaacgagaagtcagactcctccgggtcgcgctccagctgcttcggcttcgtcgcctactctgtgaactccggggagagatctcgagtcaagattaagaccttaacccaccaacctgcctgttcggacaccccccgggacggccgctgtctgtccccttctccatcgccctctcccagaaagctccggtgcttggaccagctagagtctgagaaagaggagaggcgcgaacgccactccaaaaagagaagggttaaagagggcacccctaacgatacgcttgactttctgtggctgggaacaccttccagtacaaaaattaagtggactagacctccagctgttgagcccctcctagttcttcatcccactccaactcttccccctctcccagttgtcccgattgtaactcaaagggtggaatatcaaggtcgtttttttc

SEQ ID NO: 149459 - DNA, 2804 bp, Homo sapiens
cttatgttaggctgatttataagtgctgctttgggcagttacacagtttgtttacaatgaggagttatttgactttgaacatactgtacatggcaattagaagttgtcatggcaaaagaaaaccacagctggcctgccacagccaacacaagaaccagaaaatggtagatgaaatgaaggaataaaggtggggtttattccttattataaaagaaaaaaaataattcttcagcagtcttaacaaagacatcaagatacaaaattacaagtgttttgactccagccctgtcccatctcctccaagaggcagaggtaggagacagttgaagcaaacaagcaattctgtaaaaattacctagaaacccatcaaatttgattaaaatctaaacttctataattttgctttttaaaaaatttaatatcaaaaggcctgctttagtgacatgctattcctaccagaaaataaccccaataccccctctgtcagtaacatgctcaagttgaccagccaactcttatctctaaacctatgtggacaagtgtgtcttttaaaccaaagccacggagatcaagtgactgctagtaacggtgttggtctgttaactaatccagtgcccaccttctccagagggtgggcagggcagaaacccaaaaggggtcttgagggcctaatcccagatcaccatctaagaaccacttcccttgctctctactcaaaatgagatgctttatttctaatccgactatttgtctcaaatttggtgccccgtgacctggatggttttttcctttagccaaaacacacataatccacaaaaccatacatatagttttttgtctttacatttaaatataaaaatactattctgctttgtgtgataaatcaaggaccaagcagtaagaaccttttcttctttcaaggtagggatatccatcagtttatactaagcttcgtgttcagagcagggcatttagtcccaagccaggctagtcccacaagcaagagaccaaagccattctctctgattcccaacccctaccttctctcctaattcccacttttaatagaaaagttggttataaactttttaaagaaaaagtttcccaccacaagggcaagtccctaacctaaccagagtacgtccaggtcttcccctttcagctaccctggaagaagagtcccccctctgcaaacgtgcctctgtcccggaattacgtacgccctattggacaggtgcacccccattaaatggaagcagtggttatgtctcccccaccctccctcccccactaatgcactaaaaagcttacagtgatagggaaaaaaaggagggtaggtgtgaagaaattaataacttgacccctctatcccagccaaacaaaagaaagcaaggattatctgggcacatggaatgaaaaaaaacgaccttgatattccaccctttgagttacaatcgggacaactgggagagctgggaagagttggagtcagggatgaagaactaggaggggctcaacagctggaggtctagtccacttaatttttgtactggaagggctcatcggcggtttcattgagaagacacgtgcggatgagggcttctgtcaccgaaaaggggtccgcagttggcaagaggggcgaccgattcttcaaagtaacccttctttctcctggccaacagtccggggaaaggcgtatgctggcgctacgattggctacaccagcagaaaaatcgttgatgttgggagggtttattggaattcaattaaaccttggggatttgtcccaggcctcccctggggatcatatggcacggatgtgggtacttgtggccgcttgctttgtttctctaatggcctcctcgatgtacttaaaaccattctcctcccgcatggccttggtgctagatttggtatggagacctgcaccattccagttccccaagagtggggctaaggatcaaaggttgctatcactccccaagtcttcacacacacgaatgcaagatgaaacgggccacccagaagatagtcctccctgcttgattccttcacaaggtccaatctgaaattcccacctggagaggactgactccggctttagttcccggaattcttgtcccagacataaaagcaggcccggtaatgggcctccccgaatgtcccttccaaggcttctgtctcctccccacacccagtaaatattgaccttggggccctgggaagacccttggaaggccaaccaaaggggtgcccatctgtccccatgagggtatactcctgctccatgccaaaccaggggtgctggttgctcaccatgtccattatccgtttacaggtgtgcctcaaattggtctctgcaggccttcgattgtacttgaaaacttcacataacaccagcttgttagggtccttacggaaggggtcccgaaacatggcagcaggcacgagatacatgtcactgttggaaccctcagactgtaaagtactggagccatcgaaattccactcaggcaactcttccacacacttgggctcactgtccagggtccgggtcttgcagcgcagtccttctccagtaccatcgatccagatatacatggcctggactttctcaccctgaggcagggacatgtacacctgcttgatgcctttatttaagtgggaacttgctgaggtggtcatggtggaaggtgttctggtcgccgagcaggcgggcgggtaaaggtaggccgagagtgggagaagagcggagcgtgtgagcagtactgcggcctcctctcctctcctaacctgctctcgcg

SEQ ID NO: 149460 - DNA, 1222 bp, Homo sapiens
atgcatgggaaaagcactgctgtgctagaaatggactattcaattgttgattttctaacgctgtgtgaaacaccatacccaaatgattttcaagaaccatatgctgtggttgttcttctagaaaaggatttagtacttatagaccttgcacaaaatggatatcctatatttgaaaatccctaccctttgagtatacatgagtcccctgttacatgttgcgaatattttgcggattgtcctgtggaccttattcctgcactttattctgttggagctagacagaaacgtcaaggttacagcaaaaaggaatggcccatcaacggaggtaattggggcttgggtgctcaaagttacccagaaataattattacagggcatgctgatgggtcagttaagttctgggatgcttctgcaataactctacaagtattatataagctaaagacatctaaagtatttgaaaagtcaagaaataaagatgacaggccaaacacagacattgtagatgaagatccatatgccattcagatcatctcctggtgtccagaaagtagaatgctgtgcatcgctggagtttcagctcatgtcattatttatagattcagcaagcaggaagtaatcacagaagtcattccgatgcttgaagttcgattattatatgagataaatgatgtggaaactccggagggtgagcagccaccacctttgccaacacccgtgggagggtccaaccctcagcccatccctcctcagtctcatccatctaccagtagcagttcatctgatgggcttcgtgataatgtaccttgtttaaaggttacattttgccatctgcctttccagagtaagtggctctatgtgggcactgaacgaggtaatatacatattgtcaatgtggagtccttcacactctcaggctacgtcattatgtggaataaagccattgaactgtcatctaaatctcacccaggacctgtggtccatataagtgataatccaatggacgagggaaagcttttgattggctttgaatctggaacagtagttttatgggacctcaaatcaaagaaagccgactacagatacacatatgatgaggctatccactctgttgcttggcatcatgaaggaaaacaatttatttgcagtcattcagatggcaccttgactatatggaatgtaaggtcccctgctaaaccagtacagacaatcactccacatg

SEQ ID NO: 149461 - DNA, 570 bp, Homo sapiens
agctcatgtcattatttatagattcagcatgcactaagtaatcacagatgtcattccgatgcttgaagtgcgatcagtatatgagataaatgatgtgggaactccggagggtgagcagatcaccacctttgccaacacccgtgggagggtccaaccctcagcccatccctgctcagtctcatccatctaccagtagcagttcatctgatgggcttcgtgataatgtaccttggttaaaagttaagaactcaccacttaaacagtctccaggttatcaaacagaactagttattcagttggtttgggtgggtggagaaccaccacaacaaatagccagcctggcagtcaattcttcctatggactggtggattttggcaattgcaatggcattgctatggttgactacctccagaaagcagtgctgctcaacctgggcactattgaattatatggctctaatgatccttatcggagagaaccccgatctcctcgtaaatctcgacagccttcaggagccggtctgtgtgatattagtgaaggcctcgtgccaagcaaggcgtaaggaggtc

SEQ ID NO: 149462 - DNA, 1401 bp, Homo sapiens
ccagaatcaaaggtttgcatttcgtatggaatgtatccaaagaggccagcaccacggtaggacagcttgcaatcacacaccctgatagttcgggcgaaataaagtttgcagaattttatttaaatttttattttgtattcgtagttgtttgtcatcgtaccaatgcatgcaaagcattccactcccagaaacaacgccaaaatgaggtaataggagtaataaaaaaaattagtatcctttctaaataaataaattataattaaaaatgcaaaacaactataaaaataattaaataagaacccacgatatctacaagtcacgtcataaattatgattgttaaatataaggcatttaaactcacaaaaccctgtaaactagcaacgtgccatgttttttgttttttgtgttttttttttcatttttgtttttctatcagctgaaatcgctctagcatttgctctacgcgcgcaggagatgaaacacaagggggcctgacagacgttgctacagccccacgcagggagtgtttgtcccgcctacaggcggggggcttaggggatttctttaggaaaaaaagaaaaaaagtctggtgcttttttcttcaccattgaaaaactgtgcttgttcattaggcgtaaagagttaagaatacttgcacggaggctgggaacatttgcagaagaggagcttgagtcctgccacaggtggtggccaagggcaactgggtgccgaagggggtcctggccaggtggaggggcagcccctgctcaccctctgcttgcacccaaccaagcttgtggtgttgggttgattgattggcgtcctcggtggacccgcggcggcacagctgctgcaggtgctaggacgcccaacttaaaccctggggctgctctcaccccagaaggcactcatgcgtctcagtcaagaaagggtctgagtcccttgagttgagcaggaggaggacttaccagtggtctcccctcctggaggtggtggatgtgagatgctgaggcctgaccctgcctcttctccactcttcccagactccctgaccagtgccgggagcagaagcacagaccctggccctctcttgtcccccaaacagctgcccggctaaagaagtgggagctgcagggttctgagcaccccttcacctcctgtccccatctgtgggggaaggaggaggggcttcagggtctacccccaaagtaagcagcttccctctcccctttggtggtcccctccacagtccataatattagcctgggccagagaattgggaggggggaggggacgagggcccactgtctcacccagcacgtgtgcccgcagcccagtctgaaacagagtgtgtgcccacagaaagtccttttcaatagctcggacgcgtgggtcgagac

SEQ ID NO: 149463 - DNA, 394 bp, Homo sapiens
acagccaggccccatccgagtagcagctcatactcccccgctgtcgtaggcgtggacccagccatggaattctatccatatggctctggcaagcacaaggccaaatatgcctttaagaagcgggccagcctgacatgcctcaactgcagcttcaggagctgttcacccgatcactggttgagagcgagctccgaattgccccgtctgagtacccagatgagagccccattgagcagctggaggagcgtaggcagctactggagcagcctatcagcctagacgtgatgctggagccatacattctgcgtcgatccaagctggatttactgtacacggacagtgactcggacctacagctctacaaggaacagggtgaggggcagggtgaccggag

SEQ ID NO: 149464 - DNA, 666 bp, Homo sapiens
tttcactccttccaaaaatatttattggatgtctacgacgtgccagcagtggccctggtgctgggaatatgcttggctctccctcgccacagcctctggtttccatccttggtatcgccgagtcttggtcaactctcccacaggggcagcccccggccaatcctgaagcgtgggcaggaccggctggtgccaaaactgacaaatccaaaacctaaggccacttcacaccagagactctcccaaacgtccccaaaaaagacccccttcaactcggtgcttgaaagcctggggggtccaaaccttctgaagagggtggtcacaatcccgggcccgtggttgaggaactcgggattcttccctccttccctcaacccacggtggggaccttttcccagcaccctttgggaacgcttctagaactgttctcagcccttcagagccttaaggaatccaccggtcccgctctaaggggttctaagagccagcaatccctggccacccccacatccccacacacaccccgcaaacatgcccccggcaccaccacgggtccggctgaggtccagttccactagcgcgcctcctccttggggctgcacgcaggggccgcgcggtgcacgcgctggtgcttgagcaggtgctgcttctagctgaagccgcggccgc

SEQ ID NO: 149465 - DNA, 415 bp, Homo sapiens
ttttttttttttttagaaaatgggtgaatatatttgcaaattacatgtgaaaaaagttaatattaaaaatatatcaacaactctaaaaactaaaccataaagttcaataacttgatttataaatgaacaaacaaaactttcatcaaaaaactacacaaatgggaagaaacatttgacaggatgcacaaaattactcatttgcagagaaatgaaaaaaaaaacacaatgacagcgaaatcatctcacacccattagaatggccactatatattttttaaaaaatgccaactctgttgatgatgcaataaaaatgaaacccatgttggttgttggtggaaaacaaagatgtagtcattattttaaaatgttattaatgttcctcatttatatatctatatacaaaatatgtaacaca

SEQ ID NO: 149466 - DNA, 397 bp, Homo sapiens
  misc_feature (1)...(397): n = a,t,c or g
nggaccaacccacagacatcatactggatgagcaatagctggaactattccatctgagaactggaataagaagaggatgcccagtctcatcgctcccattcaacttagagcaatcaggcaagagaaataaataaaaggcatccaactgggaaaagaaatcaaactagctctcttcgctgatatgattttatacctagaaaaccccgaagactctgccaaaagctcctagactgataaacaactttagtcaagtttcaggatacaaaatcaatgcacaaaaattaggagcatttctatacaccaataacgttcaagctgagagcaaatcaagaacccaataccatttacagtagccataaaaaaactgaaatacttaaaaatacacctagccaaggag

SEQ ID NO: 149467 - DNA, 328 bp, Homo sapiens
tgcacatattgacgctgttaatgaggccatgagactcctggagcatggatttcacgctcctaccatgtcctggcctgtgtcagggaccctcatggtggagcccattgagacggaggaccatgcatagctggacagattctgggatgccctgatcaaccttctgcagggcattgctgacattgaggatggccgcatctgccccagggtcaatccgctgaagatgtctccacactccctgacctgcgttacatcttcccactgggaccgggcttaattcagaaaagggggcagcattcccactccccttcgtgaaaccagagaacaaatt

SEQ ID NO: 149468 - DNA, 410 bp, Homo sapiens
agaatagcttaaaacaaaatgagaagacaggccactgatagagataaaatgcttgcaaaagacacattcgataaagagcacacttgaaatatacaatcaattcttaaaattcaacaataagaaaatgagtatcccaattaaataatgggcaaaaaacctgaaagtcatctcaccagagaagatatacaggtggcaaataagcccatgaaaagatgctccacctcatacttcatcaaagaaatgcaaattaaagcaatgacaagatcccgctgtgcagatattaagatggccaaaatccagaccactgacgacatcaaatgttgacggacatgcacacgcagcacgaattttcctttcccggcgctccaccttttttatcagctgacatttaggaagtcaatctcgcacac

SEQ ID NO: 149469 - DNA, 373 bp, Homo sapiens
  misc_feature (1)...(373): n = a,t,c or g
cggacaagggtttaaagggctttagggggttccccactttcacaagttttggccaaccaacttggttgggcttggggttagacttacccgaacccggaaattagggtccgggttttggctgtgggcccattcccgggttgggccaaccttgtcaaatttgggcccaggtcccgaaaggggcccccccggcccccctgggttgggagtgtaagcccttaaggggaaaagggcggacaagaaaggaggggccagtttttttccaggtttttaaaagtttccggttgggttaccctgagttnnnnnnnnnnnnnnnnnnntgtcacaaaacaaggatcaaacagagggcacgtttccctctccccttcccttctag

SEQ ID NO: 149470 - DNA, 366 bp, Homo sapiens
  misc_feature (1)...(366): n = a,t,c or g
aaggggggtggcatgaaaatttccattcttggggtatatgactgtcctgtttcccccaggccacnnnnnnnnnnnnnnnnnnnggaaacagggcttggtttttccccaggcggaataccggtagggcatccccggtgaacggcgccttgaacctccggggctaagggacccccgggcctaagcccccaaataaaggggaacaacgggcccggcccccaaaactaagttttttttggtgggtttaaaacaaaagtcccctttggtgcccaaggcgggtctgaaatcccgggcctaaaccaatttttccccctggccctccaaaggggcgaaaataccgggttggacccatggccccaccccttcaaa

SEQ ID NO: 149471 - DNA, 336 bp, Homo sapiens
tcctgcttctgttagcgccatgatgatgatgccctactctggcaaccacacggcagcatacgggatgatatgcggtaacacatagcaactttcaatgctttaagctatgtccaagcatctaagagagacaaaaaattttttgcctgtgctccaaattactcgtatgcagtcctttgtgagtgcctatcgtcgagtattcatctatcgtcagcctgctcccatgtccactgtattttacaacagaaaggattgcttgcaaaggtggacaggatgcttatccataaggtagcaagcctaaaaaccaacgatcctatcttaagtattcaggcaccaaag

SEQ ID NO: 149472 - DNA, 634 bp, Homo sapiens
aaagatacaaattgccagtattaggaatgaaataggacatcactaacagatgctacatacattcaaaggaggctaagggaataatgtggacaacttcaagccaataaatttgacaatttaaatggaagagacaaattccctggaagacacaaattaccaaaactgattcaaaaagaaatggaggctgggcgcagtggcctgcctctgtctcccagggtgctgggattgcaggcatgagccactgtgtctggcctcactggtaaattctataaaacatgtaaggaagagataataccaatcttaaccatactctttcaaaaaacggagaagggaacacttcaactcatcctaggaggagactagcacaattctaataccaaaccaggagggaaaaaaaaacttccaaaatgggtgtctctccatggaccctgggacaggaaaagtccctttaacaaaaatactggtaaatcagattcaacaatctgtaattcacaaagataacatcagtatatgktytcctgacagtgggtccttagtataatcattgtctacttcatttctttgcaatgctattattvaggcttgatgggatatttatbtbtymcacagcttaattaaggtataatgacatgca

SEQ ID NO: 149473 - DNA, 1514 bp, Homo sapiens
ccgggactttggaaggccaaggcaggggactcacttgagcccgggagttcaagactgcagtgagctgagatcatgccactccactccagcctgggcgacagagcaagactccatctccaaaaaaaaaaaaaaaaaggccggcacggtgactcacgcctataattccagcactttgggaggccaaggagggacagatcatgagatcaagagattgagaccagcctggccaacatggtgaaaccctgtctctactaaaaatgcaaaaaattagctgggcgtggtggcgggcgcttgtagtcccagctactcaggaggctgaggcaggagaatcacttgaacccgggaggcggaggttgcagtgagccgagattgtgccaccgcactccagcctgggcaacagagtgagactccgtctcaaaaaaaaaaaagggaaatcctggctttctttaagccacagacttcctaggctgtggtcccagctccttgtctacccgggcccctgtcaccttgcagtgccaccacccccaggggctctgcttgcttccagtggcttctgtagctttggcaactggcagatctttatggcagtagaggtgccagcatggaggatggagtttgggtttaataccccacccctcgaacgaaccaccctgtggggccctggagtggagctggttttggggagtcacaggtgcggggggttcatcatctcctttctccttctcctttcctgacccctccgacagcttccatgttgggccatggggtcaggtgaatgggatgggagctccaagcgggggttcagccatttttgaccccgagcgaaggcgcacacacctgcagcgtggatcaagcgcactctctccagcatcgccctgaccattccaggggcttggcccaaacatggccatttcttgactttctccacttcattttattaaaaagttaaatgctttaggaatctgtggcgtgtggccactgaccgccccccacctcctgccgctcctccaagtttgagctgagatggttctgtgagtccttggcaggggtcaaagggcacatctccttgaacctagaaagccccctacactctcagaggacacctctcctgtggattcagcgctggggcagtgaaggtgtcgggagccagcagagcatggtgcgtgctgccagctgccggccagccgggatagaggagatgccactggccctccgtgcccccagcccctccctcttaaccgaggctgtccttgctctctgcagaggccgctctgcaggatcctcgtgtcgcgcgtgatgtgtggtggcacagccgtgtcaaagtcacagtgtcttttctgtcgttctagttccagggtcacccccgagaggacaacaggcatctggaagtgctctctcgccactctgggtgctttactgtctctggcttgtttccatcactggaaatcacttagagaattgtagtgtttttggtccttgataaagcctagaagacatttgtgatgttacaaaat

SEQ ID NO: 149474 - DNA, 379 bp, Homo sapiens
ggaacaaaagctgccaaggcccgagaacctcctttgcttcagcaggctgggctttaaaaaaccctcggtggcaagaacaaaaagagggcttgggcaaagcaggaaggccctcgggaatgaattcttcagcatcctccccaacccccgggaggaagagggagcttggaatggggtctccctctctatctcggtcccccccatgatgtgaagtgaaggtccgacaggttgggctgaccaccctgaggagggcaggggggtggggggcacggtgcccccagcacacctgggccaggaggggaggcctggtgacttccacagcaaacctccagacccaagcctggtccccaggcctactgaggcgagaggcagtccaggcccc

SEQ ID NO: 149475 - DNA, 2022 bp, Homo sapiens
aagtgagggggctccaccaaggaggggggcttgggggggccctcctgcccgaagtcatactcttgctcccaccccacccttgcccccagccctctctccctgtgctttgcttgtctcaaatggctcggtgttgacccagggatggggctgggtagttggggtcccagaaagccgggggtaggggccaccctggaatggggcaggggaagggcacaccccctgcccatgcatggtagcccactgggtggtgcactggaaagccctagaaactagggttcctctgccccttccacatcccacctgtctctctagcttgcttcctgctctcctgtgcggcgtctgatttctcggtgctaacctggcagctgtggggcccttaggagccccccaccgagggtggacacagtccctttccttcctgcagatgcctaggcaggaggagggcttcctgcctgtttggcaaagtcccaggcagaggccaaggatgaggcctgactcggctcctccctccacatcagccagggcatcaaaagttgggccagggcggggtcttccgctgctcaattttggacgaggcctaatttaaccccctatggccctgccccagccctggctctttcctaaccccctcaacggtgggaggaactggcagagggtgcgcctgggccacagcctccccgcatctaaaggccccttcagttcttgaccaaaggtgctacgagaacctgccgtggaaacttccagttgtgcgtctgccccactcgctgtgtttgtccgtggggttcatacatgcattgggggctaggccccaggcttgtcgggtgggcaccctttaacagtttccttttgaatagggggcattgaaggcctggactgcctctcgcctcagtaggcctggggaccaggcttgggtctggaggtttgctgtggaagtcaccaggcctcccctcctggcccaggtgtgctgggggcaccgtgccccccacccccctgccctcctcagggtggtcagcccaacctgtcggaccttcacttcacatcatggtggggaacgagaatagagagggagaccccattccaagctccctcttcctcccggtgtttggggaggatgctgaagaatccattcccgagggcctcccggcttgtcccagcccctcttttgcttctgaccacggaggctttctcacagcccagcctgcctgaagcaaaggaggctcccgtgtcctgggcagcttctgtttccctctgctgcctgggagctgaggcacccgtgccagtggcagaggccacagccccagccttaagccaggccctgggagggcaggcaggcaaaggggagaccagagggtctgtgttctccaggagaatgagggtgttggtcccagaattgggaccggggccccgctggccagccctgggccacttcccgggtctccattgtgcgtgggtggcgtgttccaggcgtggctggagctggcttcctggctgtgctgccatgggcccctccctcagaagcacgttggcaggaggccgatcagaaccctagcgcctttggtcctaaagaatgggaggctgccttccttcccaatctcccttgccaaggccaacagcgtggccctagccctccccctcccccgggatgtagaaacggggacccctcgcaagggttgggggcgggggctgaatactccctcggccccctcccctacacctgaccctgtgtgttggctttgtggccgtcccaagtgcccaattggcttttcgccccaaataaggggctggtatttctcctctgtccttggaggtgatttccccctgacccccttcccccaggtgagtgaccacctgggtgccagttacaggtgtttccagagaccatagaaatgtgttttcctgagagttcgtgtcattcgtgactttttttgtaaagaagttgtgttaacagaggtgattttatgacaggaaagtgaaagaattagttttgcaaaaaaacaaaaacaaaaaaagaggaaaaaaaaa

SEQ ID NO: 149476 - DNA, 451 bp, Homo sapiens
  misc_feature (1)...(451): n = a,t,c or g
ncggatgtacgcgtggaggtggaaagcatggaacgggcgggaaattaaaggaaataatcccagatggaagcgtggaggtggaaagcatggaacgggcgggaaattaaaggaaataatcccagatggaagcgtggaggtggaaagcatggaacgggcgggaaattaaaggaaataatcccagatggaagcgtggaggtggaaagcatggaacgggcgggaaattaaagtaaataatcccagatggtagcgtgaaggtggaaagcatggttcgggcgggaaattaaaggaaataatcccagatgtaagcgtggaggtggaaagcatggaacgggcgggaaattaaagtaaataatcccagatggaagcgtgcaggtggaaagcatggatcgggcgggaaattcaaggaaataatcccagatggaagcgtcaaggtggaaagcatggaacgggc

SEQ ID NO: 149477 - DNA, 269 bp, Homo sapiens
ggagggagggctggggttgaaccgcttcccgccaccaccggggccgccccgccgcccggccgccgcttgcatgtcagctccctgaccgcagaggcctggcctccatgccgcgggaagagaaagcttcattgaacgagccgggagggccagggagggggagggggcgcggcagtggccagctccacggggagggaggacccagaggaggagaggagggaactggccgggaggaatggaaggagaaggcggaatcgacgcgcccgccagtt

SEQ ID NO: 149478 - DNA, 312 bp, Homo sapiens
ctggtgaattcaaaaatagtctgttatgaatgggacctccatttgtaaatgtagagcgaatgatgagactggtctatcgccttcaccagcgggccccaagagtcgaagtcggcgcctctcataactctggcgccccagcgctgcaacagactccgggtcacctccaacatgaccggtccccaccccgtcccctcccgcccctaccccagcaaggccgggttctagggcgccatcctcccccggcctggccccgacattaacagggccaggaggaaccgctacggccaccaccgccacccgccgaggagccgc

SEQ ID NO: 149479 - DNA, 505 bp, Homo sapiens
cagtagataatttggctgaatcatttggatactagatcttgatttttttaatgtattttttccggttttctcatttctaatctttgtttatgcctttggctttacagttttaaagtattggattcacctatatactaaccagttgatactagtacaatctttatgtatatttatttcatttccagatttggggatttttaatacaaaaggtacttgataaatgctatattattaataaataatgatgagcgtttttacattattaatctagtctttcaatcttgtatttgctccctaaaaatctatttcagttgcaaccgccaacccaggaaagtgcctgtcgtgcacaaactcaacattcactttcaccacctgtagaatattacatccctctgacatcactcaggttacccccaggtaagagtgcctgggaaatctggggcctcacttctttcctcagctgtattttcatgaatttctttttaaaattaccttcattttaatt

SEQ ID NO: 149480 - DNA, 6789 bp, Homo sapiens
atgaaacatactttgataccaagaattaaaaatgcctgtctacaaatgtcttcccttgctgttcctgtaaattcattagtgtgcttaggaaagattttggaatacttggataagtggttggtacttgatggtatcctacccttcttacaacaaattccatccaaagagtctgcagtcctcatgggtattttaggcatttacaaatgtacttttactcataagttgggaatcaccaaagagcagctgactggaaaagtattgcctcatcttattcccctgagtattgaaaacaatcttaatcagttcaattctttcatttccatcataaaagagatgctgaataggttggagtctgaacataagactaagctggagcaacttcatataatgcaagaacaacagaaatctttggacataggaaatcaaatgaatgtttctgaggagacaaaagttacaaatattgggaatcagcaaattgacaaggtttttagccacattggagcagaccttctgactggcagtgattccgaaaataaagaggatggtgctttgaatgttcctcctgctggtgcgaagccaacccaacaaagacccacagatatgtctgcccttaataatctctttggccctcagaaacccaaagttagcatgaaccaattatcacaacagaaaccaaatcagtggcttaatcagtttgtacctcctcaagtttctccagctacgggcagttcagtaatgggaacacagatgaacatgataggacaatctgcctttgatgtctgctccaatgaggatctccctgaagttgagctggtgagtctgctagaagaacaactaccacagtataggctaaaagtagacactctctttctatatgaaaatcaagactggactcagtctccacaccagcggcagcatgcatctgatgctctctctccagtccttgctgaagagactttccgttacatgattctaggcacagacagggtggagcagatgaccaaaacttacaatgacatcgacatggttacacatctcctggcagagagggatcgtgatctggaactcgctgctcgaattggacaagctctcttaaagcggaaccatgtcttatctgagcagaacgaatccctggaggagcaattgggacaagcctttgatcaagttaatcagctgcagcatgagctatgcaagaaagatgagttacttcgaatcgtctccattgcttctgaagaaagtgaaactgattccagctgttctacacctcttcggttcaatgagtcctttagcttatctcaagggttgctgcagttggaaatgctgcaagaaaagctcaaggaactggaagaagagaatatggctcttcgatccaaggcttgtcacataaagacagaaactgttacctatgaagaaaaggaacaacagcttgtcagcgactgtgttaaagaacttcgtgaaacaaatgctcagatgtccagaatgactgaagaattgtcagggaagagtgatgagctgattcgataccaagaagagctttcctctcttttgtcacagattgtagaccttcagcacaaacttaaagaacatgtgattgagaaggaagaactaaaacttcacctgcaagcttccaaagatgcccaacggcaactgacaatggagctgcacgagttacaagacaggaatatggagtgtctaggaatgttacatgaatcccaagaagaaataaaggaacttcgtagtagatctggccctactgctcatctctacttctcccaatcatatggagcttttactggggaatctttggcagctgagattgaggggactatgcgtaaaaagctgagtttggatgaggaatcttctctctttaaacaaaaagcccaacagaagcgggtatttgataccgtcaggattgccaatgacacacggggccgctctatctcattcccagctctgttacccattccaggctccaaccgttcaagtgtcatcatgacagcaaaaccttttgagtctggtcttcagcaaacagaggacaaatcactcctgaaccaggggagcagctcagaggaggttgcagggagctcccagaagatgggccaaccaggaccctcaggagatagtgatttggctacagcactgcatcgccttagcttgcgtcgacaaaactatttaagtgagaagcagttctttgctgaagaatggcagcggaagatccaggttctggcagaccagaaggaaggagttagtggctgtgtcaccccgacagagagccttgcctctctctgcaccacccagtcagagatcacagacctcagcagtgccagttgccttcgaggttttatgccagaaaaattacaaattgtcaagccccttgaaggatcacaaactctgtatcactggcagcagcttgctcaaccaaacttgggaaccatccttgatccacgaccaggtgtcattactaaaggctttacccagttgcccggggatgctatttatcacatctcagatttagaagaggatgaagaggagggtattactttttcaggttcagcaacctcttgaagtggaagagaaactttcaacatccaagccagtaacagggatcttcctgccacccattacttcagcaggtggaccagttacagttgcaaccgccaacccagggaaagtgcctgtcgtgcacaaactcaacatttcacttttcaccacctgtaggaatatttacatccctctgacatcacttcaggttacccccagctctggggttccctttcatttatcctgtgggaagtagcggtagcagttttcattccaacacggctgtgaattctcctgccttgtcctatagactcagcattggtgagtccatcaccaaccgacgagattccaattacaacctttcagtaggcaccatggaggttgggccaaaatttttacaagagcgaaggcatctctggccaaagtgtaccacagcccaattttcagagaaccccctccagcctctccctaaaatccctgggctatcccttccacaccaccaaattcaccatctcactcaccttgcccttctcctttaccctttgagcctcgagtgcatctctctgaaaattttttggcctctcgaccagctgagacattcctccaggagatgtatggcttgagaccctcccggaaccctcctgatgttggccagttgaagatgaacttagtggacaggctgaagagactggggatagccagagtggtcaagaaccctggtgcccaagagaatggaagatgccaggaggcagaaattggtcctcaaaaaccagattctgctgtttatttaaattcaggtagcagtttattaggtggactaaggaggaatcagagtcttccagtcataatgggtagctttgctgccccagtttgcacatcctcacccaaaatgggtgtcctgaaggaggactgaggttcagcagttaactgacctcttatacaagttagcacatgaaggatagatatgcactgaaacatgtggtctggtctgacttgagagaaaaggaatgttgcacaagggttgtgaatgtgaaagggggaatggaggaatggaaataaaattgggatgagccctaatggaggaagtcgggcaaattgaaagtataaatgaatgggccatgagtgttcagagggagaaaagaaaggtttaatatactccttcagttgagttttcttgtcttgaacataaaaagtgaatacaaataaattcagtaatactaaaacatacagagatactgaacttgctggcacatttacttctggtaagcataaagcagagagaacccaggttagaaggatgggaagagaaaaggagcagttttattgcttatagaaagccgttctgaggggttggtggggtaagctcagtctattactgagacaatagtgagatggcttatatgtttcccctgttaatatctggttaaattatgtatccatcaaatggtatgctcgcagcattagcaaaattaggagtttcatctttttcattgaatcacaggtggagactcctattttcctttctgttttcaggcctttgagcccctgggagcccaaataccactcaattattttgtatttatgattaataaaagttcattttttaaatttgtatttttatacaacctccaaaaaaaaaaacaactgggtagagggtgggagggatttacttttaagaggcaaaatgtgagtaaattgaaaccaagaaaacttgtttttagaatatttcgtctgaataagtacagtagccaaggaatacaaacataattgcatgtttttaaaaattccttggaggctggaaggggttaagccagaagtgcaatcaataggaattagggaatgttgtatatttatatatgtaaactttttttgtaagaaaagttggtgacaactaaaccaactttttccaaagtgcgctatgcatatttttaatgaaagatgacatgtatttgcacaaaaattctcaggcacattaaattattgtaaactgaagtaaaacccgggtgcttgctttgagattgtggttttttcttcctaatgtaaaataaaataaaacacatctgccttcttgatatttatagaattagagaataaactttttaatgggggagtcaaagctttttctttttctctaaggttctttttttttattcaaactgtatgaaatggcaaagtgaggctctggggttagatttcagcattcagcagttgacacaggctaagaaatggaaagaagtagatctgttttttctcaatgttgctgagcaaagtctgcttctcatcagatgacgtggctttgtctagacagcacgcagttcagaaagaaatgtctttatacaaaagacatgatagagaaaagatgagagaggggactaattattttgtttatgaaaatggcaagtaaattacttgatctttttggtgcttaatttgcaaatgttttgttcctttgtcctgacttaaaggcagttttctgaagaactcttgactcttgctcctatggttcccataggcacacctattcccaggccaaggagagtccttcctctccccttttgaggcatccccgccatccccccacttagagctatgtgctcaaaaagccaacatgaatgcagtggtaaaaatttgttagtttcttatactttttagaatctctcaataaaatttttctaaataaattccacaaaaacaaagggtgaagatggtctctccctttcgttccccttcactcagttgtgctgaggtcaatagagtgtagagtttcagaaaggattccagcaggtttatatgtgaatataagtgtccctgaatggggcaggcattaaatagaagaatccctgctgtttaaatttcccgcatattccaattcacttttaaaaaataccatttgaatttgtatttcataaagtgactctggggtgcttactttagtcaattcttaaaattttttatttgttccctaagaaagtaattactgtttctgttgcctggacagttacagtttccaggaaacatcaggaagtaggaaactgtagggccagagagtagtacaacgttaaattgtccgatttatgtgtattacttaaagctataaattgaactagatcttgccgtgctctgtattgagtataatttgtatacttttttataattaatgactaaatgatcactttggaggcagggtggtgggggtgtattagcagccaaataagcatatctgatcaaaaagaaccaggcttagattttttttaagtacattgatgttgatgttccaccagaaacaccttaagtgtatactgttgtgtaatgtctctagaaaggaatcctgtcttaaaactgggttttgctgttttttgaagtttctacctaaaatcatttttggtatatcctgataatctctataatactagaattgtctgcaaaatatagtaagaagaattggagcctaatagctgattcctcccaatttatctgttatgttttgtcactattcacattttagtcttttctacgataaaaattgtatgtgtactttcatgccagtataggaaacctcaatcttttttttttttcgcctttaagaaggttttcagtgattatacctcaggtatttctgagtgtcctattgtctaataggagaaatatcttcccgagctcagaattaaaagttctcctaaattatgaagatcccaaatcttatgtaaataaccttaggcatgagtccttagggagaagttaatgaccattgttaaagtgcttttttagaaaatgttgtgctgtatgttcttgatctgacataaatgaatagactttggcaagggaggaaataagttaaaaggcagcttacaagagcctattccctataaagggtataattttacacagtactcaaagcttgttatcttttctgaccattttagtacagaattagtacttggtggttactaacatcaacttgtgacatctagaactagggctcttagtgtttagtgggccacttctctgatgtcagatgcatgcagacctgtactccacatgcaacccaacagcagtgcagtgtgataactgagcggtcgcatggcagaggacatccccctcagagtgggcacaagtgccctctagggcagccaggggaatactattgttcgatacctgggatttgactttgtcaaacagctctttgtgcccctatctttgttttgtcaaatgtagatcagttaataaacatgagtagcttgaattttc

SEQ ID NO: 149481 - DNA, 329 bp, Homo sapiens
ccgtctcaccccagctcctttggctccgcaccccacccacacctgctgcccaccaccccggcagcacctttccctgcccaggcttcagagtgccctgttgctgctgccactgccccccacactccagggccatgtcagagctcccatctaccctccaccagcatgccgctcctgaagatgcccccaccattctcggggtgcagccacccctgcatcgggcactgtggtgggcactgcagtgggccttctcctcctaccctctagctgtgaggctgtccctaactctgacaggtatgggcgtcggatgagggtcaatgtatcctcccacg

SEQ ID NO: 149482 - DNA, 916 bp, Homo sapiens
cttgcttggggtggtaagggaaaaggggcatcatcagactcagggggattagtggactctatctctaccctgactcccactcctggggacacaaacacccatcggatctaatagtcagaggaggggcgtatggaggtcagtgggctcacggagttctagctcaggtccaaccctcggtgggtgcagaggtcacttccctagcctcagatgggtgagtaaacagacgtatgtggcagccagcagagcccccacatttgttccctgaccttgagggttggggctactatgctgggaaaggccaggttggaagccattggggtgaactcttcctagggaaaattgttcaattcaaaagcaacctgcagccctggagggactgcaaaggtcagtgccgccattcgaggacttggaagatgcagggtggtgacccccactgcagcctcgttccactcgtcttaattggcttgtgtggaagacaggggggtcccggagaaagaaggacagtgaatcctgggtaaacttaaccaggactccaattgcaactgctgttccagatatgactactgattcattggggcaaatccaaagcatccccggacacccggtcctacagcccattgatcctggtgaaagcctttaatttttaatatagattttattttttagagcagtttcatgtttacagagaaattgagcatatttgagagtcctcatatagcatctctccctacacacagtttcccttattattcatatcttgaattactgtgatacatctttgcaattgatgaaccaatattgacctagtcattgatcaggttacatgagggttcactcttcttgttgtacatgctgtgagttcgggcaaatgtgtaatggcatatctccactattacagtgtcacacagaattattt

SEQ ID NO: 149483 - DNA, 448 bp, Homo sapiens
ttttcttggcaatgatattttttaatatgacccaaatcacttctcagccttttggtcaagatcaattatgggtatgtccccaaatgacaagcaacaaaagcaaaattggacaactgggattacatcaaactacaaagcttctgcataactacaaaaataatgaacagagtaaggagacaacctgcagaatgagaaaatatatttgcaaaccaaacatctgacaaggggttaatatccaaaatatataaggaattgaaacaactcaatagtaagaaagcaaataacctaattaaaaactggtcagacgacttgaatagaatttctcaaatgaagacatacaaatggctagtaggtatatgaaaaaaatattcaacatcacaaatcatcagggaaatgcaaattaaaaccacaatgagatatcacttcatgcctattagaatgactacta

SEQ ID NO: 149484 - DNA, 310 bp, Homo sapiens
ggaaatttacatttaagaggcatcatcatttgcaattgctcaaaagaaaatgagattcataggtataaacttaacaaatgttcatggaacaaatcaaagaagacctaagtaaacaaagagacaactcatgttcatgaattggaaagctcagtatagcaaaaaatatatatgtatcaattatgcccaggttgatttgatgcaattcctatcaaaatcccagcaaggtttttttatgcttttggactttattgccgaaacagtgtctctctgtcgcccagattgaattaacgtaatgcatatcaattttacg

SEQ ID NO: 149485 - DNA, 236 bp, Homo sapiens
cggccactcactccaccctgccctcctttcagggacctgtctccctagcctccatgactgttgtgggaattgacggcaaagcctccagacctctccagactccacttgtgtgtcaactagatcagcactcctttttgcactccttttagtcatccccacttgtccagtccctctcctcggctgaggcatcctaacaaaactgtctgcctccctcactattcctaggctacagccac

SEQ ID NO: 149486 - DNA, 323 bp, Homo sapiens
ctgcccttcacaaagaggagagaactctccccggggctcccgccggcttctccgggatcggtcgcgttaccgcactggacgcctcgcggcgcccatctccgctgttgattctttgcctaattttttattttttgccgttattgaaaaagggatttttaaacaccccaagggggggactcaggaaatcagaggctcctttattcccatggttgctattggtacgggatatagacgtcctggtttaaggacttttttgaactaattctgtaccgtttgtgtactttatagcgtctgaccagcgaaatctgaactcgatgaacttt

SEQ ID NO: 149487 - DNA, 756 bp, Homo sapiens
gcttacgtccagccgcggcgcgcgcccagctccgcttcgcgctccagcccgaccgacccagcctttagagccaatccgttatcccgaagttacggatccggcttgccgactttcccttacctacattgttccaacatgccaaaggcctgttcaccttggagacctgctgcggatatgggtacggcccggcgcgagatttacaccctctcccccggattttcaagggccagcgagagctccaccggacgccgccggaaccgcgacgctttccaaggcacgggcccctctctcggggcggaacccattccaagggcggccctgcccttcacaaagaaaagagaactctccccggagctcccgccggacttctccgggatcgcgtcgcgttaccgacactggacgcctcgcgggcgcgccatgctccgccactccggattcggggatctgaacccgactcccctttcgaatcggccgaggggcaccggaggccatcgccccgtcccttcggaacggcgctcgcccatctctcaggaccgactgacccatgtttcaactgcttggttacaattggaacccttctccggttcggccttcaaaagttcttcgtttgaatatttgctactacacaccaagatcatgcacctgcggcggctccacccgggcccgcggattttcaagggccagcgagagctcaccggacgccgccggaaccgcgacgctttccaaggcacgggcccctctctcggggcgaaccca

SEQ ID NO: 149488 - DNA, 322 bp, Homo sapiens
gtatgggttctgtaacaggtcctctttactcaggttacaaggaggaagttgtttgctgcacacttgttgaagtatttccatcccttctccaggtgagcagaaatccccggatgccatttgattttcttgggattctaatcttctgtctgggcggccaaggattcccaagagcgacgacggtctccggccactggccggaatgactctcccagagctcctcttccccgaagctccgcccgccgaccctttaaagcaaacctgcacaccctggggcagctgaagctctcaaggcggtgccgagaacctcggctggggctcgtgc

SEQ ID NO: 149489 - DNA, 500 bp, Homo sapiens
  misc_feature (1)...(500): n = a,t,c or g
catagtagtccacaagcaactcttgaatgactctgtgtaaaatctcagacctcaaccatgttgtcttatgcagtcgaacttccttccatgcctgagcctgctcctttgctagggtgaggcttaagccactctcatccacatgcttgttgaagtatttccatcccttctccaggtgagcagaaatccccggatgccatttgattttcttgggattctaatagggcccgagatgaatcaaaatgcagaacgggctctccggcgcctacttcccttctgtctgggcggccaaggattcccaagagcgacgacggtctccggccactggccggaatgactctcccagagctcctcttccccgaagctccgcccgccgaccctctaaagcaaacctgcacaccctggggcagctgaagctctcaagtcggtgccgagcccctcgtctgcggagggctgctcgcacgcgttcaatnagcgatcaattntggcggcggnngaccacg

SEQ ID NO: 149490 - DNA, 696 bp, Homo sapiens
ggacgcgtgggcggcctctagtgcactttcggctccttccccttcccgggcctttcagcttggtctttccgggcctcgcttcccccagcccctgcgcccggcccgaacgagaggttccggagccccggcgcgggcgggttctggggtgtagacgctgctggccagcccgccccagccgaggttctcggcaccgccttgagagcttcagctgccccagggtgtgcagattagaatcccaagaaaatcaaatggcatccggggatttctgctcacctggagaagggatggaaatacttcaacaagtgtgcagcaaacaacttcctccttgtaacctgagtaaagaggacctgttacagaacccatacttcagcaagcttctcctgaatctctcacagcatgtggatgagagtggcttaagcctcaccctagcaaaggagcaggctcaggcatggaaggaagttcgactgcataagacaacatggttgaggtctgagattttacacagagtcattcaagagttgcttgtggactactatgtgaagatacaagacacaaatgtaacttctgaggacaaaaagtttcatgagacccttgaacagcggctgcttgtaactgaactgatgcggctcttaagtcctagccaggagagggagatacctccactgcttgggctggagaaagcggaccttcttgaac

SEQ ID NO: 149491 - DNA, 807 bp, Homo sapiens
gcagtagtgcactttcggctccttccccttcccgggccttttatcttgtgtctttccgggcctcgcttcccccagcccgctgcgcccggcccgaacgagaggttccggagccccggcgcgggcgggttctggggtgtagacgctgctggccagccctccccagccgaggttctcggcaccgccttgagagctccagctgccccagggtgtgcaggtttgctttaaagggtcggcgggcggagcttcggggaagaggagctctgggagagtcattccggccagtggccggagaccgtcgtcgctcttgggaatccttggaccgtccagacagaagggaaagtaggcgccggagagcccgttctgcattttgattcatctcgggccctgtaagggtcagtatcttgtgaaaataacctgtaaaatcaatttaaccgttcaagttgcagcgtgtaaagacaagctctaagaatttaaaagacgcctgagtcagaacatttaaaatgcttgggtccctgtagcagcgtttttaacacgtctgagtgcagaagggtggagaatcgaagcctgaattgcccgttcacgccctgtaacctttaagaagggtaaagaaaggcaccctaaaaaaacgcaaggggacacttaccctagggggggacgaacagctagctttttggaatttgggatggtcttcatttccaagtgcggaatttgccctgcccaactttttatttgcagtcgtagatcaacgatatacagaattgttaagacactgaacttaactaactagggggttttgccgtcaagttg

SEQ ID NO: 149492 - DNA, 326 bp, Homo sapiens
  misc_feature (1)...(326): n = a,t,c or g
tgtgaaaactgctgaatttgtcaataagtggcaaaagaattccacaaaattatggaactcccaagctcaaatagatnnnnnnnnnntagttaaccaaattaatgatctccgtcagacagagatttggatgggagatcgtattatgaatttagaaagtagaattcaaatgcaatgtgactggaatacatctgacttttgtgttactcctcagttacaatgagacagaacactgatggaagaaggttaaacgccatctagagggtagagaggaaaatctcaccctctaaattgtaaaactaaaagagcaggattttgaagcctctcag

SEQ ID NO: 149493 - DNA, 373 bp, Homo sapiens
  misc_feature (1)...(373): n = a,t,c or g
ggtgcttctgactcctgaggagaggactgttgtcattgccctgtggcgcaaagtgaacgtgtatgctttatgcaggtgaggcgcctgggcatgatgactgtaggcctacccttggacccataggtgtctttgagtcctttggagatatagactcttctgatgctgttatgggcaagcctatcgtgaatgctcatggaaagaatgtgctaggtgcctttagtgatggtcagtctcacctggacaacctcttgggcacttattctcagctgagtgagctgcactgtgacaagctgcacgtggatcctgagaacttcaagctcttgggcaatgtgctggtgtgtgtgctggcccgcaactttggcaaggaattccn

SEQ ID NO: 149494 - DNA, 332 bp, Homo sapiens
  misc_feature (1)...(332): n = a,t,c or g
ctcatctatcaataataaacttgaatgtaaaccaattaaattctccacttaaagcatacacactgcctgtatggatttnnnnnnnnnngtggcccaactatatgctgcctacaagaaattcactttgccagtaaaaacacatataaactgaaagtaaaggaattnnnnnnnnnntttcaagcaaatgaaaaagaaaaacatgcagataaaacaggctttaagtccaaaactgtaaagagaaaaaaatggccattatataatgataaagagatcagttcaaaaagagaatatatatatatatatgtttttaattgcagatccagatatatgcg

SEQ ID NO: 149495 - DNA, 329 bp, Homo sapiens
  misc_feature (1)...(329): n = a,t,c or g
ctcatctatcagtaataaacttgaatgtggaccaatgagattctccacttaaagcatacacactgcctgtatggatttnnnnnnnnnngtggcccaactatatgctgcctacaagaaattcactttgccagtaaaaacacatataaactgaaagtaaaggaattaaaaaaaagatttcaagcaaatgaaaaagaaaaacatgcagataaaacaggctttaaggccaaaactgtaacgagaaaaaaaagggccttatatatagggataaagatttcttttcaaaaacgagtatttttctatataggggtttataaccgaagatccaaatt

SEQ ID NO: 149496 - DNA, 304 bp, Homo sapiens
catagctgttcgtcaatgcggatgcctcctttgccaacaccacctcccaagtgttgtgtcctccccacccaagtccccttatcaaagctctagtttcttcaaagccgccctaagtcccttcacctgcagaaacctggccagttgcagcccttggtgcctgagttcctgcagtccttgggtggccacttcacactgagaatgtgcttcctgtgccgcctttaccgcttgagatgcctcgtattcagtggcattttatgctgtgttcctttccccagcgaagtcccagggcagatgagagtacgca

SEQ ID NO: 149497 - DNA, 254 bp, Homo sapiens
  misc_feature (1)...(254): n = a,t,c or g
cggccgcgtcgacaatttggaatagaagggagcttccttaaccagataaagaatatttacaaaaaatctacagctaatgtcatactttatgttgacagactaaatgctttctctctaatatcaggannnnnnnnnnnnnnnnnnnnnnnnnnnnnnnnnnnnnnnnnnnnnnnntaactcccagtcaatattataaggcaagaaaggtaatataaggcatgcaaattgtaaaggaagaactaaatctgtccctg

SEQ ID NO: 149498 - DNA, 418 bp, Homo sapiens; identical to SEQ ID NO: 148219
  misc_feature (1)...(418): n = a,t,c or g

SEQ ID NO: 149499 - DNA, 9234 bp, Homo sapiens; identical to SEQ ID NO: 145209

SEQ ID NO: 149500 - DNA, 236 bp, Homo sapiens; identical to SEQ ID NO: 106842

SEQ ID NO: 149501 - DNA, 5442 bp, Homo sapiens
tgtttttctcacaatttcatggattatgggtttgggacaggaagaccacaaagataaagggccattttcattatatcatattaaaggtacatgtgatcaacatgacatcactgtttatgttaaccttgatgatgaccttgttttcatctggtttctccactataagttactcctctcctcacttcccatttccagactctgctctctggaaggaagtcactgtgtgtagcccatatttaagtgatagaaagtaatgttctacctccttgaaccaggggtattatccacataaattatttggaattcttctgcacaaaaaacttacctcttctcctctacatattaatttattcaatcacttacatatatcagtgtagactcatagatacttattttgtactttagcttataatttggcttttctttctttctttttttttttttttttgctctatttgttacaactttagctgtgggagctctttcaggtggctcttgtgtcccttttactccctcagtgtgtgtgtgtctgtgtgtgtgtgtgtgttgagcattttcttactttctggcactgaaagatatatctggtataaaagacaaacgatacacctatctacatggggcacttactgtgaatagaacttgcaggactggaagttgctttcggtgagtcattgagtgagtggtgggtgaatgtgaaggctcagttcattactgtacactactgtagactttataaatactaaggatacacacgaaatttattttaaaaaactatcttcaataattaaccttggcttattgtaacttttcattttataaactttttaattttttgaaactttttactcttttgtaatcacacttagcttaatcacaaacatgtatagctgtacaaatttttttctttttttctttttttttttttttgagacagggtcttgctctgtcatccaggctggagtacagtgacgcgatcatgggtcactgcagccttgacctctctagctccagtgatcctcccacctcagcctcttgagtagctgggaccacaggtgcacgccaccacacccagctaatttttgtattttttgtagagacaagttcttcctgcgctggccaggccagtttcacacgcctgggctcaaacagtcctcctgcctcaatctccccaagtgctaggattgcaggtgtgagctgccacatctggctttttactttgtatccttattctataagctcttttcttttcttttttcttttttttttttgagacggagtctcgctctgttgcccaggctggagtgcagtggcgcgatctcggctcactgcaagctccgccttccgggttcacgccgttctcctgcctcagcatcccgagtagctgggactacaggtgcccgtcaccgaattttttttgtatttttagtagagatggggtttcaccgtgatctcgatttcccgacttcatgatctgcccgagggattacaggcgtgagccactgcacccggcccttttctttttttttttttttttttttttttgagacggagtctcactctattgcccaggctggagtgcaatggcgctatcttggctcgctgcaacctctacctcctgggttcaagcaattcgcctgcctcagcctctcgagtagctgggattgcaggcatgcaccaccacgcccggctaattttttgtattttagtggagatggggtttcaccatctctaacttgaactcctgatctcaagtgatccacccgcctcggccttcaaaagtgctaggattacaggtgtgagccaccgcgcctggcctatacgcttttttctgttaaaaaatatttttaagtttttaaacttttgttaaaaattgagacagaagcaaacacattacttactaggcctacacagagccaggattatcagtatcaatcccttccgcctccacatcatgtcccactggaaggtcttcggggcagtaacggacatggagctgttatctcctaacatgccttcttctggaatacctcctgaaagacctgcctgaggctatttaacagttaactttttttttatatgtaagtaggagtactctaaaataacaatataaaatgtagtacaataaaataaataagccagtaacgtagttgtttattatcaagtatgtactgtacataattgtatatgctagacttttatacagctggcagcacagtaggtttatttataccagcacctccacaaacatgtgagtaatgctttgcacttgaccttctgtcagctatgacatccctaggttgcaggatttttcagcttcattataatcttatgggaccatcttcatatgtgagtggtctcttgacccaaacattgttatgtagcacatgactgtaaattttggaatcaccttgtcagtatttacaaaatagctttctgagatttagtggcaggatctcagctcactcctacctgcacctcccaggttcaagcgattcttatgcctcagcctcccaagtaactgggattatagacgtgcaccaccaagcatggctaatttttgtatttttagtagagacagggttttgccacattggccaggctggtctcaaactcctggcctcatgtgatctgcccgcctcagcctcccccagagtgctgggattacaggtatgagccactgcgcctggccaaaattgcctaaatttttaaaatcctaaattggtgttgaattttgtcaaatgctttcctgcattgattttgatgatcacttgatttttctccattcttttgttaatgtgctaaattatgttgcttaatttttgaatgaaaaaataatcttacattcctgaaataatttcggtttggttgtgatgttttattcattctatttcgtgctgaattcagtttgctaatattttgtttaggaattttgcatctatgttcatgagacagatcggcctgtaattttacttttttgtaatgtccttgtcaggtttaggcctcaaagttatgttgactttataaaatgaactgtgaagtatttcctcttttttatgctttagtttgagtaagattgattttttttaaaacttatgtcgtccttaaatatttattagaattcactagggaagttatcttggcctgttactttctttcttgagtaaattttgttttcattctttttttatagttaagtatattgagttagaatgcatacacaaacaaatgcacacaacttaaagtccagttctatgaattttgactaatgtataaacctgtttaacttccactgtaagcaaaatatagtgaattttcgtcaactaaaaagtccccttgtacccatttaccttcagtacctatccctaccccagccacaggcaacaaatgattttcatgtgcttatttgccatctgtatacctctttggttagttttctgtttatatcttttgcccatttatttttttttttttttgagacagagtcttgctatgttgcccaggcaggtcttgagctcctgggcttaggggatcctcccgcctcagcctcccaagtagttgggactacaggcacacactactactcttggtttgcctatttttaaatcaggttgtttgttttcttattattgtgttctctacactgtaggatattctacctttcctagaatttcatgtaaatggactcagacatactgttgtgtctggcctcttttgttcagtgtaatgtttttgagcttcatccttgcatgttatgtgtatcagtgattgattcaatttttattgctgcatagtattggattgtatagctataccacaatttgtttattcattctcctgttgatggaatattggttgtttccagtatttagctattattattattattttttttttttgagacggagtcttgctctgtcacccaggctggagtgcagtggcgcaatctcagctcactgcaagctccgcctcccgggttcacggccattctcctgcctcagcctcctgagtagctaggacttacaggcgcctggccaccacgcctggctaatttttttgtatttttatagtagagacggggtttcacccgtgttagccaggatggtctccatctcctgacctcgtgatccgcccgccttggcctcccaaagggctggggattacaggcttgagccaccgcgcctggtcttttttgtttgttttgttctttttttagacagagtctcgctctgtcaccccaggccggactgcggactgcagtggcagaatctcggctcactacaagcctgcgcccctcaggttcaagagattcttgtgccccagcctcctgagtagctggggttacaggcgtgtgccaccatgcctggctaatttttttaaattttttttttatttttagtagagaccgttagtatttttgtattcaccgttttagccaggatgggtctcgatatcctgacctcaagtgatctgcctgcctcggcctcccaaaagtgctgggattacaggcgtgcagccactgcacccggccagggatgtcattttttataactagccataaactttagctttgaagtaaaactatttctagcaagtgattcttacctgatattttttgttgttcttgcccatattttaattgggttgtgttattatggttctctatgtattctagatttaagtttttgtatatggtgtgaggcaagtgtcaagtttaattttttttctacaaacatcctgttgttccagtaccttttgatgataagactgtcttttcccccattgaattatcttaacgccctcatgaaaagcaattggccatatgtatgtggatctacttttggactctcaattctgttccagtgatttatatgtccacccttatgtcaataccacattattttgattattgctgctttatagtaagtgacatcatgttgcctgaaatcacgttttccacctttattcttctgttgatggttgctttggcaattaggggtcctttgcattttcgtagacattttagaatcaacttatctattgctactaaaaatgcttgattgggattgtggtaaatctagaaactaatttaggaagaatggtcatattaacagtttcaagtttcagatccatgagcatattttcactctccattaggtcttttaaaatttatcctagcagtgttttatggtttttactgtagaggtcttacacattttgttacatttgttgctatgtgtttgaccttttttgatactagtgtaaatggaaattttttcttttatgttctagttgttcattattacactaaatcatctttgggtgactactaaacattctattgaaaatttgtgaatggcgtgaacccgggaggtggagcttgcagtgagccaagatcgcgccactgcactccagcctgggcgacagagcaagctccgtctc

SEQ ID NO: 149502 - DNA, 311 bp, Homo sapiens
atttattttacacgtatgtgataaactcatcctttttgtctctggtgatacttttcaaacagtgtctccccgcttccttgctccacgtacatttcttgcgcctcttcaaaacccctagccactctcaccttgcgccgtacacatctcattttcacgtcctctgccagctcgctcccccttgccccctctcgtccacctcctccacccacatgttccaccgccattcctgcccccacccataatcctattctcaccacccattcaactcctccccccacgcttcctactatcaacctaacttcgagcccccc

SEQ ID NO: 149503 - DNA, 549 bp, Homo sapiens
agacttgacaccaaaagtatgatctagaaaaggaaaaattggtaagttggacttcataagaactaaaacattttggtctgctaaagaccatgttaaaaggctgaaaaggcaaactacagactgggagaaaatatttttgaaccacatatccaataaagactactgtctagaatatataaataactccaaactcagtattaaaaaaccccaagtaatccaattagaaaacagcaaaagatgttaaggaacatttcactgaagaggatatacagatggcatgtaaccccatgaagagatgttcaacatcattagccgttagggaactgcaaattaaaaccacagtgagatatctcaaaatagagtttaatttttaaaaagcttgggtgcactggcacacacctgtaatcctagtactttgcgaggttgaggtgggaggatcacctgagcctggaaagtcgaggctgcagtgagctgtagtcctgccactgcacaccagcctgggcaacgggaatgagactgtgtcttaaaacaaattgttttaaaggcctt

SEQ ID NO: 149504 - DNA, 687 bp, Homo sapiens; identical to SEQ ID NO: 125892

SEQ ID NO: 149505 - DNA, 1568 bp, Homo sapiens
tttcctttctctctcctcccgccgcccaagatgccgaaaggaaagaaggccaagggaaagaaggtggctccggccccagctgtcgtgaagaagcaggaggctaagaaagtggtgaatcccctgtttgagaaaaggcctaagaattttggcattgacactaacagcacatctggagacccggtggagaagaaggacgaaacaccttttggggtctcggtggctgtgggcctggccgtctttgcctgcctcttcctctctacgctgctccttgtgctcaacaaatgtggacggagaaacaagtttgggatcaaccgcccggctgtgctggctccagaggatgggctggccatgtccctgcatttcatgacattgggtggcagctccctgtcccccaccgagggcaaaggctctgggctccaaggccacatcatcgagaacccacaatacttcagtgatgcctgtgttcaccacatcaagcgccgggacatcgtgctcaagtgggagctgggggagggcgcctttgggaaggtcttccttgctgagtgccacaacctcctgcctgagcaggacaagatgctggtggctgtcaaggcactgaaggaggcgtccgagagtgctcggcaggacttccagcgtgaggctgagctgctcaccatgctgcagcaccagcacatcgtgcgcttcttcggcgtctgcaccgagggccgccccctgctcatggtctttgagtatatgcggcacggggacctcaaccgcttcctccgatcccatggacctgatgccaagctgctggctggtggggaggatgtggctccaggccccctgggtctggggcagctgctggctgtggctagccaggtcgctgcggggatggtgtacctggcgggtctgcattttgtgcaccgggacctggccacacgcaactgtctagtgggccagggactggtggtcaagattggtgattttggcatgagcagggatatctacagcaccgactattaccgtgtgggaggccgcaccatgctgcccattcgctggatgccgcccgagagcatcctgtaccgtaagttcaccaccgagagcgacgtgtggagcttcggcgtggtgctctgggagatcttcacctacggcaagcagccctggtaccagctctccaacacggaggcaatcgactgcatcacgcagggacgtgagttggagcggccacgtgcctgcccaccagaggtctacgccatcatgcggggctgctggcacggggagccccagcaacgccacagcatcaaggatgtgcacgcccggctgcaagccctggcccaggcacctcctgtctacctggatgtcctgggctagggggccggcccaggggctgggagtggttagccggaatactggggcctgccctcagcatcccccatagctcccagcagccccagggtgatctcaaagtatctaattcaccctcagcatgtgggaagggacaggtgggggctgggagtagaggatgttcctgcttctctaggcaaggtcccgtcatagcaattatatttattatcccttgaaaaaaaaaa

SEQ ID NO: 149506 - DNA, 1068 bp, Homo sapiens
atgctccagacatggtctggatatgacaatcccagggtcacacagaaagtgccccccttccaactgaactgcctacccatgacagtggtgctactcattctttacgcagaagtggccactgattggaacagagtgggcctgacccaagggcagcttctccacagcctgcgtcttgacccatggagtggacttactcaaaggacttttcctactggggcaatggaaattagtccagactatctccctccagaatttatagtagagaatacagagagaattgatgagagggagaaaggaagagagcaaccccctaagaagacaccagaaaacaaagcctggcccaagatgctgaaaggaaagaaggccaagggaaagaaggtggctccggcccctgctgtcgtgaagaagcaggaggctaagaaagtggtgaatcccctgtttgaggaaaggcctaagaattttggcattggacaggacatccagcccaaaagagacctcacccgctttgtgaaatggccccgctatatcaggttgcagcagcagagagccatcctctataagcggctgaaagtgcctcctgcgattaaccagttcacccaggccctggaccgccaaacagctactcagctgcttaagctggcccacaagtacagaccagagacaaagcaagagaagaaggctgttggcccaggccgagaagaaagctgctggcaaaggggacgtcccaccaagagacacctgtcctttgagcaggagttaacaccgtcaccaccttggtggagaacaaagaagctcagctggatctttactgtgctatctagtccgctcaactgtaatatctatgggtttggagatttctccaaaactctttctaccacttgcctgcacatttattccatatcagcagatgaagcaagactcattcttcgagtccgggagaagcaccttggtgaggctttgggaggcaccaatgtgctctctgaaggaaatggcctgaggctcgaggaaaataatatgggatggagacctgggaagagggagagaccagacttattgtcaggttcctga

SEQ ID NO: 149507 - DNA, 932 bp, Homo sapiens
  misc_feature (1)...(932): n = a,t,c or g
ggcacgaggcccaagatgccgaaaggaaagaaggccaagggaaagaaggtggctccggccccagctgtcgtgaagaagcaggagggctttaannaaaaaagtggtgaatcccctgtttgagaaaaggcctaagaattttggcattggacaggacatccagcccaaaagagacctcacccgctttgtgaaatcggccccgctatatcaggttgcagcgggcagagagccatcctctataagcggctgaaagtgcctcctgcgattaaccatgttcacccaggccctgggaccccgcaaacaagctactcagcttgcttaagcttggcccacaaagtacagacccagagacaaagcaagagaaggaagcagagacttgtttggcccggggcngaggaagaaggctgcttggccaaaggggacgttcccaacgaagagaccacctgttccttcgaagcaggagttaaacaaccgtcaccacccttggtggaggaccaaggaaagcttcagctgggtggtggattgcacacgacgttgatttccatcgaacttggtttgtctttcttggctggccctgtgtcgtaaaaatggggggtccccttacttgcattatcaagggaaaagggcaagactggggacgtctcagtcaacaagaagacctgcaccactggtcgcctttcacacaggtgaacctcggaagacaaaaggcgcttttgcttaagctggtggaagctatcaggaccaattacaatgacagatacgatgagatccgccgtcactggggtggcaatgtcctgggtcctaagtctgtggctcgtatcgccaagctcgaaaaggcaaaggctaaagaacttgccactaaactgggttaaatgtacactgttgagttttctgtacataaaaataattgaaataatacaaattttccttcaaaa

SEQ ID NO: 149508 - DNA, 745 bp, Homo sapiens
ttgtagcagattcacaactgtatatctcaaggctatgcaggacaaatgcagaagcttcaattaatccaagcaatagacgtccagactgtgaaacacacgcggttcctcatctgtacaaacactataaatctagctcatccttgacgacgtcgtgggactcaatcctgtaatctcatcactattgtgaaccacatcagcgagatcactgtaattatgttcatagagtgcagcctatgcatcaaggtcatccgcttgtttcatatactcattcttctggatttctcatcaaagcctgctccgccgcctcctccctgcggcgctccggggctgtagacggctactttattgtctcggctgcgcaccgcgcgggacctggggacccggctctgagccagtcctgcaagtccactctgcgctgtgccttccccggcggcggctgccttcctcttcttcctcttcctctctgtccaagctccagctcagcacgtgagctacgcagcccgactcccgggctctctgggcagccagcgcctgccgcatcccccggcccgggtctgcaggtcgcccccgccaccgccgctcgccgtgcgtcctcgctttgctccacacttacagctgtgccccgggccgcctttctcgcgtccttccgtcctgcctgcctcctctcgctgtcagccggggctttcggctccctctctccccagcagcccccgcccgccgcctctccgggggctggggcggtccc

SEQ ID NO: 149509 - DNA, 432 bp, Homo sapiens
ggcacgagccaggcaccaatctcaatagagcattcatgtaaatgaacaagaataaggtttctatgctatttcttccaggctttgagagagtagacatttctcttctttctgatttttagctctgagtattggaaattccaaaagaagcaatactcattggagaaatctttatttgtggcttataatcataaggatggttagacacattttcttaaaggtaacaaccagtttatattctccattgccccttcacccttggtgatataatttactgtaaggatatttttggaaggctaggtcttcagccaaggatatttcttcttctgattctccctttctcagctttagttcctctatttatatattaacatggggccaggcacggtggctcacacctgtaatcccagcattttgggaggccaaggcgggtgg

SEQ ID NO: 149510 - DNA, 582 bp, Homo sapiens
  misc_feature (1)...(582): n = a,t,c or g
cttgcaaaaaatggggtttatgaatgccccatggcccaagcccctgttgtgtgggttccacttccaggtgatgaaagaatctggcaatcatcgggcnactcactttntttttttgaagatggagtcttgtctcgctctgttgcccaggctggagtgccagtggcgcgaatctcagctcactgcaacctttgcctcccaggttcaagtgattctcctgcttcagcctcccgaagtagatgggactacaggcacgcaccaccatgcccagcttatttttgtatttttagtagagacacggtgtcaccatcttggccaggatggtcttgatctcttgacctcgtgatccgcctgcctcggcctcccaaagtgctgggattacaggcgtgagccactgcgccccatccaggcactcactctcttaaccacctaggtgcttcttgcagccttgggctgtgtggctgccgggtccttctcccctcctagtgaggtctggagcttggttcaggcccatgattttttttttaaatctatttatttattttgagaccgaggttgtgagactggctaatttttagtattttt

SEQ ID NO: 149511 - DNA, 382 bp, Homo sapiens
  misc_feature (1)...(382): n = a,t,c or g
ggcacgaggaaacagcatatgacataaatatcctttcatgataaacacaaacatttaacatggcaagactagaatagaactgctgcaacacaataaaaagcatttctgaaaaaccacagctaactcaatacgctaggctaaaaaacaagaaggtttcttccaaatatcaggaataagacagggatgcctgctttcatcatttctattcattatactggaagttctagctagaggaaataggtaagacaaaaatgcatccaaattggaaagaaaaaagtagaactatctctattctcagagaccatgagatttaatatatggaaaagactatggaagccacatataactactagagccaataaatgaggtcatgagaattgan

SEQ ID NO: 149512 - DNA, 450 bp, Homo sapiens
  misc_feature (1)...(450): n = a,t,c or g
gcgtgagccactgcacccggctggttgcacaaaattgagatgaattntactctcctattcatggcactctattcatttgcttatgaaaataatttcatggcactttgatggtcagttctcagctctggtaatactgtaactctcagtagcagttgacacagctgattacagtcacttccttgaaacagcttctttacttgactttgaatttacggtgctctcttggttttcttcttacctcactgtatgttccttttcactcttgttttttcactcctccttttctattcaacttctaaatattggaatatcccagggctcagtgttgagccctcttttgtattatgcttctgcctctggatacatgagtttaaatatcatgtatagacactaattacatacaaatttacagattttactctattttctcacctgcccagttctcgtgcc

SEQ ID NO: 149513 - DNA, 366 bp, Homo sapiens
ggcacgagaacaaagatgatgccagctgttaataaaaatgtccgctaatcaggcagttcacttgctgcagttttttggggtcccaagggcccagcccaggctcctgtgcccttgggcaccgtgggccagtccctcgggtcctgacttaccgcgcccgctccacccggccgacccgcaacgtcagcgtttgagcaccgttcctctacccctctcacgtccccctgccctctctctcatcgctcccatggcgctttctcactcttgctccaacattcctccctgaaccccgccgcctgcgtcgctccggcctgaatcccttacccccgctcgctcgccccgactcgctagtctcactcccccccgccc

SEQ ID NO: 149514 - DNA, 533 bp, Homo sapiens
ctgcagtgagctgtagtcataccactacactccagcctgagcaaaagagtgagaccctctctcaaaaaagaaaaaaaaatcagaaacaaactgggcaaattaagatggtggaaacaaaactaaatatgtccctaaccacagtaagctgtatagaattgccggttgacaggtaaaggttaggactgggtgcagtggctcatgcctgtaatcccagcactttgggaggccgtggtgggtggatcacctgaggtcaggggtttgagaccagcctggccaacatggtgaaaccccgtctctactagaaatacaaaaatcagccagttgtggtggtgcatgcctgtaatctcagctactcgggaggctgagacaggagaatggtttgaacctgggaggcggaggttgcagtgagccaagattgcgccactgctctccagcctgtgtgacagagtgagactgtcatacacacaaacacacataaagattaggaggaaaatctgtgacccagagtcacacgcatgaagacagacaggagg

SEQ ID NO: 149515 - DNA, 523 bp, Homo sapiens
gagtctcgctctgttgcccaggctggagtgctgtggcgcgatctctgctcactgcaacctccacctcccgtgttcaagtgattctcctgcctcagcctgccgagtagctggaattacaggtgtgcaccaccatgcccagctagtttttttgtatttttagtagagacagggtttcactatgttggccaggctggtcttgaactcctgacctcaggtgatccgcccacctcagcctcccaaagtgctgggattacaggcatgagccactgcacctggccttaacccctctttagattggaaaaaattattacaacctttaaaaatagcttagtgttgaaccctttggtaaactaaagacccttttataatgcacatattcccaacaaaattaatatattttgtgagattaaacaatgcttgtatatgcttgaactttcttaaaatatgtccatgtcatactattatgaatgtacatttttatgagtcataaatattattttcaaaagcaaaaaaaaaaaaaaaa

SEQ ID NO: 149516 - DNA, 955 bp, Homo sapiens
actcctgacctcaggtgatccgcccacctcagcctcccaaagtgctgggattacaggcgtgagccaccgcgcccggccagaacattagttttaaacttcctaacccttgggagaaggcaaaacacttgatgaaatctacataaagactaaaacattttaccaattttgcattgtttgtttgaaattgcattgacgactgatggagttcgctcttgttgcccaggctggaatgcaatggcatgaccttggctcactgcaacctctgcctccccagttcaagtggttctcctgcctcggcctccccaaagtgctgggattacaggcgtgagccaccatgcccggctaatttttttttttttttgtatttttagtagagactgggtttcaccatgttggccagggtagtctcaaactcctgacctcaggtgatccgcccacctcggcctcccaaagtgctgggattacaggcatgagccactgcgcctggcctttttttttttttctttttttttcttttttttttgagacagggtctcactgtgttgcccaggctggtctgaaactcttaagctcaagcgatcttcttgccttggcctccgaaagtgctgggattataggcgtgagccactgcgcctggccccctcctggacttttaggatgtgacttccttcccatccagcctttctgtctgagcactacccacccagctagactgacttggtaactggatctaagaaggaggcgatattgctgttttcgaggtcgatgggccaggggcctgggctaaggcacttagacaagcccctgccctgcccacctggtcaccaccattcacagtgatcactcatctgtggcaagaggtgggcagcggaggaagctgactagagatacctgatgtataactttttggaggtttttacaaaagcagatacagtggccagtggcatcaaagaaa

SEQ ID NO: 149517 - DNA, 970 bp, Homo sapiens
tggaattaagggatggggagaaggttctggatctctgtgctgctcctggagggaaattaatagctctgctgcagtgtgcttgtccaggttatcttcattgtaatgaatatgatagtctgagattgaggtggctaaggcagacgttggaatctttcatcccacagcctttgataaatgtaattaaagtgtctgaattggatggcagaaaaatgggagatgcccagcctgaaatgtttgacaaggtgttagtgggatgctccgtgttcaaatgatcgaagctggttgttttcttctgactctcagaaggcatcctgtaggataagtcaaaggaggaatttgccttcttttacagattgggctgttaaggtctgcaattaaggcccttacgtcctggagggatacttgtatactctacatgcacgctttccaaggcagaaaatccaagatgtgatcagtgaaattttaaactcccacggtaacatccatgcctatggacattaaaggaattagcaaggacttgctcccacgacttcacatttgctcccactggccaggaatgtgggctcttagtgattccagataagggcaaagcctggtggcccaatgtatgtagccaaattgaagaaatcatggagcacaggaaaatggtgacattgaatttgtaaactgtgtttatgtgttattatatttatatttctgaactcagttacatgtttaatatttaaataattatgccagtaacctttcctctgggtctgtttgggaatccctatttagttaatactttagcatccttagaatctaggcttgagaattgttcaggtgtatttttttcctagaaatatatctgtaacaatgatttaaggtggtgcagatggtgtttgttctatattataaatctgctgtctttgcttggcattttatagttaaattaattagaatatgtggttttatgcataaaaaaaaaaaa

SEQ ID NO: 149518 - DNA, 95 bp, Homo sapiens
acccctaaggtgcacgcttcctggcagaagatgccgactgaagcggccagtgccctgtactacaaataccactgagctcactgtccatgatgcag

SEQ ID NO: 149519 - DNA, 1659 bp, Homo sapiens
  misc_feature (1)...(1659): n = a,t,c or g
cccaggcaaggaggtgctggggatggggaatgttcacaggtgaacaacagcagtggtttttcaacttctttttcatcagcagaaactatttacaaacagggtttcatatggacccccaatatagaagtcagataagggactgaaccagggactgggggcccagggccctagggctcatcctcctcctcagcccacgaagccatgtgactgctgggctggggatcgaaggcagagcctggttctgaagcctaaagctggaagctggctgagaaggtctgggaagcccagctccctggattcccctcgccccctcagtgctccgtgcggtgcggccggggccagagaagccggcaggttcgctgtgttgggaacaacggtgatgaagtgagcgagcaggagtgtgcgtcaagccccccacagccccccagcagagaggcctgtgacatggggccctgtactactgcctggttccacagcgactggagctccaagtgctcagccgagtgtgggacgggaatccagcggcgctctgtggtctgccttgggagtggggcagccctcgggccaggccagggggaagcaggagcaggaactgggcagagctgtccaacaggaagccggccccctgacatgcgcgcctgcagcctggggccctgtgagagaacttggcgctggtacacagggccctggggtgagtgctcctccgaatgttgctctggcacacagcgtagagacatcatctgtgtatccaaactggggacggagttcaacgtgacttctccgagcaactgttctcacctccccaggccccctgccctgcagccctgtcaagggcaggcctgccaggaccgatggttttccacgccctggagcccatgttctcgctcctgccaagggggaacgcagacacgggaggtccaagtgcctgagcaccaaccagaccctcagcacccgatgccctcctcaactgcggccctccaggaagcgcccctgttaacagccaaccctgcagccagcgccctgatgatcaatggcaagggacagttcttccacatttgccccctgggtgggtacagggcccggcttttgcgttttacccctacttacacagccacctgtttgccgctctttgcgcacatgtcctgggagcggtctccccaggatccctcctgaaaggggtccggggcaccttcacggttttctgtgccaccatcggtcacccattggattgggcccactctggaaccccctgggctcttccagcctgttcccaggtcttcagcaggggatgtcctccaggtgaacagaaggggtgggcaaggtgaatggaacacaaagtgacttttcagggactgtgggtcaggcccatgtgggtgggtgtgatggggtgtgttgcacatattgcctcaggtgttgcttttggggactgcatgggatatgtgtgtggtcaaacgtgtatcacttttcaaaaagaaggttacacaggactttagaagggacaagacctgttttccttgaagacttttcctaggtggaaaggaaaagcaagtctgcagttccttgcttaatctcgagctactttagcagttttggtcttccccacccaactccagtttttgtngccctaaggcctcattttcttcatgttcagacctcaca

SEQ ID NO: 149520 - DNA, 355 bp, Homo sapiens
tctccaggtcctggtatctacagaatttttaactccgtaatgtcaccatgccatgaaggtgacttctggaacaagacacttcactccattatggaaaggccgggtgagagaaatggtctggctgacctgatccacagctgacactcttccatgatagacacccaagctatctccacaattgatggacacaatacttcccagccaatctgtagccatgtttcacacgtgagaccactccgcgccgacgggcctggagctcctccgcacaccacaccaagccgaccactcaacaccagaggacccacagaagaattctctccacgcccacccccacagcatcggccttcctcgtgcc

SEQ ID NO: 149521 - DNA, 420 bp, Homo sapiens
agcagcagccaccaacaaggttggattaagggcccaagcagttaatgcctcactccccacacaatccccatactatttagaatcctgcagtcctcagccttccacctcaaaccaaactcctggggccgcccgtagtacgtggtcccctgctcatccgatgaagcccccagctcttgcctgcctgcctgcctctataaaggtctacgaggcctggaactctgaagcctaaagcaaccccggcagccccctcccacgaccgtccacaaaccagtagcctcccttcgctcccacctccgcgccgacgggcctggagctcctccgcacaccacaccaagccgaccactcaacaccagaggacccacagaagaattctctccacgcccacccccacagcatcggccttcaccaccgccgacgaaa

SEQ ID NO: 149522 - DNA, 497 bp, Homo sapiens
aagtgtgtaggcccctttcctccccccggggagcctggggcttcccttccctccagatatacagactgagcccacagaagaggacagtgtcctgctgatgcataccctgttggcggcaaccaaggactccctggccatggacccaccagttgtcaaccggcctaagaaaagcaagaccaagaaggcccctataaagactattactaaggctgcacctgctgcccctccagtcccagctgccaatgagattgccaccaacaagcccaaaataacttggcaggctttaaacctgccagtcattacccagatcagccaaagtacatccttggaatctttgtccacacagcagtcaaggcagttatggccaatcagctgagggtgtcatgtgatggaaaaatctgtttgctgttcctgctttattgtttgctttctgtgtgctgtcatattttggtatcagagttacattaaatttgcaaaatgaaaaaaaaaaaaaaaaa

SEQ ID NO: 149523 - DNA, 260 bp, Homo sapiens
ctgtcatctgggaggtgctgcgcaagttggggctgcgccctgggtatgactgggctctctcagcgcttgctgtccgtgttgtcctttggcaagagaggatggtcctaggattgcatcagtctggtggtctggtggagcgggtggggtacctggagtacaagagggtccctaacagcagaccacctgaatatgagttcttctggggcttgcgctcctaccacgagactagcaagatgaaagtcctcaagtttgcatgcagg

SEQ ID NO: 149524 - DNA, 208 bp, Homo sapiens
ctgtcatctgggaggtgctgcgcaagttggggctgcgccctgggtatgattgggctctctcagcgcttgctgtccgtgttgtcctttggcaagagaggacggtcctaggattgcatcagtctggtggtctggtggagcgggtggggatacatcattcactctttggggacgtgaagaagctcatcactgatgagtttgtgaagcagaa

SEQ ID NO: 149525 - DNA, 515 bp, Homo sapiens
gtgaggcattcactctttggggaagtgaggaagctcatcacagacgagtttgtgaagcagaagtacctggagtacaagagggtccctaccagcagaccacctgaatatgagttcttctggggcttgcgctcctaccacgagactagcaagatgaaagtcctcaagtttgcatgcagggtgcaggaagaaagacccccaagggactgggctgtgcagtaccgcgaggcagtggagatggaagtccaagctgcagctgtggctgtggctgaggctgaagccagggctgagatttattccccatgtttacagataccgctaataaattgcagtagtccttcccatggagccaaagtacatccttggaatctttgtccacacagcagtcaaggcagttatggccaatcagctgagggtgtcatgtgatggaaaaatctgtttgctgttcctgctttattgtttgctttctgtgtgctgtcatattttggtatcagagttacattaaatttgcaaaatga

SEQ ID NO: 149526 - DNA, 4760 bp, Homo sapiens
gggggataggctcagacacaaggagaggcttggagagagcagacgccttctggattcaagaagacgaggctcacctgttactcggcctcccagaaagatggataggagaaatgactacggatatagggtgcctctatttcagatatacagactgagaccacagaagaggacagtgtcctgctgatgcataccctgttggcggcaaccaaggactccctggccatggacccaccagttgtcaaccggcctaagaaaagcaagaccaagaaggcccctataaagactattactaaggctgcacctgctgcccctccagtcccagctgccaatgagattgccaccaacaagcccaaaataacttggcaggctttaaacctgccagtcattacccagatcagccaggctttacctaccactgaggtaaccaatactcaggcttcttcagtcactgctcagcctaagaaagccaacaagatgaagagagttactgccaaggcagcccaaggctcccaatccccaactggccatgagggtggcactatacagctgaagtcacccttgcaggtcctaaagctaccagtcatctcacagaatattcacgctccaattgccaatgagtcagccagttcccaagccttgataacctctatcaagcctaagaaagcttccaaggctaagaaggctgcaaataaggccatagctagtgccaccgaggtctcgctggctgcaactgccacccatacagctaccacccaaggccaaattaccaatgagacagccagtatccacaccacagcagcctccatccgaaccaagaaagcctccaaagccaggaagacaattgctaaggtcataaatactgacactgagcatatagaggctctaaatgtcactgacgcagctaccaggcagattgaggcctcagtagtggctatcaggcccaaaaaatccaagggcaagaaggctgccagcaggggcccaaattctgtctctgagatctctgaggccccacttgccactcagatagtcacaaaccaagccctggcagccaccctgcgggtcaagagagggtctagggctcggaaggctgccactaaggctcgggcaactgaaagccagactccaaatgctgaccaaggggcccaggccaagatagcctctgctcagaccaacgtaagtgcccttgagactcaggttgctgctgctgtccaggccctggcagatgactatctggctcagttgagcctggagcccacaaccaggacccggggcaaaagaaaccgaaagtccaagcatctgaatggggatgagagaagtggcagtaattacaggcggatcccatggggccggaggcctgcaccaccgcgagatgtggccattttacaagaaagggctaataagttggtgaaatacctgttggttaaggaccagacaaagatccccatcaaacgctcagacatgctgagggatgtcatccaagaatatgatgaatatttcccagaaatcattgaacgagcaagctacactctggagaagatgtttcgagtcaatctgaaagaaattgataagcaaagtagcttggagtattctcatcagcactcaggaatcctctgcaggcatactgggaacgaccaaggacacacccaagctgggtctcctcatggtgattctgagtgtcatttttatgaatggcaacaaggccagtgaggctgtcatctgggaggtgctgcgcaagttggggctgcgccctggggtgaggcattcactctttggggaagtgaggaagctcatcacagacgagtttgtgaagcagaagtacctggagtacaagagggtccctaacagcagaccacctgaatatgagttcttctggggcttgcgctcctaccacgagactagcaagatgaaagtcctcaagtttgcatgcagggtgcagaagaaagaccccaaggactgggctgtgcagtaccgcgaggcagtggagatggaagtccaagctgcagctgtggctgtggctgaggctgaagccagggctgaggcaagagcccaaatggggattggagaggaagctgtggctgggccctggaattgggatgacatggatatcgactgcctaacaagggaagagttaggcgatgatgctcaggcctggagcagattttcatttgaaattgaggccagagcccaagaaaatgcagatgccagcaccaacgtcaacttcagcagaggagctagtaccagggctggcttcagcgatggtgctagtattagcttcaatggtgcacccagctccagtggtggcttcagtggtggacctggcattacctttggtgttgcacccagcaccagtgccagcttcagcaatacagccagcattagctttggtggtacactgagcactagctccagcttcagcagcgcagccagcattagctttggttgtgcacacagcaccagcactagtttcagcagtgaagccagcattagctttggtggcatgccttgtaccagtgccagctttagtggtggagtcagctctagttttagtggcccactcagcaccagtgccactttcagtggtggagccagctctggctttggaggcacactcagcaccacggctggctttagtggtgtactcagcactagcaccagctttggcagtgcacccacaacgagcacagtcttcagtagtgcgcttagcaccagcactggctttggaggcatactcagcaccagtgtctgttttggtggctctcccagctccagtggtagctttggtggtacactcagtaccagtatctgcttcggtggctctccctgcaccagcactggctttggaggcacacttagcaccagtgtctcctttggtggctcttccagcaccagtgccaattttggtggtacactaagtaccagcatctgctttgatggctctcccagcactggtgctggctttggtggtgctctcaacaccagtgccagctttggcagtgtgctcaacaccagtactggttttggtggtgctatgagcaccagtgctgactttggcggtacactaagcaccagtgtctgctttggtggctctcctggcaccagtgtcagctttggcagtgcactcaacaccaatgctggttatggtggtgctgtcagcaccaacactgactttggtggtacactaagcaccagcgtctgttttggtggctctcccagcaccagtgctggctttggtggtgcactcaacaccaatgccagctttggctgtgccgtcagcaccagtgccagcttcagtggtgctgtcagcaccagtgcttgcttcagtggtgcaccaatcaccaaccctggctttggcggtgcatttagcaccagtgctggcttcggtggggcacttagtaccgctgctgacttcggtggtactcccagcaacagcattggctttggtgctgctcccagcaccagtgtcagctttggtggtgctcatggcaccagcctctgttttggtggagctcccagcaccagcctctgctttggcagtgcatctaatactaacctatgctttggtggccctcctagcaccagtgcctgctttagtggtgctaccagccctagtttttgtgatggacccagcaccagtaccggtttcagctttggcaatgggttaagcaccaatgctggatttggtggtggactgaacaccagtgctggctttggtggtggcctaggcaccagtgctggcttcagtggtggcctaagcacaagttctggctttgatggtgggctaggtaccagcgctggcttcggtggaggaccaggcaccagcactggttttggtggtggactgggcaccagtgctggcttcagtggcggactgggcaccagtgctggctttggtggtggactggtcactagtgatggctttggtggtggactgggcaccaatgctagtttcggcagcacacttggcaccagtgctggctttagtggtggcctcagcaccagcgatggctttggcagtaggcctaatgccagcttcgacagaggactgagtaccatcattggctttggcagtggttccaacaccagcactggctttactggcgaacccagcaccagcacgggcttcagtagtggacccagttctattgttggcttcagcggtggaccaagcactggtgttggcttctgcagtggaccaagcaccagtggcttcagcggtggaccgagcacaggagctggcttcggcggtggaccaaacactggtgctggctttggtggtggaccgagcaccagtgctggctttggcagtggagccgcccagtctgggtgcctgtggcttctcgtatggctagtgaggtttcaggtaactgcaatatttccatagccaggacccacagggatgggtacaagagctgggagatgttgtaagaaacactaaggcaggacagcagggtggaaaggtgagggcaattaaggaattatgagaagacagtgtatttggtgctaaaatgtgttcctatttgttttgttttcagatttattccccatgtttacagataccgctaataaattgcagtagtccttcccatggagccaaagtacatccttggaatctttgtccacacagcagtcaaggcagttatggccaatcagctgagggtgtcatgtgatggaaaaatctgtttgctgttcctgctttattgtttgctttctgtgtgctgtcatattttggtatcagagttacattaaatttgcaaaatgaa

SEQ ID NO: 149527 - DNA, 1646 bp, Homo sapiens
ctaatatgttggggaaatacctgtaggttaaggaccagacaaagatccccatcaaacgctcacacatgctgagggatgtcatccaagaatatgatgaatatttcccaaaaatcattgaacgagcaagctacactctggagaagaagtttcgagtcaatctgaaagaaattgataagcacagtagctcgtatattctgatcagcactcaggagtcctctgcaggcatactgggaacgaccaaggacacacccaagctgggtctcctcatggtgattctgagtgtcatttttatgaatggcaacaaggccagtgaggctgtcatctgggaggtgctgcgcaagttggggctgcgcctggggtatgactgggctctctcagcgcttgctgtccgtgttgtcctttggcaagagaggatggtcctaggattgcatcagtctggtggtctggtggaaccgggtggggtgctggactgggtagagggcccagggttctgacctgtgtggatgacgggcaaatggtcctgaaactctctgctgtctctctccttaatgtcctctgtctgttctaagcttagatgttagatagaccttcaaggatccctgacaaagaaggcatctgggtcctaaactgcttgcttctagtggccatgtgctcattactttcttcacttcattgagactgccccatgtgctaagagaggtctccttccatgttgggaaaatggcctctggccctcaatctggggcagttcctgatctgtggttcatgggggttaatttttcccaattgtcaagggtgaggcattcactcctttgggggaagtgaaggaaagctcatcacagaacgagtttgtgaagcagaagtacctgggagtacaagagggtccctaacagcagaccacctggaatatggagttcttctgggggcttgcgcttcctaccacggagactagcaagatggaaagtcctcaagtttgcatgcagggtgcagaagaaagaccccaaggactgggctgtgcagtaccgcgaggcagtggagatggaagtccaagctgcagctgtggctgtggctgaggctgaagccagggctgagtggttccaacaccagcactggctttacctggcgaacccagcacccagcaacggggcttcaagtagtggacccaagttctattgttggcttccagcggtggacccaagcactggtgttggcttctgcagtggaccaaagcaccaagtggcttccagcggtggaccgagcacaggagctggcttcggcggtggacccaaacactggtgctggctttggtggtggaccggagcaccagtgctggctttggcaagtggagccgccagtcttggtgcctgtggcttttttgtaagggctagtaagggtttcaaatttattccccatgtttacagaataccgctaataaattgcagtagtccttcccatggagccaaagtacatccttggaatctttgtccacacagcagtcaaggcagttatggccaatcagctgagggtgtcatgtgatggaaaaaaatctgtttgctgttcctgctttattgtttgctttctgtgtgctgtcatattttggtatcagagttacattaaatttgcaaaatgaaaaaaaaaaaaaaaaa

SEQ ID NO: 149528 - DNA, 412 bp, Homo sapiens; identical to SEQ ID NO: 129735

SEQ ID NO: 149529 - DNA, 596 bp, Homo sapiens
cccaggctttttggctgtgaatggtctcaaattacatttgaccaagttaggatgtataaaatgttactgaaaaaggtaaaaatgcctaacgttcgttttccaacggttcctcctgaactttcttcccacataccacaccaccacccccagaattgccagaccccaaaaggcccaacacttttgaaaaaaaaggaaaacacgagaataaagcccctggttgctctttaaaggaagaaaaggaaggagctgaaaggcctgctggggccctttccccatgtggccctaatgttgtgtaaaagcaaacttccccaagcagcagcacgggcactgttcctaggtgagtgttctacccttttgtcacccgaggcttcaatgtactctaattctccgttcaagggctgtcaatttctcgtttagtgttgcaagtccttgacgacaagacatatcgaacgagttgagaaagtctgcgattttcctgatgctgctggtgaatatctcaaatgtactcccggttagcccagtcctggtgaatctccccgctgcaaccggatcctcctgtcccgccatggccgccgcctgaggaagagcctcgtgcc

SEQ ID NO: 149530 - DNA, 3567 bp, Homo sapiens
atgaacctggaagggctggagatggttgctgtgctcgtggtcctcgctctgtttgtcaaggtcctggagcagtttggcctctttgagcctgtctccttggaaggccaccctccagggcccactaaaaaagcgctgaagcagcgattcctcaagctgctgccgtgctgcgggccccaagccctgccctcagtcagtgaaagcaagtgcctctcatgtgcttccgggggcggggctcgatgtgtgcacagcgtggacgatgaatttgaattgtccaccgtgtgtcaccggcctgagggtctggagcagctgcaggagcaaaccaaattcacgcgcaaggagttgcaggtcctgtaccggggcttcaagaacgaatgtcccagcggaattgtcaatgaggagaacttcaagcagatttactcccagttctttcctcaaggagactccagcacctatgccacttttctcttcaatgcctttgacaccaaccatgatggctcggtcagttttgaggactttgtggctggtttgtccgtgattcttcggggaactgtagatgacaggcttaattgggccttcaacctgtatgaccttaacaaggacggctgcatcaccaaggaggaaatgcttgacatcatgaagtccatctatgacatgatgggcaagtacacgtaccctgcactccgggaggaggccccaagggaacacgtggagagcttcttccagaagatggacagaaacaaggatggtgtggtgaccattgaggaattcattgagtcttgtcaaaagggaacgagaggtcacagcctcgctctccgcttaggcttctggcgccccagcttaaagccgaggctgcggctgacaaagggctcgcgccggtgccgccgcccttctcatccgggcattcgggtccctgcggagagggagggggaagggcagagggggaggggaaggagccggaggggcgcacacttggagctgaagccctctccagggctccgggccggtgccccaacggacagaggtcgaggaggacccgcagaggtggcagcggccgggggcaggaggatggtgcagaaggagagtcaagcgacgttggaggagcgggagagcgagctcagctccaaccctgccgcctctgcgggggcatcgctggagccgccggcagctccggcacccggagaagacaaccccgccggggctgggggagcggcggtggccggggctgcaggaggggctcggcggttcctctgcggtgtggtggaagagcaacttatgactctcatctctgctgcacgagaatatgagatagagttcatctatgcgatctcacctggattggatatcactttttctaaccccaaggaagtatccacattgaaacgtaaattggaccaggtttctcagtttgggtgcagatcatttgctttgctttttgatgatatagaccataatatgtgtgcagcagacaaagaggtattcagttcttttgctcatgcccaagtctccatcacaaatgaaatctatcagtacctaggagagccagaaactttcctcttctgtcccacagaatactgtggcactttctgttatccaaatgtgtctcagtctccatatttaaggactgtgggtgaaaagcttctacctggaattgaagtgctttggacaggtcccaaagttgtttctaaagaaattccagtagagtccatcgaagaggtttctaagattattaagagagctccagtaatctgggataacattcatgctaatgattatgatcagaagagactgtttctgggcccgtacaaaggaagatccacagaactcatcccacggttaaaaggagtcctcactaatccaaattgtgaatttgaagccaactacgttgctatccacacccttgccacctggtacaaatcaaacatgaatggagtgagaaaagatgtagtgatgactgacagtgaagatagtactgtgtccatccagataaaattagaaaatgaaggcagtgatgaagatattgaaactgatgtactctatagtccacagatggctctaaagctagcattaacagaatggttgcaagagtttggtgtgcctcatcaatacagcagtaggcaagttgcacacagtggagctaaagcaagtgtagttgatgggactcctttagttgcagcaccctctttaaatgccacaaccgtagtaacaacagtttatcaggagcccattatgagccagggagcagccttgagtggtgagcctactactctgaccaaggaagaagaaaagaaacagcctgatgaagaacccatggacatggtggtggaaaaacaagaagaaacggaccacaagaatgacaatcaaatactgagtgaaattgttgaagcgaaaatggcagaggaattgaaaccaatggacactgataaagagagcatagctgaatcaaaatccccagagatgtccatgcaagaagattgtattagtgacattgcccccatgcaaactgatgaacagacaaacaaggagcagtttgtgccaggtccaaatgaaaagcctttgtacactgcggaaccagtgaccctggaggatttgcagttacttgctgatctattctaccttccttacgagcatggacccaaaggagcacagatgttacgggaatttcaatggcttcgagcaaatagtagtgttgtcagtgtcaattgcaaaggaaaagactctgaaaaaattgaagaatggcggtcacgagcagccaagtttgaagagatgtgtggactagtgatgggaatgttcactcggctctccaattgtgccaacaggacaattctttatgacatgtactcctatgtttgggatatcaagagtataatgtctatggtgaagtcttttgtacagtggttagaagatgaagatggcatatgtggttatgccttgggcactgtagatgtgaccccctttattaaaaaatgtaaaatttcctggatccccttcatgcaggagaagtataccaagccaaatggtgacaaggaactctctgaggctgaggactgtgcgtctcctttaatgggcggggccggaactggccgagggtccccggctttgtgcgtgtcgggggcggagtttgaagaaggctcttacagcatggccgccggctgtgagctctccggccacacccgctccttcacctttaaggtagaggaagaggatgatgcggagcacgtgctggcactaaccatgctctgcctcaccgagggagccaaagacgagtgtaatgtggtagaagttgtggcccggaaccatgaccatcaggagatcgcagtccctgtggccaacctcaagctgtcctgccaacccatgctcagtctggatgacttccagctccaaccacctgtaaccttccgcctgaagtcgggctctggccctgtgcggatcactgggcggcaccagattgttacgatgagcaatgatgtttctgaggaggagagcgaggaagaggaagaggacagtgatgaggaagaagttgagctgtgccccatccttcctgccaaaaagcaggggggcaggccctag

SEQ ID NO: 149531 - DNA, 355 bp, Homo sapiens
ctacctggaattgaagtgctttggcaaggtcccaaagttgtttctaaagaaattccagtagagtccatcgaagaggtctgtaagagtattaagagagctccagtaatctgggataccattcatgttaatgcttctgatccgccctcacaccttaccaaatcgttactaccaaattctatttcagaattaaaaagatagttcactgggggccatttcctcactcctcccaaaaaatcctgtcaatatgcgaaaagtatcaatggctctccgtccctttaacacataatttgaccaaatttctctcaataatcgtaaattattccaggtatcattgtatcaagccacagctcgtgcc

SEQ ID NO: 149532 - DNA, 5146 bp, Homo sapiens
aggcagcagcagagggagagctcggggcttggaggggaaacagcggaagacctaagattatcgggagggcagcagaggcagagaacgaggacaggacccttggccgtcttcttccagggaacgagaggtcacagcctcgctctccgcttatgcttctggcgccccagcttaaagccgaggctgcggctgacaaagggctcgcgccggtgccgccgcccttctcatccgggcattcgggtccctgcgagagggagggggaagggcagagggggaggggaaggagccggaggggcgcacacttggagctgaagccctctccagggctccgggccggtgccccaacggacagaggtcgaggaggacccgcagaggtggcagcggccgggggcaggaggatggtgcagaaggagagtcaagcgacgttggaggagcgggagagcgagctcagctccaaccctgccgcctctgcgggggcatcgctggagccgccggcagctccggcacccggagaagacaaccccgccggggctgggggagcggcggtggccggggctgcaggaggggctcggcggttcctctgcggtgtggtggaaggattttatggaagaccttgggttatggaacagagaaaagaactctttagaaggctccagaaatgggaattaaatacatacttgtatgccccaaaagatgactacaaacataggatgttttggcgagagatgtattcagtggaggaagctgagcaacttatgactctcatctctgctgcacgagaatatgagatagagttcatctatgcgatctcacctggattggatatcactttttctaaccccaaggaagtatccacattgaaacgtaaattggaccaggtttctcagtttgggtgcagatcatttgctttgctttttgatgatatagaccataatatgtgtgcagcagacaaagaggtattcagttcttttgctcatgcccaagtctccatcacaaatgaaatctatcagtacctaggagagccagaaactttcctcttctgtcccacagaatactgtggcactttctgttatccaaatgtgtctcagtctccatatttaaggactgtgggtgaaaagcttctacctggaattgaagtgctttggacaggtcccaaagttgtttctaaagaaattccagtagagtccatcgaagaggtttctaagattattaagagagctccagtaatctgggataacattcatgctaatgattatgatcagaagagactgtttctgggcccgtacaaaggaagatccacagaactcatcccacggttaaaaggagtcctcactaatccaaattgtgaatttgaagccaactacgttgctatccacacccttgccacctggtacaaatcaaacatgaatgggagtgagaaaagatgtagtgatgactgacagtgaagatagtactgtgtccatccagataaaattagaaaatgaaggcagtgatgaagatattgaaactgatgtactctatagtccacagatggctctaaagctagcattaacagaatggttgcaagagtttggtgtgcctcatcaatacagcagtaggcaagttgcacacagtggagctaaagcaagtgtagttgatgggactcctttagttgcagcaccctctttaaatgccacaaccgtagtaacaacagtttatcaggagcccattatgagccagggagcagccttgagtggtgagcctactactctgaccaaggaagaagaaaagaaacagcctgatgaagaacccatggacatggtggtggaaaaacaagaagaaacggaccacaagaatgacaatcaaatactgagtgaaattgttgaagcgaaaatggcagaggaattgaaaccaatggacactgataaagagagcatagctgaatcaaaatccccagagatgtccatgcaagaagattgtattagtgacattgcccccatgcaaactgatgaacagacaaacaaggagcagtttgtgccaggtccaaatgaaaagcctttgtacactgcggaaccagtgaccctggaggatttgcagttacttgctgatctattctaccttccttacgagcatggacccaaaggagcacagatgttacgggaatttcaatggcttcgagcaaatagtagtgttgtcagtgtcaattgcaaaggaaaagactctgaaaaaattgaagaatggcggtcacgagcagccaagtttgaagagatgtgtggactagtgatgggaatgttcactcggctctccaattgtgccaacaggacaattctttatgacatgtactcctatgtttgggatatcaagagtataatgtctatggtgaagtcttttgtacagtggttagggtgtcgtagtcattcttcagcacaattcttaattggagaccaagaaccctgggcctttagaggtggtctagcaggagagttccagcgtttgctgccaattgatggggcaaatgatctcttttttcagccacctccactgactcctacctccaaagtttatactatcagaccttattttcctaaggatgaggcatccgtgtacaagatttgcagagaaatgtatgacgatggagtgggtttaccctttcaaagtcagcctgatcttattggagacaagttagtaggagggctgctttccctcagcctggattactgctttgtcctagaagatgaagatggcatatgtggttatgccttgggcactgtagatgtgaccccctttattaaaaaatgtaaaatttcctggatccccttcatgcaggagaagtataccaagccaaatggtgacaaggaactctctgaggctgagaaaataatgttgagtttccatgaagaacaggaagtactgccagaaactttccttgctaatttcccttctctgataaagatggacattcacaaaaaagtaactgacccaagtgtggccaaaagcatgatggcttgcctcctgtcttcactgaaggctaatggctcccggggagctttctgtgaagtgagaccagatgataaaagaattctggaattttacagcaagttaggatgttttgaaattgcaaaaatggaaggatttccaaaggatgtggttatacttggtcggagcctgtgacatttgttgacactgtgaactgtccaaaagtctcttaactgcaccttgtgaatggtagttgaggtcttcatacagttcagcctctagaatggtaacaaatcagccaattggattcgaaacaaagaagactatgtaaaactcacccatcacactttgagactactcactggttggaagaatatagtattgcagcaaatcctgtatgaaagagagatgtgggcttcctttttgagtcttgtgttaggtgctgagaccttttacatgggcttatacagggagagagtcttcaataaatgtagtcagcactattttctgcatccagtgtggttgcgtttctcacctgagagtaatcaagataacatctgtcatcttccttggtttattgagtgaaatgcctctcagtcttaggggacatggcagagatgaaagaaagaaagagtgggtttcagaagtgtcagggtggagtgattccaagtgggatggttgtggcattagtttaagctgaataaataatttcaatttggggcagttattctgctttttgtaaagccgtggccaattgtctcctgtaatgactgttggttcaggcatgttgtactttgtagggacaaatgtgcatttgtttgtggcaaaagcctacaattgacaaacttgtaaatttctttgtatataaactagctgtaacctgactatcctttgtgtttactgtttttgtaaatttttttcctctataaatgaaagggtgttggttcagaatggcactttgaataatgtaaaccagtgaaaagtggattttctttacttttgtctttgggtttggggttgtttttgttctttttgaagttttattatttttaaagtgcctcccacctaggcgtaggccatgaccatttggggtacgagagcctaattttgtaggacttaatctgttgaaaagtgcagttacttctggaaattaacctcaatattaggtcagcatgtgaaatgttggatttgacatgtcaggtagggttcagggactgattggtcccatttgccctcaggtcagttgtttaatctcaagacctgttactactgattttattaaatcagagtctttaattcttgcatgtttgtatctaatttctgaacgaatgagcacactttaaccagttatttacagttacctttttcctttaaccggattgtgaaagcttcatgtattttaatttagattctgtgtttttaagggttctgagcatgaagctggcagatagtcggcaggactcattttttcatcatggctggctgatttctccatagattgataacagtattttgttatcttgcttctctgtagttttgcatcagctgtttaactttgagctgagtgaggggagaggggtaaagagaaagaaacttaagttttctttcacagaactccaccattgtgggctttgagagagccctaaagcattgtacctagtggtacctagtgacttccaaccaaagcctttgagtatgcactaaataggtgagaagaaaggagagaaggtttttaggttagaaacctttaaccgatagaaggatatggtatgttgtaaagctggaaccaagtttgcatttttgagggcttgagatgaagggaagactcttaccagatagtaagacagctgagttttcctcagttttctcgtcttaacactagtggacaattctagcattttgtttggaggatttcagagttaacctcatggaattcaggattttttagcaagtttgcttttggttttatcttggcttttagtaatcatgttggctggtctggtcacaggtgactgtgaaacagatgccctggtcttgctttcatcactctaggatcatgaagtgctatgctatttcctggttatgaatattaaggttggaattacatttttattgattgtttggatcagagctcagttcctgtagaaaacgaactgtaaaagaccatgcaagaggcaaaataaaacttgaagtg

SEQ ID NO: 149533 - DNA, 350 bp, Homo sapiens
  misc_feature (1)...(350): n = a,t,c or g
ggcacgagcggcacgagctccagatgcttgttgacgctccctgctcagacctggctcaggaactacgtcagagttgtgccaccgtccagcggctgcagcacacactccaacaggtgcttgaccaaagaggaagtgcgtcagtctaagcagctcctgcagctgtaccttttggctttgtataatgaggtcagtctattgtcttagcaggatatttttaatgtggctttagatgtctgtatgtgtcgtagttagtatgagagaaacattacattgagtcgtcggtggtgggggggggagggcnnnnnnnnnnnnnnnnnnnnnnnnacgggtctttggttctatatatgtag

SEQ ID NO: 149534 - DNA, 408 bp, Homo sapiens
  misc_feature (1)...(408): n = a,t,c or g
ggcacgagcttgaatagtttatccaagaccaaagccaaagatctcttcataggtgatgtgatccacaatgctggacctcatcgggataagaagctgaagtactacatcccagaagttgtttactctggcctctacccaccctatgcagggggagggngggttcctttactccggtcacctggccctgagactgaaccatatcgctgactcagtccaattttaaccgcgctaggacccatatactgtaaggtgacttctgaagccttcatctgcaggctatgatccaaccttcgtcttgctaatcggtaccgatggcatctacacatataccccgtctagctgcgaaaatggacttgggtcctgtgaggaaccccatctcatgagcttccgcagctattttcatggccg

SEQ ID NO: 149535 - DNA, 399 bp, Homo sapiens
cctgtcacagctgactcttccatctgtgcaggttgactgaggtcattcctgagttgcagtatgttgagagggtaatatttctgtcttctctaactccccatactcccttgtcttccgctctccacttaggagttttttgtgagttatgtccttgttgcttttgcctctttttctttctagccttgattgtgccagaagacaatgtccctattcacacactctttctgcttttctgtgggcaggaacatggaaggggtgctgatggacgtggactgtgagagcgtctaccccattgtgtaggcctctaattgaggcctggcctctgctgaggtgggaggatcctttgagcccaggagtttgagaccagcttgggcaacatagtgagaccctgtctctacc

SEQ ID NO: 149536 - DNA, 431 bp, Homo sapiens
  misc_feature (1)...(431): n = a,t,c or g
acgccttcccgggtcgagccacgnncccgacagaacgatgggtggatagagagcaacgccagagcccaggtgctcagaggactttcttccagcttctgctgtccttctttgtggagagcnnnnnnnnnnnnnnnnnnnnnnnnnnnnnnnnnnnnnnnnnnnnnnnnnnnnnnnnnnnnnnnnnnnnnnnnnnnnnnnnnnnnnnnnnnnnnnnnnnnnnnnnnnnnnnnnnnnnnnnnnnnnnnnnnnnnnnnnnnnnnnnnnnnnnnnnnnnnnnnnnnnnnnnnnnnnnnnnnnnnnnnnnnnnnnnnnnnnnnnnnnnnnnnnnnnnnnnnnnnnnnnnnnnnnnnnnnnnnnnnnnnnnnnnnnnnnnnnnnnnnnnnnnnnnnnnnnnnnnnnataccatatattaaattacttgagcgcttccc

SEQ ID NO: 149537 - DNA, 1222 bp, Homo sapiens
ctctcatagctccaggtccatcctggaagaagttccagggcagcttctgtgaatttgtgaggacattggtctgtcagtgccagtacagcctcctctatgatggcttccctatggacgacctcatctccctgctcactggcctctcagactcacaagtccgcgccttccgtcacactagcaccctggctgctatgaaactgatgacctccctggtaaaagttgccctccaactgagtgtgcaccaagataacaatcagcgtcagtatgaggctgaaagaaacaaggggccagggcagagggcacctgagcggctggagagcctgttggagaaacgcaaagagctccaagagcatcaagaggagattgaggggatgatgaatgccctcttcaggggtgtctttgttcatcggtacagggatgtccttcctgagatccgtgctatctgcattgaggaaattgggtgttggatgcaaagctacagcacgtctttcctcaccgacagctattttaaaaatatatttggttggactctgcatgataagcaccgagaagtccgcctgaagtgtgtgaaggccctgaaagggctgtacggtaaccgggacctgaccacacgcctggagctcttcaccagccgcttcaaggaccggatggtttccatgatcatggacagagagtacagtgtggcagtggaggccgtcagattactgatacttatccttaaacttttctaccctgagtgcgagataagaacgatgggtggaagagagcaacgccagagcccaggtgcccagaggactttcttccagcttctgctgtccttctttgtggagagcaagaatcgactcccagacacctgccactcgtgaatgcatctgataaactcactcacactgaggccttggggactgagagtgcgatgacatggatcctgcggacaaaccgccccagggcgtacctagcaccgaagcatcaggcgccactaggtctccagctccttctcggatgacgtccttcagcacgccccggtcccccgagatgtccagcatcctctgacttaaccgctcgtacagggactgatggagaatgaaagccaggcctcagagccgcagacccacccggccacccctcagcgtctacgcccccacgtctgggccctcacctggccgggggcgtcgtccccttccaggactccctggtttaacgcgcttccccccattgtatt

SEQ ID NO: 149538 - DNA, 1704 bp, Homo sapiens
gaagtccgcgtgaagtgcgtgaaggctcttaaagggcctgtacggtatccccgaacctgacggcatgcctgaagctcttcactggccgcttcaaggactggatggtttccatgatcatggacagagagtacagtgtggcagtggaggccgtcaagattactgatacttatccttaaagaacatggaaggggtgctgatggacgtggactgtgagagcgtctaccccatttgtgtaggcctctatttgaggcctggcctctgctgtgggtgaatttctgtactggaaacttttctaccctgagtgcgagataagaacgatgggtggaagagagcaacgccagagcccaggtgcccagaggactttcttccagcttcttcttgtctttctttgtggagagcaagtctcattttgtcacccagggtggaggcagtgggcagttctcggctcaccgaaacctttgcctcccgggctcaggcaattttcatgtctcagcctcccgagtagctgggattgcgggtgcacccccccacacctggctgatttatgtatttttttcgtaaaaacggggttttcccgtgttggccgggctggtctcaaactcctgggctcaaaggatcctcccacctcagcctcccaaagtgctgggcttacaggcgtgagccaccaaccccagcccacttgtaggtcctatgcacaacagccagagttctctctgtgtatgtcaccttgctctccacaaagaaggacagcagaagctggaagaaagtcctctgggcacctggggctctggcgttgctctcttccacccatcgttcttatctcgcactcagggtagaaaagtctggtgggaatggacacaagggaaagggctcagcacaggagggaaacaaggaggtgtaattgattgaccacagagggaggagatggcccaaggagatgataaaggaaaaggaggtgcagagctaaggaaagccccaaggagctgagagaggaaaagagacagcagagagacttccacggagatggggaggccttaagtagggcagcagcacatgtgggagagaaaccgagagggtggtgttaaagaaacgtaaaaggagccccactggcttccagtacagaaattcacccacagcagaggcgcaggcctcaattagaggccctacacaatggggtagacgctctcacagtccacgtccatcagcaccccttccatgttcctgcccacagaaaagcagaaagagtgtgtgaatagggacattgtcttctggcacaatcaaggctagaaagaaaaagaggcaaaagcatcaaggacataactcacaaaaaaactcctaaatggagagtggaagacaagggagtatggggagttagagaagacagaaatattaccctctcaacatactgcaactcaggaatgacctcagtcaacctgcacagatggaagagtcagctgtgacaggtggagggagatgaccctggaagggcaaaggtctgagacactggcctcccctcttcccaggactcacttaaggataagtatcagtaatctgacagcctccactgccacatcatacttctctgtccatgaccatgggaaaccatccggtcctgcagaaaggagaaagtcactcaatattcttcatttacaccctttccaaacatttctgtttctctttaggattcagaggacttcttaaagg

SEQ ID NO: 149539 - DNA, 1617 bp, Homo sapiens
atgaagaatggtgtccagtgggcagagctggctggccacgactacgtgttagacctggtgtcggacctggagctgctcagggacttccctcgacagaagtcctacttcattgtgggcacagaggggcctgcagccagcaggggaggccccaaagtggtgtttgggaacagctgggactcggatgaggacatgtccactagaccccagccccaggagcacatgcccaaagtacttgactctgatgggtacagcagccacaatcaggacggtacaaatggggagactgaggcccaaagagggacagcaacccaccaaggtcaaccaacaatggctgctgtctctgagtcagacagtcttggagagcctgctgtgccccacaaggggctggactgctacctggatagcctcttcgaccctgtgctgtcctacggggatgcggacctggagaagccaacagccattgcctaccgcatgaaagggggaggccagcccggtggaggcagcagtagtggtactgaagacacccccaggagacccccagagccaaagccaatcccaggcctggatgcctccacattggctctgcagcaagccttcatccacaaacaggccgtgctgctggcccgggagatgaccctgcaggccacggcactccagcagcagcccctgagtgctgccctgagatccttgcccgcagagaaacccccagcaccagaggcacagccgacgtctgtaggcaccggtccccctgccaaacccgtgctcctgcgtgccactccaaagcccttgcgcccagcccctctggccaaggctccaaggatccccatcaagcctgtggctgcccctgttctagctcaggatcaggcttctccagaaaccagcctgcaccgggatgcagccactgtcacacagatgcacttcttgaccggccagggccgcctcctgtccctgcttgatgacagcagtctgcatctctgggagattgtccaccataatggctgtgcccacctggaagaagcactcagtttccagctgcccagccggcccggctttgatggtgccagtgctccgctcagccttacccgagtcacagtggtcctgctggtggctgccggcgacatagcagccctgggcactgagggcagcagtgtcttcttcctggatgttaccaccctgaccctgctcgaggggcagacgcttgccccaggcgaggttctgcgcagcgtgccagacgactaccgctgtgggaaggcactgggccccgtggagtcactccagggacacctgcgggaccccacaaagattctcattggctacagccggggcctgctggtcatctggaaccaggcctcgcagtgtgtggaccacatcttcctggggaaccagcagctggagagcctatgctgggggcgtgatagcagcactgtggtcagctcacacagcgatggcagctatgctgtctggtctgtggatgccggcagcttcccaacgctgcagcccacggtagccaccacaccttacggcagggcatgtacacccgttgcccacgatcacatcgatgaactcgtccggggagcagtcttctcggaaaagcacttctgcattgaagatctctga

SEQ ID NO: 149540 - DNA, 940 bp, Homo sapiens
cacgcgtccgcaggagctggatgttggcaccttcctggaatcattgaaggcgcagcccaaggaaaaggccgtggccggcaggtgatcgctgtggcgcgcacggctgacgtcatcatcatgatgctggatgccaccaagggagaggtgcagaggtctctgctggagaaggagctggagtctgtgggcatccgcctcaacaagcacaagcctaacatctacttcaagcccaagaaaggtggtggcatctcctttaactcgacagtcacgctgacccagtgctcggaaaagctggtgcagctcatcctgcacgaatacaagatcttcaatgcagaagtgcttttccgagaagactgctccccggacgagttcatcgatgtgatcgtggggcaaccgggtgtacatgccctgcctgtatgtttataacaaaatcgaccagatctccatgggaggaggtggaccgcctgggcccgaaaacccaacagtgttgggtcatcaagctgcggcattgaagctgaacctgggactatctgctgggagatgctttggggagtacttgggccctgacctggcatcttacaccaaggaaggaggagggacaggagggccagattttcacaggacgccatcattctccggaaaggggcctcagtggagcacgtgtgccaccgcatccaccggttcactcgccagccagtttcaagttacgccctgggtgtggggggcaccagcaccaagttacagttccgcaggcgggtggggccttgacccacaaccatggagcatgaggacgtcatccagatcgtgaagaagtaacggcgcctgccgggcctcccgcccacctgcctcgtctccctggggaggtggtcccactgggacacacaaacacccaaacagaaaaatacaaatacacgtaccccaggaaggggtccctcaaaaaaaa

SEQ ID NO: 149541 - DNA, 571 bp, Homo sapiens
cagagattccccgccgcgttccctggactcaggagctcgccgcgatgccccgccccactctccacccgctgaatgcagggcgcatgctgctacttggcggctcaagccccgcccgcaccgtccccattctctgaccgcccctctcccggtacactgggcaggcacaacagagccgctcccctctcctcgccccgccaccgggacggagagcgcccgccgctgcatttccggcgacacctcgcagtcattcctgcggcttgcgcgcccttgtagacagccggggccttcgtgagaccggtgcaggcctggggtagtctcctgtctggacagagaagagaaaaatgcaggacactggctcagtatggccttttcattgctgtgggtattggctactcagcattgcctacatccggaggaatcattgactatgtaacctgtaacttggtgagttaagtggttgcaggtctggtctgttccaccctagtgggcctgggtgatcactaactatgcatgttgcccaaagaccagctcatgacagatgctacacaaggatagatgctggcccagtgcg

SEQ ID NO: 149542 - DNA, 488 bp, Homo sapiens
ggcatggtcctatttattttcagacattctcgcttcacagaaagaaacagggtgaggggctcaagagagaggctgcccaagggagaagcacgggaacgctgaactggccgaggggcttgtcctcatcctcaggggtagggggaagcccccatctgccagtctggctggaagggaatagatatagagcagaggccctgagtggaaggtgacagttaaccaaacagccaaggccaaggagaggacggggccctaaggcttagagaggccctgaggaccaaccttgctctgccatctgaccttgcccttgtaggcctcctctgaactcccaaaatgtggacctatgccatcacccgagggccgcaggaacaaagaggttggggtgttccatgacatttggtacctttcatccctgttgttgcagcaggtgtgccccaccctggaggcagcagaagaaggtatgtgagtcattgtgaattccaccacacgag

SEQ ID NO: 149543 - DNA, 965 bp, Homo sapiens
ccaggatgtggtgactgtacacatattgcatatccacaggggggcaccctaaccccacctttccagccccctttttctaatgtgggcttgtcacccctgcttgcctggatccctgggttgggatagcccctctacctgataccctcattgtcttgagaggtgggggttcagctctgctgcctgcccccatcccacctgtcacactggaggagaagcagacactcactagactgctggcagcccgtggagccaccatccaggagttgaacaccattcggaaggccctgtcccagctcaatggtggggggctggctcaggccgcctaccctgcccaggtggtgagcctcatcctgtcagatgtggcgggggaccctgtggaggtgattgccagtggccccaccgtggccagttcccacaatgtgcaagattgcctgcatatcctcaatcgctacggcctccgtgcagccctgccacgttctgtgaagactgtgctgtctcgggccgactctgacccccatgggccacacacctgtggccatgtcctgaatgtgatcattggctctaatgtgctggcgctagctgaggccccagcggcaggccgaggcactgggctaccaggctgtggtgctgagtgcagccatgcaagggtggggcacacctgctgcacacagggatgacaggtaccaatgtcatggacacccacctcttgttcctgcggcctcggtgatggcataggtcacattttgggagttcagaggaggcctacaagggcaaggtcagatggcagagcaagccagactggcagatgggggcttccccctacccctgaggatgaggacaagcccctcggccagttcagcgttcccgtgcttctcccttgggcagcctctctcttgagcccctcaccctgtttctttctgtgaagcgagaatgtctgaaaataaataggaccatgccatgggtta

SEQ ID NO: 149544 - DNA, 332 bp, Homo sapiens
caccgccttttgaaggcgaatgccaggtcaattccattgagaaaaagaaagtgttttaaccaaacattgatataataaatagatatttatatacaataaaataaacctcaaccccagttattatatagaataaaattaacctcaaccccatttcatcctattcaaaaagttggtctgagacagatgatagacctaaacataccacccagaatcataaagcttctagaagaaaacataaaataatatcttagtgaccttggggtagacaaagtaaaaattaaccaaattcaacttcctcaaaattaagcatttctgctcaccaagctcgtgcc

SEQ ID NO: 149545 - DNA, 900 bp, Homo sapiens
acgaattatatgtagacgttcacaatatgctgcagctgtttttcattgctcacataattgctatttttgagaattacacatttaataaaaatgccaggggttccttgccctcattcttccatatttgtcttatatatgtttagcaaaataattgagttaaatatgagcttttatgcttaagcgatggctgtgttctcgctcttaatacaattgcaccataaaacttgatttttagtgccacaattataaaaaggggatggccttgtttcctcaaccagaacaacttcttaccttcaagatggatgattcaaagaggaataatagggaatttcttagtatgaagttacttcggttgttttcttaggaaaacaaaaggtagaatttaacagcatggggcctgatttaaatagaaaataaatgtacagatataatcaactctgctgtcatggggatttcaagttataaatgcaataagtaacatcccctgacttattctatgtacttttgccctaatctactacctattagtctgaaacttgagtttttaaatttaatctctatgtaaaagaggaataaattgaatgcataattaaaatatatgttgtcaattatcacacctttttgcctagactataagcttcatttttcctgttatatccactaaattaatttatgcttgtttttccattaaaacaagttactttggctgggtgcagtgactcccgcctgtaatcctagcactctgggaggctgaggtgggcagatcatgaggtcaggagttcgagaccagcctgtccaacatggtgaaaacctggtctctactaaaaatacaaaaattagccgggcatgggtggccggcacctggtagtcccagttgcttggcagggctgaggcaggagg

SEQ ID NO: 149546 - DNA, 330 bp, Homo sapiens
ggcacgaggtgcaacaattcttttacagatatggaacttatagaagcctatcaaaaaaaaaatctagttcctttctttccatataagcaaggctagttcaaaacacaggggcccaactaaaagaggttcaatataagttattttttggttttttgttttttgagtagcgtctcactctgttgcccaggctgggtacagtgctgtgattatagctcactgcaacctcagtctcctgggctcaagtgacccttttttttcagcctcctgagtagctgggactacaggcatgtgccaacatgcctggctaatttttgatcgttagtagagatg

SEQ ID NO: 149547 - DNA, 356 bp, Homo sapiens
ggcacgagggaaagcatatcctttttaatactattactatgttaagagatttaaggctaaactaaactctttaattagtgatagaattgagggcatgcttttttgtttgggggttattattcatcatctcactggccctcgacttacccgcctcacgcccccgtcccacctcctccgccctcttcccccatatccctccctcccacccttccactctctcccccccatcaaaccctttccgcttccccctttcctccctctcctccctccccctctctctaatcccctccgaccccccctcccaccctcctcattccctctccttcccctcccccagcctctccccctctccaacc

SEQ ID NO: 149548 - DNA, 332 bp, Homo sapiens
gtgtgggggacccccaggctctcctgacaccaggggaggctccctcatcccgcaaggtgtctaggctgcttgggcccatggagcaagtgcccctagtggcccccagcagtgctattcccgctgttcctggatccctaagtgggactccttcacatcagccggttctgggcacccataccccttcctgtcccggtctcacctacattcctcctccagaaagcagtgagctccctgactgtcctgctccaggaaggcagcggccttgcccgggccagacgcccctacccactccctgccctccatccttcattttctccaagcagcctcgtgcc

SEQ ID NO: 149549 - DNA, 1649 bp, Homo sapiens
acagaggtaggtcaccaggtccaggagagatgagcttgctgcccttcccagacaggcgaatctccctgtgccctcaacattcccccttaaatgtcattttgtaagggaatcaaatgaaaatcaaagtgcagcttgcctgtctgtgcagacccagctgctcagcctctcacaaatcccccccgcgggctgagccctggcagacagagatgctgtgtatcactggtcccacttcaggcagcgtttactcccttgctgggtggggggcattggtctggtcacgggcagatccagcccatcccctgttagactgttgagtcaatatgtctgatctttcctaggttgagaggaggataagtgggaagtaaggggtgtattctcttctaggccaccatttttggggttcaagtggccatagcagctgagcaagctcacaggggcacaagaacctttctctaaagatgccgaggtcttacacaacacaaagaatgtccaaggtcagggaacctctctggcctcagccagccctcagcctctctgaccctcttttcctatgcaagtgactctaatcctcttgatacccttttgcccatgagccgtgtccctcagacctgcagccttgggcttccctccctctaggtctggcagttagataagagtatgagagctgcccaaccctgggctccagctggaggtgcagcaggcagtgagtgggctgggctcaaacggctgtccccttggttggtcttccttcagccctgcggcagcacagtctccactagagctgctaggccacccccagcccagtccctggccctcggaagccccatggaaagcatgccaagtcagtttccagggcactgtgtggcagcttcctatcacaatgctcagcatgggacagaaagacagcacagcagctcctgctaaggcctgggcagctagtgaactctcccacctgggccaggctgagcactcactgcccccaacttccaggaacactcctagaactcagcactgcccccactatcccccacgaggcctggccaaaaggtggctctgtggggaaggtcctaatccttactcacatccactgagagaggggccattgaggaggagggtaggcagggggatgggcaaggaagttcatctcttctacagagcctggcattcaggcatccacttccccagccaccatccaggacaagccaccaggacagtcctcacctagagaactgaacgagccccctaattgatctcacacccacttgggcccctcctatgtgtaaacggatcttgtaaaaatgtacttgcaactcccttcctcaaaagccttcaatggctctccagtgtatctagaatgaaatcaacaagacatcaactacctcacccactgtgtcttgcgcctcactaagctccagccacactggcctgctcgccattcctccagcccgctgagctccttcccatctcagggactctccacgtgatattccatccaccgcgaacactcttccccaagtccaggactggctccttcctctccagcccgcaagtctcggtataaaagaaatgtccttccccatccccacccccacacacagcactctaagtacacggacgcgtgggtcgacacgggaaccattgccaagagc

SEQ ID NO: 149550 - DNA, 335 bp, Homo sapiens
cgcactgcacccgactctgactctagatttgtatttcacaatatatacaaaaattcactctacatagatcgtagacctagatgtaaaacctaaaactctaaaatgtctggaagaaagtataagagaaaactttgtgacctcagattaagcaagatttcttggatactaaaagcacaatccatagaagaacaaactgatacatgtgacttgaaaacttaaaacaattactcttcaaatggcacagttaagagaatcaaaagacaagttgaagactaggcacaaagtctttgcaaggcgaatatctgatacaggacttgtatccagaatctcgtgcc

SEQ ID NO: 149551 - DNA, 399 bp, Homo sapiens; identical to SEQ ID NO: 122527

SEQ ID NO: 149552 - DNA, 388 bp, Homo sapiens
gaaagctgggtacgcgtaagcttgggcccctcgagggatactctagagcggccgccctttttttttttttttgtattttttagtagagatggggtttcactgtgttagccaggatggtctcaatctcctgacttcgtgatccgcccacctcggcctcccaaatccttctgggattaaaggcgtgagccactgcatccagccaatctacttcttttttttttttttttttttgagatggagtctccctctgttgcccaggctggagtgcagtggcgtgatctcagctcactgcaagctccgcctcccaggttcatgccattctcctacctcactctcctgagtagctgggaggctgaggaacaagaattgcttgaacccggacgcgtgg

SEQ ID NO: 149553 - DNA, 1870 bp, Homo sapiens
agcaaggataatatcttgtggtggtagagccagaagatcccaagatataatggacccccatggtaagtccctacccacctgccagatgtggcagggttattccatttggcagctttgcccgacagacttcccagacagtgaggcaggtcctgagctgtctggacagtattaccttctgcaccccacatttggcagcccaaaattccctggaaggctcactcccagctcccaatcctaataagttatgaaagatggcatttcacaattatacttggaactgcaaataattgggaatcttagtactttttcattatattcttgcatttttaaataagcatagagtcagtctttctggatttgtataaaatgtaccgtaactgaacattactataaacatgacaaaagtacattccttatgaatctactctgctaaaaggtaaaagcttaaccttcaatttcaatattaaagggccatgtatcgtaactggcagttaattgctatgcacacagaagtagttttggggcacttgattcctctgccatgattttcagttttgttttatttttttgagtcggagtcttgctctgttctccaggctggagtgcagtggcgtgatctcggctcactgcaacctccgcctcccaggttcaagccattctcccacctcagcctcctgagtagctgggactacaggcacctgccaccacacccagctaatttttatatttttggtagagacggggtttcaccatattggccaggccagtctcaaactcctgacctcgtgattcgcccaccttggcctcccaaagttctgggattacaggtgtgagccaccacaccctgcctagagtagtctttactctaggaggtggttctttcccctaaggtgtggtttttcaattgaatgcctatgatgttaaaaagttctctccactctggctaggtcagaacctcatatttctcagcactgtgcaacctctagtatctccattctttctttttctttttttttttttttttgagatggagtcttgctctgtcgcccaggctggagtgcagtggcatcatctctgctcactgcaagctccgcctcccgggttcaccccacacgccattctcctgcctcagcctcttgagtagctgggactacaggtgcctgccaccatgcccggctaattttttggtattttttaaatagagacagggtttcaccatgttggccaggctgatctcgaactcctgacctcaggtgatccgcctgcctcagcctcccaaagatctggggattacagatatgagctgccacgcccggcctttctagtcgtacatttttattaaaaacaaaacaaaacaaaaaagcctttttttttttttttgagacggagtctcgctctgttgccccaggctggagtgcagtggcgcgatctcggctcacttgcaagctccacctcccggggttcacgccattctcctgcctcagcctccctagtagctgggactacaggtcccctgccaccacacccgactaatttgtgtttttgtttttgttgtttttcagtagagacggggggtttcaccgtgttagccagggatggtcgcgatctcctgacctcatgatccggccgcctcagtctcccaaagtgctgggattgcaggcgtgagccacagcacccagcctccaaattttaaatgagccccttgtgagaaggaaaagaatctgctgtccacagaagccaggcgtggagctacttcaaccagaaactgtcacccatgacactctgtgtgggttcagtcacacagaccacgatccattatggaagggagggagaaaaggatcacatcaaatctactgtatgcctcatagac

SEQ ID NO: 149554 - DNA, 372 bp, Homo sapiens
  misc_feature (1)...(372): n = a,t,c or g
ggcacgagtatggatgtnnnnnnnnnnnnnnnnnnnnnnnnnnnnnnnnnnnnnnnnnnnnnnnnnnnnnnnnnnnnnnnnnnnnnnnnnnnnnnnnnnnnnnnnnnnnnnnnnnnnnnnnnnnnnnnnnnnnnnnnnnnnnnnnnnnnnnngnnnnnnnnnnnnnnnggaaacggatttttgttttgtacccaggttgaagtgcagggggcctttctttgatatttgaaccttttggcccctggggttaaacattttttcctgcttaaccctcttgaagccgtgggactccgggaccttccccacattttccttcaatttttttatttatttagcggaaaaagggtttaacggctaagccccagtgggttt

SEQ ID NO: 149555 - DNA, 850 bp, Homo sapiens
gcgaattctgcagccatgccttccttaggctgctctgcctcatctggactggtcttctggcctcaaggcttataccttctgggggttgtgtctgtgtccccactcccccccacccccaccacagtgacttttccagaacaaatctaacttctgtctcctcaagtcagcagctccccagtatctgaaggatcaagccagcacctcagcatagagcctgagacccttccatgtgcctcgctccttccagtttcatccctgcagccctttgctccagccaagtcacctggtccctctgccacgtgtgccttctctgctcctagcttgtcccttctcacccttttggcatctggtgactcctcattttggggacctgggcctatccagatgtcagcaggaggctccatagtcatgtgcagctaagggctctgctggcgcttttgctttagggtctgtggacaggctccaggacacttgagggtcattgtgtatttgtggccttttctccactggggcacttttgcttgggggagggagcatgtggattacaggcagccttcatttgacttaggttggaaacacttccttttatctgcctttgatttgaccccagcagtttggcctacagggctcatttctctggccatgtgattccttttctctttgtatcaggttcaacgccctctagatcgcctgttctcctctattgtcaccgttgctgaacaaaagtatcagtctaccttgtggtaagtttccttatcataggagaggaggcttggggtggggcggagagtgggcattctgcccacacatccagcattgtcctaggagggttgggtagatggtatatgtg

SEQ ID NO: 149556 - DNA, 352 bp, Homo sapiens
ggcacgagcagccgactgagactccacaggacggacgagctcactgctccttccatatacagaagcacgaaatctactctagatggctcattagctgcgaatgagagagagcccttcacactaggaaagaaaccaccattttctgacaagccctcgattccagcgggaaggtcactcggggagcatttacccaagattcagaagcctcctttaccaccgaccacggaaagacatgactggagcaggcgcctggcagggaagaagccacctgtgccaaagcatggatgggtaccatgactgaggatgataatgagtgagatgaggaggaggagagagtgaaggaggtagtccg

SEQ ID NO: 149557 - DNA, 1106 bp, Homo sapiens
attgttctgagtcagtttcctcatctacaaagtcaaagtggtgaatgagaccagtgatttttaaactttttttagccacagaccttttgttcaaaggaaaccttaaatggagatgtaacacgccagctgcttaaagacacaggctctgcaagagtgtagtgtgggagtgggaggggggctaccagtctcgccagctgggccccctcgctgcttctgcccagctctccctgctgcagcactggcactgcagggaaccttcccagccacggggggctgagcctggggcctgtcaagccctgactggacattctcaacaaagaaattggttatggagtcagcacgaagccatggagaagggggagcccaggggccagccaccctcacaggtcctccaggggagggggccctcagagcttctcagcagggacagcaggttcagagctgagacaccgggcacgtgggccagcacagatttgcagcacgcgcaccaggcgctgcgccatggtggacataaagccttccacctccaggtcacagtagagcagtgggctttgataggtgtgggccagcttcaccacggtgtgccggtgaatgctgcagtggctctcccgcccagcacgtgtggcgaggaatcacgccttccacaagaagaaggtggcatccacatggcgcagggactcctctgtgttctggagactgtatatgctgtgaagattaaccacagtcacgatcaggtcagttcggggccgattcactctgaagggcaaagggagggactttgccaagtggaccttcagctcggaggcgcagtcctctttgagcatctgagtccgccagctgctgcagaagagcatcttccgtgcccaccagctgcgcagggagagagagcggacagtcgagccctaggcacagcaccccctggggagggcctggcccttcgacccactcccggggggatcgggacaccgccagcaggcggctcggaggacatttcccgagaagtggaccccgcgaagcggcacgggctgggggcctgaggtttggacccgcagcaggcctgtgggcaccgcactctctactacccgaccctcgctcccacgaattcc

SEQ ID NO: 149558 - DNA, 1455 bp, Homo sapiens
tggctctgcagcaggaagcacctacgaaccatcctccatgcgactggaggccttacaggtattgactcttctggcaaggggctacttttcaatgactcaagcctacttgatggagcttggagaggtgatttgcaagtgcatgggggaagcagatccatccattcagcttcatggagcaaagcttctggaagaactgggcacaggcttaatacagcagtataaaccagactccactgcagcacctgatcagagagcaccagtcttcttggtggtgatgttctggactatgatgctgaacggtcctttttccagattctctgcagaattcagaacacccaactctccaggcgagcgcctgtgatgccctgtcttccatcttgccagaggccttcagcaatctgccgaatgacaggcagatgctgtgcatcacagtgctgctcgggctgaatgacagcaagaatcgcttagtgaaagctgcaacttcacgggccctgggagtctatgtgctttttccctgtctcagacaggatgtcatatttgttgcagacgcagcaaatgcaatattgatgtcacttgaagacaagtctctgaatgttcgagccaaagcagcctggtccctgggcaacctgacagacactctgattgtcaacatggaaacaccagacccaagtttccaggaagagttctctggtctcctgctcttgaaaatgttacgatcagctatagaagcatccaaggataaagacaagttgtctacaataagcatatattactttaatggtcaagaaaacaggaaggaaaaaaactggaatgagagggaatataaactggaaatcccctatgagctgtgtacagaagtggatgccattaataaatggacagccccatggacctcccaggcctacaatgccctgacatcggtcgtgacatcatgcaagaacttcaaagtgcgcatcagatctgcagctgccctttccgtcccggggaagagagagcagtacgggtctgttgaccagtatgctcggatctggaatgcattggtcaccgcttttacagaagagtgaagacaccatagactttttggaattcaagtactgtgtcaagcctacggacccaaatctgccaaggcactgattcacctcttgaagcttggccaagtgcctcggacctccctttgtatgaaagaaacccttgaactgagtgggaatatggtccagtcctatattctacagtctttaaaatctaggagcatagggagatgacactggagcaccccacagcccattggatagagaccagatggtcagaatggcccttaaacacatgggcagcatccaggcaccaactggagacacagccagaagggccatcatgggctttttagaagagatcctggccgtttgttttgactcatctggatcacaaggggcactcccagggttaacaaatcagtga

SEQ ID NO: 149559 - DNA, 730 bp, Homo sapiens; identical to SEQ ID NO: 122881
  misc_feature (1)...(730): n = a,t,c or g

SEQ ID NO: 149560 - DNA, 372 bp, Homo sapiens
ggcacgagctggaatttgaaattaaaaacacaataccatttatattagcaccaaaaaattaaatacttaggtataacataacaaaatatgtgttatatctcaatatctatatgcagagaactacaaaactctgatgaaataaatcagagatctaaatggagatcctttgagctgcaaggtaaaaaatttaataaaaataaataaatacatgaagagagattctatgttcacgaatagggaaggactccaatattgtttaggtgtcacttcttccccaacttgacctgtagattgaatgcaattcccatcaaaatccctgcaaatcattttgtggaagtcaactaactgattttaaagtttatataaaaaatc

SEQ ID NO: 149561 - DNA, 524 bp, Homo sapiens
aaacaaacaagcaaacaaaaacaaacaaacaaacaaactccaaatactttaaatgctattacagattataaaattacaacactgcagacttggcagaaggaaagatttagatttcagaaaacatacacaagtcatttggtagaaggcccagggatatgaacagatactacacgcatgagaaaatatcatgagtaaaacaagtacagaaaactgtacaaaacagtgccacttttggcatgttaacatttgatattctattttttttttttttttgagacagagtctcgctctgtcacccaggctggagtgcagtggcgtcatctcggctcgctgcaagctccacctcccgggttcacaccgttctcccgcttcagcctccccagtagctgggactacaggtgcccgccaacaagcctggctaattttttttgtattttagtagagacggggtttcactgtattagccaggatggtctcgatctcctgacctcgtgctcctcccgcctcagcctcctaaagtgctg

SEQ ID NO: 149562 - DNA, 337 bp, Homo sapiens
  misc_feature (1)...(337): n = a,t,c or g
caatttccaaaaccttccccgcgtgggccaaacccacaaagtccctttttcacattctttcccccccgaaccaataaataagcccaccaccctgacaattacctccctcactgtatcaaattccacccactatatgnctctcacctcttccccttgctgaatctccatccccactgtctgtgggattaggaggaccgctgggctgggtgggccaacttctgtgcctcagtttcccaggtggaccaaagcacgttgaagtctaaacactttacccttggctgggcattnnnnnnnnnnnnnnnnnnnnnaacaatctttctaagtttaggctcgtgcc

SEQ ID NO: 149563 - DNA, 369 bp, Homo sapiens
ggcacgagcggcacgagctggtaaaggaattcaacaaagtttcaggatacaaaattaatgcacacaaatcagtagctctgctatacaccaatgcgaccaagctgagaatcaaatcaagagctcaaccccttttacaatagctgcaaaaagcgtaaaatcttaggaatatacctaaccaaggaagtgaaagacctctacaaggaaaactacaaaacactgctgaaagaaatcgtagacaacacaaacaaaaggaaacacatcccatgaccatgaatgggtagaatcaatattgtgaaaatgaccacactgccaaaagcaatctacaaattcaattcaatgcccatcaaaatatcaccatcgcactttggg

SEQ ID NO: 149564 - DNA, 338 bp, Homo sapiens
cggatgctgggacaactagatatccacatgcaaaagaatgaagttggactgttccctcatgctacatatgaaaattaactcaatgtgatcaaagacgtaaatataaagagctcaagctatgagaaaagacataggggtaaatctcccggacaatgtacttggaaatggtttcataaatatgatgccaaaagcacaagcaagtaaagaaaaaataataaattgggattcagcaaaattaaaaacagaaagtgaagacaactcacagaatgggagaagctatgtgcaaatcccatatactcgcatctgatacctgtattatgttacttatatctcgtgac

SEQ ID NO: 149565 - DNA, 823 bp, Homo sapiens
  misc_feature (1)...(823): n = a,t,c or g
aatatactgatttaatagatcgtttctgtgagttgtgctaaatagaattggtaacagtgttacagttttatagggctttttatctgtttgagaggtatgcaggatttcttttttattattattttttattttttgtagagataagatttcactatattttccaggntgggntctcaaactcttgggctcaagtgatcctcccacctcgggcctcccaaagtgctgggattacaggcgtgagccaccgcacctggcccgatatgcaggatttcttgatgtttcacatcttcccaaaacttttctctttccctgacatgtgctttttagcctctgaatagccgtcagcaaatacctggctcctgttggttgttcagtcctctttttctcttctctcacatacctaccaccctccaggcaaagcaagtaccctgtggttctctgcctaatttatatgtctcggaacatgctgctcccctcaccttaaatgccctgcataactcacaagactcttaggacctttgagttgtaccttcatctccagaagttctccctggcatttgttctgcacctcccatggctccacatgcccagagttactgatttgtctcctctcgattctcctggaacacccagtccacctttttttttggtttgctcacctgccatctcccatgtcatagaaaggctgcagtgagacacagccctgttcatgaccttagtaataacatcataagcaggttatcagtaaatgttgatcaactgtatgaatctgctgaggttgtgaaaagggattcggagaagtttgagatgcatttggccccag

SEQ ID NO: 149566 - DNA, 1220 bp, Homo sapiens
accttccttttctggtctcacaagactgaaccactgcctcccattgtatgggtgaaatacctcgcggacatgtcttccggcgccccatgaaagcatcaccattaatctgccagttctccgccgcataagtatcttctgggcgcggattaagccgtggcgcaccactaatatggatttcccgctgtggtttaactgcgaaccctcacacttctgtggcctagaaacccattccccactccaatccctctatagctccaacagttatgataacaagaaaaaggagtgaaaacccgctccagtcacggtattgtggaggtggaaggacacttgtggcagccaatccaacacctccattttatagctggtgtaaacatagttcagaaaggttgtcccacttgctgaaagtcacccagcagttcctggtcggcaaagtgagaacatccaggtctcctaaatctccccctcgtgctctgcccacttgactgggcttttcaatcctggctgtcaaagagaaacaccaagtccacttgggctcctggccagcatccaggccaggccaactcaacagcaagcggaagcaaataccacacaatgaactcgttgaacagactctgcgctcaggcttaaccagtgcacagcctgcacacccgacaggcggatacagctgttccaagctaaggccagggcctctccccaatcccaatgggctctgcaggtgcagtgatggaagaatccctggtgacagggagcccttagctctgagcaggacctgaatccatctcagggcttgcaccggtccagatgctgctgcacaagtgctcccagggctcctgccctgccctcctcacttgccccctcacctgtcagggatgtttgattcctggctggcccctcccctacctgacccctgccaaagacctacgccaccccaggctcccagctctgaagcaaacaaccagagaagtcaagcgcctggctgcgggccacacagcttgagggactcagagctccagggacagtgcccgggccctgctcaggccttctgcagaggctctgggctcttccagttgactcagctcacagggcccctacacggtaccaggtgaagactcagccccaagaactcccaggctctgaagccacacatgtgagctgtgggcagaatcctgcattggcctccagcagctcgacccgggaattccggccggtatcctgatgac

SEQ ID NO: 149567 - DNA, 353 bp, Homo sapiens
  misc_feature (1)...(353): n = a,t,c or g
ggcacgaggtcccagcaaagggccctcgaccccatctcactgactgccctaccacccaggacttcctcccgggcttctccccaaggcccgcttctggtcctccccctccgtccctgtccctgaggctctttcagcagcccggctaaactgtatggtcccctgggcctccctgccctgtagtcccagattgcacttctgcttctggccaggtgcccttcctccctccggccttcagattcaagaacgttttttaaccaagtcggncttccccaggcacccgtggaggccctcgccttaggtctgtaccagtagacactaccttaaacctctgaaccccagcctcaacctggctg

SEQ ID NO: 149568 - DNA, 343 bp, Homo sapiens
ggcacgagcgtcttgatctactaagccaagtcccatgggccctatccaatggtctcacatgcctggcgcattctcagaaacgtagcagctgtcattcacacagtgccttcctgccaccatacttctctcatggccctagcaacagaccacctatcagagccctatgcagaaacttacccttgccacttccaaacaaacctcgggccccatccgccgcggatgaagataattcattaaatgtagagtggtacgtaccttatattacccgaccacaagcataagctgctcttataaagataaaccaggatggcacatttctggtcagagacagctctaaaaaaac

SEQ ID NO: 149569 - DNA, 337 bp, Homo sapiens
  misc_feature (1)...(337): n = a,t,c or g
ggcacgaggtcctgggccctcgggaaagagtggagccaggagcggtttggggaacacccctaggagaggaggggctggcttgggcagggtgccctggagtctgtgctactaggagggggtggagtctggacgccctgagggggcggggccaggaacatctccaggggtgggttttattggggcatatcatgggaggggcgtgactaaggtgggcggacttcctggagccaagcctgcggggtgtggtcagaccccaagagtcctggtgagccggtggagcctatcccgggaggctcttggcccccacaaagggaaccctgacctgtacgatgtttgn

SEQ ID NO: 149570 - DNA, 381 bp, Homo sapiens
  misc_feature (1)...(381): n = a,t,c or g
gttcccaacttactctttgaggacnaaaggtgcagatgtattcaacaaaatactagcacaccaaatataccaacatacatggattgtataccatgaccaaatggatatatgcaagcttggatcaacattagaaaatcagtttatgtaatacactgtgtaaataaaataaagnnnnnnnnnnnnnnnnnnnnnnnnnnnnnnnnnnnnnnnnnnnnnnnnnnnnnnnnnnnnnnnnnnnnnnnnnnnnaaaaactcaggagagaacttcctcagcctgttaaagggcatctacaaaaacccatggctgacatacctaatggcaaaaaattgaaagcttctaccactaagatcatgaacaagacgagttcctgatcgtttctg

SEQ ID NO: 149571 - DNA, 990 bp, Homo sapiens
agaggactttaagggaatgctataaacaatataagccaatgaactaaataacctagatgaaatgagcaagttaaaagacgcaaactattgcagctaactcaggaagaaatagaaaccctgaagtataacaacgagattgaataaataatgaaaaactgcccacaaagaaaagtcctggcccacatggcttcactggttaattctaccaaatgtttcaagaagaattcacgccaatactttccagactctaatagaaaataaaagaggaaggaacagttcccaacttactgtatgaggtcatattatcatgataccaaagccagataaagacatcacaagaccagtatctcttatgattataggtgcaaaaatattcaaacaaaatatctagcacacacaagtatatgcacacatacataggattgtatgaccatgaccacaatggatttatgcaagcttggttcaacatttgaaaatcagtttatgtaatacactgcgttaatagaataaaggacaaaaaccacatgatcgtttccataggagcaaaaaagcatttgacaaaatacaacaccctttcatggtaaaaacaaaaactcaggagagaactttctcatcctgttaaagggcatctacaaaaacccatggctgacatacctaatggcaaaaaattgaaagcttctaccactaagatcaggaacaagacgagttcctgatcgtttctggaagtggcagtgccattgccacttctcttcagcatcgtattggaggttctggctagggcagttaggcaagaaaaagaaattaaaggcatgcaaattagaaaagtagtgaaactgttcacagatgggatgatcttatatgtagaaaaatctaaggaatctactataaaaaccagtaaactaataaataggttcaacaaaggttcagaatacaaggctaatattaaaaaatgagtagtatttctatagagtagcaatcaacaaaccaaaa

SEQ ID NO: 149572 - DNA, 314 bp, Homo sapiens
ggcacgagaatgattccaatcctgaaaccgacaaccgtcaagaagggccttcccaggaaaacattggccgagtgagtgacaggcctttgtgccctcagcttggacagcctcgggtggggttgcttggggtaacccgggtgaatcaggcagcaggactgggggagtccgtgctgaaaccttggctcccaggctccaggtgtaacctgcccacctcataggccacccacgcagtaacagagggcaggggaggcctccttggaaagcaggaaaactggggaagtgtcaggaagttctctttaggtttgctgcctttg

SEQ ID NO: 149573 - DNA, 349 bp, Homo sapiens
ggcacgaggtgaggaatgtcgaaaagccttccgttgtatctatgactgcgtcattcatgaacgaattcacaatggggagaagctctatgaatgttaggagtgtgagacgagtttgagttctaattcagttctgattcagcatcagagaattcacactgcggagaaaccttatgaatgtaacgagtgtggcaaggccttccaccgcacttcggtatttcttcaacaccagaggttccacactggggaacaactctacaaatgtaatgaatgttggaaaactttcagatgtagctcccgcttcatagtgcatcagagaatccacaatgggtagaaaccctatgaatgccag

SEQ ID NO: 149574 - DNA, 628 bp, Homo sapiens
  misc_feature (1)...(628): n = a,t,c or g
agtcagaccaggcttctgagataaccacccgnncgacaccacggcgtccggaccctgtagtggactgaacctgtgaggcacccggatatccacagtcagaaaagggagccatcactgatgcctcccactgtgacaggccctggcaccaccaatatgttatttcaacctcacaggggacctgagaaatcgagagtaccactccacnnnnnnnnnnnnnnnnnnnnnnnnnnnnnnnnnnnnnnnnnnnnnnnnnnnnnnnngaagactttcttggagcgccgaaacaccaccctctgctcctacttctcctgacctggcccaggcatcctaggggctgaaatcctggaaaccgtggtctggagagagaaggtttggatgctcaaagcagagaagggctctccccactgcttcgtgattccagggccagagccatgcagccccagaaaccccatcctatgtggggcaggaccagagcccaagccctggtgggtagaggccaagcacaagccctgaaggggactcttgcttcccctagaagaggtttcagtgccaagaagctgaaactgcgagccggagttggggagaggccctggaacaggaccttttcggggatttggacacagctggc

SEQ ID NO: 149575 - DNA, 786 bp, Homo sapiens
  misc_feature (1)...(786): n = a,t,c or g
ggggctttttggggggtttaaggaaaaggccctgggccaccagggggggtctgtaagtcaacccttcctcccgcaaaaccctggcggggccctccccatcttcctctccccttggggttataagagaaggctcttccgcgggctttagggcagtgggaaggcagggaatctttttgggaccagcctggaaagctgcccctgcagaatctcccagaagccttggtgtggctatgggtacccaggctgtagaaatcccagatggtcgtcttccagacctctccccaactccagctcacagtttcagcttcttggcactgaaacctctactaggggaagcaagagtccacttcagggcttctgcttggcctctacccaccagggcttggactctggacctgccccagctaggttggggtttctgggactgcatggctctggccctggaatcacgaagcagtggggagagcccttctttgctttgagcatgcaaaccttctcacaccagcccacggtttccaggatttcagcccctaggatgcctgggccaggacaggagaaggaggagcagagggtggtgtttcgggctccaagaaagtcttcnnnnnnnnnnnnnnnnnnnnnnnnnnnnnnnnnnnnnnnnnnnnnnnnnnnnnnnngtggagtgataatctcgatttctcaggtcaactgtgaggttgaaataagatattggtggtgacaggaaactgtcacagtgggaggcatcagtggtggcttcccggacgcgtgggtcgatccgcctatccg

SEQ ID NO: 149576 - DNA, 1303 bp, Homo sapiens
  misc_feature (1)...(1303): n = a,t,c or g
ggggaactagagcactgtgatccaccnccctgcaggccgagctggcgtggtggagccggaccctgcacgtgcatgagcgcctgtgccccatggattgtgcctcctgctcagctccagggctcctgggctgctgggaccaggctgaggggctcctgggccctggcccacagggacaacatggctgccgggagcagctggagctgttccagaccccgggttcctgttacccagctcagccgctctctccaggtccacagcctcatgattctcccagcctcctccagtgccccctgccctcactgtcccttggccccgctgtggttgctgaacctcctgtccagctgtcccccagccctctcctgtttgcctcgcacactggttccagcctgcaggggtcttcctctaagctcagtgccctccagcccagcctcacggcccaaactgcccctccacagcccctcgagctggagcatcccaccagagggaagctggggtcctctcccgacaacccttcctctgccctggggcttgcacgtctgcagagcagggagcacaaacctgctctctcagcagccacttggcaagggctggttgtggatcccagccctcaccctctcctggcctttcctctgctctcctctgctcaagtccacttctaacctggtcttcggagctgggttggccccttctttgggctcaggaagcagccttagcacacgggcctctcctccctcactactgggtgctgccctgcgtggctgaccagctggcccaggatttcacagtccgaaaggaaagcccacccttgatgcctcccactgtgacaggccctgtcaccaccaatatcttatttcaacctcacagttgacctgagaaatcgagattatcactccacnnnnnnnnnnnnnnnnnnnnnnnnnnnnnnnnnnnnnnnnnnnnnnnnnnnnnnnngaagactttcttggagcccgaaacaccaccctctgctcncttccttcatcctgtcctggccccaaggcattcctaggggcttgaaaaatcctgggaaaacccgtgggggccttgggtggtggaagaaagggtttttggccaattggctttccaagaagccaaggaggaaaaaggggccttcttttcccccactggttttgtgattccaggggcccagagccctgccagtccccagaaacccccaccctaaacttggggcaagttcccaaagtccaagcccctggtggggtaagaggcccaagccaaaaagccctggaaatgggacctcttggcttccccctaagtagagttt

SEQ ID NO: 149577 - DNA, 954 bp, Homo sapiens
ccttgagacctagatgagcgtggtggaattccggagctgggttggccccttctttgggctcaggaagcagccttagcacacgggcctctcctccctcactactgggtgctgccctgcgtggctgaccagctggcccaggatttcacagtcgaaaaggaagccaccactgatgcctcccactgtgacaggccctgtcaccaccaatatcttatttcaacctcacagttgacctgagaaatcgagattatcactccactttttcagacaaggaaactgatggtcttggctaccaagtgacaagtccaaggtcacgaagactttcttggagcccgaaacaccaccctctgctcctccttctcctgtcctggcccaggcatcctaggggctgaaatcctggaaaccgtgggctggtgtgagaaggtttgcatgctcagagcagagaagggctctccccactgcttcgtgattccagggccagagccatgcagtcccagaaaccccaacctagctggggcaggtccagagtccaagccctggtgggtagaggccaagcagaagccctgaagtggactcttgcttcccctagtagtgttttcagtgccaagaagctgaaactgtgagcctggagttggcgagaggtctggaagaggaccatctgggatttctacagcctgggtacccatagccacaccaaggcttctgggagattctgcagggtcagctttccaggctgttcccaaatagctccctgcctccccactgcccctaaagccacagcagaagagccattcatctcataaacaaaaaggaagaggaaagaatgaggaaaagaccctgtgccaggttatttgcaggcaaaggatggggcttgtaccctgacagcaccccaccccctgtggggcccccccaagccctcatcaccctcaaacccctcctaaacaggttccttatttg

SEQ ID NO: 149578 - DNA, 410 bp, Homo sapiens
  misc_feature (1)...(410): n = a,t,c or g
natcctatagagcggccgcacgaactcaaacaccggctcccgcatgtccagaagctggtggaagatgtaggtgacggagtcatcccagcggcactggaagaaggacaagccggctggagtcatggtttcttggtgtttcttgtagaaatcaaaagtgcggaaggtccgctgggccagctgatagcagggtgaggggcgtgcgtcctcagagaagtcaatcggctggtcctgcttgaagagcaggaaggcaagacggtgtatgccggagcctcgggcagggaagggggggaggtagggccacgtcacttgtccttcacccacccggttacccgggatgttggttctcggttggagtcccctcactgccgcagtacacaggcatcaggtcatcctcaccccgcacgcgtggg

SEQ ID NO: 149579 - DNA, 451 bp, Homo sapiens
gatcgaaaccctagcgactggctgagtattacggcctctaccgagacctgttccacggtgccacctttgtgccccgagtccccctgcacgtggcctacgctgtgggtgaggatgacctgatgcctgtgtactgtggcaatgaggtgactccaaccgaggtaaccactcacttgtgcccctcctccctgccctgtgcaaacacagacacatcccatctcagtgtcacagacactcctgggtttggaattttgttgttctctgtctctttgatttcctggaagacgacaccatgacaatttcaaagaaaatagaacaaaatgaaggaaaaagaggctctgtcttagcacattcctgtgaccagcctgctgtctgtggtgtgccctcctggcccggccttggcacatgttcgtttttggtggtgttgcctggacaggcaactctgcagggctgc

SEQ ID NO: 149580 - DNA, 1449 bp, Homo sapiens
  misc_feature (1)...(1449): n = a,t,c or g
gttttttttttttttcccggcaagaaatcatgtttattcacatttccccaccccaccacctgagagtcactttcactccaagcccctgggctctaacgggagggggccaaagaggggggctgcctaaggcagggcccagaccccacagtgtggccatctggagctgtgtctttactcttgctgccgatcaatcccatgctctgaaatgcgcacactctggctccttagtagatgccataggtgggctcatgactgtccctgtaccggtccaaggtagcgcagggggctgccgggtgggggaaagcgcttctgcttggggtggtaagggggcggccgcagcgaactcaaacaccggctcccgcatgtacacagaagaattgtggaagatgtaggtgacggagtcatcccagcggcactggaagaaggacaagccggctggagtcatggtttcttggtgtttcttgtaagaaatcaaaagtgcgagaaggtccgctgggcccagcgtgataagcagggtagaggggcgtgcgtcctcagagaagtcaatcggctggtcctgcttgaagagcaggaaagagacaagacggtggatgccggagcctcgggcaggcgtagggggggaggtagggacacagtcacctgtccttcaggcgcaagcggttacccagggatgttggttagcaagccagtgggaggtacttcagcatcttggctcccagcagggtgccccatcccaagctagttgagttagcaacgttcacaagggagcccttcttcttgcctcataggtcacctcttggcgctttgggcagccttcggtttnggagtcacctcattgccacagtacacaggcatcaggtcatcctcacccacagcgtaggccacggtgcagggggactcggggcacaaaggtggcaccggtggaacaggtctcggtagaggccgtaatactcagccagacgctgcttgtggtaggggccacaggtcctctcccactcggccccgcacggcaatcccaacgggaacactggctgtgcggaaggcgggcaagcccgctnccttcttccaaaattggccccaaagctccctggatggcctgtttccgttccagtagctgttgggtccgggagactttgggtggaggcaggcccaatatcaatcttctctttgggatctgtcttctccccgaaatactctcggtaggtccgccaccagtgcggggcctgcgcctcctgctctgctcggcgccggtagcggtcgaagctccggtacttctccagccgctccaggttgctcaagtcgatgtcactgttgggcatcggccccagcgggggtgtccggcggcccaggacggccgaggtgctgaagccccgccatctccgacactcgcacagcgcggctcgccaccagggcgccgccatcttccctccggcctgcggaattccacca

SEQ ID NO: 149581 - DNA, 726 bp, Homo sapiens
ggcacgagcaaaagaagtgtaagacttgtacactgaaagaacaaaacattattgaaagaaattaaagaagaccgaaataaatggaaacacacctcatgtttatggattgcaagacttaatattgtgaagatgtcaatactttgcaaattggttcacagattgagtgcaatcactatcaaaattcttgctggctttgtttggcagaaattgataagctgatcctaaaatcatatggaaattcaaggatccagagtagccaaaacagtcttgaaaaagaagaggaaagttagaaggctcacactttccaacttcaaaacatactactttagagttacagtaataaaaatagagtggctgtgtcagaaggataaatatatagatcaatggaatagaattaagagtctagaaataaactcatacatctgtggcttactgattttctacaagagtgccaaaactatttcatgagagaatagtgtctcatggtacttggacaactgtatacccacatgcgaaagaatgaagttggccccttacatcatatacaaaaaaattaaagtggattaaagacctaaatataagagctataactgtaaaactcataaaagaaaacatagggccaggcgcacgcctgtaatcccaggcactttggaatgccgaggcaggtggatcacctgaaagtcgagttcaagaccagcctaacatggtggaaaccccgtatctact

SEQ ID NO: 149582 - DNA, 590 bp, Homo sapiens
ggcacgagcggtactaggttttctgagtcctctataatcatttattacctggatggaggttccataatccagtgcaattggatatgacatgtacctggagaagaatgttttgctacatatcaggaatctccaattagctttcatttataagggaatatagccttataatcctatgctgggttactgtggaaccaaatatcatacaaggatgtgtgatatttttatgttcttcacgagggtagtatagatttaaaaggcgagatacatattacctgacctaatgataggactagattttttttttttttttttgggggaaacaaaatttccttttgccccccaaccgggagggcaccagggggatttgggttaattgaaattaaccccccccagggattttccggcctaacccccccaagaagcgggaactaccggcttggccccccccccccacttaatttttttgttttttaaaaaaaaagggggggcccccatgtgggccaaacgggttttgaactcctgacctaaaaagacccgccccccttggcctcccaaagggctgaaattacaggggggacccaccatgccgg

SEQ ID NO: 149583 - DNA, 378 bp, Homo sapiens
ggcacgaggtaactcctatatagagaatgagaggacattactctagtttcttacctgctacagtagggttataaatgcaaagtactaattattctaccataatgtttcctttattctatttgcagaggtgctgatactcaaagaaggtttaagttgtctgatctctctataaattccactgaatgtctacatgtgcattgccgaggattagagatcagcttggctgactgtgcttatacctagatattaactaagggtaaccataatccgctctcatgatatacgtttatgcgtaactgcaaagcaacccgttaattgatatcatagatgtactgaaacatttagtcttactcgtatggaacttctcgtctcagtcac

SEQ ID NO: 149584 - DNA, 456 bp, Homo sapiens
gagacagtgtcttgctctgtggcccaggctggagtgcagtggtgtgatcatagctcaccacagcctccatctcctgggctcaagtgaccctcccacctcagcctcctgagtagctgggactacaggtatgcaccaccatgcccagctaattttttttgggttttaatagacacagggtaatgctatgttgctcaaactggtcttgaacccctgaactcaggccatcctcccacctcagcctcccaaagtgctgggattataggcctgaggcaccgtgcccagccttgtgtatttcaaagtagtcagaagagaggacctgaactgttctgaacacaggaaaatgaggaataccaaagtgacagacaccacaaacactctgccgtgatcattacatactctgtacatctaataaaacatcacagggaccccataaatatgtcaaacattatgtatctt

SEQ ID NO: 149585 - DNA, 1214 bp, Homo sapiens
ttttttttttttttatagaagactactcaacaacagcaaaatttattcttctcaagtgcacatgaaacatattaccaatacagaccatattctgggccatgaaacaagttttgatatgttttaacatattcaagtcatataaagtacattcctttaccataatgtaattaaattagaagtcaatagcagaaagatctctggaaaatgtccaaatatgtggaagttaaataacacagttctaagtaatacaaaaatcataaactttttggataataagcaaaacgaaacaataaagataaagcagaaaccaatgaattagaaaacagaaaacagagaaaatcaattaaaccaaaatgtgattctttgagatgatcaatacaattgataaatctttagccagatgatcaaggggaaaaaggcacaaactattaatatcaggaatgacaaatgtggtatcacattgtgttagtcttccaactttgttcctttttcagagttgctttgactacattctaactactttgcattttcttatcaattttagaatcgttttaacaatttatacaaaatgataagaggatattaacaactttacaaaaattaatttgataaactacatgaaatgaagaactttctttaaaatactaattaccaatcctcacacaagaagaaatataacctgaatagccctatatatattttaaaaattgaaattgtagtcttaaaccttcccacaaataaaacttactggtaaactctaaaatttaagagatgataccaattgtacacagactcttccaaaaacaggaaacacttcccaacccattctatgaggtcagcattaccccgataccaaagataaagacattaaacaaaagaaaacttcagaccaatatccttatgtagatgcaaaaattccaagcaaaaatttatcaaattacatctgcagtaggctgaataatgcctcccatcctcaaagatctacagatcctaatctccaaaacttttgaatatgttactttacatggttaaaggaactttccagatgtgattaacttaaacatattgagatgtggagattatcctagatgatcccaatgcatgcaaagtaatcacaagagtccttttaagtgagaggcaggaagatcagagtcagagaagatataaggattggaagagaggttcagaaaagagaaaaaatactacattggcgg

SEQ ID NO: 149586 - DNA, 369 bp, Homo sapiens
gttccacatcaaatgcctaccattctaattcattacatcaacaaattaaagagaaaaaaaatcatacaattttatcaatagatgctgaaaaggcattttataaaattcaggaaccacttctagcaataacactataaaacaggaatagcggaaactcttaaacatgttaatgactacctactaataaccaaaagtaaatgtcatactaatagggaatactattccctattaatattttgcattcttacttccatgaaaattaagaacaagacagtcacgtctgtcatcactcttcaacattgttttgaaaaatccagctaatgtaacagtaatcagtataaacattaagaggaaataaaatgatctata

SEQ ID NO: 149587 - DNA, 446 bp, Homo sapiens
  misc_feature (1)...(446): n = a,t,c or g
ttttttttgagacagagtctaactctgtcgcccaggctggagtgcagtggcatgatcttggctcactgcagcctccgtctcccgggttcaagcaattctcctgcctcagcctcccgagtagctgggattacgggtgcctgccccaatgtccagctaatttctgtggggtttttgttttttgttttttggtttttttttgagacagagtctctctctgttgcccaggccactggagtgcagtgggtgcgatcttgggcttactgcaacctccgtctcccgggttcagggcgattcttatgcctctgcctcccgagtagctggggactacagggcgtgcgctaaccacgnccgggctaaatttttgtatttttagtacagatggggatttcactatgtttgggtcagggctagtcttngaactcctgaccttgtgatccattcgnctt

SEQ ID NO: 149588 - DNA, 1297 bp, Homo sapiens
ggaaattgcagtaaaattgtaccaatgttcaagttgaaaaaaaaaaatggctctgaattacagcattcagttctatgctcaaggtatgtattagctaacactgcagttgtcagaggtgggaggcccctgagaaatgctgagaatgccaggcaccccagttctgagagccaccctagctaaactcaaagcagcattcttgagattttagcaaaaggctccgccccaagccacaaaaagatcccaatccaatcttttcagctttatcctctaaacccttttgtcagatgaggatagcatttgtgtttcccaggaggagaaggttggggaagaaaatgaagatagcttacatacagattttggatgacccgctaatctttcccccttccctaggtaaagtgaaaaccagataaaatgtttctgggcagccccaaaggtttaccacctgtttcactagaatggccagtctgtgtaaagaggctataatgacgaaagcattttccctgcaggggagaagctagaaacaaatgggtcttcctatacatcagtctgccaaatgcagcctctctcaatctatataagttcacctcgaaatacatattaagtactgctgtcatcattgttttaaacagagcgtcttttcattttttctaatagtgactgattctatcggcaaggccaccaaagggtgagaaagggagcttcctgcttgctgagttttctagctattttcattctggattattttcatccgccagatctttttttttttttttttttttttttgagacagagtctcattgtgttgcccaggctggagtgcagtggcttgatcttggctcactgcaacctccacctcccgggttcaagcaattctcctgcctcagcctcccaagtggctgggaccacaggcgtgtgccaccacgcccagctaatttttgtacttttagtagagacggggtttcaccatgttggtcaggctggtctcgaactcctgacctcgtgatccacccgccttggcctcccaaagtgctgggattacaggcgtgtgccactgcgcctggccgatcactggcctctttgactgtaggcagatcaaggacttgtgcccatctccctagggaattagggccaatacgagaaagcagatgagaagggccagagtgcgggactgccttcgggggatctgagctctgatggactcatggaccatggaaaacccttctgatcagtatctgggggacaggagaacctgtgttatgcggtgggctagttctccactgctctccaagcctaatgt

SEQ ID NO: 149589 - DNA, 4415 bp, Homo sapiens
tttttttttacctaagaacttcagaaataaatgtaatgtttattcatagtgaccacaacagtctggattttggtttatctacttctctaagcaaggttgtccattttttgttaacattttgaatatttgtagttttgttttgttttttttttttgagacagagtcttgctctgtcgcccaggctggagtgcagtggcatgatcttggctcactgcaacctccacctcccgggttcaagcgattctcctgcctcagcctcccgagtagctgggattacaggcgcctgccaccagacctggctaatttttgtatttttagtagacatggggtttcgccatgttggccaggctagtctcaaactcctgacctcaggttttaaaaagtgggttacttgatccagaaaatccaaaagctttggaaattccaggaaagcaactactcttttggcagtggactcttccagggttgttaatcccactctgacacaatatggatggactagggaggcttcctgattatccaaatggaataccaagcatgccatcatctctccaaagcaagcccaaagggggctttaacttcccaaagtgctactgtaatcaccaattcccctgggcctcccagtgctaaataataagccaaagccaaaaaataaagtgtcattcagtgcagttgtcactttgcagccctgcaaccccgaggcacttcttccatgaggaagaacactttgtgacccttctttggcagctcaagcaaagacacaagaatgcatctgagagctgacaggtactagtcgagagttctatgagtcccctatttctatctgtggtagtaatgcattctttcctccactgcttccttgaattttagtgttaaaaattaggagaatctgctgcctaggctctgtccccttgaagttgatggagtcaaaagtgactctctttggtctgggaacaaccagcacagtcctcctgaagcgcttgctcagtcaatgagctactctttgcagaggatcagggaactaaggtatgcctggggaaaccccacccaaatgagccatgccagacagcccttgccatcagctctctaggcacagggtcagccattccagggccccaggctccaccatttctcctgactgctctgcaggaaggcctctcactcatttctgaaacaaaatgagagaccagacttcaagctctggccattaaaaatggccaggtcatcattttcatgttggggtaagctgccctaattatgttgattagaaggacagaccacaataagggtcattctttcatgccatcctttttcttcctccagccacaatctcacctcaccacttgggaacacatacaaccaaagctgggaggtaaaatctttaggactttggtcatgctgagccctctataacccaagtgctgccagacttctttgaaaacctagtgtcctcccaagtaatatacaatacagtacatttcatggcattccatcacttataataagaatggatgccaaagaacaaagccaaaattagctgacaatgttataaaacaaaagcaaagtatacacactctatacacacgtatacctgcactcagcctgctgagtatttaaataacatccccaaatatccatatgtggactttggctggcctagagactttcaagaatattttgcaccttttctcaaagtacttttttttaaagaaaatgaactgtaacacaactactcatctccttacttatatcagtccctcccttccaccctccccactggggaaaaaactgttggggaatctgctagagaactggtatctgacagcaaactaagccgtggggtaaactaaaaagggactctgggtagaggaaaaaaatctaacctcccatatgtgaatgagagtatgagctaatacttcccaagaatgctaggaatgtgaccttcataatggaagcacagacttatgattatagttagagtcaaaagaaaacagtctggaaagggaactatataagacttttcctaaaatttcatacacaacagacttacaatgattttccagcaagtagagagtacttacccctcctttcttgacacctgactcccttgaagccccatcatagttcccagaaggacagtaagttagtgcagagaatagagtacttgaagtatagctaaataggtggtaaaaattctgagaatatactgaacatcctaccaaaacaaggctaaagcctgcagagcccaaagacactgagtcagttactttatcatttgcaagtaaaaaggttattagcactacatggaatttctgaaaggctccaagagtttagggagctactatgctcaaacatatcatgatcagagcccaggatagccaaagagttaaaagttatatgaaagacccattatagactccatttatactccattaatatttaaaagatggtcattctgtcatagacaaccctagaaaatcccagcagcagatgtgcgactcatctttgttttttgttttttttttttgttttttttttttgatagagtctcgctctgttgcccaggctggagtgcagtggcgtgatctcggctcaccatgacctctgcctctcgggttcaagtgattctcctgcctcagcctcccaagtagctgggattactggtgcgtgccagcatgcccggctaatttgcaactcatcttatacacctacctggggacctgttttacaaactctggggctgaacacaggggccagaccacagttattggggattaggcagatggagggagactactcacttccactgtctacttcctcgtctacctgtttttcggaatctaatggaccagtttggttgaggaaggcttgaagtcaagtgcatctgagatgcaccaatatttaaattgttccccttcctctgcctagaatcagaatttctttcctcaagcacacttcatgaggaaccctccaaaagaccacccacccgcctcccacctttcagggaaacttcacagacactagcacacaggggtgaggggcacacacagaactaccagaggagggtttttctctttcgtctgctgctttttttcttctaacagatttttaaaaaggtaaaaagaaggaacaaattgcgggagaaatcgtggttaaaagctcattgatcaagttttccaaacgtcagtgtgttagattcaaacacaaaaagaaaaatttctgattgtgttaagttttaaaaacaagctggttttcttccagtatgtttgtacataggccatggcctccaatcatctcccacctctcagttctcacccaaatacttcgcattgggttggttttgcttagacactcactcctaagtaccatgttatctggagctttcccactttgagatgaaaagaggtaaacaaaagaaaagactcaaaggtaaaagaacagattctgttctggggttagcagtaactctaaatccaataactcctgtgtgtatgtctatatagatagagatatagacacacacacatatatacatatacacacaaatatatgcatacacattctatttttttttttttttgagacagagtctcactctgtcacccaaggccggagtgtagtcgcacgatctcggctcactgcaacctccgcctcccggggttcacgccattctcctgcctcagcctcccgagtagctgggactacaggtgcccgccaccacgcccggctaatcttttttttttttttttttttttgtatttttagtagagacgggatttcaccatgccggccaggcttggtcttgaacgcccgacctcatgatcctgatccgcctgcctcggcctcccaaagtgctggggattacaaggcggtgagccactgcacccggccttttttttttttttttgagacagagtttcactcttgttgcccaggctggagtgcaatggcgtgatctcggctcactgcaacctccacctcctgggttcaagcgattctcctgcctcagcctcccgagtagctgggattacaggcgcccaccaccatgcctggctagtttttctatttttagtagagatggggtttcaccttgttggtcaggctggtctcaaactcctgacctcaggtgatccaccagcctcgcctttccaagagtgctaggattacatggcgtgagccacctgcgccctgccatataatctttttaaaaccaacaatctataatttcctcacatccccaaagcaaataattcagtgtttgtgggtacatgcacacacacatgcatggcacacacacgtacacactctagtcatacaaccattctcaagaacacatcagaaaaagtcttcaacaatggaagctagtactattaattttcttggggtcaaatacaagtcccatatccatggattag

SEQ ID NO: 149590 - DNA, 516 bp, Homo sapiens
aattagcattctctgttgttgcaaactttggttagtttccagagttccaaaaaggttgattctgacatttttaccagttttttcctcactttagtggcagaatggacctttggagttccctgctctgtcatttttttatgacatcccaatttgttacttttgtttttttactctattttatttttgttgtatatattttaagtgtataacttgatttttaaatgaggaaacagacttagctaataagcggttaagccagcatctgatacagatatgtctaacttcaaaacttgtatgtgcttaaactctacattacaccactatccctttaagctcatgtacttatttatttatttatttaaagagtgagtctcactctgtcacccaggctggagtgcagtcgcacaatctcagctcactgcctcccagattcaagtgattcccctgcctcagcctcccaaatggctgagattacaggaatgtgccaccacacccggctaatttctgtatttctag

SEQ ID NO: 149591 - DNA, 375 bp, Homo sapiens
  misc_feature (1)...(375): n = a,t,c or g
ggcacgagaacagaatgaaatatgagatatccataaatatgtggaaattgaataacatctttctaaataaactgtgggttaaagaaatcacaagtagacttcaaaaatattttgaatgtagtgaaaataaaaccacaacatatcaaaagttataggatgcaaaacaaaatgaaccagtgccagggatatttatgggtatttatggctttaagtgcctgaatttcaaaacgaaaaaggcttcttatcaattacctaagcttctaccttagtaaactggaaaaataagagccaactaaacccaaagcaagcagcaggaaagtagtaannnnnnnnnnnnnnnnnnnnnnnnnnnnnnnnnnnnnnnnnnnnnnnnnn

SEQ ID NO: 149592 - DNA, 391 bp, Homo sapiens
taaaaatttttaaacagaaaagttaatagtggtgtgaacacccatattccttttctttttttatttttaagttgggagcaatctatctatttatttatttattttgagcccgggttataaggcgggctaatttttgtatttttggtaaagatagagtttcgccatgttgcccaggggggtcccgaacttccgggactcaagcgatcccccagcctcagcctcccaaagtgttgggattacccctgagccactgcacctggccaacacccatattcctgattttaaaattgtgattgtgttttgtaattggtttatctaggcacaaacccaaacccaaatagattttgtttttgttttcctaaaaaaaaaaaaaaaaaaaaaaaaaaaaaaa

SEQ ID NO: 149593 - DNA, 454 bp, Homo sapiens; identical to SEQ ID NO: 145846
  misc_feature (1)...(454): n = a,t,c or g

SEQ ID NO: 149594 - DNA, 558 bp, Homo sapiens
tgaaggatcggtgatggatacttgcccctcctacaaggaagacacaacccctacctctaaagcacaagcacttgagaacacaaccccatagcaactgccctatgtaagccattgagggacatgtcttctgggccgacgcatggtctgcatgaatggtgctccccgaaggaggctacttcccgctctccttctctgcccttttcattgtaagtcatctttcctcaagagcattttcatgtactcttctcagcccctcccaccttctacctatggggagtttacagggtctggcactgactgtgttgctaaagaagccacagaggcagcccagtgtaacctgctggcagaaaaggtgagtgggccgggaccttggggtgttaccactcggacagagctgtttgtggaacagaacatccttggatagtttgtatcttggggctgcagacagagaataacagtgcaaatcccctctccctgtggatcacggcaagccttcttttagggtgtcacctcatccctttaagagctgtcatcaaatcatctcacccactggaagcg

SEQ ID NO: 149595 - DNA, 1603 bp, Homo sapiens
cctccaaccacctgcacgcctgcctgccagggcctctctggggcagccatgaagtccctcgtcctgctcctttgtcttgctcagctctggggctggcactcagccccacatggcccagggctgatttatagacaaccgaactgcgatgatccagaaactgaggaagcagctctggtggctatagactacatcaatcaaaaccttccttggggatacaaacacaccttgaaccagattgatgaagtaaaggtgtggcctcagcagccctccggagagctgtttgagattgaaatagacaccctggaaaccacctgccatgtgctggaccccacccctgtggcaagatgcagcgtgaggcagctgaaggagcatgctgtcgaaggagactgtgatttccagctgttgaaactagatggcaagttttccgtggtatacgcaaaatgtgatttccagtcaagactcagccgaggacgtgcgcaaggtgtgccaagactgccccctgctggccccgctgaactgacaccagggtggcgcacgccgagaaagctgccctggccgccttcaacgctcagaacaacggctccaaattttcagctggaggaaatttcccggcgctcagcttgtgcccctctccaccttctaacctatgtgggagtttacagtgtctggcaactgactgtgttgctaaaagaggccacagaggcagccaagtgtaaccctgctggcagaaaaagcaataatggcttttgtaaaggcaacactcaagtgagaaagcttgggtgggggcagaaggttgcagttgacctgcacggtgtttccaaacacagccctgtgaccttcacagccccaacccagaaggtgccaatgaagcagtccccacccccgtggtgggacccaagatgcacctccgtcccctccacttgggcgcacctgggactccctccaagctggctcacccccagaactcccatgtttttactgggcagctcctccagggacaccagtttgcaccggggcgcactacggacctgcgccaacacctttcatggggtgtgggtcttcattgggggtcacccttcagggagaaagtgttcgcaccccccgggaaaacacggcacagttggttcaagcctagtgttttggtgctgctgctgcttggggccagtggttccttccattgttccgggggaggatcagacacttcaaggtcttaggctagacatggcagagatgaggaggtttggcacagaaaacatagccaccattttgttcaagcctggggcatgggtggggggccttgtctgctgggccacgcaagtgtcacatgcggttttacatttatatcaagtcttgactccctacttcccgtcattcctcacaggacagaagcagagtgggtggtggttatgtttgacagaaggcattaggttgacaacttgtcatgattttgacggtaagccaccatgattgtgttctctgcctctggttgaccttacaaaaaccattggaactgtgactttgaaaggtgctcttgctaagcttatatgtgcctgttaatgaaagtgcctgaaagaccttccttaataaagaaggttctaagctg

SEQ ID NO: 149596 - DNA, 443 bp, Homo sapiens
aagaagtttgtcattcctgattttgaggagttcacgggccatgtgggtcgcatctttgaggatgtcaaagagctcactggaggcaaagtggcagcctacatccctcagctggccaagtcaaacccagacctgtggggtgtctccctgtgcactgtggatggtcaacggcactctgtgggccacacaaagatccccttctgcctgcagtcctgtgtgaagcccctcacctatgccatctccataagcaccctaggcactacgtgcacaagtttgtgggcaaagagccaagtggcctgcgctacaacaagctctccctcaatgaggaaggaatcccccataaccccatggtcaatgctggtgccattgttgtcagctccctgatcaagatggactgtaacaaagcagagaagtttgattttgtgttgcagcatctcaacaaaaag

SEQ ID NO: 149597 - DNA, 217 bp, Homo sapiens
gagcgaccaagcggaagaagaaaatgaaggacaaagacaaagctgaaactcctggaagcaatgggaacgagcaaaacgaacgaggaggataagcggcgcgggctggacaagcgtaccccggaccaggcggccttcgagaaaatgcaggagaagcgggacttcagcagacacctggacacactcacggagcattacgacattcccaaagttcaccacc

SEQ ID NO: 149598 - DNA, 772 bp, Homo sapiens
  misc_feature (1)...(772): n = a,t,c or g
cggccgcgtcgacggagagtggcatggtggcctactatcaggtccaaaagggacccctgaagctgaaaggcgtcgcaaagctgggagtgaccaagcggtgaggcccgagggcccgcgggattccgtcttcatcccccttaaaccttttctcgggacccctgggcctgatcctccgacccgccgccttctcatgtttttttccaggaagaagaaaaagaaggacaaagacaaagcgaaacatcctggaagcaatgggaacggagcaaaaagaacggaggaggagaagcggcgcggccttggacaagcggaccccggcccaggcggccttcgagaaaatgcaggagaagcggcacatggaaaggatcctaatgaaggctatccaaaacccacaagcagagagtggaggacttcaacagacacctgggcacacttcacggagcattaccgacattcccaaagtcaacttggacgaagtagcccgnctgcccccagtatggagcagcatcgaagggttcgcaaaaaggggcacactgggggttgagtgtggtttcctttgggtatattctggaaaacatggcttacaccacacccttgcatcttcttgctacagactgcttttccgaagctgtgttaccctcattctggaacttgattaaagtaagatcgtccttgtactcagtttaggcttcttggcaacatacagaagatacacccttttcgtttggatggaaagtttctaagtttatccagaggtaaagcccattgtgtgtct

SEQ ID NO: 149599 - DNA, 5448 bp, Homo sapiens
ctccctgaccccttgcgcttcccgagtgaggcaatgcctcgccctgcttcggctcgcggacggtgcgcgcacccactgacctgcgcccactgtctggcactccctagtgagatgaacccggtacctcagatggaaatgcagaaatcacccgtcttctgcgtcgctcacgctgggagctgtagatcgcagctgttcctattcggccatcttggctcctccattctgcttttaagatacaagtgatgccttcaaatttgagctcagtttcttatggtcgtttaggagcatgagggtttctgcaataatctaccagtgaaatgatgatcaagatcttggaaagcactctactggtcaagcagaatagttcctgtcatctccattaagaatcagcttattggccgggcgcagtggctcatgcctgtaatcccagcactttgggaggctgaggcgggtggatcacgaggtcaggagatcgagaccatcctgtctaacaaggaatcctttctggcactcaagagttttcaattcaatcctgatgaatgaatcattatttgataccagcctaagtgaagactctgcctggtgacttttgcaaggtggtttctggctgcaacatgggaagatttgggatcagtgagatggaagagatttttctggctactagcgttcctaagaaagagctttagtgtttatccagctattggtatgcagacaactatacccttatgagaaacactagcagagaagaagagttcttgactgggtctgggccatgaaactgaccggataaaagtgggagaagaagagatgttgaaggaggagtttgctgttttctcagtctcctgagaaattccagatatcttctttctacacacatcctggagaggggaaagaaagcctctctctgtcacccaggctggaatgcactggtgccatctccactcactgcagcttcagcctcctgggttcaagtgatcctcctgcctctcagccttccgagtggctgggactacagtttgctgcatctggaggagctcactggagaatctccaacatcggagcgggccttcaactaccatcccaccacctgcctgaggagaaaaattcttcaagactcagagcacacagccagcaccagaggccccatgaccctggacagaccaggggagggggccaccatgctgaagacattcactgttttgctcttttgcattcggatgagtctgggtatgacatcgatagtgatggaccctcaaccggagttgtggatagagtccaactacccccaggccccttgggagaacatcacgctttggtgccgaagcccctctcggatatcaagcaagttcctgctgctgaaggataagacacagatgacctggatccgcccttcccacaagaccttccaagtttcattccttataggtgcccttactgagtccaatgcaggtctttaccggtgctgctactggaaggagacaggctggtcaaagcccagtaaagttctagagttggaggcaccaggccaactgcccaagcccatcttctggattcaggctgagacccccgctcttcctgggtgtaatgttaacatcctctgccatggctggctgcaggatttggtattcatgctgtttaaagagggatatgcagagcctgtggattaccaagtcccaactgggacaatggccatattctccattgacaacctgacacctgaggatgaaggggtttacatctgccgcactcatattccagattctcccccaccctgtggtcagagcccagcaaccccctgaagctggttgtagcaggactctaccccaaaccaactttgacagcccatcctgggcccatcatggcacctggagaaagcctgaatctcaggtgccaagggccaatctatggaatgacctttgctctaatgagggttgaagacttggagaagtccttttaccacaagaagacaataaaaaatgaggcaaatttcttcttccagtctttgaagatccaagatactggacattacctctgtttttactatgacgcatcatatagaggttcactccttagtgatgtcctgaaaatctgggtaactgacactttccccaagacctggctacttgctcggcccagtgctgtggtccaaatgggtcagaatgtgagcctacggtgtcgaggaccagtggatggagtgggtcttgcactctataagaaaggagaagacaaaccacttcaatttttggatgccaccagcatcgatgacaacacatcattcttcctcaacaatgtaacctacagtgatactggcatctatagctgccactatcttctcacctggaagacctccattaggatgccatcacacaacactgtggagcttatggttgtagataagccccccaaaccctccctgtcagcttggccaagcactgtgttcaagctaggaaaggccatcacccttcagtgccgagtatctcatccagtactggaattttctctggaatgggaagaaagagaaacattccaaagattctcagtaaacggagacttcatcatcagtaatgttgacgggaaaggcacagggacctacagttgcagctatcgcgtagagacacatcctaacatgtggtcacatcgcagtgagcccctgaagctgatggggccagcaggctatctcacctggaattacgttctgaatgaagctatcaggttgtctctaatcatgcagcttgttgccttgctgttggtagtgctgtggataaggtggaagtgtcggagactcagaatcagagaagcctggttgctgggaacagctcaaggggtcaccatgctcttcatagtcacggcccttctctgctgtggactgtgcaatggggtattgatagaagagactgaaatagtcatgccaacccctaagcctgagctgtgggcagagaccaactttcctctggccccgtggaagaacttaaccctctggtgcagaagcccttctggctcaactaaggagtttgtgttgctgaaggatgggaccgggtggatcgccactcgcccggcctcagagcaggtccgggctgccttcccccttggcgccctgacccagagccacaccgggagctaccactgccattcatgggaggagatggctgtatcggagcccagtgaggcacttgagctggtggggacagacatcctccccaaacctgtcatttctgcttcccccacaatccggggccaggaactacaactccggtgcaaaggatggctggcaggcatggggtttgctctgtataaggagggagagcaagaacctgtccagcaacttggtgctgttggaagagaagccttctttacaatccagagaatggaggataaagacgaaggcaattacagctgccgcactcacactgaaaaactccccttcaagtggtctgagcccagtgagccgctggagcttgtcataaaagaaatgtaccctaagcccttcttcaagacatgggccagccctgtggtcacccctggtgcccgagtgactttcaattgctccaccccccaccagcatatgagctttattctttacaaagatggaagtgaaatagcatccagtgacaggtcctgggcaagtccgggggccagtgcagctcactttctaatcatttcggtgggcattggtgatggagggaattacagctgccgatattatgacttttctatctggtctgagcccagcgaccctgtggagctcgtggtgacagaattctaccccaaacccactctcctggcacagccaggtcctgtggtgtttcctgggaagagtgtgatcctgcgctgccaagggactttccagggcatgaggttcgccctcttgcaggagggagcccatgttcccttacagtttcggagtgtctcagggaactcagctgacttccttctccacactgttggagcagaggactctgggaactatagctgtatctactatgagacaaccatgtcaaacagggggtcatatctcagtatgccccttatgatctgggtgactgacacattccctaagccatggttgtttgctgagcccagttctgtggttcccatggggcagaatgttactctctggtgccgagggccggtccatggagtaggatacattctgcacaaagaaggagaagccacttcaatgcagctctggggatccaccagtaatgacggggcattccccatcaccaatatatctggtactagcatggggcgttacagctgctgctaccaccctgactggaccagttctatcaagatacaacctagcaacaccctggaactcctagtcacaggcttactccccaaacccagcctattagcccagcctggtcccatggtggcccctggcgaaaatatgactcttcagtgtcaaggggaactgccagactcaacatttgtgctgttgaaggagggggctcaggagcctttagagcaacagaggccaagtgggtacagggctgacttctggatgccagcagtgagaggtgaagactctgggatctatagctgtgtttattatttggactctactccctttgcagcttcaaatcacagtgactccctggagatctgggtgactgataagccccctaaaccctctctgtcagcctggcccagcaccatgttcaagttagggaaggacatcacccttcagtgccgaggacccctgccaggtgttgaatttgttctagaacatgatggagaagaagcacctcagcagttttcagaggatggagactttgtcatcaacaacgtagaaggaaaaggcattggaaactacagctgcagctaccgcctccaggcctaccctgatatctggtcagagcctagtgatcccctggagctggtgggggcagcagggcctgttgctcaggagtgcactgtagggaacattgtccgaagtagcctaatcgtggtggttgttgtagccttgggggtagtgctagccatagagtggaagaagtggcctcgactgcgaaccagaggctcagagacagacggaagagaccagaccattgcccttgaagagtgtaaccaagaaggagaaccaggcacccctgccaattctccttcatcaacctctcagagaatctctgtggaactgcccgttccaatataataatctcctcctttacaagagctttcctctcctctctcttgctctcagagacctataaatccaaccagttaccctgcaagtcagccccatctgctgttccttggtctctaatcacctgagctgggtaaaggggattctgggagttgagagctctgccagggtgagatgtttcctgaagagaggttccccacccctgtaactcctcactgtactgatttactggcgcatgaaattctattaaaaatgcattcttctgaataaaaagagtattcactatttaacttcaattt

SEQ ID NO: 149600 - DNA, 1108 bp, Homo sapiens
  misc_feature (1)...(1108): n = a,t,c or g
ggcacttttcaactgcccaagcccatcttctggattgaggctgagacccccgctcttcctgggtgtaatgttaacatcctctgcccatggctggctgcaggatttggtattcatgctgtttaaagagggatatgccaagcctgtggattaccaagtcccaactggggacaatggccatattctccattgacaacctgacacctgagggatgaaggggtttacatctgccgcactcatatccagatgctccccaccctgtggttcagagcccagcaaccccctggaagctggttgtagcaggtgggtgtgggctatggctgctggcatctggcaattgttgtcccaggtatcatggctggctgagctagggtttctgattttactttcctcagccagtttctaggccctgcaaggccccatgagctacagtcgtttgaagttttactgagatataaattagaatggcatgtgctgcaaggcagatgtatgggagccaatcatttggccnagtaaaggagccccagccaactggccagcagcttcagctcatcacagctttgttgttctcaacttgttgaatatcatgcattcattcattaattcaaccagtatttattgagcacctaatatgtgccaggcactgccactgcaatcttataaatggagttttaaatttgcaaatgtattttatttgtaattgttatttttatgtgtggaaaacatgaatggattgctacgtgttggtgagtaaaaacaaaaaaaaacaaatgacaaatgaatgtgatagctcatattttagaaatggctttataaatcaccttggttccctatcagtagagctagtaaggcagcaccaatctctaaatatagaagaaatttccccaaaatgtaaaatgccagacatgtcccagcccgaactcccccaccccatggcctggaggtttctagatggaattggccacatttgctttagtctctctatccagctaaataggcttggggaaagctgtggtgctacagaaagtaccctagacttagaagcagtaatactggtttctagttctattctgacactgctccttgtgtggtcttaaccaagcactttatt

SEQ ID NO: 149601 - DNA, 429 bp, Homo sapiens
tgtattagggttcatatataactgaacgtcgagcagtgtctcaacggacaacgatatacacgacagaatagaagtgagtctaacaaactgaaagatccatacacatgtatagcgtcccttataagagacattctactcttctcataataatttataactacgtgatgcacaataatcggtgaatatccataaaatcaatgaaactaattagtgattataaatactgtatatacatatatcgataccacagagatgtcatacgcttaggtataatagacatctatagtgtacttcatccaacatcagcacaatacacattcttctcaagcctacatggaacactcaccacaagagacaacattttgggccataaaacaccttaacaaattcaaaagaatagaaatcagacagtatctgttctcagaccag

SEQ ID NO: 149602 - DNA, 373 bp, Homo sapiens
gacctctgggtgcctgcaggggagctgctgcagccgggccgccgggagcggtggggagagcatcgcggagccgcccctccacgcgcccgcccagccgcgctcgcccactgggctctcccggctgcagtgccagggcgcaggacgcggccgatctcccgctcccgccacctccgccaccatgctgctcccccagctctgctggctgccgctgctcgctgggctgcttccgccggtgcccgctcagaagttctcggcgctcacgtttttgagagtggatcaagattaggacaaggattgtagcttgaactgtgcgggtttgcccaaaaacctttttggccatttgaccgaaagacctttcctttcccgtgggaat

SEQ ID NO: 149603 - DNA, 428 bp, Homo sapiens
aatccatgtctttctgaacgacaggggtgctgtgagaagctgccattagagagatccagcacgccccaggactcagctggccacccggtgacactgctcactgctcattgccctcacctgtggacctctgtccccttctgctggccactcacagaatttcctgctggcactgtcaagatgaagtccaaggaggaacagactgctgccgatacgggagacctggaggccctgagcctcctcgccggccatggcgacaccgacgggcacatcatcctggacgtgcccgatggggcaccgtacccccagcgtaccaaggccggcattgaccacctgcaccagaagatcctgaagatcatcgagcagatcacgattgagcatgaggctcgcgatgacaatgcgccagactatccgaaactggccaacaaccg

SEQ ID NO: 149604 - DNA, 412 bp, Homo sapiens
ggcagagtgaaaagcacacacctgagaaatgaaaagaaatggcaaaggtcacacgtctcaggatgaattgcactgtgtgtgacaccctagctgaaatcctatcccacaggaccatcaggtgagcaattaaagaaagtggctgaaattgcttccatgttcttttttctcttctaaaaatatctatgctgagactttttccccgtgtgtgtgtatacgtgtgtgtatacacgtgtgtgtatacacgtgtgtgtatacatgtgtgtgtatacatgtgtgcagctgcccatgcttgggcaggcctctgcgctaaagtcggtgagtttatgtcaactgcactgcattctggtactgactcctatgcttacattgcgcttcgataaaaagtttttcacccaggattctcattttatct

SEQ ID NO: 149605 - DNA, 353 bp, Homo sapiens
  misc_feature (1)...(353): n = a,t,c or g
aaaatttacatggaaacataagggacccaggatagctagaaataatcttgaaaaggaaaatcaaagttgaaggattcacacttcccaatttcaaaacttactacaaagctgcagtaactgagacagtgtggtactggcataaggatagtggcttagaccatttcgtgttgctataaagaactacctgagnnnnnnnnnnnnnnnnnnnnnnnnnnnnnnnnnnnnnnnnnnnnnnnnnnnnnnnnnnnnnnnnnnnnnnnnnnnnnnnnnnnnnnnnnnnnnnnnnnnnnnnnnnnnnnnnnnnnnnnnnnnnnnnnnnnnnnnnnnnnnnnnnnnnnnnnnnnnnnnnnnnn

SEQ ID NO: 149606 - DNA, 353 bp, Homo sapiens
  misc_feature (1)...(353): n = a,t,c or g
aaaatttacatggaatcataagggacccaggatagctagaaataatctcgaaaaggaaaacgaaagtcgaaggattcacacttcccaatttcaaatcttactacaaagctgcagtaactgagacagtgtggtactggcataaggatagtggcttagaccatttcgtgttgctataaagaactacctgagnnnnnnnnnnnnnnnnnnnnnnnnnnnnnnnnnnnnnnnnnnnnnnnnnnnnnnnnnnnnnnnnnnnnnnnnnnnnnnnnnnnnnnnnnnnnnnnnnnnnnnnnnnnnnnnnnnnnnnnnnnnnnnnnnnnnnnnnnnnnnnnnnnnnnnnnnnnnnnnnnnnn

SEQ ID NO: 149607 - DNA, 912 bp, Homo sapiens; identical to SEQ ID NO: 129841

SEQ ID NO: 149608 - DNA, 1017 bp, Homo sapiens
atgcaagtggctgacctacaacaaaaggtgtatgctcagcctcaccacctgtctactgataaagtaagggcaatgattggaaaagaatgggaccctgcatcttggaatggggaaatgtgggaggaccctgatgaagctggggacgctaagcttgtaaactctgataagcctttcttgccagaggaaacagcctccctgcccccagtggtggcaacattccctcctccactcacactgccatcagtcttgccacctttgactgaggtgattaaccatacactgcctgaggcaacagtgatggcctctcttgaggcagttgccaggcaagataatgctgattctcctcaggaactacccccaacacccctgtttgcttctagacctgtaaccaaagtcctggcaggcctcaagagatcttacagtggaaccacagtcactcaattagaaaatttaaaagcaatgggaataattggatcccgaggtggcagggaccaagtggcagcactcaactgtcaaaggcaagacctccaacctttcaccagagtaactgtgcaatggggaaagaggaatgttcagactttttggggattattgtacactggatctgagttgatgttcattccaggggaccaaaatgtcactgtggtcctccagttaaaccgggggcttacagaggggtatatcatctccccggctttgtgccagaatcttgtttgcagagatcttgatcacttttcccttctacaagatatcacatgggtccgttacattgattacactatgctgattggatctaatccaatggtgcttgaggtgtcagtggcagatagggatgctatttggagcctttggcaggcccccatagatgaattacagcaaaggtctctaggattttggagcagggccctgccatcttctgcagataaccatcctcctttcgacatgcacctcttggcttgttatcgggctttgatagaaactgaatgtttgactatgggtcatcaagtcaccatgtga

SEQ ID NO: 149609 - DNA, 1219 bp, Homo sapiens; identical to SEQ ID NO: 117723

SEQ ID NO: 149610 - DNA, 561 bp, Homo sapiens; identical to SEQ ID NO: 121815

SEQ ID NO: 149611 - DNA, 2208 bp, Homo sapiens
atgggagctgtctttgaagccttgtggcagtacagcccagagttacccaaagcatctgtgatggtccaggaggcttccaaggcgatcgggcagtgtcagtcttcagctgctaagctgagaagatccgggaaggagtcagtcacagagccctgggccagagttctaggggctctggaaatggctgccagactatataaggtaacttctggacattgccatggcattcatacaccgtcatggcgctgtctttgcttttccacaggaggaaaagaaaggcatgcacatgaccttcctcatgtaacagcacagtctcaaggtcatcagggccaagggaaaatttcccggactgctctcaaagagcctacagtccacaaagtaacagcttccctatccccagtagtggcaacatcccctccccaacccatgctgccatcagactttccacctttgtctgaggagataaaccctatgctgcctgaggcaacagtgatagcctcccctaaggaaattgccaggcaagataatgttgattcccctcaggagccacccccaacaccccagttttcttctagacctataactagactaaagtcccagtgggcccccagagggccagagtgcgtaattggcatagacatacttagcagctggcagaacccccacattggctccctgactggtagggtgagggctattatggtgggaaaggccaaatggaagccattagagctgcctctacctagaaaaatagtaaatcaaaaacaatatcacatccttggagggactgtggaaattagtgccaccattaaggacttgaaagacacagaggcggtgactcccaccacatccccattcaactctcccatttggcctgtgcagaagacagatggatcttggagaatgacagtggattattgtaaacttaaccaagtggtgactccaattgcagctgctgtaccagatgtggttcattgcttgagcaaatcaacacatctcctggtacctggtttgagtggagtccaaaagaaggctctgcagcaggttcaggctgctgtgcaagctgctctgccatttgggccatatgacccagcagatccaatggtgcttgaggtgtcagtggcagatagggatgctatttggagcctttggaacgccgccattggtgaatcacagcggaggcctctaggattttggagcaaggctctcctgtcttctgcagataactactctccttttgagaggcagctcttggcctcttactgggctttggtggaaactgaacgtttgacggtgggtcatcaagtcaccctgcgacctgaactgcctatcatgaattgggtgctttctgacccatctagccataaagttagtggtgcacagcagcgttccatcatcaaattgaagtggtatatacatgattgggttcgagcaggtcctgaaggcacaaccacctctgtcatcacccaatgggcccatgaacaaagtggccacggtggtagggatggaggtcatgcatgggctcagcaacatggacttccactcacgaaggctgacctggctacggccactgccaggattcacaggtccaggaatcaaggggtgaaagtggaagtggcaccactcaccatcacccctagtgatccactagcaaagtttttgcttcttatttccgcgacatctactagtctagaggtcacagttccagagggagaaatgctgccaccaagagacacaacaaagattgccacctttgggactcagactggcttccttgctcttcagcttgcagatggcctattgtgggaccttgtgatcataccaggaaaggggaaacccagcagagacctagtggagagtcccagcccctattccacctacgagggtattgatgggtggcccgatgagcctgcaccaacagcaacaaagcccccagtcatgccagccccagctctaccaccagacacccgcagtggcagcaaagccccaactgtcccaaccccttacccacaaatggagcaccaccaagtccaattagccagcaacaacagcaacaccgaagctctgggccatcttagtccccagtccagctgggtgcagactcctgggcagaatagtggcccagcaataccgaaccatctagggaaggacatgatttcacctccacaaatggcaccagcaggggttaagtgggagtcccagaagtactag

SEQ ID NO: 149612 - DNA, 531 bp, Homo sapiens; identical to SEQ ID NO: 128282

SEQ ID NO: 149613 - DNA, 942 bp, Homo sapiens; identical to SEQ ID NO: 121675
  misc_feature (1)...(942): n = a,t,c or g

SEQ ID NO: 149614 - DNA, 2595 bp, Homo sapiens; identical to SEQ ID NO: 121679

SEQ ID NO: 149615 - DNA, 945 bp, Homo sapiens; identical to SEQ ID NO: 117726

SEQ ID NO: 149616 - DNA, 1899 bp, Homo sapiens; identical to SEQ ID NO: 128300

SEQ ID NO: 149617 - DNA, 301 bp, Homo sapiens; identical to SEQ ID NO: 122904

SEQ ID NO: 149618 - DNA, 562 bp, Homo sapiens
aagacagacggatcttggagaatgtcagtggattactgtaggcttaaccaagtggtgactccaattgtagctgctgtaccagatgtggtttcactgcttgagcaaattaacacatctcctggtacctggtatgcagccactgacttggcaaatgcctttttctccattcttgtccataaggcccaccagaagcaatttgccttcagctggcaaggccagcaatatgcctttactgtcctacctcaggggtatatcaactctccagctttgtgtcataatcttatttggagagaccctgattgctttttgcttccacaagatatcacgctggtcccttacattgatgacattatgctgattggatccagtgagcaagaagtagcaaacagactggacttattggtatcaatggcctcatcgagagttccctatgatcagttgacagaggaagagaaggctaggttcacagatggttctgcacgatatgcaggcaccacccgaaagtggacagctgcagcactgcagcccctttctaggatatccctgaaggacagcggtgaag

SEQ ID NO: 149619 - DNA, 594 bp, Homo sapiens; identical to SEQ ID NO: 119164

SEQ ID NO: 149620 - DNA, 586 bp, Homo sapiens
ctgggaagtccggcaatataccttcactgtcgtacctcaggggcatatcaactctctggttttgtgccatgatgttgttcgcagagatcttggtcactttttccttccacaagatatcaccctggtccattacattgatgacattatgctgattggatctacccctcctataaccaagaagaaggcacaacacctagtgggcctatttggattttggaggcaacttgttcctcatttgggtgtgttactctggcccatttatcaagtgacccaacaggctgccagttttgagtggggtccagaaaaggagaaggctctgcaacaggtccaggctgctgtgcaagctgctttgccacttgggccatatgacccagcagatccaatggtgcttgaggtgtcagtggcagatagggatgctgtttggagcctttggcaggaccccataggtgaatcacagtggaggtctttaggattttggagcaaggccctgccatcttctgcagataactactctccttttgagagacagctcttggcctgttactggggtttggtagaaactaaatgtttgactatgggtcatcaa

SEQ ID NO: 149621 - DNA, 514 bp, Homo sapiens
cccctcctataaccaagaagaaggcacaacacctagtgggcctatttggattttggaggcaacttgttcctcatttgggtgtgttactctggcccatttatcaagtgacccaacaggctgccagttttgagtggggtccagaaaaggagaaggctctgcaacaggtccaggctgctgtgcaagctgctttgccacttgggccatatgacccagcagatccaatggtgcttgaggtgtcagtggcagatagggatgctgtttggagcctttggcaggaccccataggtgaatcacagtggaggtctttaggattttggagcaaggccctgccatcttctgcagataactactctccttttgagagacagctcttggcctgttactggggtttggtagaaactaaatgtttgactatgggtcatcaacctgcactgatggcctcgtggggagttccttatgataagttgacagaggaagagaagacaagggcctggtttacagatggctctgcatg

SEQ ID NO: 149622 - DNA, 994 bp, Homo sapiens
atggtgagaaaagccaaatggaagccattacagctgcctctacctagaaaaatagtaaatcaaaaacagcatcgcatccctggagggactgtggagattagtgccatcaccaaggacttgaaagacgcaggggtggtgattcccaccacatccccgttcaactctcccatttggtctgtgcagaagacagatggatgttggagaatgacagtggattattgtaagcttacccaagtgatgactccaattgcagctgttgtaccagatgtggtttcattgcttaagcaaattaacacatatcctggtacctgtaaaatttctaggagtccagtggtgtggggcctgtcgagatattcctctaaggtgaaggataagttgctgcatttggcccctcctacaaccaagaaagaggcccaacacctagtgggcctatttggattttggagggaacacattcctcatttgggtgtgttactccagcccatgtatcaagtgacccgaaaggctgccagttttgagtggggtctggaacaggagaaggctctgcaacaggtccaggctgctgtgcaagctgctctgccatttgggccatatgactcggcagatccaacggtgcttgagatgtcagtggcagatagggttgctgtttggagcctttggcaggcccccataggtgaatcacaatggaggcctctaggactttggagcaaggcccttccattttctgcagataactactctccttttgagagacggctcttggcctgttactgggctttgatggaaactgaaggtttgactatgggtcatcaagtcaccatgcaacctgaactgcctatcatgaactgggtgctttctgacccatctagacataaagtgggtcatgcacaacagcattccatcatcaaattgaagtggtatatatgtgatcaggctcgagcagttcctgaaggcacttgtttaactaaacaaggaagtggctcaaatgcccatg

SEQ ID NO: 149623 - DNA, 643 bp, Homo sapiens; identical to SEQ ID NO: 131713

SEQ ID NO: 149624 - DNA, 1074 bp, Homo sapiens
aagtaacagcttccctatccccagtagtggcaacatcccctccccaacccatgctgccatcagactttccacctttgtctgaggagataaaccctatgctgcctgaggcaacagtgatagcctcccctaaggaaattgccaggcaagataatgttgattcccctcaggagccacccccaacaccccagttttcttctagacctataactagactaaagtcccagtgggcccccagagggccagagtgcgtaattggcatagacatacttagcagctggcagaacccccacattggctccctgactggtagggtgagggctattatggtgggaaaggccaaatggaagccattagagctgcctctacctagaaaaatagtaaatcaaaaacaatatcacatccttggagggactgtggaaattagtgccaccattaaggacttgaaagacacagaggcggtgactcccaccacatccccattcaactctcccatttggcctgtgcagaagacagatggatcttggagaatgacagtggattattgtaaacttaaccaagtggtgactccaattgcagctgctgtaccagatgtggttcattgcttgagcaaatcaacacatctcctggtacctggtttgagtggagtccaaaagaaggctctgcagcaggttcaggctgctgtgcaagctgctctgccatttgggccatatgacccagcagatccaatggtgcttgaggtgtcagtggcagatagggatgctatttggagcctttggaacgccgccattggtgaatcacagcggaggcctctaggattttggagcaaggctctcctgtcttctgcagataactactctccttttgagaggcagctcttggcctcttactgggctttggtggaaactgaacgtttgacggtgggtcatcaagtcaccctgcgacctgaactgcctatcatgaattgggtgctttctgacccatctagccataaagttagtggtgcacagcagcgttccatcatcaaattgaagtggtatatacatgattgggttcgagcaggtcctgaaggcacaa

SEQ ID NO: 149625 - DNA, 1485 bp, Homo sapiens
atggctcctaacagcagagtccaggagctggttttagggcaggttgcagtgatttgccaaggactcttgagccttcagccacggactgaaggctacactgtcggcttccttacttttgaggttttggacttgactggctcctcggcttgcagatggcctattgtgggacttcactctgtgatcattttgctggacaaggtgacaaaagaaaaggatgagctcagggattctaactcctggcttcagaagcagatactgagcctcaagttttctaagaccgctctgagtgagagtcttatctcctgtagacaaagggctgaaattgtggaaaatcagacacaaggtcttatcatgagacctctggcctttcaccggggtaactgcattggagaaaggggaatgaccatacttttcaggggctactggactgagccgacgttgattccagaggacccaaaacatcactgtagtcctccagttaaagtaagggcttatgaagatggatcttggaaaatgacagtggattatcataagcttaaccaagtgatgattccagttacagctgctgtaccagatgtggtttcattgcttgaaaaaattaacacatctcctgctttgtttcataatcttgttcagagaaatcttgattgcttttcccttccacaagatatcacactggtccattacgttgatgacattatgctgattggatccagtgagcaagaagtagcaaacacactggacttattggtgagacgtttgtgtgccaaaggatgggaaataaatttgactaaaattcagggaccttctagtttagtaaaatttctaggggtccagtggtgtggggcctctcaagatattccttctaaggtgaagaataagttgctgcatttggcccttcctacaaccaagaaagaggcacaatgcctagtgggcctatttggattttggaagcaactcattcctcatttggccacccctattattccccaacgggctcatgaacaaagtggccatggtggcaggaatggaggttacacatgggctcagcaacatggacttccactcaccaaagctgacctggctacggccactgctgagtgcccaatttgccagcagcagagagagaatggtgctctcgatatggcacaattcccctggggtgaccagccagctacttggtggcaggttgattatgttggacctcttccatcatggaaagggcagcaatttgtcctcaccagaatagacacttactctgcatatgggtttgcctatcctacatgcaatgcttctgccaagactaccatccatagcctcacagcatgccttattcaccgtcacggtattcctcacagcattgcctctgaccagggctctcactttacagctaaagaagtgcagcagtgggctcatgctcatggaattcactggtcttaccatgttccctattatcctgaagcaactggattgatagaatggtga

SEQ ID NO: 149626 - DNA, 1497 bp, Homo sapiens
atggctccagggcacatcagaggtcttcctggcagcccctcccgtcacaagcccagaggcctaggaaaagaacatggttttgtgggccagacccagggctcctctgctctgtgcagtctagagactgggtgccctgtgtcccagcaactccagccatggctgaaaagggacaaggtacagcttgatccgtggcttcagaaggtgcaagcccaaagccttggcagcttccaagtggcgttgagcctacagaagacagatggatcttggggaatgacagtggattatcataagcttaaccaagtggtgactccaattgcagctgctgtaccagaagtgattttattgcttgagcaaattaacacatctcctggtacctggtatgcagccattgacttggcaaatgcctttttctccatttctctccataaggcacaccagaagcaatttgtcttcagctggcaaggccagcaatatacctttactgtcctacctcagggctatctcaactctccagctttttgtcacaatcttattcagaaataccttgatcatttttcgcctccacaagatatcacactggtccattacattgatgacattatgctgattggatccagtgagcagtcttgcaaacacaccggacttattgccataaagtgggtcatggcacagcagcagcattgtatcatcagatggaagtgctgtatatgtgatcgggctcaggcaggtcctgaaggcacaagtaagttacgtgaggaagtggctcaaatgcccatggtctccactcctgtcaccctgtcttctcaaccccagcctgcactaatgatagcctcatggagagttccctatgattggttgatagaggaagagaagactagggcctggtttacagattgttctgcacgatatgcaggcagcaccagaaagtggacagctgcagcactacagtccctttctaggacatccctgaaggacagcagtgaaggcaaatcttcccaatgggcagaacttcgagaagtgcaccgtgttgtgcactttgcatggaagaagaaatggccagatgtgcgattatatactgattcatgggccgtagccaatgatttggctggatggtcagggacctggaagaagcttgattggaaaactggtgacaaagaaatttggcgaagaggtatgtggattgacctctctgagtggtcaaaaactatgaagatatttgtatcacgtgtgagtgctcagcaatgggtgaccttagcagaggaggagtttaataatcaagtgtatagaatgacctgttctgtggacaccactcagcctctttcaccagccacccttgtcatcacccaatgggtccatgaacaaagtgaccatgttggcagggatggaggttactcatgggctcagcaacatggacttccactcaccaaggctgacctggctacagctactgctgagtgcccaatttgccagcagcagagaccaacacagagcctttga

SEQ ID NO: 149627 - DNA, 393 bp, Homo sapiens
  misc_feature (1)...(393): n = a,t,c or g
ccacacgaggcagctgtactatggacacttggctgtccactcagtttcaccacatcctcaatcacagactgcttcaccgtctcttgctgtcttgccaacngcaactgctgtctcttgtctctcaccaattgctgcctctctgtctctgctgtcttgcctctctgccaattgccaccatctccgctgtccttgtccctttgctggttgccagatgatgcaggacaggcaagccccaagactggggcttagcctgggagagttcttggatttgcccaaagattcaagggtgagctggtggtgttaggcagcagctttcatggaagcagctgtgcacagcagcgccagagatgccgctccttgcagatcagggctgctccataggctgctcgtgcc

SEQ ID NO: 149628 - DNA, 1912 bp, Homo sapiens
atgacagtggactattgtaagcttaaccaagtggtgattccaattgcagctgctgtatcagatgtggtttcattgcttgagcaaattaacacatctcctggtacctggtatgcagccattgacttggcaaatgcctttttctccattcctgtccataaggcccagcagaagcaatttgccttcagctggcaaggccagcaatatacctttactgtcctacctcagtggtatatcaactctccagctttgtgtcataatcttattcggagagaccttgattgcttttcgcttccactagatatcacactggtccattacattgatgacattatgctgattggatccaagacagctcttggcctgttactggctttggtggaaactgaacatttgactataagtcatcaagtcaccatgcgacctgaactgcctatcatgaactgggtgctttttgacccatctagccataaagtgggttgtgcacagcagcattccatcatcaaatggaagtggtatgtacatgattgggctcgagcaggtcctgaaggcacaaccacccctgtcatttcccaatggccccatgaacaatgtggccatggtggcagggatggaggttatgcatgggctcagcaatgtagacttccactcactaaggctgacctgaatacagccaccgctaagcgcccaatttgccaacagcagagaccaacactgagccctcaatatggcaccattcctcagggtgatcaaccagctacctggtggtgggttgattatatgggatctcttccatcatggaaagggcagaggtttgtcctcactggaatagatacttactctggatatgggtttgcctatcctgcatgcaatgcttctgccaagactgccatttgtggactcacggaatgccttatccaccatcatgatatcccacacagcattgcctctgaccaaggcactcactttatggctaaagaagtgcggcagtgggctcatgatcatggaattcactggtcttaccatgtttcccatcatcctgaagcagctggattgatagaatggtggaatggccttttgaagtcacaattacagtgtcaactaggtgacaatacttggcagggctggggcaaagttctccagaaggtcgtgtatgctctgaatcagcatccaatatatggtactgtttctcccatagccaagattcacaggtccaggaatcaagggctagaagtggcaccactcaccatcacccctagggatccactagcaaaatttttgcttccttttcctgcaacattacagtctgctggcctagaggtcttagttccagaggaaggaacgctgccaccaggagacacaatgattccattaaactggaagttaagattgccacccagacactttgggctcctcctacctttaaatcaacaggctaagaagggagttacagtgttggctggggtgactgacctggactataaagatgaaatcactctcctactccataatggaggtaaggaagagtatgcatggaatacaggagatccattagggcttctcttaatattaccatgccctatgattaaggtcaatgggaaactacaacagctcaagccagaagccttggttccaaagggggtagtgtttccaccaggagacacaacaatgctttcactgagctggaagttaagactgccatctggccacgttggactcctcatgcctctgagtcaacaggtccagaaaggagttacggtgctggctggggtgattgatccaggacatacatcagcagcctccctggttctcaggtcttgtgtatggagtgggagtgacaccattgtctcccctggttctcaggacttcagacttggaataaatgataccactggctttcctgtgtttccagact

SEQ ID NO: 149629 - DNA, 836 bp, Homo sapiens
gagacctctggccttttaccagggtaactgtgcattgggaaaggcaaatgatcagacatttcagggactactggacactggctctgagctgacattgattccagggtacccaaaacgtcattgctgtcccccagttaaagtacgggtttatggaggtcagacagatggatcttggagaatgacagtgggttatcataagcttaaccaagtggtgactccaattgcagctgctgtaccagatgtggtttcattgcttgagcaaattaacacacctcctagtacctggtgacggacaagttgctgcatttgcccctcctacaaccaagaaagaggcacaacggctagtgggtctatttgattttggaggcaacacattactcatttgggtgtattactctggcccattatcgagtgacctgaaaggctgccagtttgagtgggatccagaacaggagaggctctgcaaggccttctcagcacacagccaatggtttggctgtcagggacttggaagaagtgttgattggaaaattgatgacaagaaactggggaagaggatgcggatggacctctctgaattgggcaaaaatcgtgaagaatattggtatcctgttcaacaggctaagaagggagttaaagttttggctgtggtgattgaccagactatcaagatgaaatcagtctactacttcacaatggagaaaacatgtcagcgtcaggccacaacagcagagttggaaccagagaaaaatgttataggagttgatgaaacagttgaaggacagagttatcactccagcaagcaaaaagatataccttttcaaggagagaaataa

SEQ ID NO: 149630 - DNA, 1300 bp, Homo sapiens
agacctctggccttttaccagggtaactcttcacaggggaaagagaaatgatcagacatttcagggactactggacactggctctgagctgatgttgattccagaggacacaaaacatcactgtggtcctccagttaaagtagaggcttatggaggtcaggtaattaatggagttttagctcagatccaacttacagtgggtccagtgggttcagggactcatcctgtggtcatttacccagtgccagaatgcataattggcataggcatacttagcagctggcagaatccccacattggctccctgactagtaggaagacagatggttcttggagaatgacagtgcattatcataagcttaaccaaatggtgactccaattgcagctgctataccagatgtggtttcattgcttgagcaagttaacacatctcctggtagctggtatgcagccattgacttggcaaatgcctttttcttcattcctgtccataaggcccaccagaagcaattcgccttcagctggcaaggccagcaatatacctttactgtcctacatcaggggtatattaactctccggctttgtatcataatcttatttggagagatcttgatcgcttttcacttccacaagatatcacattgatccattacattgatgacatgacactgattggatccagtgagcaagacgtagcaaacacactggacttattggtgacctcagcagaggaggattttaataatcaagtggataggatgacccattctgtggacatcactcagcatctttccccagccacccctgtaatcgcccaatgggcccgtgaacaaagtagccatgggggcagggatggaggttacgcatgggctcagcaacatgtactcccactcaccaaggctgacctggctatggccactgctgagtacccaatttgccagcagcagagaccaacactaagccctcaatatggcaccattcctcagggtgatcagccagctaccaggcagcaggttgattatattggacctctttcatcatggaaagggcagaggttcgtcctcctggagtacatgcttattgtggatatgggtttgcctatcctgcacgcaatgcttctgccaagactaccatctgtggactcacggaatgccttatccactgtcacggtattctgcacagcattgcctctgaccaaggcactcactttacagctaaagaagtgtggcagtgggctcctgctcatggaattcactggtcttaccatgttccccatcatcctgaagcagttggattga

SEQ ID NO: 149631 - DNA, 838 bp, Homo sapiens; identical to SEQ ID NO: 118594

SEQ ID NO: 149632 - DNA, 1461 bp, Homo sapiens
atggagaacactgatactgcttggcatgaactgtttagagagttatgcaaaataaatgcatttgacactcctgatttatcgctcatgagaggcaaggaatttagtgactctgtacataatacctttgaccatatgtggagaagcaaggaacataatgaagttggttgtttgctcctaagttcagtggacaaagtgatggaagaaaatgatgaactcagggattttaactcccatcttcagaaacagatactgaccctcaaatctgctaatatcaccttgagtgagagtcttatctcctgtagagaaagagctgaaattgtggaaaaacacacacaagctcttatcatatccaacagtgggagctgcagtcactcaactacaaaatttaactgcaatgggagtaattggatcccatggtgccaggggccaagtagtggcactcaaccgtcaaaggcaaggagacctccaaccttttaccagggtaactgtgcactggggaaaagggaaatgcagatatttgggggactactggacactggctctgagctgacattgattccaggggacccaaaacatcattgtggtcctccagttaaagtaggggcttatggaggtcaggtaattaatggagttttagctcaggtccaaattacagtgggtccccagactcatcctgtggttatttccccagtgccagaatgcataattggcatagacatacttagcagctggcagaacccccacattggctccctgactggtattatggtgggaaaggccaaatggaaacaattagagctgcctctacctagaaaaatagtaaatcaaaaaccatattgtatccctggagggactgtggagattagtgccaccatcaaggacttgaaagatgcaggggtggtgattttcaccacatccctgttcaactctcccatttggcctgtgcagaagacagatggatcttggagaatgacagtgggttatcgtaggcttaaccaagtggtgactccaattgcagctgctgtaccagatgtggtttcattgcttgagcaaattaacacatctcctggtacctggtatgcagccattgacatggcaaatgcctttttctccattcctgtccataaggcccaccagaagcaatttgccttcacgtggcaaggccagcaatatgcctttactgtcctacctcaggggtatatcaactctccagctttgtgtcataatcttatttggagagaccctgattgctttttgcttctgcaaaatatcacactgctggtccattatgttgatgacattatgctgattggatccagtgagcaagaagtagcaaatgcactggacttattggtgttttctgaccatctagccataaagtgggtcatgcacagcagcattgcatcatcaagtggaagtggtatatgcgtgatcaggctcaagaaggtcctgaaggcacaa

SEQ ID NO: 149633 - DNA, 3183 bp, Homo sapiens; identical to SEQ ID NO: 134229

SEQ ID NO: 149634 - DNA, 2187 bp, Homo sapiens
atgtcactgtggtcctccagtaaagtagaggcttacggaagtcaggtacttaaaggagttttagctcaggtccaacttacagtgggtccagtgggtcctcggactcatcctgtggtcattttcccagtgccagaatgcataattggcatagatatgcttagtagcaggcagaacccccacactggctccctgactggtagggtgtggactattatggtgagaaaggccaaatggaagccattagagctgcctctacctagaaaaatagtaaatcaaaaacagtatcacatccctgaagggattgtggagattagtgccaccatcaaggacttgaaggatgcaggggtggtgattcccaccacatccccattcaactctcccatctggcctgtgcagaagacagacggatcttggagaatgacagtgggttactgtaagcttaaccaagtggtgactccaattgcagctgctgtaccagatgtggtttcattgcttgagcaaattaacacacctcctggtacctggtatgcagccattgacttggcaaatgactttttccccattcctgtccataaggcccaccagaagcaatttgccttccgctggcaaggccggcaatacacctttactgtcctacctcaggggagatgggaaataaatatgactaaaattcagggaccttctacctcagtaaaatttctaggggtccagtggtgtggggcttgtcaagatattccttctaaggtgaaggataagttgctgcatttagtccctcctacaatcaagaaagaggcacaatgcctagtgggcctatttggtttttggaggcaacacattcctcatttgggtatgccactccagcccatttatcgagtgacccaaatggctgccagttttgagtggggatccagaacaggagaaggctctgcaacaggcaggtctaggctgctgtgcaagctgctctgccacttgggcccctaaagacccagcagatccactagtgcttgaggtgtcagtgtcagatagggatgctgtttggcgcctttggcaggcctccatagccataaagtgggtcatgcacagcagcattccatcatcaaatggaagtggtatatacgtgattgggctcgagcagatcctgaaggcacaacaaagggacaaggacagcggagatggtggcaattggcagagaggcaagacagcagagacagagaggcagcaattggtgagagacaagagacagcagttggcaagacagcaagagacggtgaagcagtctgtgattgaggatgtggtgaaactgagtggacagccaagtgtccatagtacagctgcctcgtgtgggacccactgctctaacgagccagcccccgacacagaagctgagcacccccaagctggggaacctagagagacctgcacccgggtcccacgtggaagactggctggtgccattttgtcttctgtggatgggggagagtcccctttgcaccctcccccagtaatatcaggcacaaaggaagggcactacaaccacaaccaatatcagtaaagctttggaagacctctgctacctatttaaaataatcaacactcagccagaagaggtaatgtaatgctgtagatgggaaatgggagcattggatcttgctcttcttcctgactgtagtacttccctttcctatggctttaaccagccacctcctccctgggaaacatctcctgtgggcttgttgggtatagaagctactctaagacccaaccagataccatgatgccactgttaattctgtttgctcttctaattaacctaagctagtgtgtatgtggacagggagggtggacaaaattctacagtaaatatttcaaaaattataggcatcataggaatcatctttatgggctgccagatttgtcattcaacacccccggggttaggacagttttcatctttcccgacctatctggaaaatctcaggaccatgtccccagacctcctaactaaccatagcaccccaaaatacccaaacccctattgtgaagtggaactcttccccacttagtggatcccccctggaccctgctgtccccctgccctgaccactattatcggaatctgggaagttgggcatctatatctccagtgcactcataactctaacatttgcatccactcttgcattaatg

SEQ ID NO: 149635 - DNA, 1252 bp, Homo sapiens
cgcagatgggctaccgctccctcctgagcgctcgctcctctcgctcctctcccctcacccgccgccttccctgctgggtccctctccccggtctccacctctcctccctctcctggaagggaaaagtctgccaagctggggactgccacgaccaaaccaacaaaggccgaccgaaggcggaagaacttgaaaagaacttgttttgttccagttaaggaacctgcaggaaaatccacacccacattgcctggttttgaactggagagctgcgtgtgtgtgtgtatgtgtgtgtgtgtgtcaagcaagaggcggaggaggcacagactatggtctctggtttgataaggaaactgccagctgtcgaaagttaaccagcagagaggggaagatggcccaggagccagcccctcctgagttttaaactacactgttttctgtccagatattccaatggagacagttggaaaacctgtacttcagagaaaagaagttttccgtggaagttcatgacccacgcagggcttcagtgacaaggaggacgtttgggcacagcggcattgcagtgcacacgtggtatgcatgtccggcattgatcaagtccatctgggctatggccataagccaacaccagttctatctggacagaaagcagagtaagtccaaaatccatgcagcacgcagcctgagtgagatcgccattcgacctgacccggaccaggacccttgaaaactctaagctggccaacatgggtagcaaggggaagatcatcagcggcagcagcggcagcctgctgtcttcaggatctggtgccaggagacactgcattctactcccaggttctcaggaatcagatagctcgcagtcggccaagaaggacatgctggctgccttgaagtccaggcaggaagctctggaggaaaccctgcgtcagaggctggaggaactgaagaagctgtgtctccgagaagctgagctcacgggcaagctgccagtagaatatcccctggatccaggggaggaaccacccattgttcggagaagaatagggcccagccttcaaactggatgaacagaaaatcctgcccaaaggagaggaagctgagctggaacgcctggaacgagagtttgccattcagtcccagattacggaggccgaccgccgcctagccagtgaccccaacgtcagcaaaaaactgaagaagcaaaggaaaacaaagtatataaatgcagtgaagaaactgcaggtgtatt

SEQ ID NO: 149636 - DNA, 400 bp, Homo sapiens
cggcacgaggaaagaacaacaggaattctgacctcggaaggcctagcctcagacacgtcgctgatttgtgttatagaagatttctttgacactgcattgattatttccaggagtagtagtgaagggaaaattcagatgttggattccttcctacttagcttaggattcctggtgacagaaaagactgtaaatcatttgcttcaacaggaggaaagaccttgcatggacactcttgactgtgggtgcaggttgctatttctgaagcgctgtgtagactgacgattaaaaaatcaagggatgaacttgtccataaatggtttgatgatgaagtcattgctgaagctttcaaagaaattaaggatcgagaatttgagacggacagtagacgttttctcaatcg

SEQ ID NO: 149637 - DNA, 612 bp, Homo sapiens
atggatagagaaaaggtgagagagaaaaggaaaggggtgggggaacaagggagaaaaggagagggaaagggagaagatggagatgagggaatgagcaggaggagaaaggaggaaaaagacaaagatttgcttggaacggtagaagaaatccttccaagcctctcagaaaatatcagtgtttgggggatgaaagattctgttccacaaggtgtaatttcactcaaagaaaaactgagcacctcacctgatgagcccgtgccacgcagccaccatgttgtctcactcctcaagtctacttgtctttacatttttacctctggaacaacaggtctaccaaaagcagctgtgattagtcagctgcaggttttaaggggttctgctgtcctgtgggcttttggttgtactgctcatgacattgtttatataacccttcctctgtatcatagttcagcagctatcctgggaatttctggatgtgttgagttgggtgccacttgtgtgttaaagaagaaattttcagcaagccagttttggagtgactgcaagaagtatgatgtgactgtgtttcagtatattggagaactttgtcgctacctttgcaaacaatctaag

SEQ ID NO: 149638 - DNA, 498 bp, Homo sapiens
  misc_feature (1)...(498): n = a,t,c or g
tgcggttctagatacacaaaagcaactccaaagtgaatggtttgagatttaaggtttgcttaactcttcccaaccctttggcttttagatttgcttggaacggtagaagaaatccttccaagcctctcagaaaatatcagtgtttgggggatgaaagattctgttccacaaggtgtaatttcactcaaagaaaaactgaggcacctcacctgatgagcccgtgccacgcagccaccatgttgtctcactcctcaagtctacttgtctttacatttttacctctgggaacaacaggtatgatccaattcttttggaaggcttaaaatgaatggcgaggaatttggcaaagcaacagtgttggggccaaatttctaccatgtgtagtgaccaaccatctgagaatgcatgcttgcaagaagatgtaaggatctcagaggctagaactttccaactttggatggaaaggtaattatcttaacttttacttgaanagtcatt

SEQ ID NO: 149639 - DNA, 508 bp, Homo sapiens
tgagcagagatcatgccactgcactccagcctgggtgacagagtgtgaccctgcctccagcctccccagaaaaaccccacaaaaacccaacttttcaacacttatcacacaagtacctttcagtgagttttactcttgtttaatgtgatatttgtattacaacaggcctttctacagcttaattttttaaaacaggttttgaacatttcttaatgttattccaggtttggtcacaactattcaatctgaacagtcagattgtaaataggtctccataatcaaataatattacagtattttcctcatttattattattattattttttgagatggagttttgctcttgttgcacaggctgtagtgcaatggtgtgacctcggctcactgcaacctctgtctcccggcttcaagagattctcccgcctcagccttgagtagctgggattacaggcatgagcaaccacgtccagctaattttatatttttagtagagacaggatttctcca

SEQ ID NO: 149640 - DNA, 3630 bp, Homo sapiens
atgctggccccgcatcattttagcagtcaaagcagtactacccccagagttggccctgacgttaccctgggaggcagggatttgggcctcagaatcatccgaactgtcaggcttgatgattatttctgtacgacttccagcctctatttgccagcaaactggagagattgtggagaatttggaaaaactgtttcccttgagagtagagtaaaaggagaagttactttgttagaattggtaccattgcccgaagtgacgaaaccaagtttaagccaaccaacggccgccagcccaattggcagctctccatcgccaccagtcaatggtggcaacaatgccaaaagggtggcagtgccgaacggacaaccgccaagcgccgcccgctacatgcctcgggaggtgccgccgcgattccgttgccagcaggaccacaaagtgttactaaaacgtgggcagccccctccaccgtcctgcatgctccttgggggtggggcagggcctcctccctgcacagcacctggagcaaacccaaacaacgcacaagtgacaggagcgctgctgcagagtgagagtgggactgcgccagactcaacccttggaggtgctgctgcttcaaattatgcaaattccacttggggctcgggagcctcctccaacaacggcacctcccccaacccaattcacatctgggacaaggtgattgtagacgggtctgacatggaagagtggccttgtattgccagcaaagacactgaatcttcttccgaaaacaccaccgataacaacagtgcctcgaaccctggctctgagaagagcactctgccaggaagcaccactagtaacaaaggaaaagggagccagtgccagtctgcaagttctgggaacgaatgtaatcttggggtctggaaatctgaccctaaggctaaatctgttcaatcttccaactctactacagagaacaacaatggactaggaaattggaggaatgtgagtggtcaggatagaattggacctggctctggcttcagcaactttaacccaaatagcaacccatctgcctggccagcactggtccaagaaggaacttctaggaaaggggcattggaaacagataatagtaattccagtgcacaggttagcacagtaggtcagacatccagggaacagcagtcaaagatggaaaatgcgggtgttaattttgttgtctctggcagagaacaggctcaaattcataacactgatggaccaaaaaatggaaacactaactccttgaacttaagttcaccaaaccccatggagaataagggaatgccctttggaatgggcttggggaacacctccaggagcactgatgccccttcacaaagcactggagatcgaaagactgggagtgttggatcttggggtgcagctagggggccttctggaactgacacagtctctggacaaagcaattctggaaacaatgggaacaatggaaaagagagagaggactcctggaaaggagcttctgttcagaaatcaactgggtcaaaaaatgactcttgggacaacaataacaggtctacgggtgggtcctggaactttggcccccaggactctaatgacaacaaatggggtgaagggaacaaaatgacatctggggtctctcagggagaatggaaacagccgactgggtctgatgagttgaaaattggagaatggagtggtccaaaccaaccaaattctagcactggagcatgggacaatcaaaagggccaccccctccctgaaaaccaaggcaatgcccaggctccctgttggggaagatcttccagctccacaggaagtgaagttggaggtcaaagcactggaagcaaccacaaagcaggaagtagtgacagtcataactctggccgtcggtcgtacaggcccacacatcctgattgtcaggctgtcttgcagactcttttgagccgaactgatttggaccccagggtgctctcaaacactggctggggccaaactcaaattaagcaggacacagtgtgggacattgaagaggtgccaaggcctgaggggaaatctgacaaaggaactgaggggtgggagagcgctgccacacagaccaagaactcagggggctggggagatgcacccagccaaagcaatcaaatgaagtctggatggggggagctctcagcctctacagagtggaaagaccccaagaacacaggaggctggaatgactacaagaacaacaactcttccaactggggaggaggacgacctgatgaaaagacaccttcctcttggaatgagaatcccagcaaggatcaggggtggggaggtggacgccagcccaatcaaggatggtcttctggaaagaatggttggggggaggaagtcgatcagacaaaaaacagcaattgggaaagttctgcaagtaaacctgtgtctgggtggggtgaaggagggcagaatgaaatcgggacttggggtaatggtggcaatgcaagcctagcttcaaaaggtgggtgggaggattgcaaaagatccccagcatggaatgagacgggccgacagcccaattcctggaataaacaacaccaacagcagcagcccccacagcagccgccgccaccacaaccagaggcttctggttcgtggggaggcccacccccaccacctccaggcaacgttcgaccttccaattccagctggagcagcgggccacagcctgcaacacctaaggatgaggaacccagtggttgggaagagccatccccacagtcaattagtcggaaaatggacattgatgatggcacttcagcatggggagaccctaacagttataactacaagaatgtgaatctgtgggataagaattcccaagggggcccagcacctcgagaaccaaacctgcccaccccaatgaccagtaaatcggcatcagtctggagcaaaagcacaccacctgctccagataatggtacttccgcttggggtgagccaaatgaaagcagtcctgggtggggcgagatggatgatacaggagcatcgaccacaggctgggggaacacgcccgccaacgctcccaatgccatgaagcctaattccaaatctatgcaagacggctggggggagagtgacgggccagtcacaggagctcgccatcccagctgggaagaggaggaggatggaggagtctggaacaccactggctctcagggcagtgcttcctcccacaactcagcaagctggggacaaggaggaaagaaacaaatgaagtgctcactcaaaggaggaaacaatgattcatggatgaatcctcttgccaaacagttttcaaatatgggattgctgagtcagactgaagataatccaagcagcaaaatggatttgtctgtaggaagcctttcagataaaaaatttgatgtggacaagcgagcgatgaatctcggggattttaatgatatcatgaggaaggatcgatctgggttccgtccacctaattccaaagacatgggaaccacagatagtgggccttattttgagaagctacaagctgtctccctctggttccacactacccaacgtcagccttggagcaatcggcacagggctcaacccccaaaacttcgctgctag

SEQ ID NO: 149641 - DNA, 3614 bp, Homo sapiens
tgaaaattggagaatggagtggtccaaaccaaccaaattctagcactggagcatgggacaatcaaaagggccaccccctccctgaaaaccaaggcaatgcccaggctccctgttggggaagatcttccagctccacaggaagtgaagttggaggtcaaagcactggaagcaaccacaaagcaggaagtagtgacagtcataactctggccgtcggtcgtacaggcccacacatcctgattgtcaggctgtcttgcagactcttttgagccgaactgatttggaccccagggtgctctcaaacactggctggggccaaactcaaattaagcaggacacagtgtgggacattgaagaggtgccaaggcctgaggggaaatctgacaaaggaactgaggggtgggagagcgctgccacacagaccaagaactcagggggctggggagatgcacccagccaaagcaatcaaatgaagtctggatggggggagctctcagcctctacagagtggaaagaccccaagaacacaggaggctggaatgactacaagaacaacaactcttccaactggggaggaggacgacctgatgaaaagacaccttcctcttggaatgagaatcccagcaaggatcaggggtggggaggtggacgccagcccaatcaaggatggtcttctggaaagaatggttggggggaggaagtcgatcagacaaaaaacagcaattgggaaagttctgcaagtaaacctgtgtctgggtggggtgaaggagggcagaatgaaatcgggacttggggtaatggtggcaatgcaagcctagcttcaaaaggtgggtgggaggattgcaaaagatccccagcatggaatgagacgggccgacagcccaattcctggaataaacaacaccaacagcagcagcccccacagcagccgccgccaccacaaccagaggcttctggttcgtggggaggcccacccccaccacctccaggcaacgttcgaccttccaattccagctggagcagcgggccacagcctgcaacacctaaggatgaggaacccagtggttgggaagagccatccccacagtcaattagtcggaaaatggacattgatgatggcacttcagcatggggagaccctaacagttataactacaagaatgtgaatctgtgggataagaattcccaagggggcccagcacctcgagaaccaaacctgcccaccccaatgaccagtaaatcggcatcagattccaaatctatgcaagacggctggggggagagtgacgggccagtcacaggagctcgccatcccagctgggaagaggaggaggatggaggagtctggaacaccactggctctcagggcagtgcttcctcccacaactcagcaagctggggacaaggaggaaagaaacaaatgaagtgctcactcaaaggaggaaacaatgattcatggatgaatcctcttgccaaacagttttcaaatatgggattgctgagtcagactgaagataatccaagcagcaaaatggatttgtctgtaggaagcctttcagataaaaaatttgatgtggacaagcgagcgatgaatctcggggattttaatgatatcatgaggaaggatcgatctgggttccgtccacctaattccaaagacatgggaaccacagatagtgggccttattttgagaagggcggtagtcatggtttgtttggaaacagcacagcacaatcgagaggtctgcacacacccgtgcagccactaaattcttctcccagtctccgggcgcaagtgcctccccagtttatttccccccaggtttctgcctcaatgctcaagcagtttcccaacagtggcctgagtccaggtcttttcaatgtggggccccagttatctcctcaacaaattgccatgctgagccagcttccacaaattccccagtttcagttggcatgtcagcttctcttgcagcagcagcaacagcagcagttgttacagaaccagagaaagatttctcaagctgtacgccaacagcaagagcagcagctggctcgaatggtgagtgcactgcagcagcagcagcagcagcagcagaggcagccaggcatgaagcactcgccctctcatcctgttgggcccaagccgcatctggacaacatggtacccaacgcattgaatgtggggctcccagaccttcaaaccaaagggccaatacctggatatggttctggcttcagctctggcggcatggactatggcatggttggtgggaaggaggctggaaccgagtctcgctttaaacagtggacctccatgatggaggggctgccctctgtagccacacaggaagccaatatgcacaaaaatggcgctatagtggcccctggtaaaacccggggagggtcaccgtacaaccagtttgatatcatccctggtgacacactgggtggccatacgggtcctgctggtgatagctggttacctgccaaatctccaccaacaaataaaatcggaagtaaatccagcaatgccagttggcctccagaattccaaccaggagtgccatggaaaggtatccaaaacattgaccctgaatctgacccctatgtcaccccaggaagtgtgctggggggtacagccacatctcccattgtagatactgaccaccaactgctgcgggataacaccacagggtctaattcttccctcaacacctcgctgccttcacctggtgcctggccctacagtgcctctgacaactcctttaccaacgttcatagcacttcagcaaagttccctgattacaaatcaacatggtccccagatcccataggacacaaccccactcatctctccaacaagatgtggaaaaaccatatttcctccaggaacactacaccgctgccccgcccacctcctggtctgaccaaccccaaaccatcatctccctggagcagcacagcaccccgatcagtcagggggtgggggacacaggactcacggctcgcctcggcctctacctggagtgatggtggctcagttcgtcctagttactggctggttcttcacaatctcaccccacagattgatgggtcaaccttgagaacgatctgcatgcagcatggcccactgctgacattccatctgaatctaacccagggcactgccctgatccgatacagcaccaaacaggaggcggccaaggcccaaactgcactgcacatgtgtgtgttgggaaacactaccatccttgctgagtttgccactgatgatgaagtcagccgctttctggcacaagctcagccccctacacctgcagcaaccccaagtgcgccagctgcggggtggcagtcgctggagaccggccagaaccagtcagatcccgtgggacctgctctgaatctttttggtgggtccactgggctcgggcagtggagcagcagcgctggtggcagcagcggggccgatcttgctggcgcttcattgtgggggcccccaaactattcttctagcttatggggagtcccaacggtggaagatccccataggatgggcagccctgctcctttactacctggtgaccttctgggaggagggtcggattcaatctga

SEQ ID NO: 149642 - DNA, 594 bp, Homo sapiens
ctctgtctcaaaacaaaaacaaacaaaacaaaacctcagttctgacttctcagagcgaatgagcaagtgcgaacatttctaagcaggctaccttcatttgtttctttcctccttgtccccagcttgctgagttgtgggaggaagcactgccctgagagccagtggtgttccagactcctccatcctcctcctcttcccagctgggatggcgagctcctgtgactggcccgtcactctccccccagcagtttggcatagatttggaatctttaagaaaagaatgaattaactctctgcagcagctatataaaacaatcatcagaataataattccttgcagatgcagcatttacgtgtcttggtaattttatctactccatctccatggcaagacaaatattattactctttttttagagagcaggaaactaaaatccataaagcttcaatgatgcacagaaagttagcaaaccatagaatcaaggcctcctgatttatggatcaatgctttttcccttgcacaaagttggacaggaatttcaaaactgaaaagaacttatcccaacattcctggcaagaaatttcgctcgtgcc

SEQ ID NO: 149643 - DNA, 514 bp, Homo sapiens
gaatgtaaagattgtgggaaatccttcactgtttcttcaagcctgactgagcacgcaagaatccataccggagagaaaccctacgaatgtaagcagtgtggcaaagccttcacagggcgctcaggcctcactaaacacatgcggacacacaccggggagaagccctatgaatgtaaggactgtgggaaagcctacaatagggtttatctactgaatgagcatgtgaaaactcacacagaggagaagccctttacatgtacggtatgcaggaaatccttcagaaattcctcgtgcctgaataagcacatttcatattcacactggaataaaaccttatgaatgtaaggactgtgggaaaacattcactgtttcttcgagcctaactgagcacatacgaactcacactggagagaaaccttatgaatgtaaagtatgcggaaaggccttcaccacatcctcacaccttatcgtgcacataagaacccacaccggtgagaaaccctacatatgtaag

SEQ ID NO: 149644 - DNA, 3225 bp, Homo sapiens
atggggccctggggctggaaattgcgctggaccgtcgccttgctcctcgccgcggcggggactgcagtgggcgacagatgtgaaagaaacgagttccagtgccaagacgggaaatgcatctcctacaagtgggtctgcgatggcagcgctgagtgccaggatggctctgatgagtcccaggagacgtgcttgtctgtcacctgcaaatccggggacttcagctgtgggggccgtgtcaaccgctgcattcctcagttctggaggtgcgatggccaagtggactgcgacaacggctcagacgagcaaggctgtccccccaagacgtgctcccaggacgagtttcgctgccacgatgggaagtgcatctctcggcagttcgtctgtgactcagaccgggactgcttggacggctcagacgaggcctcctgcccggtgctcacctgtggtcccgccagcttccagtgcaacagctccacctgcatcccccagctgtgggcctgcgacaacgaccccgactgcgaagatggctcggatgagtggccgcagcgctgtaggggtctttacgtgttccaaggggacagtagcccctgctcggccttcgagttccactgcctaagtggcgagtgcatccactccagctggcgctgtgatggtggccccgactgcaaggacaaatctgacgaggaaaactgcgctgtggccacctgtcgccctgacgaattccagtgctctgatggaaactgcatccatggcagccggcagtgtgaccgggaatatgactgcaaggacatgagcgatgaagttggctgcgttaatgtgacactctgcgagggacccaacaagttcaagtgtcacagcggcgaatgcatcaccctggacaaagtctgcaacatggctagagactgccgggactggtcagatgaacccatcaaagagtgcgggaccaacgaatgcttggacaacaacggcggctgttcccacgtctgcaatgaccttaagatcggctacgagtgcctgtgccccgacggcttccagctggtggcccagcgaagatgcgaagatatcgatgagtgtcaggatcccgacacctgcagccagctctgcgtgaacctggagggtggctacaagtgccagtgtgaggaaggcttccagctggacccccacacgaaggcctgcaaggctgtggtccctgataaaactgtgagatggtgtgcagtgtcggagcatgaggccactaagtgccagagtttccgcgaccatatgaaaagcgtcattccatccgatggtcccagtgttgcttgtgtgaagaaagcctcctaccttgattgcatcagggccattgcggcaaacgaagcggatgctgtgacactggatgcaggtttggtgtatgatgcttacttggctcccaataacctgaagcctgtggtggcagagttctatgggtcaaaagaggatccacagactttctattatgctgttgctgtggtgaagaaggatagtggcttccagatgaaccagcttcgaggcaagaagtcctgccacacgggtctaggcaggtccgctgggtggaacaaccccataggcttactttactgtgacttacctgagccacgtaaacctcttgagaaagcagtggccaatttcttctcgggcagctgtgccccttgtgcggatgggacggacttcccccagctgtgtcaactgtgtccagggtgtggctgctccacccttaaccaatacttcggctactcgggagccttcaagtgtctgaaggatggtgctggggatgtggcctttgtcaagcactcgactatatttgagaacttggcaaacaaggctgacagggaccagtatgagctgctttgcctagacaacacccggaagccggtagatgaatacaaggactgccacttggcccaggtcccttctcataccgtcgtggcccgaagtatgggcggcaaggaggacttgatctgggagcttctcaaccaggcccaggaacattttggcaaagacaaatcaaaagaattccaactattcagctctcctcatgggaaggacctgctgtttaaggactctgcccacgggtttttaaaagtccccccaaggatggatgccaagatgtacctgggctatgagtatgtcactgccatccggaatctacgggaaggcacatgcccagaagccccaacagatgaatgcaagcctgtgaagtggtgtgcgctgagccaccacgagaggctcaagtgtgatgagtggagtgttaacagtgtagggaaaatagagtgtgtatcagcagagaccaccgaagactgcatcgccaagatcatgaatggagaagctgatgccatgagcttggatggagggtttgtctacatagcgggcaagtgtggtctggtgcctgtcttggcagaaaactacaataagagcgataattgtgaggatacaccagaggcagggtattttgctgtagcagtggtgaagaaatcagcttctgacctcacctgggacaatctgaaaggcaagaagtcctgccatacggcagttggcagaaccgctggctggaacatccccatgggcctgctctacaataagatcaaccactgcagatttgatgaatttttcagtgaaggttgtgcccctgggtctaagaaagactccagtctctgtaagctgtgtatgggctcaggcctaaacctgtgtgaacccaacaacaaagagggatactacggctacacaggcgctttcaggtgtctggttgagaagggagatgtggcctttgtgaaacaccagactgtcccacagaacactgggggaaaaaaccctgatccatgggctaagaatctgaatgaaaaagactatgagttgctgtgccttgatggtaccaggaaacctgtggaggagtatgcgaactgccacctggccagagccccgaatcacgctgtggtcacacggaaagataaggaagcttgcgtccacaagatattacgtcaacagcagcacctatttggaagcaacgtaactgactgctcgggcaacttttgtttgttccggtcggaaaccaaggaccttctgttcagagatgacacagtatgtttggccaaacttcatgacagaaacacatatgaaaaatacttaggagaagaatatgtcaaggctgttggtaacctgagaaaatgctccacctcatcactcctggaagcctgcactttccgtagaccttaa

SEQ ID NO: 149645 - DNA, 4439 bp, Homo sapiens
atggggccctgggcctggaaattgcgctggaccgtcgccttgctcctcgccgcggcggggactgcagtgggcgacagatgtgaaagaaacgagttccagtgccaagacgggaaatgcatctcctacaagtgggtctgcgatggcagcgctgagtgccaggatggctctgatgagtcccaggagacgtgcttgtctgtcacctgcaaatccggggacttcagctgtgggggccgtgtcaaccgctgcattcctcagttctggaggtgcgatggccaagtggactgcgacaacggctcagacgagcaaggctgtccccccaagacgtgctcccaggacgagtttcgctgccacgatgggaagtgcatctctcggcagttcgtctgtgactcagaccgggactgcttggacggctcagacgaggcctcctgcccggtgctcacctgtggtcccgccagcttccagtgcaacagctccacctgcatcccccagctgtgggcctgcgacaacgaccccgactgcgaagatggctcggatgagtggccgcagcgctgtaggggtctttacgtgttccaaggggacagtagcccctgctcggccttcgagttccactgcctaagtggcgagtgcatccactccagctggcgctgtgatggtggccccgactgcaaggacaaatctgacgaggaaaactgcgctgtggccacctgtcgccctgacgaattccagtgctctgatggaaactgcatccatggcagccggcagtgtgaccgggaatatgactgcaaggacatgagcgatgaagttggctgcgttaatgtgacactctgcgagggacccaacaagttcaagtgtcacagcggcgaatgcatcaccctggacaaagtctgcaacatggctagagactgccgggactggtcagatgaacccatcaaagagtgcgggaccaacgaatgcttggacaacaacggcggctgttcccacgtctgcaatgaccttaagatcggctacgagtgcctgtgccccgacggcttccagctggtggcccagcgaagatgcgaagatatcgatgagtgtcaggatcccgacacctgcagccagctctgcgtgaacctggagggtggctacaagtgccagtgtgaggaaggcttccagctggacccccacacgaaggcctgcaaggctgtgggctccatcgcctacctcttcttcaccaaccggcacgaggtcaggaagatgacgctggaccggagcgagtacaccagcctcatccccaacctgaggaacgtggtcgctctggacacggaggtggccagcaatagaatctactggtctgacctgtcccagagaatgatctgcagcacccagcttgacagagcccacggcgtctcttcctatgacaccgtcatcagcagggacatccaggcccccgacgggctggctgtggactggatccacagcaacatctactggaccgactctgtcctgggcactgtctctgttgcggataccaagggcgtgaagaggaaaacgttattcagggagaacggctccaagccaagggccatcgtggtggatcctgttcatggcttcatgtactggactgactggggaactcccgccaagatcaagaaagggggcctgaatggtgtggacatctactcgctggtgactgaaaacattcagtggcccaatggcatcaccctagatctcctcagtggccgcctctactgggttgactccaaacttcactccatctcaagcatcgatgtcaatgggggcaaccggaagaccatcttggaggatgaaaagaggctggcccaccccttctccttggccgtctttgaggacaaagtattttggacagatatcatcaacgaagccattttcagtgccaaccgcctcacaggttccgatgtcaacttgttggctgaaaacctactgtccccagaggatatggtcctcttccacaacctcacccagccaagaggagtgaactggtgtgagaggaccaccctgagcaatggcggctgccagtatctgtgcctccctgccccgcagatcaacccccactcgcccaagtttacctgcgcctgcccggacggcatgctgctggccagggacatgaggagctgcctcacagaggctgaggctgcagtggccacccaggagacatccaccgtcaggctaaaggtcgtccctgataaaactgtgagatggtgtgcagtgtcggagcatgaggccactaagtgccagagtttccgcgaccatatgaaaagcgtcattccatccgatggtcccagtgttgcttgtgtgaagaaagcctcctaccttgattgcatcagggccattgcggcaaacgaagcggatgctgtgacactggatgcaggtttggtgtatgatgcttacttggctcccaataacctgaagcctgtggtggcagagttctatgggtcaaaagaggatccacagactttctattatgctgttgctgtggtgaagaaggatagtggcttccagatgaaccagcttcgaggcaagaagtcctgccacacgggtctaggcaggtccgctgggtggaacatccccataggcttactttactgtgacttacctgagccacgtaaacctcttgagaaagcagtggccaatttcttctcgggcagctgtgccccttgtgcggatgggacggacttcccccagctgtgtcaactgtgtccagggtgtggctgctccacccttaaccaatacttcggctactcgggagccttcaagtgtctgaaggatggtgctggggatgtggcctttgtcaagcactcgactatatttgagaacttggcaaacaaggctgacagggaccagtatgagctgctttgcctagacaacacccggaagccggtagatgaatacaaggactgccacttggcccaggtcccttctcataccgtcgtggcccgaagtatgggcggcaaggaggacttgatctgggagcttctcaaccaggcccaggaacattttggcaaagacaaatcaaaagaattccaactattcagctctcctcatgggaaggacctgctgtttaaggactctgcccacgggtttttaaaagtcccccaaaggatggatgccaagatgtacctgggctatgagtatgtcactgccatccggaatctacgggaaggcacatgcccagaagccccaacagatgaatgcaagcctgtgaagtggtgtgcgctgagccaccacgagaggctcaagtgtgatgagtggagtgttaacagtgtagggaaaatagagtgtgtatcagcagagaccaccgaagactgcatcgccaagatcatgaatggagaagctgatgccatgagcttggatggagggtttgtctacatagcgggcaagtgtggtctggtgcctgtcttggcagaaaactacaacaagagcgataattgtgaggatacaccagaggcagggtgattttgctgtagcagtggtgaagaaatcagcttctgacctcacctgggacaatctgaaaggcaagaagtcctgccatacggcagttggcagaaccgctggctggaacatccccatgggcctgctctacaataagatcaaccactgcagatttgatgaatttttcagtgaaggttgtgcccctgggtctaagaaagactccagtctatgtaagcttgtgtatgggctcaggcctaaacctgtgtgaacccaacaacaaaagaggggatactacgggctacacaggcgcttttcaggtgtctggttgagaagggagatgtggccttttgttgaaaacaccagactgttcccacaggaacactggggggggaaaaaaaccctgatccatgggcttaaggatctgaatgaaaaagactattgagttgctgtgccttggatgggtaccagggaaacctgtgggaggagtatgcgaacttgccacctggccagagccccgaatcaccgctgtgggtcacacggaaaggataaggaagcttgcgtccacaaggatattacggtcaacagccagccacctatttgggaagcaacgtaactgacttgctcgggcaacttttggttggtccggtcgggaaaccaaggaccttcttgttcagagatgacacagtatgttttgggccaaacttcatgacagaaacacatatgaaaaatacttaggagaagaatatgtcaaggctgttggtaacctgagaaaatgctccacctcatcactcctggaagcctgcactttccgtagaccttaaaatctcagaggtagggctgccaccaaggtgaagatgggaacgcagatgatccatgagtttgccctggtttcactggcccaagtggtttgtgctaaccacgtctgtcttcacagctctgtgttgccatgtgtgctgaacaaaaaataaaaattattattgattttatatttc

SEQ ID NO: 149646 - DNA, 453 bp, Homo sapiens
gctgtcccgggtggtactttccgccgccgccacagcggccccctctctaagaaatgcagccttctaggtccaggggtattgcaggcaacaaggacctttcatacagggcagccacaccttgtccctgtaccacctcttcctgaatacggaggaaaagttcgttatggactgatccctgaggaattcttccagtttctttatcctaaaactggtgtaacaggaccctatgtactcggaactgggcttatcttgtacgctttatccaaagaaatatatgtgattagcgcagagaccttcactgccctatcttgctctgcctttgagttgttccgtgatcacttctgaataagcagtttgcctttataaaaacttgctgcctgactaaagattaacaggttatagtttaaatttgtaattaattctaccatcttgcaataaagtgacaattgaatg

SEQ ID NO: 149647 - DNA, 1383 bp, Homo sapiens
  misc_feature (1)...(1383): n = a,t,c or g
cccacgcgtccggccctgacagattctcctatcggggtcacagggacgctaagattgctacctggacgtttcgttgaccatgctgtcccgggtggtacatttccgccgccgccacagcgccgaccatcatcatgaagaatgcagccttcctaggtccaggggtattgcaggcaacaaggacctttcatacaagggcagccacacctttgtcccatgtaccaccatcattcctgaatacgggaggaaaagttcgttatgggactgatccctgagggaattcttccagtttctttatccctaaaaactggtgtaaacanggaccctaatgtacctccggaaacttgggggcttaatcttgtaacggttttattccaaaggaaatatatggtggaatttaggcgcagaggaccttcactggcccttatcaagtactaaggtggtaaatgggtctatgggaatttaaaaaaatatgggtcccctttggttgcaggactttggctggattaaactccaatggagcaaaaacttggcccaacttaggaagaaggcgacaagggggctttccatcccaacacatccagaatggcaattgattacgggagaagtctctatcaggcactggttcagaagcgccattacctttttggatgtgcaaaggaataacattgctatggctttggaagttacttaccgggaacgactgtatagagtatataagggaagtaaagaatcgcctggactatcatatatctgtgcagaaccatgatgccgtccgaaacggaacaacgaactctttgttaaattggggtggaagaagcacgtgcgtgcaaagctatttcccccacaagccagaaaagaagacatattgcccaagtggcattgccgacctataaagctgctggcaaaggaaggctccaaggcacaggcccagttatggtaaaatgtatccctatcccccaattgagaccagccctagaaacagttgacctgacctaaatggaaacctagtcttattagacaaagtgctttgctgtgttggtgttctactgaaagttatagtttaccccttcctaaaaatgaaaagtttgtttgcatatagtgagagaacgaaaatctctatccggccagtcacgatgtttctcatccttctcgctctgcctttgagttgttcccgtgatcacttctgaataagcagtttgccttttataaaaacttggctgcctgactaaagattaacaggttatagtttaaatttggtaattaattctaccatcttggcaataaagtgacaattgaatgaaacagggtttttcaagttgtataattctctgaaatactcagcttttgtcatatgggtaaaaattaaagatgtcattgaactac

SEQ ID NO: 149648 - DNA, 342 bp, Homo sapiens
  misc_feature (1)...(342): n = a,t,c or g
agctccagtcacaagctggaccaaccaaaggatggctcatgtccttttagtgagtctaccaagaccatttccctgtatatctcctctgaacagcaattccatctgcccaggccttcagagtcagatgactttattgaagacacagccgatatgctgtgtttcattcagtggatactctagtgccccaaagaatcaagagcaannnnnnnnnnnnnnnnnnnnnnnnnnnnnnnnnnnnnnnnnnnnnnnnnnnnnnnnnnnnnnnnnnnnnnnnnnnnnnnnnnnnnnnnnnnnnnnnnnnnnnnnnnnnnnnnnnnnnnnnnnnnnnnnnnnnnnnnnnnn

SEQ ID NO: 149649 - DNA, 360 bp, Homo sapiens
agtccatgtctttctgaacgacagttctgctgtgagaagctgccattacagagatccagcaggccccaggactcagctggccagccggtgacactgctcactgctcattggcctcaactgtggacctctgtccccctctgctggccactcacagaatttcctgctggcactgtcaagatgaagtccacggaggaagagactgctgtcgataagggagacctggaggccctgagcctccccgccggccatggtgacaccgacggccccatcagcctggacgtgcccgatggggcaccggacccccagcggaccaaggccgccattgaccacctgcaccataagatcctgaagagcaccgag

SEQ ID NO: 149650 - DNA, 636 bp, Homo sapiens
atggataagtttatactagtgttggcacatggcggcatgtatagatatactaggaggacctagttgtattccttgtatgaaaaagcgtccctggtactacaataagtctttcgtgaaaggagtgtaatcctaacaacaactcaggaaagtattttgaaaagaatactggataaggaaaaacctgcagctactcctgctatttcaagacattgcctacaagtggttggtgtggtctctgtggctgtggccgtgattccttggatcgcaatacccttggttccccttggaatcattttcatttttcttcggcgatattttttggaaacgtcaagagatgtgaagcgcctggaatctacaagtgagtatggaaactcgggttggtatagacatgctagctagtttccatttatgccataaattacagagaccccctgaaattcggcagactctgtcttccagaatttctctaacattaggtaattgaacgtattggccattatgaatcattgtgtcccttagagcatgtggaattgatagcctgcaacgtgtaactttgcatttggaataaggaaggagtgaaggccatatggggagtaatattctacaggaatgtcagcactgtgaagacagggactc

SEQ ID NO: 149651 - DNA, 4232 bp, Homo sapiens
ggacaggcgtggcggccggagccccagcatccctgcttgaggtccaggagcggagcccgcggccaccgccgcctgatcagcgcgaccccggcccgcgcccgccccgcccggcaagatgctgcccgtgtaccaggaggtgaagcccaacccgctgcaggacgcgaacatctgctcacgcgtgttcttctggtggctcaatcccttgtttaaaattggccataaacggagattagaggaagatgatatgtattcagtgctgccagaagaccgctcacagcaccttggagaggagttgcaagggttctgggataaagaagttttaagagctgagaatgacgcacagaagccttctttaacaagagcaatcataaagtgttactggaaatcttatttagttttgggaatttttacgttaattgaggaaagtgccaaagtaatccagcccatatttttgggaaaaattattaattattttgaaaattatgatcccatggattctgtggctttgaacacagcgtacgcctatgccacggtgctgactttttgcacgctcattttggctatactgcatcacttatatttttatcacgttcagtgtgctgggatgaggttacgagtagccatgtgccatatgatttatcggaaggcacttcgtcttagtaacatggccatggggaagacaaccacaggccagatagtcaatctgctgtccaatgatgtgaacaagtttgatcaggtgacagtgttcttacacttcctgtgggcaggaccactgcaggcgatcgcagtgactgccctactctggatggagataggaatatcgtgccttgctgggatggcagttctaatcattctcctgcccttgcaaagctgttttgggaagttgttctcatcactgaggagtaaaactgcaactttcacggatgccaggatcaggaccatgaatgaagttataactggtataaggataataaaaatgtacgcctgggaaaagtcattttcaaatcttattaccaatttgagaaagaaggagatttccaagattctgagaagttcctgcctcagggggatgaatttggcttcgtttttcagtgcaagcaaaatcatcgtgtttgtgaccttcaccacctacgtgctcctcggcagtgtgatcacagccagccgcgtgttcgtggcagtgacgctgtatggggctgtgcggctgacggttaccctcttcttcccctcagccattgagagggtgtcagaggcaatcgtcagcatccgaagaatccagacctttttgctacttgatgagatatcacagcgcaaccgtcagctgccgtcagatggtaaaaagatggtgcatgtgcaggattttactgctttttgggataaggcatcagagaccccaactctacaaggcctttcctttactgtcagacctggcgaattgttagctgtggtcggccccgtgggagcagggaagtcatcactgttaagtgccgtgctcggggaattggccccaagtcacgggctggtcagcgtgcatggaagaattgcctatgtgtctcagcagccctgggtgttctcgggaactctgaggagtaatattttatttgggaagaaatatgaaaaggaacgatatgaaaaagtcataaaggcttgtgctctgaaaaaggatttacagctgttggaggatggtgatctgactgtgataggagatcggggaaccacgctgagtggagggcagaaagcacgggtaaaccttgcaagagcagtgtatcaagatgctgacatctatctcctggacgatcctctcagtgcagtagatgcggaagttagcagacacttgttcgaactgtgtatttgtcaaattttgcatgagaagatcacaattttagtgactcatcagttgcagtacctcaaagctgcaagtcagattctgatattgaaagatggtaaaatggtgcagaaggggacttacactgagttcctaaaatctggtatagattttggctcccttttaaagaaggataatgaggaaagtgaacaacctccagttccaggaactcccacactaaggaatcgtaccttctcagagtcttcggtttggtctcaacaatcttctagaccctccttgaaagatggtgctctggagagccaagatacagagaatgtcccagttacactatcagaggagaaccgttctgaaggaaaagttggttttcaggcctataagaattacttcagagctggtgctcactggattgtcttcattttccttattctcctaaacactgcagctcaggttgcctatgtgcttcaagattggtggctttcatactgggcaaacaaacaaagtatgctaaatgtcactgtaaatggaggaggaaatgtaaccgagaagctagatcttaactggtacttaggaatttattcaggtttaactgtagctaccgttctttttggcatagcaagatctctattggtattctacgtccttgttaactcttcacaaactttgcacaacaaaatgtttgagtcaattctgaaagctccggtattattctttgatagaaatccaataggaagaattttaaatcgtttctccaaagacattggacacttggatgatttgctgccgctgacgtttttagatttcatccagacattgctacaagtggttggtgtggtctctgtggctgtggccgtgattccttggatcgcaatacccttggttccccttggaatcattttcatttttcttcggcgatattttttggaaacgtcaagagatgtgaagcgcctggaatctacaactcggagtccagtgttttcccacttgtcatcttctctccaggggctctggaccatccgggcatacaaagcagaagagaggtgtcaggaactgtttgatgcacaccaggatttacattcagaggcttggttcttgtttttgacaacgtcccgctggttcgccgtccgtctggatgccatctgtgccatgtttgtcatcatcgttgcctttgggtccctgattctggcaaaaactctggatgccgggcaggttggtttggcactgtcctatgccctcacgctcatggggatgtttcagtggtgtgttcgacaaagtgctgaagttgagaatatgatgatctcagtagaaagggtcattgaatacacagaccttgaaaaagaagcaccttgggaatatcagaaacgcccaccaccagcctggccccatgaaggagtgataatctttgacaatgtgaacttcatgtacagtccaggtgggcctctggtactgaagcatctgacagcactcattaaatcacaagaaaaggttggcattgtgggaagaaccggagctggaaaaagttccctcatctcagccctttttagattgtcagaacccgaaggtaaaatttggattgataagatcttgacaactgaaattggacttcacgatttaaggaagaaaatgtcaatcatacctcaggaacctgttttgttcactggaacaatgaggaaaaacctggatccctttaaggagcacacggatgaggaactgtggaatgccttacaagaggtacaacttaaagaaaccattgaagatcttcctggtaaaatggatactgaattagcagaatcaggatccaattttagtgttggacaaagacaactggtgtgccttgccagggcaattctcaggaaaaatcagatattgattattgatgaagcgacggcaaatgtggatccaagaactgatgagttaatacaaaaaaaaatccgggagaaatttgcccactgcaccgtgctaaccattgcacacagattgaacaccattattgacagcgacaagataatggttttagattcaggaagactgaaagaatatgatgagccgtatgttttgctgcaaaataaagagagcctattttacaagatggtgcaacaactgggcaaggcagaagccgctgccctcactgaaacagcaaaacaggttatacttcaaaagaaattatccacatattggtcacactgaccacatggttacaaacacttccaatggacagccctcgaccttaactattttcgagacagcactgtgaatccaaccaaaatgtcaagtccgttccgaaggcattttccactagtttttggactatgtaaaccacattgtacttttttttactttggcaacaaatatttatacatacaagatgctagttcatttgaatatttctccc

SEQ ID NO: 149652 - DNA, 1101 bp, Homo sapiens
  misc_feature (1)...(1101): n = a,t,c or g
ttagatttcatccagacaatgctacaagtggttggtgtggtctctgtggctgtgncggtgatccttggatcgcaatacccttggttccccttggaatcattttcatttttcttcggcgatattttttggaaacgtcaagagatgtgaagcgcctggaatctacaactcggagtccagtgttttcccacttgtcatcttctctccaggggctctggaccatccgggcatacaaagcagaagagaggtgtcaggaactgtttgatgcacaccaggatttacattcaggtctgtctatttctggaaatggtttcaaaggacaggatctgctgctttttctggcttaacctccctggtcagatgagcttgttggcaggcacctcagggcccagccccacatcctgctttttttgcgcatcttcgtctccttccccatccccttcttctgggcttggactcctctcggaatcgctgctgcacgttccctctttgtgcccccctgactggcttgtgggggtctttctctcaccatgcaatggcctgtggctctgtcagcaaacggttttctgcaaaaggccacctagtaagtgttttaggcattgtgtgccattattgtctctgttgtgattaatcacctttgccattgtagcacaaaagcagatgtcaatacattggcaaatggctgtgactatgtttcaataaaactttatttacaaaaataggtgctggctcacgtgctgtagtttgctgaccccttgcatcagtgaagattttttcaatatggaaatttcagaatttcgaccaagatctacaaaattcagatccgtcattccaatctttattttatcttgctgattaaatggcactttaaaaaccacatgctaaaaggaaaaaagaagtagcaaacaaacaaacaaaaaaccacatgcaaatcctgttagtgaggtcatttttatatagcccctaagcaatagtcagtgtgtgtgggccttctggtaagtatggaaggtgggagaagtaaattgggagctgcactctgctgttggagaactggaccagtcaaccatgtgtgtgggtggacttcacatgagatgcacttcacat

SEQ ID NO: 149653 - DNA, 356 bp, Homo sapiens
cggttcttgaagaaacatatgaatgtattcggggggacaagggcttccagtttttttcacaacaggtcagccaccatccgcctatctctgcgatgtcatgctgagtctataaatgttggttactggctagatgcgagatggacttactttactctgggcgcaaatccatgcaaattgttccaattggcacaaaccatgtgactctgccactttattggggatcatattgagtggaacaaactgacctcttgcatccatatcatcttaagcgtacagaagtggattgagcactatggagagattgccatcaagaacctgcttgatgattgctgctactgccatacgaattttataaa

SEQ ID NO: 149654 - DNA, 378 bp, Homo sapiens
aagaacgcgacggagcattaactctgccactgacccctggcctgccttcgcctcctcctcttcctcctctacctcctcccaggcgcattaccgcctctctgccttcggccagcagtttctatttaatctcaccgccaatgccggatttatcgctccactgttcactgtcaccctcctcgggacgcccggggtgaatcagaccaagttttattccgaagaggaagcggaactcaagcactgtttctacaaaggctatgtcaataccaactccgagcacacggccgtcatcagcctctgctcaggaatgctgggcacattccggtctcatgatggggattattttattgaaccactacagtctatggatgaacaagaaga

SEQ ID NO: 149655 - DNA, 535 bp, Homo sapiens
ataaatacgttattactttcaggggggaaaggtggaaaaaataagaaaaataaaaactcttctaaaccacagaaaaacaatggatccacttgggccaatgtccctctacctccccccccagtccagccccttcctggcacggagctggaacactatgcagtggaacaacaagaaaatggctatgacagtgatagctggtgcccaccattgccagtacaaacttacttacaccaaggtctggaagatgaactggaagaagatgatgatagggtcccaacacctcctgttcgaggcgtggcttctttctcctgctatctcctttggacagcagtccactggcaactcttactccattccccacgggaaggagatggcaacccatggctggcaggcttcacctgggatggagtttgacaaggaggcctattcagttttgattattaggcaaaacaaacatgggcacatttcaaaggcaataattcaaccttccacagccttccagtttccaccgttaggttattgttgttttgggagc

SEQ ID NO: 149656 - DNA, 402 bp, Homo sapiens
tttcgtgaatcatggctgctcgcagagctctgcacttcgtattcaaagtgggaaaccgcttccagacggcgcgtttctatcgggacgtcctggggatgaaggtgcaggccggggccgacaggggctggcgcgcgaggctggaaccggcgcccgagccggccctggcggagggaggggaaaatgggtgtgtcgtgaacctaagccggagggtgtccgaccttaggccctgcgcggtgttcagcttcaggagcgtggcgagttgccgttggggatcataggccttggagaagggcctaacacgattagtccccgcggtgtgcccacgcacgtcctttcatttaagccactcgtaaacgtttattgagccccgcccttgtggagcttaccgtctaccggaaaagc

SEQ ID NO: 149657 - DNA, 1542 bp, Homo sapiens
atgaggctgacacctttcagcttatcgactggcaactcctttaggtattctagacggctaaagaagaacatttttggcacagctccagccttgagagtgtctgaaatgagcctgcgaccttccagcaggatcttcccttgtttttcccgaaatggcctggactttactattgtcattacactggctcagcctcctgtccccgggataagctttatcgtagcgaagcccagactcttcccaggtgctgggagcgcgggatgcggactcctcgagcggttgtttctctcgttgctcctgggcactggcctcagatggtgcttgcggggctgcttcccaggagcgcgcttctgttccaccacctctccggaaggacacaccactttcactgggctccgccgcagcgcacggacccagcgcctcgctcaaggtcccaagcctggaccacctgcagcaacggtcgcacgacaaacctcgcgggtctcaccagcgccgccatgttccctgagacccgggctgcgtcacgaaagcgcgccgtcgggcataggtgacgtcacggcccgtggcgcccttcgtggactgggctgtacggtgcgcgtgacggctgcgtgcggcgggaatcatggctgctcgcagcgtgcttgcacttcgtattcaaagtaggaaaccgcttacagacggcagcgtttcatatcgggacgtccatggggatgaaggttcagcagcatgaggaatttgaagaaggcatgcaaagccgccttgtaatgggccattatgatggggaaatggagtaaaacaatggtggggatttggggcctgaggatgatcattttgtcgcagaactgacttacaattatgggcgtcggagactacaagcttggcaattgactttatggggaatcacgctcgctttctagccaggctgtcagcaacgccaggaaagctggagtggccactgacggaagttgcagaaggtgttttttgaaacccgaggccccgggaggatataagttctatttgcagaatcgcagtctgcctcagtcagatcctgtattaaaagtaactctagcagtgtctgatcttcaaaaagtccttgaactactggtgtaatctactgggaatgaaaatttatgaaaaagatgaagaaaagcaaagggctttgctgggctatgctggattaaccagtgtaagcttggagctacaggggcgtcaagggtggggtggaccatgcagcagctttttggaagaatttgccttctcttgcccccagaaagagtttgccagacttaggaagacttgatgaaaagggagaaccagaagattctgactcccctggtgagcctggacaccccagggaaagcaacagtacaggtggtcattctggccgaccctgacggacatgaaatttgctttgtcggggatgaagcatttcgagaactttctaagatggatccagagggaagcaaattgttggatgatgcaatggcagcagataaaagtgacgagtggtttgccaaacacaataaacccaaagcttcaggttaa

SEQ ID NO: 149658 - DNA, 504 bp, Homo sapiens
tttcggcacagaagagctagcacccaggaagcagaggttgcagtgagccgagatcgggccattgcactccagcctgggggacaaaagtgaaaacccccgcctcaacaaaaacaaaacaaaacaaaaaaaagaagtaaaggactgtatgtcctcaacacccttggcacaccctcctggtgtctggtgtgaatggaggggattaattccctcatcctctccctgagttcaagtcttctgtaatgtagcatgctggggcctctggagcacttcacttgcacactaacgaatgtgagggatgggaaaaggaaaatcttatcttagtgaaactgtggaaatagtttagacctcgggctcccctaacaggcccctagacgatgctttgggaaccgtggtggtagaactctctctcccagactcactctgccctgacccctcttattggtgagaaacaggcatgtgtaactcttctttttcctttgaggaataacccatatttgtacattt

SEQ ID NO: 149659 - DNA, 563 bp, Homo sapiens
  misc_feature (1)...(563): n = a,t,c or g
aaattaaatggtcctggtgaaaacgtcagtgaggatgaggctcagtcaagtaatcaacgtaagagaggttggaagcgagatagagaaaaaagagatgatcaagatgacgtttccagtgtgagaagtgagggtggtaatatccgaggttcctttagaggtcgaggaagaggccgaggacggggaagaggacgaggcagaggaaatcctcgattgaactttgattattcatatggttatcaagaacatggtgaaaggactgatcaaccatttcaaacagaacttaataccagtatgatgtattactatgatgatggtacaggtgtacaggtgtatcctgtggaagaagcgttgcttaaagagtatattaagcgtcaaattgaatattacttcagtgtagaaaatttggaacgagacttctttcttcggggaaagatggatgaacaaggtttcttgcctatttccctgattgctggttttcagcgtgttcaggctctcactacaaaccttaatctcatattaccgccactgaaggatagcacagaagtagtatntagtggatgaga

SEQ ID NO: 149660 - DNA, 585 bp, Homo sapiens
gcggccgccactagcgctggggcgcggggagagccgtcgccggcgctggtgctgggacgcagcgtgccccaggcggctgtccccgtgaggcccctggcgctgcacctggcgcacaaggcgcgtgggcccgggggccctttcggcggggagccgccaccgccaccgccgccgccgtcgccgttgccgccgttgctgcgggatccgccggccgaggacgcccgggaagaggtggcagctggccctgcggaaaagcggcagccgccgctgctgccgcctaagggaaatccctggaccaaaaagcctccccagcacctgtccccagacacgacaggtccgccaccgcccccgctggaaaccctggaggcagaattcggttccctcaaaattataaaagcaggaaagctcaagacaaagaaatccaacaaggctagtgatttcagtgatatggagaattggccaacaccaagtgaattagtgaacactggatttcagagcgtcctcagccaaggaaataaaaagccaccaaatagaaaagaaaaagaagagaagggtgaaagagaagaacagtgacagcaaagaaaaccg

SEQ ID NO: 149661 - DNA, 763 bp, Homo sapiens
agtcggggcggcctcatccagtgatccgggagtcgtccccttcgtcctccctcgcactcggagggcagctggggcggggcagaccctcgggccgggcggcacccgggcgggcgaatccgtcagctcccgcgggaggcccggcgagagaaggacccgaattcggttccctcaaaattataaaagcaggaaagctcaagacaaagaaatccaacaaggctagtgatttcagtgatatggagaattggccaacaccaagtgaattagtgaacacgtggatttcagagcgtcctcagccaaggaaataaaaagccacaaaatagaaaagaaaaagaagagaaggttgaaaagagaagtaacagtgacagcaaagaaaaccgggaaacaaaattaaatggtcctggtgaaaaccgtcagtgacggatgaggctcagtcaagtaatcaacgtaagagagctaataagcacaagtgggtaccactccacttagatgttgtaagatcagagagtcaagaaagacctggatcccggaacagctcaagatgtcaacctgaagcaaataaaccaacacataacaataggagaaatgatacacggagttgggaagcgagatagagaaaaaagagatgatcaagatgacgtttccagtgtgagaagtgagggtggtaatatcccgaggttcctttagaggtcgaggaagaggccgaggacggggaagaggacgaggcagaggaaatcctcgattgaactttgattattcctcgtgc

SEQ ID NO: 149662 - DNA, 372 bp, Homo sapiens
cggcacgagcagggcatcagctttctggagacagagagcaccttcatgaccgaccagctggtagacgccctcaccacctggcagaataagaccaaggtgggcctgttgtggtcagcaggctcacatccggttcaagccaacactttcccagcagcaaaagtccccagagcagcatgaaacagtcctggacggcaacctcattatccgctatgatgtggaccgggccatctccgggggctccattcagacccgggaagccctaatcaagatcctggatgacctcatccccagagaccagttcaacctcatcgtcttcagtacagaagcaactcagtggaggccatcactggtgccagcctcagccgagaacgg

SEQ ID NO: 149663 - DNA, 1021 bp, Homo sapiens
gcccaggcacagtacagcgcagcagtggccaagggaaagagcgctggcctcgtcaaggccaccgggagaaacatggagcagttccaggtgtcggtcagtgtggctcccaatgccaagatcacctttgagctggtctatgaggagctgctcaagcggcgtttgggggtgtacgagctgctgctgaaagtgcggccccagcagctggtcaagcacctgcagatggacattcacatcttcgagccccagggcatcagctttctggagacagagagcaccttcatgaccaaccagctggtagacgccctcaccacctggcagaataagaccaaggctcacatccggttcaagccaacactttcccagcagcaaaagtccccagagcagcaagaaacagtcctggacggcaacctcattatccgctatgatgtggaccgggccatctccgggggctccattcagatcgagaacggctactttgtacactactttgcccccgagggcctaaccacaatgcccaagaatgtggtctttgtcattgacaagagcggctccatgagtggcaggaaaatccagcagacccgggaagccctaatcaagatcctggatgacctcagccccagagaccagttcaacctcatcgtcttcatgtacagaaagcaactcagtggaggccatcactggtgccagcctcagccgagaacgtgaacaaggccaggagctttgctgcgggcatccaggccctgggagggaccaacatcaatgatgcaatgctgatggctgtgcagttgctggacagcagcaaccaggaggagcggctgcccgaagggagtgttctcactcatcatcctgctcaccgatggcgaccccactgtgggggagactaaccccaggagcatccagaataacgtgcgggaagctgtaagtggccggtacagcctcttctgcctgggcttcggtttcgacgtcagctatgccttcctggagaagctggcactggacaatggcggcctcggccggggca

SEQ ID NO: 149664 - DNA, 831 bp, Homo sapiens
cttcaaggaagtataggggatacaaagacaaaacatgtttgtgccagcaaagacctaatattaagggaaggtagcataaacaaaaacagttccttctttctcctgtagtgaccctttgtgatttgtaaagtatatatcttaataagatcctcaggggtctccaagttttcaaatgccatattctcatctgttacctcacccctccctcattaaatgctgtgaagtatgactgaaattgttatggactctttcagaagcttagttattaataaatacagagctaaaaatcaacagtaagatgcctgtaatgaattctgccactaagagaaaatgaatacaatctctttcttcacttctgaaataagattagctgtgatcttataggtgtctataaactcaaggtgatggtggtggttgcagaccatgacctgagccactacagaactggaagttgcacttctttacctcaaatttctggattcttgtatttctatattttgctttttttctaaatgacagataatgtataattgatagatagaatatgtgtagaataagtgccacattaacatggaaactatagaaatgtctgcattttacttggtttattttaccctcattttgttggagagaaaaagatacacattggtttcttcctatttttcccagctattgacctgaaaagtggttctggaaaagtgtaccaaggccctgcaaaaggtgctgctgatacaacaatcatactttcagatgaatatttcattggaggtggtcctgggcaagcttgaccctcagaaggcattctttagtggcaggctgaaggcagaggga

SEQ ID NO: 149665 - DNA, 2601 bp, Homo sapiens
atgggctcaccgctgaggttcgacgggcgggtggtactggtcaccggcgcgggggcaggattgggccgagcctatgccctggcttttgcagaaagaggagcgttagttgttgtgaatgatttgggaggggacttcaaaggagttggtaaaggctccttagctgctgataaggttgttgaagaaataagaaggagaggtggaaaagcagtggccaactatgattcagtggaagaaggagagaaggttgtgaagacagccctggatgcttttggaagaatagatgttgtggtcaacaatgctggaattctgagggatcgttcctttgctaggataagtgatgaagactgggatataatccacagagttcatttgcggggttcattccaagtgacacgggcagcatgggaacacatgaagaaacagaagtatggaaggattattatgacttcatcagcttcaggaatatatggcaactttggccaggccaattatagtgctgcaaagttgggtcttctgggccttgcaaattctcttgcaattgaaggcaggaaaagcaacattcattgtaacaccattgctcctaatgcgggatcacggatgactcagacagttatgcctgaagatcttgtggaagccctgaagccagagtatgtggcacctcttgtcctttggctttgtcacgagagttgtgaggagaatggtggcttgtttgaggttggagcaggatggattggaaaattacgctgggagcggactcttggagctattgtaagacaaaagaatcacccaatgactcctgaggcagtcaaggctaactggaagaagatctgtgactttgagaatgccagcaagcctcagagtatccaagaatcaactggcagtataattgaagttctgagtaaaatagattcagaaggaggagtttcagcaaatcatactagtcgtgcaacgtctacagcaacatcaggatttgctggagctattggccagaaactccctccattttcttatgcttatacggaactggaagctattatgtatgcccttggagtgggagcgtcaatcaaggatccaaaagatttgaaatttatttatgaaggaagttctgatttctcctgtttgcccaccttcggagttatcataggtcagaaatctatgatgggtggaggattagcagaaattcctggactttcaatcaactttgcaaaggttcttcatggagagcagtacttagagttatataaaccacttcccagagcaggaaaattaaaatgtgaagcagttgttgctgatgtcctagataaaggatccggtgtagtgattattatggatgtctattcttattctgagaaggaacttatatgccacaatcagttctctctctttcttgttggctctggaggctttggtggaaaacggacatcagacaaagtcaaggtagctgtagccatacctaatagacctcctgatgctgtacttacagataccacctctcttaatcaggctgctttgtaccgcctcagtggagactggaatcccttacacattgatcctaactttgctagtctagcaggttttgacaagcccatattacatggattatgtacatttggattttctgccaggcgtgtgttacagcagtttgcagataatgatgtgtcaagattcaaggcaattaaggctcgttttgcaaaaccagtatatccaggacaaactctacaaactgagatgtggaaggaaggaaacagaattcattttcaaaccaagggtccaagaaactggagacattgtcatttcaaatgcatatgtggatcttgcaccaaccatcgggtactcaagctaagacaccctctgagggcgggaaagcttcagattacctttgtatttgaggaaaataggacccccgcctaaaggatattgggcctgtgggtggtgaaagaaagtaaatgctgtatttgagtggcatataaccaaaggcggaaatattggggctaagtggactattgacctgaaaagtggttctggaaaagtgtaccaggggccctgcaaagggtgctgctgataccaccattcattactttcagatgaagattttcatgggaggtggtcctggggcaagcttgaccctccaggaaggcattctttagtgggcaggcttgaaggccaggaggggaacatcatgctgagcccagaaacttcagatgattcttcaaagactacgccaagctctgaagggcacactacactattaataaaaatggaatcattaaaatactctcttcacccaaatatggcttggattattctgccaaaagttgattaagaactaaagatgcagggggaattgcttaacattttcagatatcagaaaactgccgaatttccattttccactaatttttcatggtatcattatttttacaaagggaactatatataagctagcacataattatccttctgttcttagatctgtatcttcataataaaaaaattttgcccaagtcctgtttccttagaatttgtgatagcattgataagttgaaaggaaaattaaatcaataaaggcctttgatacctttaaaaaaaaaaaaaaaaaaa

SEQ ID NO: 149666 - DNA, 7452 bp, Homo sapiens
atggtcttgcttctttgtctatcttgtctgattttctcctgtctgaccttttcctggttaaaaatctgggagaaaatgacggactccaagccgatcaccaagagtaaatcagaagcaaacctcatcccgagccaggagccctttccagcctctgataactcaggggagacaccgcagagaaatggggagggccacactctgcacaaagacacccagccaggccgagcccagcctcccacaaaggcccaaagatccggtcggcggagaaactccctaccaccctcccgccagaagcccccaagaaaccccctttcttccagtgacgcagcaccctccccagagcttcaagccaacgggactgggacacaaggtctggaggccacagataccaatggcctgtcctcctcagccaggccccagggcagcaagctggtcccctccaaagaagacaagaagcaggcaaacatcaagaggcagctgatgaccaacttcatcctgggctcttttgatgactactcctccgacgaggactctgttgctggctcatctcgtgagtctacccggaagggcagccgggccagcttgggggccctgtccctggaggcttatctgaccacaggtgaagctgagacccgcgtccccactatgaggccgagcatgtcgggactccacctggtgaagaggggacgggaacacaagaagctggacctgcacagagactttaccgtggcttctcccgctgagtttgtcacacgctttgggggggatcgggtcatcgagaaggtgcttattgccaacaacgggattgccgctgtgaagtgcatgcgctccatccgcaggtgggcctatgagatgttccgcaacgagcgggccatccggtttgttcgcatggtgacccccgaggaccttaaggccaacgcagagtacatcaagatggcggatcattacgggcccgccccaggagggcccaataacaacaactatgccaacgtggagctgattgtggacattgccaagagaatcccgttgcaggcggtgtgggctggctggggccatgctttagaaaaccctaaacttccggagctgctgtgcaagaatggagttgctttcttaggccctcccaggttgaggccaatggtgggtctaggagataagatcgcctccaccgttgtcgcccagacgctacaggtcccaaccctgcccaggagtggaagcgccctgacagtggagtggacagaagatgatctgcagcagggaaaaagaatcagtgtcccagaagatgtttatgacaagggttgcgtgaaagacgtagatgagggcttggaggcagcagaaagaattggttttccattgatgatcaaagcttctgaaggtggcggagggaagggaatccgggaaactgagagtgcggaggacttcccgatccttttcagacaagtacagagtgagatcccaggctcgcccatctttctcatgaagctggcccagcacgcccgtcacctggaagttcagatcctcgctgaccagtatgggaatgctgtgtctctgtttggtcgcgactgctccatccagcggcggcatcagaagatcgttgaggaagcaccggccaccatcgcgccgctggccatattcgagttcatggagcagtgtgccattcgcctggccaagaccgtgggctatgtgagtgcagggacagtggaatacctctatagtcaggatggtagcttccacttcttggagctgaatcctcgcttgcaggtggaacatccctgcacagaaatgattgctgacgttaatctgccggccgcccagctacagatcgccatgggtgccccactgcaccggctgaaagatatccggcttctgtatggagagtcaccctggggagactccccaatttcttttgaaaactcagctcatctcccctgcccccgaggccacgtcattgccaccagaatcaccagcgaaaacccagacgagggttttaagccgagctccgggactgtccaggaactgaatttccggagcagcaagaacgtctggggttacttcacggtggccgctactggaggcctgcacgagtttgcgatttcccagtttgggcactgcttctcctggggagagaaccggaaagaggccatttcgaacatggtggtggctttgaaggaactgtccctccgaggcgactttaggactaccgtggaatacctcattaacctcctggagaccgagagcttccagaacaactacatcgacaccgggtggttggactacctcattgctgagaaagtgcaaaagaaaccgaatatcatgcttggggtggtatgcggggcccttgaacgtggagatgcgatgttcagaacgtgcatgacagatttcttacactccctggaaaggggccaggtcctcccagcggattcactactgaacctcgtagatgtggaattaatttacgagggtgtaaagtacattctaaaggtgacccggcagtctctgaccatgttcgttctcatcatgaatggctgccacatcgagattgatgcccaccggctgaatgatggggggctcctgctctcctacaatgggaacagctacaccacctacatgaaggaagaggttgacagttaccgtaccatcggcaataagacgtgtgtttttgagaaggagaacgatcctacagtcctgagatccccctcggctgggaagctgacacagatcacagtggaggatgggggccacgttgaggctgggagacgctacgctgagatggaggtgatgaagatgatcatgaccctgaacgttcaggaaagaggccgggtgaagtacatcaagcgtccaggtgcggtgctggaagcaggctgcgtggtggccaggctggagctcgatgacccttctaaagtccacccggctgaaccgttcacaggagaactccctgcccagcagaacactgccgacctcggaaagaaactgcacagggtcttccacagcgtcctgggaagcctcaccaacgtcatgagtggcttttgtctgccagagccgttttttagcataaagctgaaggagtgggtgcagaagctcatgatgaccctccggcacccgtcactgctgctggacgtgcaggagatcatgaccagtcgtgcaggccgcatccccccccctgttgagaagtctgtccgcaaggtgatggcccagtatgccagcaacatcacctcggtgctgtgccagttccccagccagcagatagccaccatcctggactgccatgcagccaccctgcagcggaaggctgatcgagaggtcttcttcatcaacacccagagcatggtgcagttggtccagaggtaccgaagtggaatccgcggtcatatgaaaacagtggtgatcgatctcttgagaagatacttgcgtgttgagaccattttcggcaaggcaagagatgctgatgccaactccagtgggatggtggggggcgtgaggagcctgagctttacctctgtgtgggtggttttgtctcccccagcccactacgacaagtgtgtgataaacctcagggaacagttcaagccagacatgtcccaggtgctggactgcatcttctcccacgcacaggtgaccaagaagaaccagctggtgatcatgttgatcgatgagctgtgtggcccagacccttccctgtcggacgagctgatctccatcctcaacgagctcactcagctgagcaaaagcgagcactgcaaagtggccctcagagcccggcagatcctgatcgcctccccctcctacgagctgcggcataaccaggtggagtccattttcctgtctgccattgacatgtacggccaccagttctgccccgagaacctccagaaattaatactttcggaaacaaccatcttcgacgtcctgaatactttcttctatcacgcaaacaaagtcgtgtgcatggcgtccttggaggtttacgtggggggggcttacatcgcctatgtgttaaacagcctgcagcaccggcagctcccggacggcacctgcgtggtagaattccagttcatgctgccgtcctcccacccaaaccggatgaccgtgcccatcagcatcaccaaccctgacctgctgaggcacacgacagagctcttcatggacagcggcttctccccactgtgccagcgcatgggagccatggtagccttcaggagattcgaggacttcaccagaaattttgatgaagtcatctcttgcttcgccaacgtgccgaaagacccccccctcttcagcgaggcccgcacctccctatactccgaggatgactgcaagagcctcagagaagagcccatccacattctgaatgtgtccatccagtgtgcggaccacctggaggatgaggcactggtgccgattttacgtacattcgtacagtccaagaaaaatatccttgtggattatggactccgacgaatcccattcttgattgcccaagagaaagaatttcccaagtttttcacattcagagcaagagatgagtttgcagaagatcgcatttaccgtcacttggaacctgccctggctttccagctggaactcaaccggatgcgtaacttcgatctgaccgccgtgccctgtgccaaccacaagatgcacctttacctgggtgctgccaaggtggaaggaaggtatgaagtgacggaccataggttcttcatccgtgccatcatcaggcactctgacctgatcacaaaggaagcctccttcgaatacctgcagaacgagggtgagcggctgctcctggaggccatggacgagctggaggtggcgttcaataacaccaacgtgcgcaccgactgcaaccacatcttcctcaacttcgtgcccactgtcatcatggaccccaacaagatcgaggagtccgtgcgctacatggttatgcgctacggcagccggctgtggaaactccgtgtgctacaggctgaggtcaagatcaacatccgccagaccaccaccggcagtgccgttcccatccgcctgttcatcaccaatgagtcgggctactacctggacatcagcctctacaaagaagtgactgactccagatctggaaatatcatgtttcactccttcggcaacaagcaagggccccagcacgggatgctgatcaatactccctacgtcaccaaggatctgctccaggccaagcgattccaggcccagaccctgggaaccacctacatctatgacttcccggaaatgttcaggcaggctctctttaaactgtggggctccccagacaagtatcccaaagacatcctgacatacactgaattagtgttggactctcagggccagctggtggagatgaaccgacttcctggtggaaatgaggtgggcatggtggccttcaaaatgaggtttaagacccaggagtacccggaaggacgggatgtgatcgtcatcggcaatgacatcacctttcgcattggatcctttggccctggagaggaccttctgtacctgcgggcatccgagatggcccgggcagaggcgattcccaaaatttacgtggcagccaacagtggcgcccgtattggcatggcagaggagatcaaacacatgttccacgtggcttgggtggacccagaagacccccacaaaggatttaaatacctgtacctgactccccaagactacaccagaatcagctccctgaactccgtccactgtaaacacatcgaggaaggaggagagtccagatacatgatcacggatatcatcgggaaggatgatggcttgggcgtggagaatctgaggggctcaggcatgattgctggggagtcctctctggcttacgaagagatcgtcaccattagcttggtgacctgccgagccattgggattggggcctacttggtgaggctgggccagcgagtgatccaggtggagaattcccacatcatcctcacaggagcaagtgctctcaacaaggtcctgggaagagaggtctacacatccaacaaccagctgggtggcgttcagatcatgcattacaatggtgtctcccacatcaccgtgccagatgactttgagggggtttataccatcctggagtggctgtcctatatgccaaaggataatcacagccctgtccctatcatcacacccactgaccccattgacagagaaattgaattcctcccatccagagctccctacgacccccggtggatgcttgcaggaaggcctcacccaactctgaagggaacgtggcagagcggattctttgaccacggcagtttcaaggaaatcatggcaccctgggcgcagaccgtggtgacaggacgagcaaggcttggggggattcccgtgggagtgattgctgtggagacacggactgtggaggtggcagtccctgcagaccctgccaacctggattctgaggccaagataattcagcaggcaggacaggtgtggttcccagactcagcctacaaaaccgcccaggccatcaaggacttcaaccgggagaagttgcccctgatgatctttgccaactggagggggttctccggtggcatgaaagacatgtatgaccaggtgctgaagtttggagcctacatcgtggacggccttagacaatacaaacagcccatcctgatctatatccgccctatgcgggagctccggggaggctcctgggtggtcatagatgccaccatcaacccgctgtgcatagaaatgtatgcagacaaagagagcaggggtggtgttctggaaccagaggggacagtggagattaagttccgaaaggaagatctgataaagtccatgagaaggatcgatccagcttacaagaagctcatggaacagctaggggaacctgatctctccgacaaggaccgaaaggacctggagggccggctaaaggctcgcgaggacctgctgctccccatctaccaccaggtggcggtgcagttcgccgacttccatgacacacccggccggatgctggagaagggcgtcatatctgacatcctggagtggaagaccgcacgcaccttcctgtattggcgtctgcgccgcctcctcctggaggaccaggtcaagcaggagatcctgcaggccagcggggagctgagtcacgtgcatatccagtccatgctgcgtcgctggttcgtggagacggagggggctgtcaaggcctacttgtgggacaacaaccaggtggttgtgcagtggctggaacagcactggcaggcaggggatggcccgcgctccaccatccgtgagaacatcacgtacctgaagcacgactctgtcctcaagaccatccgaggcctggttgaagaaaaccccgaggtggccgtggactgtgtgatatacctgagccagcacatcagcccagctgagcgggcgcaggtcgttcacctgctgtctaccatggacagcccggcctccacctga

SEQ ID NO: 149667 - DNA, 7461 bp, Homo sapiens
atgacggactccaagccgatcaccaagagtaaatcagaagcaaacctcatcccgagccaggagccctttccagcctctgataactcaggggagacaccgcagagaaatggggagggccacactctgcccaagacacccagccaggccgagccagcctcccacaaaggccccaaagatgccggtcggcggagaaactccctaccaccctcccaccagaagcccccaagaaaccccctttcttccagtgacgcagcaccctccccagagcttcaagccaacgggactgggacacaaggtctggaggccacagataccaatggcctgtcctcctcagccaggccccagggccagcaagctggctccccctccaaagaagacaagaagcaggcaaacatcaagaggcagctgatgaccaacttcatcctgggctcttttgatgactactcctccgacgaggactctgttgctggctcatctcgtgagtctacccggaagggcagccgggccagcttgggggccctgtccctggaggcttatctgaccacagagcttttggctttggattttggcatctttgggatccgtggtagcctggtgtttgctggttacccattgactcttttgcacacatacaggcagggtagtaatacctcttccctggtgttcacagggttgggatcaggcttcattgagttgctgggctgtccacttcgaccccaacagaaggcagcagttcaaaggccgagcatgtcgggactccacctggtgaagaggggacgggaacacaagaagctggacctgcacagagactttaccgtggcttctcccgctgagtttgtcacacgctttgggggggatcgggtcatcgagaaggtgcttattgccaacaacgggattgccgccgtgaagtgcatgcgctccatccgcaggtgggcctatgagatgttccgcaacgagcgggccatccggtttgttgtgatggtgacccccgaggaccttaaggccaacgcagagtacatcaagatggcggatcattacgtccccgtcccaggagggcccaataacaacaactatgccaacgtggagctgattgtggacattgccaagagaatccccgtgcaggcggtgtgggctggctggggccatgcttcagaaaaccctaaacttccggagctgctgtgcaagaatggagttgctttcttaggccctcccagtgaggccatgtgggccttaggagataagatcgcctccaccgttgtcgcccagacgctacaggtcccaaccctgccctggagtggaagcggcctgacagtggagtggacagaagatgatctgcagcagggaaaaagaatcagtgtcccagaagatgtttatgacaagggttgcgtgaaagacgtagatgagggcttggaggcagcagaaagaattggttttccattgatgatcaaagcttctgaaggtggcggagggaagggaatccggaaggctgagagtgcggaggacttcccgatccttttcagacaagtacagagtgagatcccaggctcgcccatctttctcatgaagctggcccagcacgcccgtcacctggaagttcagatcctcgctgaccagtatgggaatgctgtgtctctgtttggtcgcgactgctccatccagcggcggcatcagaagatcgttgaggaagcaccggccaccatcgccccgctggccatattcgagttcatggagcagtgtgccatccgcctggccaagaccgtgggctatgtgagtgcagggacagtggaatacctctatagtcaggatggcagcttccacttcttggagctgaatcctcgcttgcaggtggaacatccctgcacagaaatgattgctgatgttaatctgccggccgcccagctacagggttttaagccgagctccgggactgtccaggaactgaatttccggagcagcaagaacgtgtggggttacttcagcgtggccgctactggaggcctgcacgagtttgcggattcccaatttgggcactgcttctcctggggagagaaccgggaagaggccatttcgaacatggtggtggctttgaaggaactgtccatccgaggcgactttaggactaccgtggaatacctcattaacctcctggagaccgagagcttccagaacaacgacatcgacaccgggtggttggactacctcattgctgagaaagtgcaggcggagaaaccggatatcatgcttggggtggtatgcggggccttgaacgtggccgatgcgatgttcagaacgtgcatgacagatttcttacactccctggaaaggggccaggtcctcccagcggattcactactgaacctcgtagatgtggaattaatttacggaggtgttaagtacattctcaaggtggcccggcagtctctgaccatgttcgttctcatcatgaatggctgccacatcgagattgatgcccaccggctgaatgatggggggctcctgctctcctacaatgggaacagctacaccacctacatgaaggaagaggttgacagttaccgaattaccatcggcaataagacgtgtgtgtttgagaaggagaacgatcctacagtcctgagatccccctcggctgggaagctgacacagtacacagtggaggatgggggccacgttgaggctgggagcagctacgctgagatggaggtgatgaagatgatcatgaccctgaacgttcaggaaagaggccgggtgaagtacatcaagcgtccaggtgccgtgctggaagcaggctgcgtggtggccaggctggagctcgatgacccttctaaagtccacccggctgaaccgttcacaggagaactccctgcccagcagacactgcccatcctcggagagaaactgcaccaggtcttccacagcgtcctggaaaacctcaccaacgtcatgagtggcttttgtctgccagagcccgtttttagcataaagctgaaggagtgggtgcagaagctcatgatgaccctccggcacccgtcactgccgctgctggagctgcaggagatcatgaccagcgtggcaggccgcatccccgcccctgtggagaagtctgtccgcagggtgatggcccagtatgccagcaacatcacctcggtgctgtgccagttccccagccagcagatagccaccatcctggactgccatgcagccaccctgcagcggaaggctgatcgagaggtcttcttcatcaacacccagagcatcgtgcagttggtccagagcctggggacagagcaagaccttgtcttttatgaaaaagaaaaaaggaatcaaagcattcttggatttgaaccagtaaattccaggcatgtttcccatgtgccagaaactcacaggtacaaagaatcccactacgacaagtgtgtgataaacctcagggagcagttcaagccagacatgtcccaggtgctggactgcatcttctcccacgcacaggtggccaagaagaaccagctggtgatcatgttgatcgatgagctgtgtggcccagacccttccctgtcggacgagctgatctccatcctcaacgagctcactcagctgagcaaaagcgagcactgcaaagtggccctcagagcccggcagatcctgattgcctcccacctcccctcctacgagctgcggcataaccaggtggagtccattttcctgtctgccattgacatgtacggccaccagttctgccccgagaacctcaagaaattaatactttcggaaacaaccatcttcgacgtcctgcctactttcttctatcacgcaaacaaagtcgtgtgcatggcgtccttggaggtttacgtgcggaggggctacatcgcctatgagttaaacagcctgcagcaccggcagctcccggacggcacctgcgtggtagaattccagttcatgctgccgtcctcccacccaaaccggatgaccgtgcccatcagcatcaccaaccctgacctgctgaggcacagcacagagctcttcatggacagcggcttctccccactgtgccagcgcatgggagccatggtagccttcaggagattcgaggacttcaccagaaattttgatgaagtcatctcttgcttcgccaacgtgcccaaagacacccccctcttcagcgaggcccgcacctccctatactccgaggatgactgcaagagcctcagagaagagcccatccacattctgaatgtgtccatccagtgtgcagaccacctggaggatgaggcactggtgccgattttacggacattcgtacagtccaagaaaaatatccttgtggattatggactccgacgaatcacattcttgattgcccaagagtttgcagaagatcgcatttaccgtcacttggaacctgccctggccttccagctggaacttaaccggatgcgtaacttcgatctgaccgccgtgccctgtgccaaccacaagatgcacctttacctgggtgctgccaaggtgaaggaaggtgtggaagtgacggaccataggttcttcatccgcgccatcatcaggcactctgacctgatcacaaaggaagcctccttcgaatacctgcagaacgagggtgagcggctgctcctggaggccatggacgagctggaggtggcgttcaataacaccagcgtgcgcaccgactgcaaccacatcttcctcaacttcgtgcccactgtcatcatggaccccttcaagatcgaggagtccgtgcgctacatggttatgcgctacggcagccggctgtggaaactccgtgtgctacaggctgaggtcaagatcaacatccgccagaccaccaccggcagtgccgttcccatccgcctgttcatcaccaatgagtcgggctactacctggacatcagcctctacaaagaagtgactgactccagatctggaaatatcatgtttcactccttcggcaacaagcaagggccccagcacgggatgctgatcaatactccctacgtcaccaaggatctgctccaggccaagcgattccaggcccagaccctgggaaccacctacatctatgacttcccggaaatgttcaggcaggcaagtccggcggctcagacgcgggtacatgtgcacaatgtgcaggctctctttaaactgtggggctccccagacaagtatcccaaagacatcctgacatacactgaattagtgttggactctcagggccagctggtggagatgaaccgacttcctggtggaaatgaggtgggcatggtggccttcaaaatgaggtttaagacccaggagtacccggaaggacgggatgtgatcgtcatcggcaatgacatcacctttcgcattggatcctttggccctggagaggaccttctgtacctgcgggcatccgagatggcccgggcagagggcattcccaaaatttacgtggcagccaacagtggcgcccgtattggcatggcagaggagatcaaacacatgttccacgtggcttgggtggacccagaagacccccacaaaaaaaaaaaaacagtggctttcagtgcagggaactggattcgtagcctcactaaagtattttttaagggatttaaatacctgtacctgactccccaagactacaccagaatcagctccctgaactccgtccactgtaaacacatcgaggaaggaggagagtccagatacatgatcacggatatcatcgggaaggatgatggcttgggcgtggagaatctgaggggctcaggcatgattgctggggagtcctctctggcttacgaagagatcgtcaccattagcttggtgacctgccgagccattgggattggggcctacttggtgaggctgggccagcgagtgatccaggtggagaattcccacatcatcctcacaggagcaagtgctctcaacaaggtggtagagccctgcaccgtgcaggacattgctaaccatgttgtgtcaaagcaggtcctgggaagagaggtctacacatccaacaaccagctgggtggcgttcagatcatgcattacaatggtgtctcccacatcaccgtgccagatgactttgagggggtttataccatcctggagtggctgtcctatatgccaaaggataatcacagccctgtccctatcatcacacccactgaccccattgacagagaaattgaattcctcccatccagagctccctacgacccccggtggatgcttgcaggaaggcctcacccaactctgaagggaacgtggcagagcggattctttgaccacggcagtttcaaggaaatcatggcaccctgggcgcagaccgtggtgacaggacgagcaaggcttggggggattcccgtgggagtgattgctgtggagacacggactgtggaggtggcagtccctgcagaccctgccaacctggattctgaggccaagataattcagcaggcaggacaggtgtggttcccagactcagcctacaaaaccgcccaggccgtcaaggacttcaaccgggagaagttgcccctgatgatctttgccaactggagggggttctccggtggcatgaaagacatgtatgaccaggtgctgaagtttggagcctacatcgtggacggccttagacaatacaaacagcccatcctgatctatatcccgccctatgcggagctccggggaggctcctgggtggtcatagatgccaccatcaacccgctgtgcatagaaatgtatgcagacaaagagagcaggggtggtgttctggaaccagaggggacagtggagattaagttccgaaagaaagatctgataaagtccatgagaaggatcgatccagcttacaagaagctcatggaacagctaggggaacctgatctctccgacaaggaccgaaaggacctggagggccggctaaaggctcgcgaggacctgctgctccccatctaccaccaggtggcggtgcagttcgccgacttccatgacacacccggccggatgctggagaagggcgtcatatctgacatcctggagtggaagaccgcacgcaccttcctgtattggcgtctgcgccgcctcctcctggaggaccaggtcaagcaggagatcctgcaggccagcggggagctgagtcacgtgcatatccagtccatgctgcgtcgctggttcgtggagacggagggggctgtcaaggcctacttgtgggacaacaaccaggtggttgtgcagtggctggaacagcactggcaggcaggggatggcccgcgctccaccatccgtgagaacatcacgtacctgaagcacgactctgtcctcaagaccatccgaggcctggttgaagaaaaccccgaggtggccgtggactgtgtgatatacctgagccagcacatcagcccagctgagcgggcgcaggtcgttcacctgctgtctaccatggacagcccggcctccacctga

SEQ ID NO: 149668 - DNA, 906 bp, Homo sapiens
attaagagcagcctgcccttctccccagataccgcagcgggatccgcggctatatgaaaacagtggtgttggatctcctgagaagatacttgcgtgttgagcaccattttcagcaaggcaagagatgctgatgccaacaccagtgggatggtggggggcgtgaggagcctgagctttacctctgtgtggtgttttgtctcccccagcccactacgacaagtgtgtgataaacctcagggagcagttcaagccagacatgtcccaggtgctggactgcatcttctcccacgcacaggtggccaagaagaaccagctggtgatcatgttgatcgatgagctgtgtggcccagacccttccctgtcggacgagctgatctccatcctcaacgagctcactcagctgagcaaaagcgagcactgcaaagtggccctcagagcccggcagatcctgattgcctcccacctcccctcctacgagctgcggcataaccaggtggagtccattttcctgtctgccattgacatgtacggccaccagttctgccccgagaacctcaagaaattaatactttcggaaacaaccatcttcgacgtcctgcctactttcttctatcacgcaaacaaagtcgtgtgcatggcgtccttggaggtttacgtgcggaggggctacatcgcctatgagttaaacagcctgcagcaccggcagctcccggacggcacctgcgtggtagaattccagttcatgctgccgtcctcccacccaaaccggatgaccgtgcccatcagcatcaccaaccctgacctgctgaggcacagcacagagctcttcatggacagcggcttctccccactgtgccagcgcatgggagccatggtagccttcaggagattcgaggacttcaccag

SEQ ID NO: 149669 - DNA, 560 bp, Homo sapiens
agcgcctcgcctggatgtgagtttcagccagatcattcatcgagatataaaacctgagaatattttagtatcccagtcaggaattactaagctctgtgattttggttttgcacgaacactagcagctcctggggacatttatacggactatgtggccacacgctgacctgtggatatctgggctttgggctgtatgatcattgagatggccactggaaatccctatcttcctagtagttctgatttggatttactccataaaattgttttgaaagtgggcaatttgtcacctcacttgcagaatatcttttccaagagccccatttttgctggggtagttcttcctcaagttcaacaccccaaaaatgcaagaaaaaaatatccaaagcttaatggattgttggcagatatagttcatgcttggttacaaattgatcctgctgacaggatatcatctagtgatcttttgcatcatgagtattttactagagatggatttatttgaaaattcatgccagaactgaaagcttaattactgcaggaagccaaaagtcaattct

SEQ ID NO: 149670 - DNA, 576 bp, Homo sapiens
atggagatgtatgaaacccttggaaaagtgggagagggaagttacggaacagtcatgaaatgtaaacataagaatactgggcagatagtggccattaagatattttatgagagaccagaacaatctgtcaacaaaattgcgatgagagaaataaagtttctaaagcaatttcatcacgaaaacctggtcaatctgattgaagtttttagacagaaaaagaaaattcatttggtatttgaatttattgaccacacagtattagatgagttacaacattattgtcatggactagagagtaagcgacttagaaaatacctcttccagatccttcgagcaattgactatcttcacagtaataatatcattcatcgagatataaaacctgagaatattttagtatcccagtcaggaattactaagctctgtgattttggttttgcacgaacactagcagctcctggggacatttatacggactatgtggccacacgctggtatagagctcccgaattagtattaaaagatacttcttatggaaagtatgggcaggacctctctggaatgaaggtcttatga

SEQ ID NO: 149671 - DNA, 1023 bp, Homo sapiens
aaacctggtcaatctgattgaagtttttagacagaaaaagaaaattcatttggtatttgaatttattgaccacacagtattagatgagttacaacattattgtcatggactagagagtaagcgacttagaaaatacctcttccagatccttcgagcaattgactatcttcacagtaataatacctgtggatatctgggctttgggctgtatgatcattgagatggccactggaaatccctatcttcctagtagttctgatttggatttactccataaaattgttttgaaagtgggcaatttgtcacctcacttgcagaatatcttttccaagagccccatttttgctggggtagttcttcctcaagttcaacaccccaaaaatgcaagaaaaaaatatccaaagcttaatggattgttggcagatatagttcatgaaatagaaaaagagaaaaagcccaaggagatcaaagtcagagttattaaagtcaaaggaggaagaggagatatctcagaaccaaaaaagaaagagtatgaaggtggacttggtcaacaggatgcaaatgaaaatgttcatcctacgtctccagatacaaaacttgtaaccattgaaccaccaaaccctatcaatcccagcactaactgtaatggcttgaaagaaaatccacattgcggaggttctgtgacaatgccacccatcaatctaactaacagtaatttgatggctgcaaatctcagttcaaatctcttttcaccccagtgtgaggtgagctgtaacagagaagaaccctaaataatcccacattcctgtataatggtatttcaaagaatcgtgttcatagtgtctgtatgtaaactgaacttgaagaaaatatattgaaattaaagctgtataatgggccatttactgagtgtttcttatggatgctgtagaagaaattaacttttcttggccatatagatgtttaaattttcactaatgtcttcttgaaaaaccttattaaaaaaaaagaccctttgaaaaa

SEQ ID NO: 149672 - DNA, 541 bp, Homo sapiens
ggacgtacggtcctgctagtagaggaatatgtcgagtttctctagggcgccccagatgggaaaatgcagccacctggaaacttgctgctatggcatctataagacttcagggattacataaacctgtgtaccatgcactgagtgactgtggggatcatgttgttataatgaacaccagacacattgcattttctggaaacaaatgggaacaaaaagtatactcttcgcatactggctacccaggtggatttagacaagtaacagctgctcagcttcacctgagggatccagtggcaattgtaaaactagctatttatggcatgctgcaaaaaaccttcacagaagaacaatgatggaaaggttgcatctttttccagatgagtatattccagaagatattcttaagaatttagtagaggagcttcctcaaccacgaaaaatacctaaacgtctagatgagtacacacaagaagaaatagacgccttcccaagattgtggactccacctgaagattatcggctataagagaataagaattgc

SEQ ID NO: 149673 - DNA, 454 bp, Homo sapiens
tactcttcgcatactggctacccaggtggatttagacaagtaacagctgctcagcttcacctgagggatccagtggcaattgtaaaactagctatttatggcatgctgccaaaaaaccttcacagaagaacaatgatggaaaggttgcatctttttccagatgagacctgaagattatcggctataagagaataagaattgcagaaaataacagtgaagtgattgaaactttcttctgatgagtttctctaacctacaggatggagtaaaacaactgctacagttcagcacctgttttatgtgccgaatcactgtggggaaaggtcaggaaggtgtagtccttcaataggaaattgtaattaaaatataattttatagaaccatttttatgtaatttgatttgaatgttatagttgataataataaaatcacttacttggttgaaaaaaaaaaa

SEQ ID NO: 149674 - DNA, 921 bp, Homo sapiens
  misc_feature (1)...(921): n = a,t,c or g
ggctgagtgacccggcgtggctactaggagaaggacggtacggtccgtgctagtagagggaatatgtcgagtttctctagggcgccccagcaatgggccacttttgctattaatatggtatctcttagatgggaaaatgcagccacctggcaaactttgctgctattgcatctataagacttcagggattacataaacctgttgtaccatgcacctgagtgactcgtggggatcatgttgttataatgaacacaagacacatttgcattttcctggaaacaaatggggaacaaaaagtatactcttccgcatactggcttacccagggtggagtttagacaaggtaaccagcctggctccagctttcaccctgaggngatcccagtgggcaatttgtaaaacctagctatttatggcattcctgccaaaaaaaccttcacaagaagaacaattgattggaaagggttgcatcctttttccagatgagttatattccagaaagatattccttaagaaatttagttaggaggagcttccctcaaccacggaaaaatacctaaacgtcttagatgagtacactacaagaagaaatagacgccttttcaagattgtggactccaccctgaagattatcggctataagagaataagaattgcagaaaataacagtgaagtgattgaaacttttcttctgatgagtttctctaacctacaggatggagtaaaacaactgctacagttcgagcacctgtttttatgtgccgaatcactgtggggaaaggtcaggaaggtgtagtccttcaataggaaattgtaattaaaatataattttatagaaccatttttatgtaatctgatttgaatgttatagttgataataataaaatcacttacttggttgactaaaaaaaaaaaaaaaaa

SEQ ID NO: 149675 - DNA, 350 bp, Homo sapiens
gctgctgtgtatgaggtcctggctctgccatcactgtggggccccaacccctacagcccagaggaaccacaggcttccagttcctagcccaggtctgagcattgtcatggggctgcgtccagtcccctcccctggacccacagggctcccaggtcataggcaaagctctgagatgagacccagggaagctgggagtctgaggagctcgggagagaaagggctccctgctcctgtgccccgcccccaacagagtgacatgacgaaaaggacccttcctcgggataccccagacacacccagatgcccacctcaacactgcccgtggagcagggtgaggggacagcctcagc

SEQ ID NO: 149676 - DNA, 2178 bp, Homo sapiens; identical to SEQ ID NO: 146528

SEQ ID NO: 149677 - DNA, 190 bp, Homo sapiens
gaaagaactacagagggacgatgtccaaacaaaaaatggcatcacctgtcaaaaatggagttccacttctccccgcagacctagataaagaaatgggggctcagagcagtcaagaagaacatgccccaagttattcgtcagtgaggcggaaattgtggtgtccttgtgtaagttcacagtttatacttta

SEQ ID NO: 149678 - DNA, 661 bp, Homo sapiens
tcttctacttcttttatttctgaaatcaggccacggagagcctctggattactatgtatatgcccagggggcttcactgttcagtgtcactaacaagcacctgggggcaggaagcacagaagaatgcgcctcccaatgtgtggaggacaaagaattcacctgcggggcattccaatatcacagtaaagagcaacaatgtgcgataatggctgaaaacaagaagtcctccataatcattaggatgagagatgtagttttatttgaaaagtaaatgtatctttcagagtgccagactgggaatggaaagaactacagagggacgatgtccaaaacaaaaaatggcatcacctgttcaaaaatgggagttccactttttccccacagacctagattctcacctgctacacacccctcagagggactggaggaatccagacaacgatgcgcaggggccctggtgttatactactgattccagaacagagatatgactactgcgacattcctgagtgtgaagggcaggagtgggctctaggaaaatgttttcatttctgctcttcacctgtaaaaattaatttgttgtaaagccccttcccacagggatattattaataattggcgtaacgtgtttccaccttttcgggaaagggtgtcagaaact

SEQ ID NO: 149679 - DNA, 4759 bp, Homo sapiens
  misc_feature (1)...(4759): n = a,t,c or g
ttttttaactaggcattcttctatgttctaggtcttcaagaaacctgcatacccaagaaaaaatagaaagcaaccatgttctactatggtgacaaaaatagttgaacatcgacatcaaaaagattctttctgtctgcttatttacatattctggtttgaattaaaagtgatgaaattatcctaaatacagttggccctctgtatccatgggttccacatcaacaaattcaaccaactgtggatggaaaagacttgaaaaagatgagagaaaataacaatatgacaataaaacataatacaaataaaaacaatacagtataacaacgattacatagcatttacattatattagggattgcacaagagaaggtatgtaggttatatgcaaatactgcaccattttacataagggacttgagaagcatggaattttggttagcccacaggggtcctggaacccaatccctcacagacacagagggacaactttacagtagatgaacacaaagatgaaagggaaagtcttacctaggtctgcgggggagaagtggaactcccatttttgacaaggtgatgccattttttgttttggacatcgtccctctgtagttctttccattcccaagtcttgcactctgaaagatacatttacttttcaaataaaactgcatctctcatcctaatgattatgggaggacttcctgttttcagccattatcacacattgttgctctttactgtgatattgggaatgccctgcagggnggaattctttgtcctcttcacattttgctgcacattcttctctgcttcctgcccccagctgcttcttagtgacactgaacagtgaaggcccctgggtattcacatagtcatccaggggctctccttgacctagaggtgggagatccaaatggaacaaatgctcagttaatcaaatgttttcttcttcctctctgtccttccttcccactctgtccagaggaatgtatgcattgcagtggagaaaactatgacggcaaaatttccaagaccatgtctggactggaatgccaggcctgggactctcagagcccacacgctcatggatacattccttccaaatttccaaacaagaacctgaagaagaattactgtcgtaaccccgatagggagctgcggccttggtgtttcaccaccgaccccaacaagcgctgggaactttgtgacatcccccgctgcacaacacctccaccatcttctggtcccacctaccagtgtctgaagggaacaggtgaaaactatcgcgggaatgtggctgttaccgtgtccgggcacacctgtcagcactggagtgcacagacccctcacacacataacaggacaccagaaaacttcccctgcaaaaatttggatgaaaactactgccgcaatcctgacggaaaaagggccccatggtgccatacaaccaacagccaagtgcggtgggagtactgtaagataccgtcctgtgactcctccccagtatccacggaacaattggctcccacagcaccacctgagctaacccctgtggtccaggactgctaccatggtgatggacagagctaccgaggcacatcctccaccaccaccacaggaaagaagtgtcagtcttggtcatctatgacaccacaccggcaccagaagaccccagaaaactacccaaatgctggcctgacaatgaactactgcaggaatccagatgccgataaaggcccctggtgttttaccacagaccccagcgtcaggtgggagtactgcaacctgaaaaaatgctcaggaacagaagcgagtgttgtagcacctccgcctgttgtcctgcttccagatgtagagactccttccgaagaagactgtatgtttgggaatgggaaaggataccgaggcaagagggcgaccactgttactgggacgccatgccaggactgggctgcccaggagccccatagacacagcattttcactccagagacaaatccacgggcgggtctggaaaaaaatgctacagagtgcggtggcgccagcacagagctctgctcaacgtccctctgtgctttcacgatgctgatggattatgaaggtcaaggagagcctctggatgactatgtgaatacccagggggcttcactgttcagtgtcactaagaagcagctgggagcaggaagtatagaagaatgtgcagcaaaatgtgaggagggccgaagaattcacctgcagggcattcccaatatcacagtaaagagcaacaatgtgtgataatggctgaaaacaggaagtcctcccataatcattaggatgagagatgtagttttatttgaaaagaaagtgtagtctctcagagtgcaagactgggaatggaaagaattacagagggacgatgtccaaaacaaaaaatggcatcacctgtcaaaaatggagttccacttctccccacacgacctagattctcacctgctacacacccctcagagggactggaggagaactactgcaggaatccagacaacgatccgcaggggccctgggtgctatactacttgatccagaaaagagatatgactacttgcgacattctttgagtgttgaaggagggaatgtatggcatttgcagtgggaggaaaactattgacgggcaaaattttcccaaggaccatgtcttgggactgggaatgccagggcttggggactcttcaggagcccacacggttcatggatacattccttccaaatttccaaacaagaacctgaagaagaattactgtcgtaaccccgatagggagctgcggccttggtgtttcaccaccgaccccaacaagcgctgggaactttgtgacatcccccgctgcacaacacctccaccatcttctggtcccacctaccagtgtctgaagggaacaggtgaaaactatcgcgggaatgtggctgttaccgtgtccgggcacacctgtcagcactggagtgcacagacccctcacacacataacaggacaccagaaaacttcccctgcaaaaatttggatgaaaactactgccgcaatcctgacggaaaaagggccccatggtgccatacaaccaacagccaagtgcggtgggagtactgtaagataccgtcctgtgactcctccccagtatccacggaacaattggctcccacagcaccacctgagctaacccctgtggtccaggactgctaccatggtgatggacagagctaccgaggcacatcctccaccaccaccacaggaaagaagtgtcagtcttggtcatctatgacaccacaccggcaccagaagaccccagaaaactacccaaatgctggcctgacaatgaactactgcaggaatccagatgccgataaaggcccctggtgttttaccacagaccccagcgtcaggtgggagtactgcaacctgaaaaaatgctcaggaacagaagcgagtgttgtagcacctccgcctgttgtcctgcttccagatgtagagactccttccgaagaagactgtatgtttgggaatgggaaaggataccgaggcaagagggcgaccactgttactgggacgccatgccaggactgggctgcccaggagccccatagacacagcattttcactccagagacaaatccacgggcgggtctggaaaaaaattactgccgtaaccctgatggtgatgtaggtggtccctggtgctacacgacaaatccaagaaaactttacgactactgtgatgtccctcagtgtgcggccccttcatttgattgtgggaagcctcaagtggagccgaagaaatgtcctggaagggttgtaggggggtgtgtggcccacccacattcctggccctggcaagtcagtcttagaacaaggtttggaatgcacttctgtggaggcaccttgatatccccagagtgggtgttgactgctgcccactgcttggagaagtccccaaggccttcatcctacaaggtcatcctgggtgcacaccaagaagtgaatctcgaaccgcatgttcaggaaatagaagtgtctaggctgttcttggagcccacacgaaaagatattgccttgctaaagctaagcagtcctgccgtcatcactgacaaagtaatcccagcttgtctgccatccccaaattatgtggtcgctgaccggaccgaatgtttcgtcactggctggggagaaacccaaggtacttttggagctggccttctcaaggaagcccagctccctgtgattgagaataaagtgtgcaatcgctatgagtttctgaatggaagagtccaatccaccgaactctgtgctgggcatttggccggaggcactgacagttgccagggtgacagtggaggtcctctggtttgcttcgagaaggacaaatacattttacaaggagtcacttcttggggtcttggctgtgcacgccccaataagcctggtgtctatgttcgtgtttcaaggtttgttacttggattgagggagtgatgagaaataattaattggacgggagacagagtgacgcactgactcacctagaggctgggacgtgggtagggatttagcatgctggaaataactggcagtaatcaaacgaagacactgtccccagctaccagctacgccaaacctcggcattttttgtgttattttctgactgctggattctgtagtaaggtgacatagctatgacatttgttaaaaataaactctgtacttaactttgatttgagtaaattttggtttt

SEQ ID NO: 149680 - DNA, 306 bp, Homo sapiens
  misc_feature (1)...(306): n = a,t,c or g
cgtagtaattttacagattatctttgggatttaagtgtgactggtttaccatggagaagagagttgaagcttgaagagaggtaccgtgacatggcagaagaaaatttgaagaaagatatcagtatatctttaaaattattataggtgagaatcagaacatttgggatataaacatttggtctannnnnnnnnnnnnnnnnnnnnnnnnnnnnnnnnnnnnnnnnnnnnnnnnnnnnnnnnnnnnnnnnnnnnnnnnnnnnnnnnnnnnnnnnnnnnnatgtgcctttaagatcatcttggggtagt

SEQ ID NO: 149681 - DNA, 360 bp, Homo sapiens
  misc_feature (1)...(360): n = a,t,c or g
gtcaaactaaacctaaggaaagcagaaaacggataataataatgtttagaacagtaatttaatgaaacagagaacagaatagagggnnnnnnnnnnnnnnnnnnnnnnnnnnnnnnnnnnnnnnnnnnnnnnntacaaatgtttagctagattgactaagggaagaaaagaagattcaaattattatagttaggagtgaaagaaaggaaattattactaactacagaataaaaaggattacaaaaggatattatgagttattgtatgccaaccaattatatcacttgatgaaatgtccaaaattcctagaaagacacaaattgttgaaactgactcaagaagaaacaaaatctggggtga

SEQ ID NO: 149682 - DNA, 329 bp, Homo sapiens
  misc_feature (1)...(329): n = a,t,c or g
caaaaaagagaaaagaagaagaagnnnnnnnnnnnnnnnnnnnnnnnnnnnntggaagaagaaggaaagaggaagaggagaagcaggagaagatcaaggnnnnnnnnnnnnnnnnnnnnnnnnnnnggaggaagaaggagaagaaagaggagaagaaggaagaagaaggagaaggaagaagaaaaagaggaaggagaagaggnnnnnnnnnnnnnnnnnnnnnnnnnnncgaaggaggagaggaggaagaagaggaaggaagaagaaaggagaagaagaaaagaagaaaaggaagaagaaggagaagaagccgagaagaaggagacgag

SEQ ID NO: 149683 - DNA, 245 bp, Homo sapiens
gcggccgcctactactactatacggctgcgagaagacgacagaagggggagaggaggaagaagaggaaggaagaagaaaggagaagaagaaaagaagaaaaggaagaagaaggagaagaagaagagaagaaggagaggaggaagaagaactaagaaggaagagaagaaggagaaggagaagaaaaggagaactaagaaggaaaaaaaaaaaaaaaaaaaaaaaaaaaaaaaagtcgtatcgatgt

SEQ ID NO: 149684 - DNA, 246 bp, Homo sapiens
  misc_feature (1)...(246): n = a,t,c or g
aataagttagttnnnnnnnnnnnnnnnnnnnnnnnnnnnnnnnnnnnnnnnnnnnnnnnnnnnnnnntcaatggcattccttacaacaatagaagatacagccctaaaattcatacagaaccacaaaaggccccaaatagcaaataccaatcttgagtaagaatagagctgaaagtatcacactttttaattccaaaatacattacatgcctacagtaatcaaaccattacgagtcacgtccacct

SEQ ID NO: 149685 - DNA, 364 bp, Homo sapiens
  misc_feature (1)...(364): n = a,t,c or g
ntacatccatagttgctgctcagatgtttaatgttatcacagttatgcaggtaagaatatctcctcaacatatgacttcaatgtggccaataatggtctgtgaattaagtcaaacattcacacagcttgaagaagatgtaaaagataaagttgagtcattgagaagcaccaacaaagttaacagaaccaaagtttcagtcacggatgcaaatggaccctcagtggggtacataccccagagtgaactcatgtatgtatttatcagcttgcaaattcttggacgcagcgctttctattccacattacaagataccattatttaaaatttataggtgggcatttattccagaagtggacacagagg

SEQ ID NO: 149686 - DNA, 1315 bp, Homo sapiens
  misc_feature (1)...(1315): n = a,t,c or g
gggaaaagatgctaagattctctgctccaatccaaacacaggagaggtgttatatgaacttcccaccaacacacagnggtgcttcgatattcagtggtgtccccgaaatcctgctgtcttatcagctgcttcgtttgntgggcgtatcagtgtttattctatcatgggaggaagcacagatggtttaagacagaaacaagttgacaagctttcatcatcttttgggaatcttgatccctttggcacaggacagccccttcctccgttacaaattccacagcagactgctcagcatagtatagtgctgcctctgaagaagccgcccaagtggattcgaaggcctgttggtgcttctttttcatttggaggcaaactggttacgtttggagaatgtcagaatgccttctcatcagggagctgagcagcagcagcagcagcaccatgtgttcattagtcaggttgtaacagaaaaggagttcctcagccgatcagaccaacttcagnaggctgtgcagtcacaaggatttatcaattattgncaaaaaaaaattgatgcttctcagactgaattggagaaaaatgtgtggncctttttgnnggtaanctttgaggatgattctcgtggaaaataccttgaacttctaggatacagaaaagaagatctaggaaagaagattgctttggccttgaacaaagtggatggagccaatgtggctcttaaagactctgaccaagtatcacatcaccaatcatgaacccgntgggtgacccccagtcacaaatgctgnagcaacagcctncagctccagtaccactgncaagccagtcttcattcccacagacacatcttccaggtggacagcccttccatggngtacagcaacctcttggtcaaacaggcatgcccccatctttttcanagcccaatattgaaggtgccccaggggctcctattggaaataccttccagcatgtgcagtctttggcaacaaaaaaaattaccaagaaacctattccagatgagcacctcattctaaagaccacatttgaggatcttattcagcgctgcctttcttcagcaacagaccctcaaaccaagaggaagctagatgatgccagcaaacgtttggagtttctgtatgataaacttagggaacagacactttcaccaacaatcaccagtggtttacacaacattgcaaggagcattgaaactcgaaactactcagaaggattgaccatgcatacccacatagttagcaccagcaacttcagtgagacctctgctttcatgccagttctcaaagttgtctca

SEQ ID NO: 149687 - DNA, 4012 bp, Homo sapiens
gacgagcgctgcactaacgcaggatccggctgccgaaggtcctcgccagcaggatgaagttaaaggaagtagatcgtacagccatgcaggcatggagccctgcccagaatcaccccatttacctagcaacaggaacatctgctcagcaattggatgcaacatttagtacgaatgcttcccttgagatatttgaattagacctctctgatccatccttggatatgaaatcttgtgccacattctcctcttctcacaggtaccacaagttgatttgggggccttataaaatggattccaaaggagatgtctctggagttctgattgcaggtggtgaaaatggaaatattattctctatgatccttctaaaattatagctggagacaaggaagttgtgattgcccagaatgacaagcatactggcccagtgagagccttggatgtgaacattttccagactaatctggtagcttctggtgctaatgaatctgaaatctacatatgggatctaaataattttgcaaccccaatgacaccaggagccaaaacacagccgccagaagatatcagctgcattgcatggaacagacaagttcagcatattttagcatcagccagtcccagtggccgggccactgtatgggatcttagagaaaatgagccaatcatcaaagtcagtgaccatagtaacagaatgcattgttctgggttggcatggcatcctgatgttgctactcagatggtccttgcctccgaggatgaccggttaccagtgatccagatgtgggatcttcgatttgcttcctctccacttcgtgtcctggaaaaccatgccagggggattttggcaattgcttggagcatggcagatcctgaattgttactgagctgtggaaaagatgctaagattctctgctccaatccaaacacaggagaggtgttatatgaacttcccaccaacacacagtggtgcttcgatattcagtggtgtccccgaaatcctgctgtcttatcagctgcttcgtttgatgggcgtatcagtgtttattctatcatgggaggaagcacagatggtttaagacagaaacaagttgacaagctttcatcatcttttgggaatcttgatccctttggcacaggacagccccttcctccgttacaaattccacagcagactgctcagcatagtatagtgctgcctctgaagaagccgcccaagtggattcgaaggcctgttggtgcttctttttcatttggaggcaaactggttacgtttgagaatgtcagaatgccttctcatcagggagctgagcagcagcagcagcagcaccatgtgttcattagtcaggttgtaacagaaaaggagttcctcagccgatcagaccaacttcagcaggctgtgcagtcacaaggatttatcaattattgccaaaaaaaaattgatgcttctcagactgaatttgagaaaaatgtgtggtcctttttgaaggtaaactttgaggatgattctcgtggaaaataccttgaacttctaggatacagaaaagaagatctaggaaagaagcacattaaagaggaaaaagaagaatctgaatttctaccctcatctggaggaacatttaatatctctgtcagtggggacattgatggtttaattactcaggctttgctgacgggcaattttgagagtgctgttgacctttgtttacatgataaccgcatggccgatgccattatattggccatagcaggtggacaagaactcttggctcgaacccagaaaaaatacttcgcaaaatcccaaagcaaaattaccaggctcatcactgcagtggtgatgaagaactggaaagagattgttgagtcttgtgatcttaaaaattggagagaggctttagctgcagtattgacttatgcaaagccggatgaattttcagccctttgtgatcttttgggaaccaggcttgaaaatgaaggagatagcctcctgcagactcaagcatgtctctgctatatttgtgcagggaatgtagagaaattagttgcatgttggactaaagctcaagatggaagccaccctttgtcacttcaggatctgattgagaaagttgtcatcctgcgaaaagctgtgcaactcactcaagccatggacactagtactgtaggagttctcttggctgcgaagatgagtcagtatgccaatttgttggcagctcagggcagtattgctgcagccttggcttttcttcctgacaacaccaaccagccaaatatcatgcagcttcgtgacagactttgtagagcacaaggagagcctgtagcaggacatgaatcacctaaaattccgtacgagaaacagcagctccccaagggcaggcctggaccagttgctggccaccaccagatgccaagagttcaaactcaacaatattatccccatggagaaaatcctccacctccgggtttcataatgcatggaaatgttaatccaaatgcttctggtcagcttcccacatctccaggtcatatgcacacccaggtaccaccttatccacagccacagccttatcaaccagcccagccgtatcccttcggaacaggggggtcagcaatgtatcgacctcagcagcctgttgctcctcctacttcaaacgcttaccctaacaccccttacatatcttctgcttcttcctatactgggcagtctcagctgtacgcagcacagcaccaggcctcttcacctacctccagccctgctacttctttccctcctcccccttcctctggagcatccttccagcatggcggaccaggagctccaccatcatcttcagcttatgcactgcctcctggaacaacaggtacactgcctgctgccagtgagctgcctgcgtcccaaagaacaggtcctcagaatggttggaatgaccctccagctttgaacagagtacccaaaaagaagaagatgcctgaaaacttcatgcctcctgttcccatcacatcaccaatcatgaacccgttgggtgacccccagtcacaaatgctgcagcaacagccttcagctccagtaccactgtcaagccagtcttcattcccacagccacatcttccaggtggccagcccttccatggcgtacagcaacctcttggtcaaacaggcatgccaccatctttttcaaagcccaatattgaaggtgccccaggggctcctattggaaataccttccagcatgtgcagtctttgccaacaaaaaaaattaccaagaaacctattccagatgagcacctcattctaaagaccacatttgaggatcttattcagcgctgcctttcttcagcaacagaccctcaaaccaagaggaagctagatgatgccagcaaacgtttggagtttctgtatgataaacttagggaacagacactttcaccaacaatcaccagtggtttacacaacattgcaaggagcattgaaactcgaaactactcagaaggattgaccatgcatacccacatagttagcaccagcaacttcagtgagacctctgctttcatgccagttctcaaagttgttctcacccaggccaataagctgggtgtctaaaaggacagcttctcttccactcaatattgccatttttccaaagaaacatgttaaaaaaaaaaattataagacatggactagtcctcattagcatgtttgcatagcaaccagtcaagagcatttacactatttctgctgatatactcaccttagaactgctcagaaccctggtgctttatttttgttttaatcttttgttgccagtgatgattttcctattctgcaaatagtgtatttcctggattacacatagtatggtttcctgaagtattctgataaatgtgtttttttaaaacctcaatatactttttagaaaaggagcatctggttatgcataaagcagagctaaaactaaatttctttcatgtcctccctacttcctcagtgtcaatcagattaaagtgtgtaatcct

SEQ ID NO: 149688 - DNA, 480 bp, Homo sapiens
atctttgaaagtcatacaccagtataaataaaaacttcaccaccctaaatttagcacactcttttactttaaatggaaacagtgtcaagatatcttacctaccaagtgaagaccttgttcctattaagagatgtgagtgtgagaatccagggctacatagtgatccccacactcggctggtaaaacctttgtgacagttatttcagggttaaggcagaattttgaagtattaggtgatcgattcagttttattttttttcctttcaggattctaaaggaaaacattctctggtatctgttataggtcctcagaatggttggaatgaccctccagctttgaacagagtacccaaaaagaagaagatgcctgaaaacttcatgcctcctgttcccatcacatcaccaatcatgaacccgttgggtgacccccagtcacaaatgctgcagcaacagccttcagctgccagtaccactgtcaag

SEQ ID NO: 149689 - DNA, 4473 bp, Homo sapiens
gcggaatagtgggttttgctgcaaccggtttattttccttctgttttcacccattctggcacaatctggcgccatcgtccttcttgtgaggccaagcctgaaaatgcgaagcagagaggcaggaccaaaattgaggcgaatccaggaacctgccaatgggtctccgggtgcggtctctgaaactggaggatatcgggaggaaaggctctccgatgcggagataatggggaagctcttggcatggttggctgtaggtatgtgataccggaggagcaggagtcaaataggatacgccgacttttaattcaaggaacccttttctgaaacactttgccacaatgaaggaaataagattacagccgaagatacatattaaggatgaagttaaaggaagtagatcgtacagccatgcaggcatggagccctgcccagaatcaccccatttacctagcaacaggaacatctgctcagcaattggatgcaacatttagtacgaatgcttcccttgagatatttgaattagacctctctgatccatccttggatatgaaatcttgtgccacattctcctcttctcacaggtaccacaagttgatttgggggccttataaaatggattccaaaggagatgtctctggagttctgattgcaggtggtgaaaatggaaatattattctctatgatccttctaaaattatagctggagacaaggaagttgtgattgcccagaatgacaagcatactggcccagtgagagccttggatgtgaacattttccagactaatctggtagcttctggtgctaatgaatctgaaatctacatatgggatctaaataattttgcaaccccaatgacaccaggagccaaaacacagccgccagaagatatcagctgcattgcatggaacagacaagttcagcatattttagcatcagccagtcccagtggccgggccactgtatgggatcttaggaaaaatgagccaatcatcaaagtcagtgaccatagtaacagaatgcattgttctgggttggcatggcatcctgatgttgctactcagatggtccttgcctccgaggatgaccggttaccagtgatccagatgtgggatcttcgatttgcttcctctccacttcgtgtcctggaaaaccatgccagggggattttggcaattgcttggagcatggcagatcctgaattgttactgagctgtggaaaagatgctaagattctctgctccaatccaaacacaggagaggtgttatatgaacttcccaccaacacacagtggtgcttcgatattcagtggtgtccccgaaatcctgctgtcttatcagctgcttcgtttgatgggcgtatcagtgtttattctatcatgggaggaagcacagatggtttaagacagaaacaagttgacaagctttcatcatcttttgggaatcttgatccctttggcacaggacagccccttcctccgttacaaattccacagcagactgctcagcatagtatagtgctgcctctgaagaagccgcccaagtggattcgaaggcctgttggtgcttctttttcatttggaggcaaactggttacgtttgagaatgtcagaatgccttctcatcagggagctgagcagcagcagcagcagcaccatgtgttcattagtcaggttgtaacagaaaaggagttcctcagccgatcagaccaacttcagcaggctgtgcagtcacaaggatttatcaattattgccaaaaaaaaattgatgcttctcagactgaatttgagaaaaatgtgtggtcctttttgaaggtaaactttgaggatgattctcgtggaaaataccttgaacttctaggatacagaaaagaagatctaggaaagaagattgctttggccttgaacaaagtggatggagccaatgtggctcttaaagactctgaccaagtagcacagagtgatggggaggagagccctgctgctgaagagcagctcttgggagagcacattaaagaggaaaaagaagaatctgaatttctaccctcatctggaggaacatttaatatctctgtcagtggggacattgatggtttaattactcaggctttgctgacgggcaattttgagagtgctgttgacctttgtttacatgataaccgcatggccgatgccattatattggccatagcaggtggacaagaactcttggctcgaacccagaaaaaatacttcgcaaaatcccaaagcaaaattaccaggctcatcactgcagtggtgatgaagaactggaaagagattgttgagtcttgtgatcttaaaaattggagagaggctttagctgcagtattgacttatgcaaagccggatgaattttcagccctttgtgatcttttgggaaccaggcttgaaaatgaaggagatagcctcctgcagactcaagcatgtctctgctatatttgtgcagggaatgtagagaaattagttgcatgttggactaaagctcaagatggaagccaccctttgtcacttcaggatctgattgagaaagttgtcatcctgcgaaaagctgtgcaactcactcaagccatggacactagtactgtaggagttctcttggctgcgaagatgagtcagtatgccaatttgttggcagctcagggcagtattgctgcagccttggcttttcttcctgacaacaccaaccagccaaatatcatgcagcttcgtgacagactttgtagagcacaaggagagcctgtagcaggacatgaatcacctaaaattccgtacgagaaacagcagctccccaagggcaggcctggaccagttgctggccaccaccagatgccaagagttcaaactcaacaatattatccccatggagaaaatcctccacctccgggtttcataatgcatggaaatgttaatccaaatgctgctggtcagcttcccacatctccaggtcatatgcacacccaggtaccaccttatccacagccacagccttatcaaccagcccagccgtatcccttcggaacaggggggtcagcaatgtatcgacctcagcagcctgttgctcctcctacttcaaacgcttaccctaacaccccttacatatcttctgcttcttcctatactgggcagtctcagctgtacgcagcacagcaccaggcctcttcacctacctccagccctgctacttctttccctcctcccccttcctctggagcatccttccagcatggcggaccaggagctccaccatcatcttcagcttatgcactgcctcctggaacaacaggtacactgcctgctgccagtgagctgcctgcgtcccaaagaacaggtcctcagaatgggttggaatgaccctccagctttggaccaaagtacccaaaaagaagaagatgcctgaaaacttcaatgcctcctgttcccatcacatcaccaatcatgaaccggttgggtgacccccagtcacaaatgctgcagcaacagcctttcagctccagtaccactgtcaagccagtcttcattcccacagccacatcttccaggtgggccagccctttccatggggttacagcaaaccttttgggttcaaacagggcatggcaaccatcttttttcaaagccccaatattgaaggtgccccaggggctcctattgggaaataccttccagcatgtgcagtcttttgccaacaaaaaaaattaccaagaaacctatttccagatggagcacctcattctaaagaccacatttgaggatcttattcagcgctgcctttcttcagcaacagaccctcaaaccaagaggaagctagatgatgccagcaaacgtttggagtttctgtatgataaacttaggggaccgaaccttttcaccaacaatcaccagtggtttacacaacattgcaaggagcattgaaactcgaaactactcagaaggattgaccatgcatacccacatagttagcaccagcaacttcagtgagacctctgctttcatgccagttctcaaagttgttctcacccaggccaataagctgggtgtctaaaaggacagcttctcttccactcaatattgccatttttccaaagaaacatgttaaaaaaaaaaattataagacatggactagtcctcattagcatgtttgcatagcaaccagtcaagagcatttacactatttctgctgatatactcaccttagaactgctcagaaccctggtgctttatttttgttttaatcttttgttgccagtgatgattttcctattctgcaaatagtgtatttcctggattacacatagtatggtttcctgaagtattctgataaatgtgtttttttaaaacctcaatatactttttagaaaaggagcatctggttatgcataaagcagagctaaaactaaatttctttcatgtcctccctacttcctcagtgtcaatcagattaaagtgtgtaatcct

SEQ ID NO: 149690 - DNA, 592 bp, Homo sapiens
gcactctccctcaggcacaaaagctgactgatgatcagggccccgtcctgatgtccactgtagccatgcctgtgtttagtaagcagaacgaaaccagatcgaagggcattcttctgggagtggttggcacagatgtcccagtgaaagaacttctgaagaccatccccaaatacaagttagggattcacggttatgcctttgcaatcacaaataatggatatatcctgacgcatccggaactcaggctgctgtacgaagaaggaaaaaagcgaaggaaacctaacctatagtagcgttgacctctcctgaggtggagtgggaagacccgagatgaccgtgttgagaaatgctatggtgaatcgaaaagaccggggaagttttccatggaggtgaagaagacagtggacaaagggaaacgggttttggtgatgacaaatgactactattatacagacatccaagggtactcctttcagtttagggtgtggcgcttttccagaggtcatgggaaatatttcttcccgagggaatgtaacccatccgaagaaggcctgcatgacttagaacatcccgatgtgtcctttggcagatg

SEQ ID NO: 149691 - DNA, 419 bp, Homo sapiens
agttttgtagtcatctgatgtggttagagaataggccaattatggagagtggtaccagataataagctgtggccacgttgtgaaggcccttctaggatatgctagtaagtgatatgataagatctgtgttttaccacccccaaagctggcagaagacaagaaataaccaaaatcagagctgaactgaataaagttgaggtgcaagaaaccatacaaaagatcagtgaaaagagaagttggttatttaatataataaataagattgctagactgctaactagactaatacagaaaaaagatccaaataaacacagtcagaaatgacaaaggggacattaccacctaccccacagaaatacaaaaaaccctcagagactattatgaacacctctatgcatgtagggtagaaaacctacaat

SEQ ID NO: 149692 - DNA, 279 bp, Homo sapiens
  misc_feature (1)...(279): n = a,t,c or g
acaatggactcgaacaacactgtagaaccagttggaccttaacagacatatacagaacactccacctaacatcagcagnatacacattcttttcaagtgcacatagattatgctcaaggatagagcttacggttaagccataaaacaagtctcaacaaatttaagaagattgtaatcataccaggtatcttctgtgaccaaaatggaatccagccagaaatcaatagtggaaggaaaatgagaagagtctcaaatgtatggaaattaaacaacatacta

SEQ ID NO: 149693 - DNA, 279 bp, Homo sapiens; identical to SEQ ID NO: 149692
  misc_feature (1)...(279): n = a,t,c or g

SEQ ID NO: 149694 - DNA, 2077 bp, Homo sapiens
  misc_feature (1)...(2077): n = a,t,c or g
atggccatcctcccgttgctcctgtgcctgctgccgctggcccctgcctcatccccaccccagtcagccacacccagcccatgtccccgccgctgccgctgccagacacagtcgctgcccctaagcgtgctgtgcccaggggcaggcctcctgttcgtgccaccctcgctgggaccgccgggcagccgagctgcggctggcagacaacttcatcgcctccgtgcgccgccgcgacctggccaacatgacaggcctgctgcatctgagcctgtcgcggaacaccatccgccacgtggctgccggcgccttcgccgacctgcgggccctgcgtgccctgcacctggatggcaaccggctgacctcactgggcgagggccagctgcgcggcctggtcaacttgcgccacctcatcctcagcaacaaccagctggcagcgctggcggccggcgccctggatgattgtgccgagacgctggaggacctcgacctctcctacaacaacctcgagcagctgccctgggaggcccttggccggcttgggcaacgtcaacacgttgggcctcgaccacaacctgctggcttctgtgcccgccggcgctttttccccgcctgcacaagctggcccggctggacatgacctccaaccgcctgaccacaatcccacccgacccactcttctcccgcctgcccctgctcgccaggccccggggctcgcccgcctctgccctggtgctggcctttggcgggaaccccctgcactgcaactgcgagctggtgtggctgcgtcgcctggcgcgggaggacgacctcgaggcctgcgcgtccccacctgctctgggcggccgctacttctgggcggtgggcgaggaggagtttgtctgcgagccgcccgtggtgactcaccgctcaccacctctggctgtgcccgcaggtcggccggctgccctgcgctgccgggcagtgggggacccagagccccgtgtgcgttgggtgtcaccccagggccggctgctaggcaactcaagccgtgcccgcgccttccccaatgggacgctggagctgctggtcaccgagccgggtgatggtggcatcttcacctgcattgcggccaatgcagctggcgaggccacagctgctgtggagctgactgtgggtcccccaccacctcctcagctagccaacagcaccagctgtgaccccccgcgggacgggganttcctgatgctctcaccccaccctccgctgcctctgcttctgccaaggtggccgacactgggccccctaccgaccgtggcgtccaggttgactgagcacggggccacagctgctcttgtccagtggccggatcagcggcctatcccgggcatccgcatgtaccagatccagtaccaacagctcggctgatgacatcctcgtctacaggatgatcccggcggagagccgctcgttcctgctgacggacctggcgtcaggccggacctacgatctgtgcgtgctcgccgtgtatgaggacagcgccacggggctcacggccacgcggcctgtgggctgcgcccgcttctccaccgaaccctgcgctgcggccatgcggggcgccgcacgctcccttcctgggcggcacgatgatcatcgcgctgggcggcgtcatcgtagcctcggtactggtcttcatcttcgtgctgctaatgcgctacaaggtgcacggcggccagccccccggcaaggccaagattcccgcgcctgttagcagcgtttgctcccagaccaaccggcgccctgggccccacgcccacgcccgccccgcccgccccggagcccgcggcgctcagggcccacaccgtggtccagctggactgccgagccctgggggcccggccacgaacctgtgggaccctagccaggcgcccccccctctaagggtcctctggccccacggacagcaggacccggacaccctgtgggacctggcctcaaactcaccaaatcgctcatggtttttaaaactctgatggggagggtgtcggggacaccggggcaaaacaagaaagtcctatttttccaaaaaaaaaaaaaaaaa

SEQ ID NO: 149695 - DNA, 1567 bp, Homo sapiens
ttttgaaaggctctaggcaaaatggtctgggtttatttttttctatagtaatttcagattatccatcattcactgtaataagataccatttcagtggtggagttgcatagtcttttatttttctaaagatgaccattccatgtttaatgtcttcagagaagatctaaaaatcaaagttaacaacccatttgtcccaactctaactcttcctgggaacaattcctcattctgttacttgatttcttcctttaccacccacataaaatatgtcttactgctcacaagatcaaaagaaaacagaacaaaacattgaaacatcagaattgtttaaaaacactaggatttcattcaatggtccaattggacacttgctcattgggaacttatttctgcttcagctctaggttctttgaggaaacacaaggaattccttttcacccaaaatattaggcctggacacaagaatgttgaaaggttaagctggccttagctttattgctgcctataatctccaaagatatctgaacaccctaggaagattaaatgtagccaagaagtgggaagagaaacacagctttataagtcatcttaataactataattgcatagaatttactcacgttttcaaatacttattctgaatgaataccaaatttgtgaaacaaaatatattctatgggtgcttagaatgggtggtaaatgttgaggtagttttccaagtaaaaactttacgtgcattaacagaggggaatgcataataatcctatgaggtaggccctattatcctcattgaatagaagagaaaaggaggctcaaaaaaattaagtaacccacaaaaagtcacacagctgtgactgtcagtgtcctgctgggcactgcaaactaggccacttttaaagtaagatcattttaaattgagtactcttacttacaaaatgaacacattaatgtgataattgacaaaatatttcagatgcttggacttttaggaagtttaaggaaaacccaagattaaggattccagattcaggtaactctctttatcttttttttagacaggggtctcactttgtcagccagtacagtggcgtgatctcagttcactgcaacctctgcttcccaggttcaggtgatcctctgacctcagcttcctgagtagctgggaccacaagtgcatgccatcacgcctggctaattttttttttttttttagagacagggtttcaccatgttggccaggctggtctcaaatcctgagttcaggcgatccgcccacctctgcctcccagagttctgagattacatgcgtgagccactgtgccaggcattaggtccctttcaaattcaagatattcctaatttttctggtctactattgcagggtaagggaagaatcttcttcctctttttttttttttttttttttttgagaccgtgtctcagtctgtcgcccaggctggagtgcagtggcgccatctcggctcaccgaaacctctgcctcccaggttcaagcgactctcccgcctcagtctcccaagcagctgagaccacaggcacctgccaccat

SEQ ID NO: 149696 - DNA, 408 bp, Homo sapiens
cggcacgagcggtcacgagagtcagagggttttaatttacttgtgaagttcacactattgaaactaattgcaatgcttgactttattttctttagagtccaagaaagagaaaaacaaggcatagcacaaatccccctctagagtgtcatgttggttgggtaatggattccagagaccatgggccaggaacatcctctgtcagcacttcaaatgcttcaccttcagaaggcgcaccactagcaggaaggtatggatgtactcctcattacattcccaaagttccagaatccttctcatgaacttttgaaggaaaatggctttacccaacaagtgtaccacaagtatcgtcgaagatgcctaagtgagagaaaacgcttgggaattggtcagtcccaagaaatgaatacc

SEQ ID NO: 149697 - DNA, 665 bp, Homo sapiens
  misc_feature (1)...(665): n = a,t,c or g
ggaaatattcttactgtgagggagaaaaatcagaagataaactataaagaaagactttatttgcaaatatacccatttactttaaactgtataatggttagttttctaacatgtgcattaaaaacaaaacaagaaacaactaagattcaaatttgttttttttttaactaaaattattttttaaatgaatagatgtgtttaaaaaataagcttacttattgctagactggcaaaatcccctactccatttactgaggtacttaaaaataactagcatgctgtatctctttttttcccagctttgtcttgaattggcattgccatccttgttttatctcaactggctgtagcttttagataaatntccattaagggntttaaccagttaacctcttaacattcattactgttttctagggggaaaatatttggtatttggtttttctgttgcagcaaataaaacctctggtgcaccaaggaaattcccctgtaagtgcaatccgtgcctttggtgatgcacaccctgacttagttactctctggcacatttactaccctattgttcaatggcacatgcacagctttgcttccatgggcaccgggatgctgtgaaattctttgtggcagtcccaggtcaagtcatcagcccacaaagtagcagtagt

SEQ ID NO: 149698 - DNA, 386 bp, Homo sapiens
  misc_feature (1)...(386): n = a,t,c or g
agaaacagtgaaaatatatttacagtcatttgaagtgggcactactaacatattttcactgtttctcaatgtatttaattcataaagtaaaaattttatgaaaagnnnnnnnnnnnnnnnnnnnnnnnntaaaaaaacatnnnnnnnnnnnnnnnnnnnnnnnnnnnnnnnnnnnnnnnnnnnntgggaggcttccaaaaaaaaacccaggggggcccaaatttctaacgcgatcactacctataaataccttcctaaagtaggggtcaataaattaccagaccgaggccctttataaaccaatccagacaggtaaaattggccatcccgtgttctttcaaaaacccccacttctcggagatggacaaaactatgacacaccccct

SEQ ID NO: 149699 - DNA, 2692 bp, Homo sapiens
ctcgatttgtgccgtcagtctaacaacctgtgcttgcaaagggaagaggatcttcagagaacaagagattaccatgactgtatgaatgttgttgaagtgttcctagaaaaatttactacagaatgggataacttggccagatctgatgcagagagtacagctgtccacctggaagctttgaaaaagttagcattggcattgcaggagagaaagtatgctattgaagatctgaaagatcaaaagcagaaaatgatagagcatctgaatttagatgacaaggagttagtcaaagaacagacgagtcatttagagcaacgttggtttcagcttgaggacctcattaaaaggaaaatccaagtgtcagtcaccaacttggaggagttaaatgtggtgcagtccagatttcaggagctaatggagtgggcagaagagcaacaacccaacatcgccgaggcccttaagcagagccctcctccagatatggctcagaaccttctcatggatcacctggccatctgcagtgaactggaggccaagcagatgctcctgaaatcgcttataaaggacgcagacagggtcatggcagatcttggtctcaatgagcgacaggtcatccagaaggctctctctgatgcacaaagccacgtgaattgtctcagtgacttagtgggccagcgaagaaagtacttaaacaaagccttgtccgagaaaacccagtttctcatggcagtgttccaggccaccagccaaattcagcaacatgagcgaaagataatgttccgtgaacacatctgtctgttaccagatgatgtgagcaaacaagtcaaaacatgtaagagtgcacaagccagcctcaagacttaccaaaatgaagtcactggactttgggcccagggtcgcgaactaatgaaggaagtcacagagcaggaaaagagtgaagtgctggggaagcttcaggaattgcagagtgtctatgacagtgttttacaaaagtgcagtcaccggttacaagaactagagaagaatttggtttctaggaagcattttaaggaagattttgataaagcttgccactggctaaaacaagcagatattgttacatttcctgaaatcaacctaatgaatgagagtactgagcttcatacacaactggctaaataccaaaacattcttgaacaatctccagaatatgaaaatcttctacttacgctgcagagaactgggcagaccatattaccatcgctgaatgaagtcgatcattcctacctcagtgaaaagctaaatgctttgcctcgacaatttaatgtaattgttgccttggctaaagacaagttctataaagtccaggaagcaattcttgctcggaaggaatatgcttccttgattgagttgacaacccagtctctcagtgaacttgaagcccaattcttgaggatgagcaaagttcccaccgacctggccgttgaggaggctctttctctgcaagatggttgcagagccattctggacgaggtggcgggccttggggaggcggtggatgaactgaaccagaaaaaagaaggttttcgcagcacaggtcagccttggcagccagacaagatgctgcaccttgtcaccttatatcacaggctgaagcgacaaacagaacagagggttagcttattagaagacaccaccagtgcttaccaagaacacgagaagatgtgccaacagctggagagacaactgaagtctgtaaaagaggagcagtccaaagtgaatgaggaaacgctgcctgcagaggagaagctcaaaatgtatcactccctggcaggaagtctccaggactcagggattgtactgaaacgagtaaccatacatcttgaagatcttgccccacaccttgaccccttggcttatgagaaagccaggcatcagatccagtcctggcaaggggagttaaaactgttgacttctgccattggtgagacggtgacagaatgtgagagccgaatggtgcagagtatagacttccagactgagatgagtcgctccctggactggctgaggagagtgaaggcagagctcagtgggccggtgtacctagacctcaacctgcaggacatccaagaggaaatcagaaaaatccaaattcatcaggaagaggtccagtccagcttgagaatcatgaatgcgctgagtcacaaggaaaaggagaagttcacaaaggccaaggagctgatttctgcggatttagaacacagcctcgctgagctctcagagctggatggagacatccaggaagccttacgcaccagacaggctaccttgactgaaatatatagccagtgtcaaagggtattatcaggtatttcaagcagccaatgactggcttgaggatgcccaagaaatgttacagctggcaggcaatggcctagacgtggagagcgcagaggaaaatctcaaaagccacatggaatttttcagtacagaggatcagttccatagtaacctggaggagctccacagcctggtagccaccctggacccactcatcaagccaaccggcaaagaagacctagaacagaaagtggcttctctggaactcaggagccagaggatgagccgggactctggtgcccaagtggatctcttgcagagatgcacagctcaatggcacgattaccagaaagcaagggaagaggttattgat

SEQ ID NO: 149700 - DNA, 343 bp, Homo sapiens
gcggaacaggcctgaaggccagaaaaagtgcctcttctctgcccgagacctttcccacgcgcacacgccatggggaagcagctcttcccctttccccgacgtggaagatgactgggccggtgggaaatcccatgattccccggcagcggtccatgtccctcctgacagcggtcagcggtcagcctcacttccaggactctgcattgtcccaagcctcctcctctccagaccttcttcgcacctctccccgcgattcttgtcctggtagggtccaggaaacgctgaaagctacggataggcccccacgttgccccgcagggtgcggatgaaatcgctgtcggag

SEQ ID NO: 149701 - DNA, 367 bp, Homo sapiens
  misc_feature (1)...(367): n = a,t,c or g
cccacgcgtccggaaaagcccaggacctaatggcttcactgccaatttctaccaaacatttaaagaattaatatcaatccttctcaaactattccnnnnnnnnnnnnnnntaaaaaagggggaaaaccctccaaactcattttatggggccataattccccggatcccaaacccaaacatggatttatcnnnnnnnnnncctacgggccagtatctgggagaaacatggaggcaaaaattttcaccaaatttttagcaggccattttaaacaatcctttgggagggaaatccatcatgaccaacgggaatttatccctggaatacagggagggttcaacattggcaattaattcaaggggacgggta

SEQ ID NO: 149702 - DNA, 353 bp, Homo sapiens
  misc_feature (1)...(353): n = a,t,c or g
cccacgcgtccggaaaagcccaggacctaatggcttcactgccaatttctaccaaacatttaaagaattaatatcaatccttctcaaactattccnnnnnnnnnnnnnnntaannnnnnnnnnnnnnnnnnnnnnnnnnnnnnnnnnnnnnnnnnnnnnnnnnnnnnnnnncccaaacatggatttatcnnnnnnnnnncctacgggccagtttcggggagaaacattgaggcaaaaattttcaccaaatttttaccaggccattttcaacaatcctttgggagggtaacccatcttgaccaacgggaattaatcctgggaaaccagggagggtccaccatatgcaaatcatc

SEQ ID NO: 149703 - DNA, 262 bp, Homo sapiens
cgagggagggctgggggtgaaccgcttcccgccaccaccggggccgccccgccgcccggccgccgcttgcatgtcagctccctgaccgcagaggcctggcctccatgccgcgggaagagaaagcttcattgaacgagccgggagggccagggagggggaggaggcgcggcagtgtccagctgcacggcgagggaggacccagaggaggagaggagggaactggccgggaggaatggaacgaaaaggcggagttcacgctgcc

SEQ ID NO: 149704 - DNA, 367 bp, Homo sapiens
  misc_feature (1)...(367): n = a,t,c or g
cgcggccgcgtcgaccccatgggaatgtgtctgttgtcatggcggaggtggacggcacctgctactgagccgcccgcctgtccccacccctgaataaactccatgctcccccaagcnnnnnnnnnnnnnnnnnnncccaaaaaaaagtcaacgggcccgaaattcccaaatttttaaacggaaaatcttgaaaacccccgagggtccctttaaatggggattgggcccccttttaattttttttatttaaaccatggtttgccctttttttaggaacttaacccccttaaagttaaaatttggcccttgaacccttggatttaaaaaatttttaaagggcctaaattaagggcccnnnnnnnnnngg

SEQ ID NO: 149705 - DNA, 347 bp, Homo sapiens
  misc_feature (1)...(347): n = a,t,c or g
gagaattgaaaacatacgttcatacaaaaactnnnnnnnnnnnnnnnnnnnnnnnnnnnnnnnnnnnnnnnnnnnnnnnnnnnnnnnnnnnnnnnnnnnnnnnnnnnnnnnnnnnnnnnnnnnnnnnnnnnnnnnnnnnnacnnnnnnnnnnnnnnnnnnnnggtcaaccggcccgaaattcccaaattttaaaatcgaaaatctggaaaacccccgagggttcttttaaatgggccttgggccccatttaaaatttttttatttaaaacatggtttgcctttttttaaggaactaaaccccctaaaagttaaaatttggcccaggaacccttggattaaaaaaatt

SEQ ID NO: 149706 - DNA, 931 bp, Homo sapiens
  misc_feature (1)...(931): n = a,t,c or g
gggcccttaatttaggccctttaaaaaatttataaatcccagggttcaagggccaaattttaaccttaagggggtttagttccttaaaaaaaggccaaaccatgttttaaataaaaaaatttaaaagggggcccaaggcccacttaaaggagcccttgggggttttaacaacttccgtatcaaaaatttcgaaatttcggccgcggatacctttttcnnnnnnnnnnnnnnnnnnnnnnnnnnnnnnnnnnnnnnnnnnnnnnnnnncagtcttggtggagttcacaatctatctcaaaaaacttgttaataacgttatgacaaagcacaatagggttatgttaagttatataactggactatgagagcaatgggaaggttggggaatatctgagaaaaggtgatgcctgaataaaagaggatttaagaaaacagtcttggaaaaagggcaccttgagccaaacatttaggcgtggtgctctggagaacagccccagaagtctagggtggagtttaagctacaagacattccatgttgtcttgtatcatatatacatatatatatataaaacacacacacacacacgtatttatatatatatacacatatacatatatacacacacatatatacacatatacatacatatgtatacacacacacatacatatatatatatatatatatatacacacacacttttttttttttttttttttttttgagacggagtctcgctcagttacccaggctggagtgcagtggcatgatctgggctcactgcaagccgcctcctggggtcacgccattctcctgcctcaacctcccaagcagctgggaccacaggtgcccaccaccacgcccagctattttttttttttttgtatttttagtagagacggggcctcaccgtgctagccaggatagtct

SEQ ID NO: 149707 - DNA, 1534 bp, Homo sapiens
agacgccgagatgctggtcatggcgccccgaaccgtcctcctgctgctctcggcggccctggccctgaccgagacctgggccggctcccactccatgaggtatttcgacaccgccatgtcccgacccggccgcggggagccccgcttcatctcagtgggctacgtggacgacacgcagttcgtgaggttcgacagcgacgccgcgagtccgagagaggagccgcgggcgccgtggatagagcaggaggggccggagtattgggaccggaacacacagatcttcaagaccaacacacagactgaccgagagagcctgcggaacctgcgcggctactacaaccagagcgaggccgggtctcacaccctccagagcatgtacggctgcgacgtggggccggacgggcgcctcctccgcgggcataaccagtacgcctacgacggcaaggattacatcgccctgaacgaggacctgcgctcctggaccgcggcggacacggcggctcagatcacccagcgcaagtgggaggcggcccgtgtggcggagcaggacagagcctacctggagggcacgtgcgtggagtggctccgcagatacctggagaacgggaaggacacgctggagcgcgcggaccccccaaagacacacgtgacccaccaccccatctctgaccatgaggccaccctgaggtgctgggccctgggcttctaccctgcggagatcacactgacctggcagcgggatggcgaggaccaaactcaggacactgagcttgtggagaccagaccagcaggagatagaaccttccagaagtgggcagctgtggtggtgccttctggagaagagcagagatacacatgccatgtacagcatgaggggctgccgaagcccctcaccctgagatgggagccgtcttcccagtccaccgtccccatcgtgggcattgttgctggcctggctgtccttgtggtcaccgtagctgtggtcgctgtggtcgctgctgtgatgtgtaggaggaagagctcaggtggaaaaggagggagctactctcaggctgcgtccagcgacagtgcccagggctctgatgtgtctctcacagcttgaaaagcctgagacagctgtcttgtgagggactgagatgcaggatttcttcacgcctcccctttgtgacttcaagagcctctggcatctctttctgcaaaggcacctgaatgtgtctgcgtccctgttagcataatgtgaggaggtggagagaccagcccacccccgtgtccactgtgacccctgttcccatgctgacctgtgtttcctccccagtcatctttcctgttccagagaggtggggctggatgtctccatctctgtctcaactttatgtgcactgagctgcaacttcttacttccctactgaaaataagaatctgaatataaatttgtttgttttctcaaatatttgctatgagaggttgatggattaattaaataagtcaattcttggaatttgagagagcaaataaagacctgagaaccttccag

SEQ ID NO: 149708 - DNA, 1574 bp, Homo sapiens
attcggattctccccagacgccgaggatgcgggtcatggcgccccgaaccctcatcctgctgctctcgggagccctggccctgaccgagacctgggcctgctcccactccatgaggtatttctacaccgccgtgtcccggcccggccgcggagagccccgcttcatcgcagtgggctacgtggacgacacgcagttcgtgcggttcgacagcgacgccgcgagtccaagaggggagccgcgggcgccgctgggtggagcaggaggggccggagtattgggaccgggagacacagaagtacaagcgccaggcacagactgaccgagtgagcctgcggaacctgcgcggctactacaaccagagcgaggccgggtctcacaccctccagtggatgtatggctgcgacctggggcccgacgggcgcctcctccgcgggtatgaccagtccgcctacgacggcaaggattacatcgccctgaacgagcacctgcgctcctgcaccgccgccgacacggcggctcagatcacccagcgcaagtgggaggcggcccgtgcggcggagcagcagagagcctacctggagggcacgtgcgtggagtggctccgcagatacctggagaacgggaaggagacgctgcagcgcgcggaacacccaaagacacacgtgacccaccatctcgtctctgaccatgaggccaccctgaggtgctgggccctgggcttctaccctgcggagatcacactgacctggcagcgggatggcgaggaccaaactcaggacaccgagcttgtggagaccaggccagcaggagatggaaccttccagaagtgggcagctgtggtggtgccttctggagaagagcagagatacacgtgccatgtgcagcacgaggggctgccggagcccctcaccctgagatgggagccatcttcccagcccaccatccccatcgtgggcatcgtttctggcccagctgtcctggctgtcctggctgtcctggctgtcctagctgtcctaggagctgtggtcgctgctgtgatacataggaggaagagctcaggtggaaaaggagggagctgctctcaggctgcgtccagcaacagtgcccagggctctgatgagtctctcatcgcttgtaaagcctgagacagctgcctgtgtgggactgagatgcaggatttcttcacacctctcctttgtgacttcaagagcctctggcatctctttctgcaaaggcatctgtaatgtgtctgcgttcctgttagcataatgtgaggaggtggagagaccagcccacccccgtgtccaccgtgacccctgtccccacactgacctgtgttccctccccgatcatctttcctgttccagagaggtggggctggatgtctccatctctgtctcaaattcatggtgcactgagctgcaacttcttacttccctaatgaagttaggaatcttgaatataaatttgttttctcaaatatttgctatgaagggttgatggattaattaaataagtcaattcctggaatttgagagagcaaataaagacctgagaaccttccagaatccgc

SEQ ID NO: 149709 - DNA, 323 bp, Homo sapiens
ctggtttctgggcaccacgtgtttgcaaggacattgacaaatggcatctgtccgagccagaggctctctggtttggggaaggagggagtcctgggggctgccgctggtgggggctggctctgccaaggcaagaacagagctgctggaggggtgggggcggaaggagcctgcttaggactgctctcagctaccggcctcctctggatgacgggactgcaggaaccacgagaaccccaggtctagctcccagggtgggcaggctgcttggcaggcaggccgccttccctccaccaggagtcaggtctccagccagaggtcctgac

SEQ ID NO: 149710 - DNA, 322 bp, Homo sapiens
  misc_feature (1)...(322): n = a,t,c or g
ttccctttaattccaaagccaggcaaagacccttttaataaaacttcaggccaatatttttgatggccaaaaatgcaaaaatcctaaaaaaaattctagccaatttaattttccagccccttaaaaaaatccttgtnnnnnnnnnnnnnnnnnnnnnnnnnnnnnnnnnnnnnnnnnnnnnnnnnnnnnnnnnnnnnnnnnnnnnnnnnnnnnnnnnnnnnnnnnnnnnnnnnnnnnnncccctnnnnnnnnnnnnnnnnnnnnnnnnnnnnnnnnnnnnnnnnnnnnnnnnnnnnnnnnnnnnnnnnnnnnnnnnnnnnng

SEQ ID NO: 149711 - DNA, 337 bp, Homo sapiens
aggttaatcctactatggcccatggatggggaggacaggtcttcagtcgtagaagtagattccataccctgcccttccttttacatctgtggaggctccaaattctcatgtcaaagcagtaatgaagacttccgtgttgctgtcttgtgagattccagagaattataactccgccatgcctttcaaaattctttatgatgatgggaaaatggtagaagaagtggatggccgagccacacagaagttaattgtcatcctgatatcctgagaaatcatattcatttgagctgacatatcgtggaaactgtgctggtgggcttgaactcatggtcaccgg

SEQ ID NO: 149712 - DNA, 325 bp, Homo sapiens
  misc_feature (1)...(325): n = a,t,c or g
nnnnnnnnnnnnnnnnnnnnnnnnnnnnnnnnnnnnnnnnnnnnnnnnnnnntaccaaggctgaaacagaaaacctgaatagaccagtaacaagattaaatcagtaattaaagtctcccaacaaagaaaagcccaggactggatggattcattgccaaattcttccaaacatataaaagagaaataataccaactctcctcaaattattacaaaaactgaagtggtnnnnnnnnnnnnnnnnnnnnnnnnnnnnnnnnnnnnnnnnnnnnnnnnnnnnnnnnnnnnnnnnnnnnnnnnnnnnnnaaactacaggccaatgtcttt

SEQ ID NO: 149713 - DNA, 349 bp, Homo sapiens
  misc_feature (1)...(349): n = a,t,c or g
tgaaaccgtaaaactcctagaagaaaacattgacaaaagctctttgacattggccttggcagtgattttttggatattacaccaaaagctcaggaaacaaaaataaacaagtgggacttcatcaaactaaaaagtttctgcacagtaaaggaaacaatcaagatgaaaaggcagtctgtggaatgggagaaaatacttgtgagccatgtatctgataagtggtttatatccaaaatacaaggaatatatataactcaataccaaannnnnnnnnnnnnnnnnnnnnnnnnnnnnnnnnnnnnnnnnnnnnnnnnnnnnnnnnnnnnnnnnnnnnnnnnnnnnnnttaaa

SEQ ID NO: 149714 - DNA, 296 bp, Homo sapiens
gggagggagaaggaggaaggggagagcggagaggattgggggagagtggaggagggagaaggagggaggagaggggagggaggaggagggagaaggagggagggaagaggagggagaaggggggaggaaagaggagggagaaggagggagggaagaggagggagaaggagggagggaagaggagggagaaggagggagggaagaggagggagaaggagggaagaggagggagaaggagggaggcaagaggagggagaaggagggagaaggagggagggaagaggagggagaagcag

SEQ ID NO: 149715 - DNA, 430 bp, Homo sapiens
  misc_feature (1)...(430): n = a,t,c or g
cgaattgacaaacccatcttgaaggctggccgggcgtaccacaaatataaggcaaagaggaactgctggccacgagtacggggtgtggccatgaatcctgtggagcatccttttggagggggcaaccaccagcacatcggcaagccctccaccatccgcagagatgcccctgctggccgcaaagtgggtctcattgctgcccgccggactggacgtctccggggaaccaagactgtgcaggagaaagagaactagtgctgagggcctcaataaagtttgtgtttatgccacctgnnnnnnnnnnnnnnnnnnnnnnnnnnngggggggagatttaaaaaaatccttaggggggcaaaatttatcggttgtagaaacaaaaanggggggggcgggggattattatttttttggggggggtttttttggggg

SEQ ID NO: 149716 - DNA, 622 bp, Homo sapiens
  misc_feature (1)...(622): n = a,t,c or g
cttggcttgcctgcccattgtggattgaagaaactggatgtcagctcacagggtgcaaggggctccctagggtggaggcgagtgggctttttgctgggtagttggatgcagtattgggaaggtgcatgacaggagattgaggggaggtgggggtgctctgaccgactgggggttccctgaggtatctgatcccctacaggtgtggtggctggaggtggccgaattgacaaacccatcttgaaggctggccgggcgtaccacaaatataaggcaaagaggaactgctggccacgagtacggggtgtggccatgaatcctgtggagcatccttttggaggtggcaaccaccagcacatcggcaagccctccaccatccgcagagatgcccctgctggccgcaaagtgggtctcattgctgcccgccggactggacgtctccggggaaccaagactgtgcaggagaaagagaactagtgctgagggcctcaataaagtttgtgtttatgccaaataaaaaaaannnnnnnnnnnnnnnnnnagggggggggccctttaaaaaaaattcttgggggggccaaactttacccgggcgggcaaaaaaaatttttttttctaaaggggg

SEQ ID NO: 149717 - DNA, 314 bp, Homo sapiens
cataatgtagtgccccacgtatttatgttacaaaaggagataactaagaagaacagcacattcagggtgcacataaaagcagtattctataatctgacatttattgtatgccacctcttctaaactataggaaaacatttgatgtaattgtgatagatccaccatggcagagcaaatcagttaaaagaagtaataggtacagttatttgtcacccctgcaaataaagcaaatacctatccctaaattggctgctccaaactgtcttcttgttacttggctgaccaatacacagaagcacctacgttttataaag

SEQ ID NO: 149718 - DNA, 1624 bp, Homo sapiens
tttttttttttttttttgagacggagtctctttctgtcccccaggctggagtgcagtagcacgatctcagctcactgcaacctccgctcccgggttcacaccattctcctgcctcagcctcccaagtagctgggactacaggtgcccgccaccgcgcccggctaaattttttttgtatttttagtagagacggggtttcaccatgttagccaggatggtctcgatctcctgacctcgtgatccacccgcctcggcctcccaaagtgctgggattacaggcgtgagccaccgcgcccggccccctcctccccaatttttcatacagttgcccctatacaatatacacacccttgagggcaggtagaagtccagcccacctgcgccagggacgctgtggggagcatttttctctgagttgctaagagaaccctgatgggcggtgagcagaggaaccacagaacagccagggctcaaggctggcagcggataggccaggagagatcgctaggccccagaaagccccctactttcagtcagggtgggcaagagggtcttcgcagtgaagtgggaggcaggcctggaggagggagccagggagacccctgggagccctgaggttgggggccaggcagggagatggggatagcagctgcctcagtacttggggaccttgctgtagtcttcggaatgcacgtgccggcacaagcagatggacaggaccatccccaggagctcgaccatggccacacccacgcccacgccgaggatgatgcccaggttctcctgcagccacgcctgcaccttctccatgcagccctcctggtacacaggccagtcctcagggtggttgccactctgggtcctgttgccgggggcctcgcagaagcccttcctcacagaaaggctgttgtcctcttcccccttgacttcgcaggaacaggggtaggtgacctcagggcgattcatgagctcagcgttgtctgtccagttgtagaagctgacccagccgcagcacttcacctgagcctgcacgtagtcccaggcatcctgcaggctgtcctcgcgactgctgttgtagtctcgaatgagctcagtcacgatgccacccatctcctgcttcagcttgcccatgttgaagtagaagagggccccggccgtcacctgggcaatgaggatcaggagcaggaaagcaaagtacagccccagcaggcagcggacctcgttgacggcgccgatgcagcccaggaagcccatgagcatagtgactgcccccacgccgatgaagacataggcccccatcctaagcgagctggaggaggtttgcaggacagagatgaaactgctcttgtcggccaggatccacaccccgaagcccaggatcactgcgcccaggataaagaagatcaagttgaagaggaagagaaagtatttggtgactttgatacaggctgagcccatcccgccagtcctggagcttccttccacgaaaccagtgcagctggtcacagggcccacttctgcctgtgcccacgtgtcgtccacacagcagcagggaggactctgcgggttctgctttctgctccgcgctgcaggcccagcgtcacccgctcgtgcctcagtcggc

SEQ ID NO: 149719 - DNA, 1519 bp, Homo sapiens
  misc_feature (1)...(1519): n = a,t,c or g
tttttttttttgagacagagtctcgctctgtcgcccaggctggagggcagtggcacgatctcagctcactgcaagctccaactcccgggttcacgccattctcctgcctcagccttccaagtagctgggactacaggtgcccgccaccgtgcccggctaatttttttgtatttttagtagagacagggtttcaccatgttagccgggatggtcttgatttcctgacctcatgatccacccacctcagcctcccaaagtgttgggattacaggcgtgagccactgcgcccgggcaagacctttttttaaaaaaaaaaaaaaaaaaaaaacttccattctttcttcctccagtctgttctcacataaacagaggagttttggtttttaattttttttggttgtttgctgttttttgttttttaaggtgagtttcccactatgtttctcagactggtctcgaactcctggcctcaagccatcttcccgcctcagcctctcaaatagctgggcttacaggcatgagccaccacacctggccaggatttggttgtttaaatataaatctgatcaccccccctgcttagaacccttctgctttctattacccctcatttaaaatgtaaactcttcaccttggtttatgagaactgggttcttggccttcccccttgaacctcattaaatggtgatttccttgctaagctccagcccggagtgggtctcctcctcaagcttctaaattttggggctcctttccctggcccttttcctgggccttctcagctctccacccccaccactcttgactcaggtcggtgtccttcttcctcaagtcttgacaattcccgggcccttcagtccctgagcagtctacttctgtgtctgtcaccacatcttgtcttttcccctcattgcatttattgcagtttatatatatgctaattttacttgttcatttctggtctcccctacccaggctgtaaatgagggcagaaaccttgttggttttattcaccatcatgtacccaagtgcttggcacataagtgggccttcattaaatgtttgttgaataaaagagggaaagaaggcaagccaaccccccncctttttaatgggcccccttttnanccaatttcctaccttttggataaaatgttcctttttgacaatatacacgggattatttatttgtactttgtttttcccatgtgttttgccttttatcccactggcatttttagctccttgaagacatatcatgtgtgagataacttccttcacatctcccatggtccctagcaaaatgctacggcctgtagtagtcaaggtgctcgaataaatatttgtttcgggtggtttgtgagccttgctagccaaagtcctgcctttgggtcggacattagtatcggaaagtatttgagagagagagacgtttccactcccactgccaggattttgtattgccatcgggggccaaataaatgctcatatttatttctgaaaaaaaaaaaaaaaaaaa

SEQ ID NO: 149720 - DNA, 390 bp, Homo sapiens
agcaaagctgtgaaggtgtacgcctcatcactcgtaattcctacgagagagagatgtttgataaggccagcctcaagttggggttggataaggctgtgcttcaatccatgagtggtcgggatggcaacattactggaatccaacagttctctaagaaggagattgaagatgttttaagaaaaggagcatatgcagccatcatggaggaagatgatgaaggctccaagttttgtgaagaggacattgaccagatcttgttaagacgaactacaaccatcaccattgaatctgaaggaaaaggttccacctttgctaaggcaagctttgttgcttctggaaacaggacagatatttctttggatgaccccaacttttggcaaaagtgggcca

SEQ ID NO: 149721 - DNA, 214 bp, Homo sapiens
cggccgcgtcgacatcgaaagagccatcattttggtgcagactgggcagcaagccctggaaccagcagctcagactcagacgtgccccttacccctgccataccagcgacctattcctgaacaacgttggtttcttttttccactgataatgatgctgacgtggatggtgtctgtggccagcatggtcagaccgttggtgtctcagcaggagat

SEQ ID NO: 149722 - DNA, 379 bp, Homo sapiens
  misc_feature (1)...(379): n = a,t,c or g
ggcacgagagagaatgtgccgtcatatgaaaaaggtcagtcaactcaccgggtcgagctctgtcagagctgtgtgtttccactgagctcgggtttctccgatgtgtttctgtggtttgcagtttgtcccaggagtattttctctttactactcttttatatttcggactgcgccctttgcctgtttattgnnnnnnnnnnnagtgtttttcgtatttcgttgttctgttcctttgtttttttgttttctcttttgtgtctccctttgtttgccctttcttgggttttttcatgttttattttttcatcgccttttacccattgttttttcttttatggaaggcttttattgggcctggtgtcttgtatttttttgtttg

SEQ ID NO: 149723 - DNA, 304 bp, Homo sapiens
ggcacgagagaaactgtgggactaggagatacaaatttggcccatcaatgctctaggctgactatggtcaacaacgacaaccactccgaggcatacaacaacctggctgtgctggaaatgcggaagggccacgttcaacaggcaagggcactattacaaactgcatcagcattatcaccccatatgtatgagaccgcattttaattttgcaacaatctgtgatatgactggatatctgcacagaagctatgttgatgcgcagaagtctgaagcagcgttatcagagcatgtggacacacaacat

SEQ ID NO: 149724 - DNA, 353 bp, Homo sapiens
ggccattgaagtgacaacaaccagttgagagcaatcatcgaagcagatcctctgacaactacacgagaagttgccgaagaactcatcgttgaccattttatgattgttcggcatttgaagcaaattggaaaggcagttacaggatgccattaacgtctgttcacctcacataacaaagctggcaaaaaacatctccaggatgcggacaagacacttgcatccccgaatcagctccccgaccctgacccagttcctcatcctataaagccctgctgtagtctgtaagtgtggctgcctcctctgcttttgtcaggaggtagcccggcaggactgacaataaattagcttgcctg

SEQ ID NO: 149725 - DNA, 3107 bp, Homo sapiens
atggaattgatgttagacaaaaagtgaattcagcagttttcttatttgaattcaaaatgggtcataaagcagtgaagacaacttgcaacatcaacaatacatttggcccaggaactactaatgaacctacagtatagtggtggttcaagaagtttcataaaggagacagccttgaagataaggagcacagtggtcggccattgaagttgacaacaaccagttgagagcaatcatcgaagcagatcctctgacaactacacgaggaggtggcggaagacctcatcgttgaccattttatgattgttcggcatttgaagcaaattggaaaggtgaaaaagcttaataagtgggtgttaggatcacctaagcagaccattcccttcccctcccacaggccttacaatacagtctcttgcgctctccacacagtcaccccagggcaaaagacaaaccccccacttcactgacccctccactaactgtttgtccaggcagttacaggatgccattaacgtctgttcacctcacataacaaagctggcaaaaaacatctccaggatgcggacaagacacttgcatccccgaatcagctccccgaccctgacccagttcctcatcctataaagccctgctgtagtctgtaagtgtggctgcctcctctgcttttgtcaggaggtagcccggcaggactgacaataaattagcttgcctgaacttaggtctattggcctcattcctttctcggctgtccttccaattatcccttgtatcttggtgccgaaacccggcaaggtggtagagctcggcctccctttctccctctctcctttcctccccgcttcccccggccaaactcccccttccagaacgtgctggagacccagaggatttcctactcctttccattgctggcagacacatccaacaccagggccacctcagggcatgcccaacaaccagcccccatacttcccctccgagaggtggctggagccgaagacatcattcgagtccacgttcccttctccctctctgacctctcccaaattgcaaaacgtctcgggtcgttttcctctgatcccgacacttatatcaaagaatttaagtaccttacccaatcttatgaactcacttggcatgatctctacattatcctctcttctaccctccttccagaaaagaaggaaagagtgtggcttgcagcacaggcacatgccaacgatcttcatcggcaagaccctactaagcccataggggctgctgcagttcccctggaggaacccccctggaagtaccaacccacagaccctggccgggcatctcgtaaccatatgattacttgcctcatcgcaggacttaacaaagcagcccataaggccgtaaattttgaaaagctcaaagaaatctcccaaagagccgatgaaaatcctgctgaatttctttctcgttttacagaggccctccaaaaatatactcgtgtagaccccacctcccgggaagaaactatcgttcttaataaccatttcatctctcagtctgctcctaacatacagcacaaactgaaaaaggccgaagatggccctcaaactccacaacaagatctccttaacctgactttcaaagtcttcaataacagggaggagcagattaaattagacaaggcccaaagagattgtgctaaataccagcttctggcagtggctatccatcaacctagccatagtacccaagggcacaaaaaacccaatggcagtaaccctcctgggccttgttttaagtgcagcaaagaagtaacatacttaggagtccaactctcccctggggcccaagccatgaccccagcacaagcaaccttaataaacagcttgcctctgccttcctcaaaaaatgaaattctctctttcttaagactagaaggtttctttagaatatggattcccaactttgccctcctggctcaacccctctacgaagcagccaaaggccccctcaatgaacccctaagccccatacacaacatacttcccagtttctgtaaactccaaactgctctcatcactgcacctgccctgtccttacccgacctctcccaaccctttgttctctataccaccaaaaatcaaggaatagctcttggggtcttagggcaacaaaagggaaatcctccttcctttgaccctgtagcatatctctgtaaacaactagacaacactgtcaaagggcagccaacctgtcttaaagcatcatcagcagtggccgttttgcctctggaaagcaaaaaactaacatttggccaaagcaccaccattcacagccctcacaacttacaggatctcctctcctcctgggcattaagctccctctctccttcccaaattcagtcgctctacgccctctttatcaaaaatcctgaattcagccttgccaaaagtgcccccctcaacctggcatccctacttcccatatcctcttcccctcctactcattcttgcactgacattctggatcacttgcagccacaattccctaacatctcctccaagcctctcactaatccagatgaccaactatttatagatgactcctcttccagagcccccggctctcccaaaattgttgggtatgcagtagttaccttaaaccatgtaattgaggctaaacccctacccccagaaacctcctcccagaaagcagaactcagctctcacaagagccctaaccctctccaaggacaaacagcactggctcatatcagagccagtccaaaggccccctccttcctcagtccattcgacttaatgtatggatgccctttcctcttacaaaacagaccccctcctgagtatcaattagaatacctcccaacactctccctcatccatcatctcctctgcgaacaagctgaccaggcccccacaaaaccccaccaaggcaccactgaccaaacactccttccaggagaatatgtcttcctaaaaatcaacaagtctcatgccaaagtgcgaaatccctttccaagtccttctcgctacctccactgcagccaaactttgagaacacaagtcttggtaccatctttccaggttaaaaagagcacctgcagctga

SEQ ID NO: 149726 - DNA, 786 bp, Homo sapiens
gcacggccgcctactactactactactactactactactaccatgctgcgagaagacgacagaaggggaggcaatgaaagaaattacagcaggcttaccagtgaaagttgtgtgtggatgtcttaagacaagcttctaaggcttgtgtagtaaaacgtgaatttaagaaggcagaacagttaattaaacatgcagtgtatttggcacgggatcattttggatccaaacacccaaaatattctgatacactgctagattatgggttctacttactcaatgtagataatatctgtcagtctgttgcaatttatcaggcagcccttgacattagacagtcagtgtttggtggcaaaaatatccacgtagcaacagctcatgaagatttggcctactcttcttatgtccaccagtatagctctgggaaatttgacaatgcactatttcatgcagaaagagctattggtatcattacccacatcctacctgaagatcatcttcttttgggcttcttcaaagagggtgaaagcacttattttagaggagattgcaattgattgtcataataaggaaactgaacagaggctgcttcaagaagctcatagatgtgcacctgtcttcactccatctagcttcaaaatcttatggggacttagctgtcgtagtgcttgtgcatatgagcctcttgaagagctattaatgagcagctaatgttatgtcgctgatcattctagtatagtagctgttctagtatagatatgtgatagttgtagagatgatacgaattcg

SEQ ID NO: 149727 - DNA, 331 bp, Homo sapiens
  misc_feature (1)...(331): n = a,t,c or g
cggaagaggaggcagcgccaccgccaggcagggaaagagcccggggcaagggaggcgaccgacccaggggaggcgancccgagcaccagcgnggaggcangncaagggcagaggggnnnncngnngnagnnncnagnncgnangnnnnnnnnnnggaccccagcatccacggtgggcccagagccctgcggggcggggtcggcagcgacagcccctggtccggagctgagtggccagaaccagatggggaggggtcccccagtggaggatactgaatgagggtcttaccgtctggatccccatgacggagcgccttttcctccctcgtgcc

SEQ ID NO: 149728 - DNA, 337 bp, Homo sapiens
ggcacgagctcctgtgtcagggaagtagtccaggccatgggtaagaagaaagtgttggtcaaggtgcatctcaaggacaagtttgtcatagatgtggacaaaaatatcagcatcagtgatgtgacacccagttccttggtggttctaagaaatgacagctacactttgcacaagatcctacccaacaaggtgcactcattggtgtcactgatgatggttaatacagtaccctattgacaaatgaaacgattgtttcactggatggccccatggttacgattcttttttctgataaactttcttttacggctccccagctctacatatttactggggg

SEQ ID NO: 149729 - DNA, 368 bp, Homo sapiens
  misc_feature (1)...(368): n = a,t,c or g
ggctcgaggactcccctttttcaccagaaacgacttcagcgtgtggaccatcgcgggaacaagtgtgttgggctggaactgtccaagatcacgatgccaatcgccttcatccaacctctgatcttcttgcatcggatcacggagtacatggagcacgtgtacctcatccacagggccttctgccaaccccagcccctggagaggatgcaagtgggccttaagggtgccaggcaagagtttgtcatgaaagtgatgccccttgcatgtctggccacacagtcttggggccccaggcatctgtgaggactcgcacagctccccccaatgttcagtgccatcctgcctggcggtcgtggcatttgtcctcn

SEQ ID NO: 149730 - DNA, 346 bp, Homo sapiens
ggcacgagaactggaagaagctcttgccctgtagttccaaggcaggcctctctgtgctgctgaaggcagatcgcttgttccacaccagctaccactcccaggcagtgcatatccgccctgtttgcagaaatgcacgctgtactagcatctcctgggagctgaggcagaccctgtcagttgtatttgatgccttcatcacggggcagggaaagaaagactggtccctcttccgatgttctcccgaaccctcacggagccctgccccctggcttcagagagccgagtctatgtggacatcaccacctacaaccaggacaacgagacattagaggtgcacccacccccg

SEQ ID NO: 149731 - DNA, 427 bp, Homo sapiens
ttagacttattaatatattgaattgttcaagtgtccatatactaagaattacatcagcgatgtggaactatggataggcttccttgggttcctggctccacactataaccaccgccccccaccccttaaatttctgtatagcagacttaagagtgaatatcaccatatgcagttgttcatgtacttcttcccctttctcttctagctcttgacaaaattctcagggaaaactcttcagctctggatgtctccctttttgtggatcaaacacaaagggcatcattctaaaatatatacagaaccataaaagccccaaatagccaaagcaaccctgagcaaaaagaacaaggctggaagcatcacactaccagacttcaaaatttactacaaagctttaaaacctaaaataacatggtactggcattaa

SEQ ID NO: 149732 - DNA, 356 bp, Homo sapiens
ggcacgagcacccgcatcatcttctaccgcgacggtgtctctgaaggccaacggcaacagggtcttcaccacgagatgctggccatccgtgaggcctgtatcaagctacaaaaagactaccagcccgggatcaccttcatcgtggtgcacaacattcaccacactcggctcttatgctctgacaagaaccatccgcttgggaaaagaggaaacagtcctacaggctcaaactgtggcaccaaaatcactcaccccaccgagttcgacttctacctgcgtaggcacgctggcatacaggggacaagcaggccttcttactatcacgtactctgggactgacaatcgtttcttctctg

SEQ ID NO: 149733 - DNA, 238 bp, Homo sapiens; identical to SEQ ID NO: 67974

SEQ ID NO: 149734 - DNA, 480 bp, Homo sapiens
  misc_feature (1)...(480): n = a,t,c or g
gnnnnnnnnnnnnnnnnnnnnnnnnnnnnnnnnnnnnnnnnnnnnnnnnnnnnnnnnnnnnnnnnnnnnnnnnnnnnnnnnnnnnnnnnnnnnnnnnnnnnnnnnnnnnnnnnnnnnnnnnnnnnnnnnnnnnnnnnnnnnnnnnnnnnnnnnnnnnnnnnnnaggcttcaacatgtgaatttggggtgagcaggacacatttcattccatggcaaaatggatcatacatctaaatgtaaaccacaaaactgtgaaacttctagatgataatataggaaaaaaagaggtgaccttggtttgacaatgagtttttaggtacaacaccaaaggcacaatccatggaagaaacaattgacaagctggacttcattaaaatgaaaaacttctgctctgtaaaagacggcatnnnnnnnnnnnnnnnnnnnnnnnnnnnnnnnnnnnnnnnnnnnnnnnnnnnnnnnnnnnnnnnnnnnnnnnnn

SEQ ID NO: 149735 - DNA, 85 bp, Homo sapiens
ccacctttttaaaacgcggcccgggcccaagttaaaattaccccccctaaaagggaataaccttcggccccctaaataaaaaacc

SEQ ID NO: 149736 - DNA, 2007 bp, Homo sapiens
gaagaaggaggaggaggcccgcgtcgcctccggcggggctcgcgctcgccccgcgctcgccctccgcctcgcccgagccccgggagggtgaaacgctttctcccagcatgcagcgggaggagggatttaacaccaagatggcggacggcccggatgagtacgataccgaagcgggctgtgtgccccttctccacccagaggaaatcaaaccccaaagccattataaccatggatatggtgaacctcttggacggaaaactcatattgatgattacagcacatgggacatagtcaaggctacacaatatggaatatatgaacgctgtcgagaattggtggaagcaggttatgatgtacggcaaccggacaaagaaaatgttaccctcctccattgggctgccatcaataacagaatagatttagtcaaatactatatttcgaaaggtgctattgtggatcaacttggaggggacctgaattcaactccattgcactgggccacaagacaaggccatctatccatggttgtgcaactaatgaaatatggtgcagatccttcattaattgatggagaaggatgtagctgtattcatctggctgctcagttcggacatacctcaattgttgcttatctcatagcaaaaggacaggatgtagatatgatggatcagaatggaatgacgcctttaatgtgggcagcatatagaacacatagtgtggatccaactagattgcttttaacattcaatgtttcagttaaccttggtgacaagtatcacaaaaacactgctctgcattgggcagtgctagcagggaatacccacagtcattagccttcttctggaagctggagctaatgttgatgcccagaatatcaagggcgaatcagcgcctgatttggcaaaacagagaaaaattgtgtggattatcaaccacttacaagaggcaaggccagcaaaaggatatgacaatccgtccctccctagaaagctgaaagctgataaggaatttcggcagaaagtaatgttaggaactcctttcctagttatttggctggttgggtttatagcagacctaaatattgattcttggctcattaaagggctaatgtatggtggtgtttgggctacagtacagtttctttcaaaatcctttttcgatcattcaatgcatagtgcattgccccttgggatatatttggcaaccaaattctggatgtatgtgacgtggttcttctggttttggaatgatctcaactttttatttatccatcttccattccttgccaatagtgttgcacttttctacaattttggaaaatcttggaaatcagatccagggattattaaagcaacagaagagcaaaagaaaaagacaatagttgaacttgcagagacaggaagtctggacctcagtatattctgcagtacctgtttgatacgaaaaccggtgaggtccaaacattgtggtgtgtgcaaccgctgtatagcaaaatttgatcatcattgcccatgggtgggtaactgtgtaggtgcaggcaaccatagatattttatgggctacctattcttcttgctttttatgatctgctggatgatttatggttgtatatcttactggggactccactgtgagaccacttacaccaaggatggattttggacatacattactcagattgccacgtgttcaccttggatgttttggatgttcctgaacagtgttttccacttcatgtgggtggctgtattactcatgtgtcagatgtaccagatatcatgtttaggtattactacaaatgaaagaatgaatgccaggagatacaagcactttaaagtcacaacaacgtctattgaaagcccattcaaccatggatgtgtaagaaatattatagacttctttgaatttcgatgctgtggcctctttcgtcctgttatcgtggactggaccaggcagtatacaatagaatatgaccaaatatcaggatctgggtaccagctggtgtag

SEQ ID NO: 149737 - DNA, 396 bp, Homo sapiens
ggcacgagaagtatcacaaaaacaactgctctgcattgggcagtgctagcagggaataccacagtcattagccttcttctggaagctggagctaatgttgatgcccagaatatcaaggcaatccttaggtgtcacatggccctctagtggaagggatgctcagctggaccgaggcaactgcaggatattcccggggagttgttacccaagggattgcttttattcagggcgaatcagcactttcttggcgtagaaaaaaaagggaaaaggaaataaaaagtttttttttatggggccccgagttttatcccttttgggggggggtatattttatggggcaggggcccgggttttaaaagtgggggagggggaaaaacaaacgagcacaggcctccg

SEQ ID NO: 149738 - DNA, 325 bp, Homo sapiens
  misc_feature (1)...(325): n = a,t,c or g
ggcacgagcaatgaccaaaacatagatgtctctcctggagctgattcttgagcccaaccgaacgctcagtacagtgccttggtcttaaaaggtgcttaccaaaagtttgtgtgaatggatgaaaggaaaaaaataannnnnnnnnntaggcaggggaaggaatgcaaaatacattgtaaaaagaaactgagcccaggtataagaagctatccggttgagaacttgagataccatgtatgattacttgcagcctgcctattataagttgaacgacctgacgaatgcagatccctgtgcagtccgatatctgctctttgatcagaat

SEQ ID NO: 149739 - DNA, 405 bp, Homo sapiens
  misc_feature (1)...(405): n = a,t,c or g
cactgttaagatcaggaaaaaatgtaagagtttacggttctntcctgtcacgctccaagttggggtatatttagacattcatgagtagttgctggtgttcatttaattgtatatgtaaagtgtaattataatcatgcctggcctccttatattaattttcagtgacagaattgaaatattttaaactctcagtttagtactttcttaaatgattatgttgaattttttgtggtttttaaaatttttaattttattattattattattttttgagacagagtctcaatttgttgcccaggctggagtataatggtgcaatcttggctcactgcagccttaacctttgggcgcagatgatcctccaacctcagcctcccaagtagctgggactataggcgtgtgcca

SEQ ID NO: 149740 - DNA, 461 bp, Homo sapiens
tttactggtataatattctcctcatgaggtaggatggaagggaagaaatagagaaaaaatgttctgctctgaaataaatgtggtgtttcctgacagcgtttgtcaagagatggggttccaccatgtagccccggctggtcttgagctcatgagctcaagcgattcacctgcctcagcctcccaaagtgctgggattacaagtgtgagccaccattcctgcctctatacctctaaaggtgttgaataatttgaatgggaatttgaaggtccatggcttccaaaccagcaggagttaaggcttaattgcttggaaatacattttcatggctgataccagtaacagaaaaatgtctgtatgtcaagaggctctgtactaatcagttaaccataacatgtgccaccccataccttgggccaatgtaactgttaacagcttgaagctattaaaaatgtaccaatgg

SEQ ID NO: 149741 - DNA, 454 bp, Homo sapiens
  misc_feature (1)...(454): n = a,t,c or g
nnnnnnnnnnnnnnnnnnnnnnnnnnnnnnnnnnnnnnnnnnnnnnnnnnnnnnnnnnnnnnnnnnnnnnnnnnnnnnnnnnnnnnnnnnnnnnnnnnnnnnnnnnnnnnnnnnnnnnnnnnnnnnnnnnnnnnnnnnnnnnnnnnnnnnnnnnnnnnnnnnnnnnnnnnnnnnnncccttattggaaagggccaaaattgggccaaggccagaaaaacctatggaaaccagacaagggtggggccctttttccccaaaagttccgggccaaaaaaaattttgggggtaattagccccaatcccaagcccggggatgcacccaaaccccattttgggaccaatggtttaagaagggggaccataacccccggggattcttgggcccccataaccttatgggaaaccccttttttaacggaaacggggatccaatggggggccttatctccagta

SEQ ID NO: 149742 - DNA, 441 bp, Homo sapiens
cgaatgcatggaggactgcaacagaggagtggtggactgaagattggaatgaagattgttctgagccataacatttcacatatgttatatgaaggagactgggcatgaacaggactctgtggaaccacactatggaaagggcaagtgcacttgtgtaagtccaatatctgattgtcggatttatcccaggaagaaattggtggttgggtagggcaccaaaagtggagttaggcacgtagtgcattgagtaacagctgctggaggtacatgactacttggtgcatttaagtatttgctataagtgtctgtaatggattggcagtggattcaaagcgagtgttgaggtaccaaatcctcaaacttggaatctgggtgactctggaacccttgcatttatttgaagcccaacttgattaatgtgattggcattaatttttgtaa

SEQ ID NO: 149743 - DNA, 442 bp, Homo sapiens
  misc_feature (1)...(442): n = a,t,c or g
cccttgatcatgaactccataaaatccttttctgaccacgctcaatgtggaaggtgaatttgacaggcaagaagatgacattcacttagtgacattatgtgtgacagaattaaatgaccgggaagaaaacgaaaaccactttccagtaatatatggcattgctgtcaacattaagactgcagagatttacagagcctcctttcaagatcggggtccggaggagcagcttcgtgctgcgcgaactttagcaggaggaccaatgattagcatttatgatgcagagacagaacaacttcgtatagngaccgtactcctggacaccatttccacatgtggatttctgggttgcaccaagatgacaagcaaatactngagaatctttccacttcgcctctggctgagccaccccactttgttgaacatattagatcctaccttgatg

SEQ ID NO: 149744 - DNA, 651 bp, Homo sapiens
cagaggttttgctacatgtccgactgaaggaatggctgcctcccatgtggaaagcagctcttggtttaaaacaaaatctcaccgagtccagctcgagcctcagcgattttcaccgagatgcttggggtaaaggatgcattttccccctccagggagggggaagtccagatacttaggagccattctggtcactttcctatctttctcttaggagaggtggtagaaatgtaagactgtgcagactttccgctttggtcttttgtcaattcaaagccatgctgttgaccctcacagctgggaacaataagactgcagagatttacagagcctcctttcaagatcggggtccggaggagcagcttcgtgctgcgcgaactttagcaggaggaccaatgattagcatttatgatgcaaagacagaacaacttcgtataggaccgtactcctggacaccatttccacatgtggatttctggttgcaccaaaatgacaagcaaatactaaaggggagagtttacaggctgggtaagtcttaaatctctgcaccctggtttccccatttgtgagtggtcattttttgggtgtgggacccctttctggaaggcctcggtctggtcggtgtgctgagggctgggagcccctgggtgtccc

SEQ ID NO: 149745 - DNA, 1179 bp, Homo sapiens
ccgctgctcgtcgaggggcgttgagtgcggctgccgcagtcagccggggacctcgtccgagcccacccgcctttggaggaaagagccagacttctcagaggtcagtctgttcaacaagtgggaccccagggccttctgtatgttcagcaaagagagcttgcagtgacctccccaaaggatggctccatctccattctgggttctgatgatgccactacttgtcacattgtggtcctgaggcacacaggtaatggggccacctgcttgacacattgtgacggaaccgacaccaaagctgaggtccccttgatcatgaactccataaaatccttttctgaccacgctcaatgtggaaggctggaagtacaccttgttggaggcttcagtgacggacaggcagttgtcccaaaaatccactcaatcactttctaattgaatttgacaggcaagaagatgacattcacttagtgacattatgtgtgacagaattaaatgaccgggaagaaaacgaaaacccactttccagtaatatatggcattgagtcatcctgttgtccctcacagctgtcaacattaagactgcagagatttacagaagcatcctttcaaagatcgggggtccgggaggagcaagctttcgtgctgcgcggaaactttaggcaggaggaccaatgattagccatttatgatgcagagaccgaaacaacttcgtaataggacccgtacttcctgggacacccatttccacatgtgggattttcggttgccaccaagatgaacaagcaaatactagacgaatctttccactttcgccctctggctgaagccaccccactttggttgaacatattagatctaccttgatggttttttaaaaaaacaccccatctccagcttaacacactgtttcctggaaataaagccctactctacaaaaaaaatgaagatggcttgtgggaaaagatctcttctccaggaagctaaaaaaataggaattaccaaagaaagcagaaccttcttggcctgacagagaccattgggtgggggctggcacggaatccagatctggatcctacatctgttggggtcttaggtcttctccttccttcctcagtgtctttcaaatgactttcatcaaatgcctttcaaaataaaaccttattttggcaaaggcaaaaa

SEQ ID NO: 149746 - DNA, 405 bp, Homo sapiens
gcctatgtaactgtttgcaaccagtgtggcagagagtctaagcttttgtcaaaattttatgagctggagttaaatatccaaggccacaaacagttaacagattgtatctcggaatttttgaaggaagaaaaattataaggagacaatcgctatttttgcgagaactgtcaaagcaaacagaatgcaacaagaaagattcgacttcttagccttccttgcactctgaacttgcagctaatgcgttttgtctttgacaggcaaactggacatacgaaaaagctgaatacctacattggcttctcagaaattttggatatggagccttatgtggaacataaagtgtggtgacctactagtttgaactctatgttgtctcttaaacttggtggaatgtgtatgttaacg

SEQ ID NO: 149747 - DNA, 642 bp, Homo sapiens
  misc_feature (1)...(642): n = a,t,c or g
gccttcaagcgcgggacnancanaagtcatggaccgcaacccctcgccgccgccgccgggtcgcgacanggnggaggaggaggaggtggccggtggagactgcatagggagcacggtctacagcaaacactggctcttcggcgtcctcagcggactcatccagattgtnnccctgaaaacaccaaatctagctcagatgatgaggagcagctgacggagcttgatgaagaaatggagaatgaaatttgcagagtatgggatatgtcaatggatgaggacgtggctttatttctccaagaatttaatgctcctgatatattcatgggagtactggccaagtccaagtgtcctcgattaagagaaatctgtgtgggaattttaggtaatatggcctgtttccaggagatatgtgtgtccatcagcagtgataaaaatcttgggtgttattgcactgtttgtatgattcagacccacctactctgctggaaacaagcagaagtggccagtgtttgggttgaaaggatccaggaacatccagctatttatgatagcattgcctcattatgtcagttcacaatgttacttctgtnaagtgggagtgtgacagctcttattgatagaacnaagttgaatggcagaatg

SEQ ID NO: 149748 - DNA, 682 bp, Homo sapiens
attgacccattctaacattagtttctcatccaaatcaaagagcttgtccacaacctcccccaccttcaccagcaagtcaacatttgttgaacttgacataatgaagcaaatgctatcataaatagctggatgttcctggatcctttcaacccaaacactggccacttttgcctgggaaaggcaagtaagcaacaacctgcttgtttccagcagagtaggtgggtctgaatcatacaaacagtgcaataacacctgcccaagatttttatcactgctgatggacacacatatctcctggaaacaggccatattacctaaaattcccacacagatttctcttaatcgaggacacttggacttggccagtactcccatgaatatatcaggagcattaaattcttggagaaataaagccacgtcctcatccattgacatatcccatactctgcaaatttcattctccatttcttcatcaagctccgtcagctgctcctcatcatctgagctagatttggtgttttcagggctaacaatctggatgagtccgctgaggacgccgaagagccagtgtttgctgtagaccgtgctccctatgcagtctccaccggccacctcctcctcctcctccttgtcgcgacccggcggcggcggcggcgaggggttgcggtccatgactttgtcg

SEQ ID NO: 149749 - DNA, 548 bp, Homo sapiens
agagactgggttttgccatgttgtccaggctggtctcaaactcttgggctcaagtgatctgcctgcctcagccccacaaagtgctgggattacaggcatgtgccactgtgcccagccaactaaagtttctgtagcgtcaaaagtgtttaaaggatcccacaaagactaaatcctcacctaaggctatgcaaacaaaggtgcctaaacccattcccaaccaaaatatgaaagaaacatgtagatgtttttataaagctagatttccctaagaaatattaatattaatgaaaacttttctcaatatattaatagaaacaagatgtctgcacatttttcccagtttatagatgttaaaaattaagtctcaacaaggtctttaatccatatgtgtataatcctaagtgtaataacaacttagggaaatttcagtaatttattcctacaataatgaatcacataaaatatatatatgtacacatggcagattatgctaccaagatccgaatgttcaaatcagaaggcagttcatcttgttagaaaatttaccc

SEQ ID NO: 149750 - DNA, 360 bp, Homo sapiens
cagcagctgacagtgctggtagcgcacttaggtgtaactttgatggaccaaagggggtaccattggttattaaaatcgctaatgactcaataccaagggctcttatatgagaatccctgaataactttagagattgtgaatactctaaacccaggtaccttgctccccaatgagtcagtgccaggaagtgctcttcattgccgtgtggatgtggtacatgaaatgttgtcaatccagagagatttgacagatcataccctcagggactcggacattgaatattttattgataggagcggcttcattctagggggggatccactgagcggagtatgcagtagtgactttggactcagtact

SEQ ID NO: 149751 - DNA, 380 bp, Homo sapiens
  misc_feature (1)...(380): n = a,t,c or g
ntctctgttaaacttctagctcgtccatggtttagtttgttgccctcatgggccataagatgagccataataaatttaaaattgaaatcatacgaagtatgttctctaaccacaacagaagtcagtaatcgaaataaattaaggaaatttacaaatgtggaaattaacacacttctaaataataaatgcattaaggaaaaaaatcactagcaaaattagaaaataatgaaatgaatgaaaacgaaagcacaacatagcaaaacttatgggatgcagctaaaacagcacttaacgaacaatttatgttataaatgcctatattaaagaaaggataaatgtctcaaatcaataaacccactttccatttgaagacaataaag

SEQ ID NO: 149752 - DNA, 362 bp, Homo sapiens
gagctgaatctgccagcaccagagcttccacgaaaaaggacagagaacttgtttctccagttagcagaatatgtagctcattccctcaatgttacttcctgatatgtatgtgagggaaccactatgggagactgatggccttgggaaacccaagaattagagcctactgatccagttcctgacataattccagtccagaaggcccaaactagcaacttttgggtcttgaaaacctctattaatggacaatactgcatacctagaaaaggaaaagacttcaccatccctgtaggaaggctcaattgactaggacagaagctgtataaaagcataacagggacacagggacagtcacctggtgg

SEQ ID NO: 149753 - DNA, 436 bp, Homo sapiens
aatgtttttgttagtggtaattaatctacacatcctgtttgtgttttaatttaaactgttctcatggagttaagcaatatttctgtaattcctgttttagtttatgagtgagtcagaaaatatttactatgccgaaataggtataataataacaattgttgtaacccttaaatcattaatcattgccacctactgtattaacccatcttcacactgctataaagtatacctcgtactgtcttatttatattgcattattgttaatttcgacatatacttcttattactttgtgttcctttctgttacttctcccttatcatctcattatcacctctattcttattaatatatatgatttttttatatatacatttcattttattacttttcgttatattctatacatttattcctttttccttctattaactaacg

SEQ ID NO: 149754 - DNA, 361 bp, Homo sapiens
gaaccttatttcaattataagacctgaggaagcaacgcctggaggacttgtccactctcattccgaggatatatcctgggtggaaatgccgaacacacttcctgctaatgaagaaaagccaaattgtgattgccggctggtacaggagatatgcgcaacataagaggaaccagccgacaaagagtaccgtcttagtacttcagtcttatatccggggtaggaaggctcgaaaaattctgcgggaactgaagcatcaaaagcgctgtactgaagcagtcactaccattgctgcatattggcatgggacccacgctctaacggaaactgaacgcttgaaggaagaggctaggcgtaagcatgc

SEQ ID NO: 149755 - DNA, 424 bp, Homo sapiens
gtacatttgacagcggacgacaaggttattattgcaggcctgtggagcattgtgaatgcgcaggatgctgtaggagaaaccctgggaaggctccagggtgtctacccatggatccagaggttctttggcagctttggcaacctgtcctctgcctctgccatcgtggtcaaccccaaagtcacggcacatggcaagaatgtgctgacttccttggtagatgccataacgcacctggttgatctcatgggcacctttgcccagctgcgggagctgcactgagacaagttgtatgaggatcctgagaacttgcataccctgggacatgtgctggtcaccgttttggtgatccatttcggcacataattcaccgctgaggtgcaggcttcctggctgatgatggatactgaacgtgccaatgccctgt

SEQ ID NO: 149756 - DNA, 637 bp, Homo sapiens; identical to SEQ ID NO: 144817
  misc_feature (1)...(637): n = a,t,c or g

SEQ ID NO: 149757 - DNA, 773 bp, Homo sapiens
  misc_feature (1)...(773): n = a,t,c or g
gacactcgctttttggaacgtctgaggttatcaataagctcctagtccagacgcccatgggtcatttcacagaggaggacaaggctactatcgacaagcctgtggggcaaaggtgaatgtggaaagatgctggaggagaaaccctgggaaggctcctggttgtctacccatggacccagaggttctttgaccagctttggcaacctgtcctctgcctctgccatccatgggcaacccccaaagtcaaggcacatggcaagaaggtgctgactttccttgggagatgccataaagcacctggattgatctcaaggggcacctttgcccaagcctgaagtgaactgcacttgtgacaaagctgcatgtggatcctgagaacttcaaagctcctgggggaaatgttgctggtgacccgtttttggcaatcccattttcggcaaaagaatttcaccccctgaaggttgcaaggctttcctgggcagaaagatgggtgacttggnagtggccaagtggccctgttcctcccagaataccactgaggctcactggcccatgaattcagaagctttcaaggataaggcttttattcttgcaagcaattacaaataataaatctatttctgctaagagatcaccaaannnnnatnntnnnnnnncccccggattttttatttagcgggccgcacctttttccccttttagggggggtaaatttatattgggccttgggccggggttttcaaaagcggggggannnnnnnnnnaaagagccc

SEQ ID NO: 149758 - DNA, 413 bp, Homo sapiens
gaaggtgcggcccccgcccctgaagaagacctttgactctgtggactacagggtcctgtcagaagtggacttcgaagagcgctttgctgagttgcctgagtttcggcctgaggatgatttgtcttcgttttcctagcccttcctgtccccacctccttgtatgtctactgctcttgctcatggagatttttcgctctagtcccttcactttttatggctgtggtgatcagatggcttatggtcagtagtctgtaacacataattgattcattgttgaaagtcaatttctggtattacttccatccttagaattgattttttgatttcatatctgttaactactccttcttctgtggcttaggtctcgatactttgtttctacctcgtaatggtcctccttatcgttcctatag

SEQ ID NO: 149759 - DNA, 407 bp, Homo sapiens
gatattatgactggaccccatgatgaggtggctgcgaagaacattcagctcacgaatgagatccaaacgcttgaaacggagtgacacgaggctaccaaagaattccaggtactctcttaattattttatatactacatttttgatggatgcatggcttttggaaaaagcattttaattacactaaattcattcttaaaaccttatcatcatccatggtaccaccatttgtaatagtcccgtatggaaaacaacccattgattccttcatagcagatcgacctactgttttggggtatagtcgtatgatgtaattctaccctccgctgagattgaccccattcataacgacttgctgctacccttacgagtatcatgaacacaatgttatctcctccgtgacagatcg

SEQ ID NO: 149760 - DNA, 257 bp, Homo sapiens
cccgcatggtgctgaggttgatgcccttgtctacggacgaggccctgtgctttcacgccatgttccagcccttccttgatatgatacacgaggctcagcaggccatggacatccacttccacagcccggactttcagcacccgccaacagaattcatacgagaaggcgacgatgaccggactgtgctccgtgagatgcaccacatctagacgggctgattgcgggtgaagtggcgctgtgaagagtggcggtagata

SEQ ID NO: 149761 - DNA, 417 bp, Homo sapiens
gggcgcggcaaggctagatgagagaacaaaggaaggaagtgacgacgaagacagtggctaaggagcgagagcagaacttgaagggaacaaagaaggagagtcagagggacaatacaaagcgaaaggggagagaagcgcgtggagcaagttgaggacagaaatcaggcaaaaggcggaggaaagcatcgatgggattaaagtggatgatccgtcataaatcagtatgaaagcgacatatactacaatgaaaataagttgaagacagataagaaaaatacggcaaagggagaagaaaaatacggcaaagggagaagggcaggaaagacagaacaagaatctctcacacaaaaggcatgatatatcttgttagaggtgaaatatttcatgcaattctgtctatctggataccttaaaatg

SEQ ID NO: 149762 - DNA, 398 bp, Homo sapiens
  misc_feature (1)...(398): n = a,t,c or g
nnnnnnnnnnnnnnnnnnnnnnnnnnnnnnnnnnnnnnnnnnnnnnnnnnnnnnnnnnnnnnnnnnnnnnnnnnnnnnnnnnnnnnnnnnnnnnnnnnnnnnnatagaccttgtcaacaaatgcaaatcaatgtgattcatcctattaacagaatggataaaaaacatgtaatcatcccaatagatacatctgataaaatttaacatcctttcatgatacaaactctcaacacattatgtatataataaatgtaccttagcataataaaggccatatatgacccatacaccgctgacatcatactcactggttaaacgtttaacgcctttttctctacgatttaactctccgacagggattactcagtatattaagtcttatgcataattgatgaatg

SEQ ID NO: 149763 - DNA, 474 bp, Homo sapiens
tttttttgtttttttttttacccctccttagctttatgcgctcagaaaccaaattaaaccccccccccatgtaacaggggggcagtgacaaaagcaagaacgcacgaagccagcctggagaccaccacgtcctgccccccgccatttatcgccctgattggattttgtttttcatctgtccctgttgcttgggttgagttgagggtggagcctcctggggggcactggccactgagcccccttggagaagtcagaggggagtggagaaggccactgtccggcctggcttctggggacagtggctggtccccagaagtcctgagggcggaggggggggttgggcagggtctcctcaggtgtcaggagggtggccgccttccgcacacttgaggaaccctcccctctccctcggtgacatcttgcccgcccctcagcaccctgccttgtctccaggaggtccgaagctctgtggga

SEQ ID NO: 149764 - DNA, 401 bp, Homo sapiens
ccccaagaggtcccacagagcttcggacctcctggagacaaggcagggtgctgaggggcgggcaagatgtcaccgagggagaggggagggttcctcaagtgtgcggaaggcggccaccctgccccagcctgatggaaccctctgtttacacacctgctagccccttcccctccggccagcctcaggccagccaggagccccctcctgtggcctccgagcaccctcctgacacctgaggagaccctgcccaacccccccctccgccctcaggacttctggggaccagccactgtccccagaagccaggccggacagtggccttctccactcccctctgacttctccaagggggctcagtggccagtgccccccaggaggctccaccctcactcgtgccgaaa

SEQ ID NO: 149765 - DNA, 442 bp, Homo sapiens
  misc_feature (1)...(442): n = a,t,c or g
ctgactacaatccaggtcttggttgagcattctttctattcagacttgatgcacttcactgattctgcgaggcttttgtcaatcctttcgctaatgtcagtgattttccaaaatttaccattttttattatgctgctgcttcgtactttccaaaaactgccctattctgctgcactttttaaaaatttaccttttagctctaggtaacataaacatttcatacttctattcctaccattcaaaaacacttgccacgggccttaaactcactgacgattcgcagcatatttctcatggcacatctgggagtcgatttaaatgtcttcttctttctaaagctgtgcttatgagctctctccctgccgtgtactcataactgttgaagctcttagatgtccgggaagtatccaacatggtccatgacaccctgggcattctgccn

SEQ ID NO: 149766 - DNA, 393 bp, Homo sapiens
ggaggtatggccgagggggctgatgggctacgtgacggtgacggagccgtcggcagtgctggtggtccgcggcgtgcgggaccggctggtcatcacctacccacacgagcaccatgccctcacgtcgagccgattgtacctgctgatgctgttcgtgggagacccaagtgggtccggctccaacggctcacccgactcgtagggtctgctgttgttccggaatgaccaggcccacattgacctgttcgtctgcttctccgtcatcttgtcctgcttcttcctgttcctctcactctgtgagctcctctgtaatgccaagcaggctatggaccagcggcaggagcagcgccggcacttgcaggagatgaccaagatggccagacgtccgttcgc

SEQ ID NO: 149767 - DNA, 720 bp, Homo sapiens
ctttagagatggggtgtcactacattgctcaggctggtcttgaactcctggactcaagtgatcctcttgcctcagccttccaaaatgctgggattacaggcatgagccaccactcctgtttccactttggagagctattggcaatatctattaaagttgaaaatgaacatatgctttagttacataaactaaagggggattttcagagatgtatgccaagggacatgtatggggataattgaatattatttataatagtataaaatggaaacaatgtccatacatagagtacttaaataaaattcagtgtatacatataatggaatattattcaaaggtaaagtaaaaataaatgtccgtcaacatgcctcattttccaaaaatgcatcgagtaaaagaatgcaagttgcctaaagaagtctctgatattatatattctctgatatttttcgtgagctatttcaggcacagcaaaaagaagccggcattatacccattatgtgtttaaaacaatactatatatgtatatgcatacatctatgcacgtgtgtttgttatgtatgtgtgcatacatatgttctatatataatatttaatatgaacacattaacaggaaggaaaccaacaaatgcatgtgcttgcctcagggataaggggaaggtaggaagaaggatgcactacagagaagtataaagagggcttctttatcactaacagttt

SEQ ID NO: 149768 - DNA, 408 bp, Homo sapiens
atcagaaaatagaaattatttaaccaccataatatttgtgaatttaaaaaaatgtcagtgatagctaacgtaagttggtattgcttttcttttctgtcttcctggaattaagagttatcattgtgtgggaatggtaattgacatcttttaacttactctgaaatgtttttggggggagtaaggtactttttacagtctactctaccagctgatctgtcaaaacatgcatacttgtatgccccgtaactgcgtttatttgcttgacggtatacatctgctttcactgaatggacccactctgctaataaaactgtctgcctgatgcccaaactttacgaacttacctatgtagggatagatacccttgctacacccgtgattaagcgttactattgctcttaagtccct

SEQ ID NO: 149769 - DNA, 410 bp, Homo sapiens
ggcacgagggttgacccacatttagctccatcctccatcctcaccctggcgcgtgggcgcagctgcaatgaccctcacaggccacgactgctctcttcaccctcatttcggtggcttagcagcaggctgggtgcagccctcagccaggagctggaaacacgcctcccccacctcccaacagtgggaccctcactccctcacctgcctgtgctcactgggcccagtgctgagcaaacaaagatgagttttcagtcccggggccacagtgcctctggcccaggtgaggcccctcctatacagcctcattacctcaggccctgagagccaggccatcccagatgaccagggtcccacaggcaccaccgcccactgggccgggacccgtcgtttccccatgtgcaaacaccaac

SEQ ID NO: 149770 - DNA, 435 bp, Homo sapiens
gattgcctgagaccagagtagggatggggtcaaccgccaagggacacaaggcaacactggggttagatacaaatgctctgtatcttgattgatggtaggtacaaggatccatgcattttccaaaactcacactacatacttaaaaggaatgcatttgatgtatttaaattatagctcaataaaattgatttttaaaaaacaattttcaatgaacaatctgaaaatgaaataagacaattctattcacaacaagatcaaaataataaatttaacaaaaacagcaaaaaaacctatacttggagaagtataaaacattgttgaaagaaatcaaagatctaaataaatggaaaaacatctcatgctcatggattggaacacttagcattgataaattggtaacactgtccaaactcaactacagagtcaatgtaatcc

SEQ ID NO: 149771 - DNA, 427 bp, Homo sapiens
ccagattttcaggtacctgatcatggagaaggagcaggagcacacctaccgtgggttcaagactgtgaaccggtggactgatgcatatgactatgcccaacattattctgaggcatctgtggcctcaaaggatgtatccgtttggtgattccatgattacctgggcatgagccgacaccctgacgtcttgcaagcctgacaggagaccctgcaacgtcatggtgctggatctggtggctcccgcaacctctcaggcaccaggaactgtcatgtggagcttgagcatgagctggctgatctgcacctgaaggactcatccctgatcttctccttctgctttatcgccaatgactgtactctcttcaccttggccaagatcctgccagggcgcgagattcactcagacgcatgccagcatgctttcatg

SEQ ID NO: 149772 - DNA, 1234 bp, Homo sapiens
gtggagatgaatggcgggcgcggcgaccgggagccggacccctgggaggtcggagcttgtcgagggatgcggctggcgctgcccggagcatggcgaccgcgtggctgagctcttctgtcgccgctgccgccgctgcgtgtgcgcgctttgcccggtgctgggcgcgcaccgtggccaccctgtgggcctggcgctggaggcagcggtgcacgtgcagaaactcagccaagaatgtttaaagcagctggcaatcaagaagcagcagcacattgacaacataacccagatagaagatgccaccgagaagctcaaggctaatgcagagtcaagtaaaacctggctgaaggggaaattcactgaactcagattactacttgacgaagaggaagcgctggccaagaaattcattgataaaaacacgcagcttaccctccaggtgtacagggaacaagctgactcttgcagagagcaacttgacatcatgaatgatctctccaacagggtctggagtatcagccaggagcccgatcctgtccagaggcttcaggcatacacggccaccgagcaggagatgcagcagcagatgagcctcggggagctgtgccatcccgtgcccctctcttttgagcccgtcaagagcttctttaagggcctcgtggaagccgtggagagtacattacagacgccattggacattcgccttaaggaaagcataaactgccagctctcagacccttccagcaccaagccaggtaccttgttgaaaaccagcccctcaccagagcgatcgctattgctgaaatacgcgcgcacgcccacgctggatcctgacacgatgcacgcgcgcctgcgcaatgtccgccgatcgcctgacggtgcgctgcggcctgctgggcagccatggggcccgtgcccgtgctgcggttcgacgcgctctggcaagtgctggctcgtgactgcttcgccaccggccgccactacttgggaggttgacgtgcaggaggcgggcgccggctggtgggtgggcgcggcctacgcctcccttcggcgccgcggggcctcggccgccgcccgcctgggctgcaaccgccagtcctggtgcctcaagcgctacgaccttgagtactgggccttccacgacggccagcgcagcgcctgcggccccgcgacgacctcgaccggctcggcgtcttcctggactacgaggccggcgtcctcgccttctacgacgtga

SEQ ID NO: 149773 - DNA, 510 bp, Homo sapiens
tgctgaaccctgccatcttagacacggctcctcccttttccatgcctctgtttctgcatctgtaaagtggagaccataatgcagtcgcctctcctgggctgctgtgaggattaaatgagctcttgggcgagattatgcgaatctccagttgtgtggtatttttagcacgtcttatttgtctgcttgcataagctccgggcgctcatttctcaacaattccttacaggcataaactgccagctctcagacccttccagcaccaagccaggtaccttgttgaaaaccagcccctcaccagagcgatcgctattgctgaaatgtaagacccccgggagtggggatagggtggagacggtggagatggtgggatgttgggtggaggaggatcatggaaatggaggtccctctttttttctcattagaatttatttatttatttatttattttaagaacttgttttttaaaaaatgtttattattaaaggcaataaaacaatacatgttcattgt

SEQ ID NO: 149774 - DNA, 426 bp, Homo sapiens
  misc_feature (1)...(426): n = a,t,c or g
gccgacatgaaggcccaccatctgctgcacagcggggggatggggttctcctgtgagtgcagcacgggctttgtgaaacactcatagctcatcgagcacatcagaacgcacacgggagagaagccttttcagtgtcccaagtgtgacaagagtttccgcctgaaggcgcagctgctcagccatcacggcctgctcactggggacaggccttttcactgccctgagtgtgacaagaacttacgggaaaggggacacatgctgaggcaccagcgcatccacaggcccgagaggccctttgcctgtggctattgtggcaagggcttcatttacaagtctaagcttgctgagcacatcagagtacacacaaaatcctgtcctgctgcaaatgaactggacattaagaaaatgcttcacccactggttgcn

SEQ ID NO: 149775 - DNA, 1121 bp, Homo sapiens
ctcagttcataccactctctgtggtttacttttttccagcctcactggaagaaaatggttgcttgctataaacacttgagaggtgctctgtgtttctccctttgggtaaagctttctaggctggtcctaatctgggagcctctaaaactctgagatgtggagcgagacaggaactgggcaggggccacccttttctctttgaccatccccaactgctttttttcttgctttactttactcacttgtcttccacctcagcctgcagtgagtggcttttgtcatcaggcattaataacgcaaagtgcctcagagcagaagagttaactatttgtttacttagctaaaaacatctggacttttctccatagccaggctcctgcttgctgagccggcttgttctcacctcgaggggcatgggcctccaccctgccgtttggggtgaggggatccttggccagggtggtttccccgccgtcataggagggaagtcagtgggaggctcagaaggccttggctatacaaccagtgccatgcggcgcagtcagggtcccatggacgacttccatcagctcacccgcctccatccccaaacagagtgtaggcaagggctgtgactgcctcaggtaattgggtgattttgctccagcaagaggagaggaagcatgtgagtgccacactgaacctttcagaaacagccgtggggtcgggggtgcttgggccaggccaggatacttggtgttaagcctgctctctcttcagtgccccgactcggcttgcaatcaggacctgctggcctacctgcaacgcatcgccctctactgccaccagctgaacatctgcagcaaggtcaaggccgaggtgcagaatctcggcggagagcttgttgtctctggggtaagcattagctgaacaaaaagagggccagtgggaacgtgctgacccttgtcagaaatgaaagtcacctcctatccgcataaacacctgccctgggaaagtgtgctgtgcagaaactccaagtcctgtcccagtctctggagaccaaggtctgtccatcatctgttccctgtagaactgtgacacctgcggagcactgcaagggctgaaaggctggcctcctcccc

SEQ ID NO: 149776 - DNA, 3528 bp, Homo sapiens
ggaaatgactgctgtccatgcaggcaacataaacttcaagtgggatcctaaaagtctagagatcaggactctggcagttgagagactgttggagcctcttgttacacaggttacaacccttgtaaacaccaatagtaaagggccctctaataagaagagaggtcgttctaagaaggcccatgttttggctgcatctgttgaacaagcaactgagaatttcttggagaagggggataaaattgcaaaagagagccagtttctcaaggaggagcttgtggttgctgtagaagatgttcgaaaacaaggtgatttgatgaaggctgctgctggagagttcgcagatgatccctgctcttctgtgaagcgaggcaacatggttcgggcagctccagctttgctctctgctgttacccggttgctcattttggctgacatggcagatgtctacaaattacttgttcagctgaaagttgtggaagatggtatattgaaactgaggaatgctggcaatgaacaagacttagggaatcagtataaagccctaaaacctgaagtggataagctgaacattatggcagcaaaaagacaacaggaattgaaagatgttgggcatcgtgatcagatggctgcggctagaggaatcctgcagagcaacgttccgatcctctatactgcatcccaggcatgcctacagcaccctgatgtcgcagcctataaggccaacagggacctgatatacaagcagctgcagcaggcggtcacagggatttccaatgcagcccaggccactgcctcagacgatgcctcacagcaccagggtggaggaggaggagaactggcatatgcactcaataactttgacaaacaaatcattgtggaccccttgagcttcagcgaggagcgctttaggccttccctggaggagcgtctggaaagcatcattagtggggctgccttgatggccgactcgtcctgcacgcgtgatgaccgtcgtgagcgaattgtggcagagtgtaatgctgtccgccaggcctgcaggacctgcgtttcggagtacatgggcaatgctggacgtaaagaaagaagtgatgcactcaattctgcaatagataaaatgaccaagaagaccagggacttgcgtagacagcttcgcaaagctgtcatggaccacgtttcagattctttcctggaaaccaatgttccacttttggtattgattgaagctgcaaagaatggaaatgagaaagaagttaaggaatatgcccaagttttccgtgaacatgccaacaaattgattgaggttgccaacttggcctgttccatctcaaataatgaagaaggtgtaaagcttgttcgaatgtctgcaagccagttagaagccggttgtcctcaggttattaatgctgcaacctgggctttagcaccaaaaccacagagtaaactggcccaagagaacatggatctttttaaagaacaatgggaaaaacaagtccgtgttctcacagatgctgtcgatgacattacttccattgatgacttcttggctgtctcagagaatcacattttggaagatgtgaacaaatgtgtcattgctctccaagagaaggatgtggatggcctggaccgcacagctggtgcaattcgaggccgggcagcccgggtcattcacgtagtcacctcagagatggacaactatgagccaggagtctacacagagaaggttctggaagccactaagctgctctccaacacagtcatgccacgttttactgagcaagtagaagcagccgtggaagccctcagctcggaccctgcccagcccatggatgagaatgagtttatcgatgcttcccgcctggtatatgatggcatccgggacatcaggaaagcagtgctgatgataaggacccctgaggagttggatgactctgactttgagacagaggattttgatgtcagaagcgagacgagcgtccagacagaagacgatcagctgatagctggccagagtgcccgggcgatcatggctcagcttccccaggagcaaaaagcgaagattcgggaacaggtggccagcttccaggaagaaaagagcaagctggatgctgaagtgtccaaatgggacgacagtggcaatgacatcattgtgctggccaagcagaatgtgcatgattatgatggagatgacagactttacccgaggtaaaggaccactcaaaaatacatcagatgtcatcagtgctgccaagaaaattgctgaggcaggatccaggatggacaagcttggccgcaccattgcagaccattgccccgactcggcttgcaagcagggcctggtgggcttacttgcaaggcatcgccctttactgccaccagctgaacatctgcagcaaggtcaaggccgaggtgcagaatctcggcggggagcttgttgtctctgggaactgtgacacctgcggggcactgcaagggctgaaaggctggcctcctcccctttgcctggccactcactgggtggacagcgccatgtccctgatccaggcagccaagaacttgatgaatgctgtggtgcagacagtgaaggcatcctacgtcgcctctaccaaataccaaaagtcacagggtatggcttccctcaaccttcctgctgtgtcaatgaagatgaaggcaccagagaaaaagccattggtgaagagagagaaacaggatgagacacagaccaagattaaacgggcatctcagaagaagcacgtgaacccagtgcaggccctcagcgagttcaaagctatggacagcatctaagtctgcccaggccggccgcccccacccctctggctcctgaatatcagtcactgttcgtcactcaaatgaatttgctaaatacaacactgatactagattccacagggaaatgggcagactgaaccagtccaggtggtgaattttccaagaacatagtttaagttgattaaaaatgcttttagaatgcaggagcctacttctagctgtattttttgtatgcttaaataaaataaaattcataaccaagagatccacattagcttgttagtaatgctctgaccaagccgagatgccattctcttagtgatggcggcgttaggtttgagagaaggaattggctcaacttcagttgagagggtgcagtccagacagcttgactgcttttaaatgaccaaagatgacctgtggtaagcaacctggcatcttaggaagcagtccttgagaaggcatgttccagaaaggtctctgaggacaaactcactcagtaaaacataatgtatcatgaagaaaactgattctctatgacatgaaatgaaaattttaatgcattgttataattactaatgtacgctgctgcaggacattaataaagttgcttttttaggctacagtgtctcgatgccataatcagaacacactttttttcctctttctcccagcttcaaatgcacaattcatcattgggctcacttctaataactgcagtgtttccgccttgcgttgcag

SEQ ID NO: 149777 - DNA, 458 bp, Homo sapiens; identical to SEQ ID NO: 119947
  misc_feature (1)...(458): n = a,t,c or g

SEQ ID NO: 149778 - DNA, 764 bp, Homo sapiens
cgggccccctttgcattgcactcgcgctgcaggaattcggcacgaggcgccgctgggcctgcaggtctctgtcgagcagcggacgccggtctctgttccgcaggatggggagtgttaaagctgttaagaataaggcctactttaagagataccaagtgaaatttagaagacgcccgaaagggtaaaactgattattatgctcgttaacgcttggtgatacaagataaaaataaatacaacacacccagatacaggatgatagttctgtgtgacaaacagagatatcatttgtcagattgcttatgcccgaatagagggggatatgatagtctgcgcaacgtatgcacactaactgccaaaatatggtgtgaaggttggcctgacaaattatgctgcagcatattgtactggcctgctgctggcccgcaggcttctcaataggttttggcatggacaagatctatgaaggccaagtggaggtgactggtgatgaatacaatgtggaaagcattgatggtcagccaggtgccttcacctgctatttggatgcaggccttgccagaactaccactggcaataaagtttttggtgccctgaagggagctgtggatggaggcttgtctatccctcgcagtaccaaacgattccctggttatgattctgaaagcaaggaatttaatgcagaagtacatcggaagcacatcatgggccagaatgttgcagattacatgcgctacttaatgcaagaagatgaagatgcttcg

SEQ ID NO: 149779 - DNA, 400 bp, Homo sapiens
cagctaaccacttgcatctttcgacacaggggacgttgaatgcgctctatgtatgagattattctatgagccagacacaacaccttgcgggcatactctttgcttaagatgcctataacgatgcctatatcacaacgcaaagtgtccattgtgcaaagacggactttcacagtgataggcatcgataaaatacagctacaatgtaatagtggaggagctcatagctaaattccttccagaagaactgaaggagcgagagaagctgtatgaataggaaatggaagagctttataaccttaataataatgtgcctattctcatgtgtactatggcctatgccaacgttacttgtcccctgcacatgtttgagccttgttaccgactgatgattcgtatatgg

SEQ ID NO: 149780 - DNA, 400 bp, Homo sapiens
cagtttaccacttgcatctttcaacacatgtaacgttgaatgcgctctatgtatgagattattctatgagccagtcacaacaccttgcgggcatactttttgcttaaaatgcctagaaagatgcctagatcacaacgcaaagtgtccattgtgcaaagacggtctttcacagtgcttggcatcaagaaaatacatcaaaaatgtaataatggaggagctcatagctaaattccttccagaataactgaatgaacgaatgaagctttatgaatatgaaatggaagaactttctaaccttaataataatgtgcctattttcgtgtgtactatggcctatcccaccgatccttgtcccctgcacatctttgagccttgttaccgcctgatgattcgtatatgt

SEQ ID NO: 149781 - DNA, 378 bp, Homo sapiens
  misc_feature (1)...(378): n = a,t,c or g
gcagggcgcacggggaggcccgaggagcgggcccccgagtccaagtccggcagtggcagtgagtctgagccctccagccgagggggcagccttcggcggggtggggaagcatgtggtactagcgatgggggcccttctccattctgaggctcatctgttgtttcttttactcttctatcatatctagggtattattcttatttactgtctactgtatgattatcctttctttctttttatgttactttgactgtcttctttctattttttatttgattcttatggttcttctttatttattttcnnnnnnnnnncttattggtttagtcgttcttttcgttatttgtctctcttttgtgctttctctgtcttgttctg

SEQ ID NO: 149782 - DNA, 446 bp, Homo sapiens
  misc_feature (1)...(446): n = a,t,c or g
aatttctaagaaatcagttaggaagacgcaaaaggggaaaactatagtattctagtaacaaataatccaggactggacttgaagggaaggagtcagggtaaagaagtaatgtagaaaatgttttgaaaatcccaagattcnnnnnnnnnnnnnnnnnnnnnnnnnnnnnnnnnnnnnnnnaaattggaaaaaagaaaatcccaagatattcccaagttgtaaaaatggtaaagatttttcctcctctagattatgaaagtatttagacaagtataaaagtagtacataaagatgaaataatcatatttttcctacatcattttaataattcgaggcaatgaatctgaaggtggtttctttgaaaactgatacttttgcctgctcataaatgggggatcttggtctggcgaacctccgaggcggaacagccatacctttaattgtcg

SEQ ID NO: 149783 - DNA, 404 bp, Homo sapiens
ggccccccattgcgggtagtacccccttatagcgccgaaggtgtagaggctgccccaggtcacacgtccgggtctgctggccttggaggccaagctcttctcccatcatccctggggggccctggggaggcgggcctggccacgtagatcctgagcagcagtgccctccaggatcctgaagcagtacagccaccccaacatcgtgcgtctcattggtgtctgcacccagaagcagcccatctacatcgtcatggagcttgtgcagggtgagcgcggggcgctgagctccaggtagggcgcgcagcctggtcaggtggcagccttacctcaggaggctcagcaggggtcctccccacctgcagggggcgacttcctgaccttcctccgcacggagggggcccgcc

SEQ ID NO: 149784 - DNA, 443 bp, Homo sapiens
  misc_feature (1)...(443): n = a,t,c or g
nnnnnnnnnnnnnnnnnnnnnnnnnnnnnnnnnnnnnnnnagaccggcccttagttttctttaatgtctcattttaaagcttttgtttaggaatgtatcnnnnnnnnnnncccnnnnnnnnnnnnnnnnnnnnnnnnnnnnnnnnnnnnnnnccaggggaccttgggttaaactgggatgataaggggcccctggacaaaggttgggcccggggccattgaaaaacccccagtaggtgacaaagtccccaatggctgcccaaaatccttggggaacaggcaaccttgcttttaagttttggaagtcaatgaaccttacgttcccaaaaagtttaaggctgaaccattccccttccatgcaaatatatgcccactttctgaaaaggagagacaattcagaaaacaaactgcacttgttgacctttgaaaacccaagcccaggga

SEQ ID NO: 149785 - DNA, 789 bp, Homo sapiens
tccccgatcaaacccttttatgttgctgtgcggagatgggttctcactgtgttgctcaggctggtcttgaactcttgggcttaagcgatcttcccatcttggcctcccagagtgctgcgattacaggcgtgggccaccacgcctgtcctgtgctaggctcttaacgtccttcccagatgttatgtcccttcccttggtggctgctgctttctgccacattttaccttgccgttccgcaccttctaccatgtctccttttccagcctcattccctgagatgtagccggagttccagttcagccaacctgcccgttgttttctctcctggagctgggtgtttgagtctcctctcctgcatggagtgttcttccttcccagctaaagtcctggtcatcccatttccatctgaaaggcccccttgttcatgaagcctctcatggtccttccccctaccccagccaggtatactttctctcctcttggaattatcctataggaagaacatggtggcttgacctgggttccagtctcacccatctgtttacctggggagtgatcttgagtgggtcaatttatgttctcagtgccttacaaaatggggcagaggatacctaacccccaggagctggtgtggctggggtaccttacacagggcctgactgtagtagcttctctccaagcattggtgtcttacctcttctgtttctctaatggtgttttgcacattcattgttgtattagagtttgtttttttgtcttaccttgttttaataaattataatcttatgg

SEQ ID NO: 149786 - DNA, 449 bp, Homo sapiens
aaatatagttagtcaaaataatgatctccctcagacagtaatttggatgggggattgcatcataagtttagaaactagaattcaaatgcaatgtgactggaatacatccgatttttgcgttactcctcatagttagaatgaaacagaacaccattgggaaattaaatgccatctagtgggcagagaggaaaatctcacccttgatattgtaaaagtaaaagagcaggtttttgaagcctctcaggctcacttaaccctgctccctggaactgatattttcagcgaggcagccaatgggttgtctgcaatcaattctcttaaatggattaagaccactggaaactctacacttgtaaattttgttctaataattatatgcttgttcttggcagcggctttctctccagaagcggcttccgcatctgtagattaaaaggagacagcacaag

SEQ ID NO: 149787 - DNA, 585 bp, Homo sapiens
caacaatacaggattatctgaatcgaccaaggcctacctgggaagaagtaaaagagcaactagaaaagaaaaagaaaggctccaaggctttggctgaatttgaagaaaaaatgaatgagaactggaagaaagaactggaaaaacacagggagaaattgttaagtggaagtgagagctcatccaaaaaaaagacagagaaagaaaaaagaaaagaagaaatctgataggtattcatcttcttcttcatcaagctctgattcttccagcagttcttctgattctgaagatgaggataagaaacaaggaaaaccggagaaagaaaaagaagaaccgttcacataaatcttctgaaagctccatgtcagaaactgaatcagacagtaaggatagtttaaaaaagaaaaagaagtcaaaagatggaactgagaaagaaaaggatattaaaggactcagcaaaaagagaaagatgtattctgaagataaacctttatcatctgagtccttgtcagaatcagagtatattgaggaggtgcaagcaaaaaagaagaaaagcagtgaagaacgagaaaaagcaacagaaaaaac

SEQ ID NO: 149788 - DNA, 566 bp, Homo sapiens
ttcttcttaaaaaataagcagagcagagtggggaggcggcaagaggacctgtggcaggccctcttcggccatctctctggcctggtttccctcggcgtgccactgtgtgctcagtccagcaccatggggaagcgggacaatcggggtggccctatatgaaccccaatagcaatggcgagatcaaggggtcccaatcccagtcttcagggccaacaatacaggattatctgaatcgaccaaggcctacctgggaagaagtaaaagagcaactagaaaagaaaaagaaaggctccaaggctttggctgaatttgaagaaaaaaatgaatgagaactggaagaaagaactggaaaaacacagggagaaattgttaagtggaagtgagagctcatccaaaaaaaagacagagaaagaaaaaagaaaagaagaaatctggtaggcagttcttctgattctgaagatgaggataagaaacaaggaaaacggagaaagaaaaagaagaaccgttcacataaatcttctgaaagctccatgtcagaaactgaatcagacagtaaggatagttta

SEQ ID NO: 149789 - DNA, 382 bp, Homo sapiens
ggttttgatttgcatttctctaatgatcagtgatattgagctttttttttttttttttttacatagcctgggcgacagtgagactctgtctcaaacaaacaaacgaaaacaatgataaaagagatttaacatccctgaaagttgtaaggaagtaaaccctaaacctccacccctccattaaagcaatgattataagactatactttgaacaattatatgacaacagattagctaacctagatgaaatggacatatttctagcaacacagaaattgccaaaactggctcaagaagaagtaaaaaactttagtagatgtgtaacaatggattatgtcaataatcaaaacctctgaacaaataaaggcccagaaccagatgactt

SEQ ID NO: 149790 - DNA, 356 bp, Homo sapiens
agggaggagctgtgatcccaaaagtgtgggccaaaccctgtgtgttgctcttctgtctgtccccctgccaggcgaccctggacagagaaagctgccaagtcaaaactcagaggaggagctgtgatcccaaaagtgtgggccaaatcctatgtgttgttctttccctgtccccctggcaggtggccctggacacagtcgtagaagcacacaaagcagaacaaggtaactgaagccccagcttcctggctggaggacagaaaagggagccccagaggagatcgggaaaatgatgctgcaggttattgacgaacgcccaggctcagctctaagctgcagatgctaggatctgatcctaa

SEQ ID NO: 149791 - DNA, 623 bp, Homo sapiens
agcagagacggggtttcaccatgctagccaggatggtctcgatctcctgacctcatgatccacccgccttggcctcccaaagtgctgggactacaggcgtgagccacagcgcccagctgacacttggtttcttaaaagcaccacttagaaaatagtccagtccgtgtgcaacgactggatgcacacagaactggcagctggcatttctcaggggccagctgtgtgcacagagccacttcgtcctcacaaacacactggtcacaggcactactgctgtccaagacaggaagggttacaaagatgagtgaacctcctaaagcaatcggcaaggacagctggacagctgtgtagagactgggccccccacactacgtgcgcaggctccccgcctcccaagtcagtgccggtgctgcagggccagggcacacgcaggcctccctcctgcctttggggaaccttgaagttgaggctcggaccccaacagccgtctcacactgagtaagactctcccacctccaccgcaagggaagatgcaaaattttctcttaagactgggaatatgctataataagtgattcagaatctcttctgtcgatggcagtttcttgattaattctcgtgcc

SEQ ID NO: 149792 - DNA, 9139 bp, Homo sapiens
  misc_feature (1)...(9139): n = a,t,c or g
gccgactgaggcacgagcgggtgacgctgggcctgcagcgcggagcagaaagcagaacccgcagagtcctccctgctgctgtgtggacgacacgtgggcacaggcagaagtgggccctgtgaccagctgcactggtttcgtggaaggaagctccaggactggcgggatgggctcagcctgtatcaaagtcaccaaatactttctcttcctcttcaacttgatcttctttatcctgggcgcagtgatcctgggcttcggggtgtggatcctggccgacaagagcagtttcatctctgtcctgcaaacctcctccagctcgcttaggatgggggcctatgtcttcatcggcgtgggggcagtcactatgctcatgggcttcctgggctgcatcggcgccgtcaacgaggtccgctgcctgctggggctgtactttgctttcctgctcctgatcctcattgcccaggtgacggccggggccctcttctacttcaacatgggcaagctgaagcaggagatgggtggcatcgtgactgagctcattcgagactacaacagcagtcgcgaggacagcctgcaggatgcctgggactacgtgcaggctcaggtgaagtgctgcggctgggtcagcttctacaactggacagacaacgctgagctcatgaatcgccctgaggtcacctacccctgttcctgcgaagtcaagggggaagaggacaacagcctttctgtgaggaagggcttctgcgaggcccccggcaacaggacccagagtggcaaccaccctgaggactggcctgtgtaccaggagggctgcatggagaaggtgcaggcgtggctgcaggagaacctgggcatcatcctcggcgtgggcgtgggtgtggccatggtcgagctcctggggatggtcctgtccatctgcttgtgccggcacgtgcattccgaagactacagcaaggtccccaagtactgaggcagctgctatccccatctccctgcctggcccccaacctcagggctcccaggggtctccctggctccctcctccaggcctgcctcccacttcactgcgaagaccctcttgcccaccctgactgaaagtagggggctttctggggcctagcgatctctcctggcctatccgctgccagccttgagccctggctggtcttgtggtccttctgctcaccgcccatcagggttcttcttagcaactcaggagaaaaatgcttccccacagcgtccctggccgcaggtgggctggacttctacctgccctcaagggtgtgtatattgtataggggcaactgtatgaaaaattggggaggagggggccgggcgcggtggctcacgcctgtaatcccagcactttgggaggccgaggcgggcggatcacctgcggtcaggagatcgagaccatcctgggttaacatggtgaaaccccgtctctactaaaaatacaaaaaaaatttagccgggcgcggtggcgggcccctgtagtcccagctacttgggagggttaggcaggagaatggtgtgaatccgggagcgccaggttgcagtgagctgagattcgtgctactgcactccagcctgggggacagaaagagactccgtctcaaaaaaaaaaaattatatatatataaatatgtgtgtgtatatatgtatattatatatgtatgtattatatgtatgtatattatatatatatagtacacaaggttataagtggtgcacccgaagaggagggcacttaccatgaatggagcttgctgagctggaagttgccctggttgagtcggtgactgaatgtgaaggcctcagacattacactactggagactttataatctgtacacctaggctacactaaatttataaaaatatatttttcttcagaataaatcaaccttagcttactgtaactttataaactttttacttcgactgttgtaataatacttagcttaaaacaaacacattatttagctgtacgtaaatattttctctgcttatctccttatttataagttttctattttaaaattttttaatttttttcttaaaaaatttttttttgttaactaagacacaaacacagcacacacagtagccttgacctacacagggtcaggatcatcaagacatcactaggagataggaatttttcagctctgttataatcttatgggggccaccatcacatacgcagtctgtacttgcaaaacattatgtggcatgtgactgtaattgtagacctaaaatccatttcctacctgccctaatttcggtctttattttaaacccttgtttcatttattcttggggaaaattcccaaatcctgtgtttgtttttttagtaattattttgccaaagaaacataagaagaaaaaggagcggaagtcattgccagaagaagatgtagccgtgagtagtaatgtgtttgacttcactttgactaaaaagaaagtttacttaaataacaaactaaaggaaagaagtgtttttaaaggtttccaaggaatgggccagcattggtagtcattgtgtagattcgaaaaagcactgaaatgacacagccccagacagtccaagtgtccttcaggcatagcttactaaatggtgctggccttaccaactgctgtctctgaatttgtcttccttatgccacccacagacccgccatccccctttctctttaaatgtttggacccatcttagtgacatttcacttcccctctgtactcctggttcatttcttctctctctttcccttggaggtcccagtgaaaaggcataggaagccttgttttctgtttaaaaggcatacatttccatggcagtaatggaattgttcaaaatcgggtgggaagtttaataggttatatttctgtcctgtcgaaggaaatacaacacgctgaagaatttcttatcaaacctgaatccaaagttgctaagttggacacgtctcagtggccccttttgctaaaggtatgtggttaaaatcgtgcatcagatgaatgcctgcttttacgttatttccaagtgttaaacaattgattgagaatgcttactgctggcatccttgactttgggaagtgcccactgatacagtttaaagcaggattccttaaggtatctgaaatgagaaccaagtttttaaaaaattggcagtgcactcaacactgttgtagaacacatgtccccacaatgttaaattgctgagtttgtcaacagttctcagtttttgtacttagtccatcttgcagacctatgccagtttgtgggccacatagtggtactgactctttttttacatgtgctcacgacatggtattttgttttgtgttgtgtcgttgctttgtagaattttgataagctgaatgtaaggacaacacactatacacctcttgcatgtggttaaaatcctctgaagagagagattggggactatatcaggtaagtgttgggaggaggcactgtgcaaacttactttcttttgaaaatgctttcacatcagctattcaggaaggcagtggcatgccagaatagctttgtcttgaatatataacctgtacccgcagtgaattatttttctttttaacttttcagatttgttgtttcactggagcattaagagtgggtgatacattaattttttttttttccattccaggacaggtttcattaatcttgacaagccctctaacccctcttcccatgaggtggtagcctggattcgacggatacttcgggtggagaagacagggcacagtggtactctggatcccaaggtgactggttgtttaatcgtgtgcatagaacgagccactcgcttggtgaagtcacaacagagtgcaggtatgtgggagagggagggaaggactggctagagtgaaaagctttctgtatttcccttctatgttttgtctgctggaaactatttcttcattaagaaaaaaaaaaatcctaaagcaaggatattgttttggtttctgtgtacgttctgtcccctgccagatcttggtggtccgcgctttttggaattccacatactaagcatgtattcatcaagctgactggatccatttgtccgggttcagctctcagcttgtcactccaggcttctcactctgtgctaccgcttctgcctaaagtatccttcgttcatttttatctgagaaaagcctgcttatcttgcaaggctttttccacgcagcttctacactgagtactcccaactgtccctgttagtacattgaattcccagtgagaaagtgtcttcattctttcccacatcatcaccatgaaatctctcttaatgcaaattttatagaaacacaaggtcaaactgccgcttttcctgctgtgcaaaatgggagtgactgagcatataagaaatatggaaaacagaaaactcagtggccacacctgactactcttttgtcatttttcaggcaaagagtatgtggggattgtccggctgcacaatgctattgaaggggggacccagctttctagggtaagtctgcaattgtagggaggacaccctttgttgacttggatctctgagcccctaaacatctggagatgggttagctgtcctgactgactccttttgtccccttttcagtcggctgctgcagccagcctggaccagtgactgcacatgtacattctgatgaggtgtttgttttcatttgtgtttgttcttaggccctagaaactctgacaggtgccttattccagcgacccccacttattgctgcagtaaagaggcagctccgagtgaggaccatctacgagagcaaaatgattgaatacgatcctgaaagaagattaggtgagtcattaggcctgtgagtgggtatgaacacattcttcaggattctgttctcttattaaaagtagatgcccttgaagttgaagactttctaaaacctgccctacagctgggatattgtctgtgggcgatagtttttgttatcttttgttgaaaaagtgaacagtgcctagtaaagtgagatggcttttacaccttttatgatgactgcttctgctggagttgaaatgttttcattctgcatttgtgtagttcggtgctttgttcaaaggtaagtgttttcaccaaagtatgttttgcatgtgttttttatttgctgcaattttgactgcttagaagtttctgttgtcagaagtaaatttaagacaatgccaattttcctcccatccatgaaacataccatgctgaatatacctgcaacttaagtgttaaaaattctgctaatatcagaattacagatctttttttttttttttttttttttgagacggagtctcgctctgtcgcccaggctggagtgcggtggcatgatctcggctcactgcaaactctgtctcccgggttcacaccattttcctgcctcagcctcccaagtagctgggactataggcgcccgccatcatgcccggctaattttttgtacatttagtagagacggggtttcaccatgttagccaggatggtcttgacctcctgacgtcgtgatccacccgcctctgcctcccaaagtgctggaattacaggcgtgagccaccgtgcctggccagaattacagatctttacagcaaatgcttatattttaagaagtgtgtctgtcacctctagtcttggtggctcagatgaaggataactgcatttctcaaccagtgatgtatttacagtaggtgctgcttttcttttgtgtgtgtgtatcttaggaatcttttgggtgagttgtgaggctgacacctacagtcggacattatgtgtgcaccttggtttgttattgggagttggtggtcagatgcaggagcttcggagggttcgttctggagtcatgagtgaaaaggtatgtgttacggggctagaagttttagagctggttcttaccatctgccagcctttgatggcactccacttgcttcatgtcgtgggaaagatgctttccaaagtgttgagttcagtccagggcagcttccctgttctgttaattaaactttgggacattaaaatgggctaagggagatgattgggtagaaagtattattctattcatttgcctcccagcctacaaaaatgcctgcttggggtctaatacttcaacggttaaagatgcctggaagagggcgcggtggctcacgcctgtaatcccagcactttgggaggccgaggcgggtggatcatgaggtcaggagatcgagaccatcctggctaacaaggtgaaaccccgtctctactaaaaaaatacaaaaaaaattacccagggcgcggtggcgggcgcctgtagtcccagctactcgggaggctgaggcaggagaatggcgtgaacccgggaagcggagcttgcagtgagccgagattgcgccactgcagtccgcagtcccacctgggcgacagagcgagactccgtctcaaaaaaaaaaaaaaaaaaaaaaaaagatgcctggaagagccaggactgaagaggctgaaaacataatgagcttggactagtaaacaagtgacattcagttttaggaagtttggggtctgatgggctgagatacaaataaactgaattattttcatacatggctgcttttcaggaccacatggtgacaatgcatgatgtgcttgatgctcagtggctgtatgataaccacaaggatgagagttacctacggcgagttgtttaccctttggaaaagctgttgacatctcataaacggctggttatgaaagacagtgcagtaagttccgggttaggagtttatatttggaaagaacgtactccaaagatgacgcttgctctttttattgttttccttgggttttattttatttttttcaagtccaaaccaagtatattaatttaaagtaaaagtttaatggtaggcatacttaaaaataaggcacattaggccaggcacagtggctgatgcctataatcctagcactttggcaggctgaggcaagaggatcacttgagtccaggaaggagtttgagaccagcttgagcccaggagatcaaggctgtgagctgtgtttttatgatgatcagagagttggccttttataaattaaaacattgtctttttctctaacttgagggataaaaatttctggatatttaaaatgtttgtagttggtaattatttatattcaaatcttgtatagatgttcacattttttgtatgtgtataggctgtaataaatactgaaagatggcaccataatagttgaaaaaactcagtcacaaaacagtggacaacataaatgtgatgtcctctccttatcaaaccattggcttctgggtgaatgtaaagggaggggagaatgtgatcaaaagaggtctaggtgagtggagatggtatgaggcagatgggtgcattgggtaccattgaacctctggagaggtagccttaacttgtacccactgacctataaattctgcaccaagacttttgtgtgattggttcaacagggctcagtaatcttgttctcaagttctttaagagcctgttattgcctggatctccagtaaatctgttctttctcctcataaggaggagagaggagtaattaaggaatgccaaggctatttttatgtttcaaatgaaaatatggaccacgtgcggtggctcacacccataatcccagcgctttgggaggccgggccaggcaaattgcttgagctcaggagtttgagaccagcctgggcaatatggtgaaaccctgtctctattaaaaatacaaaaattagctgggcgtggtggcacgtgcctgtaatcccagctccttgggagactgagaatcacttgaacttgggagatggaggttgcagtgagccgagaatgtgccactgcactccaccctggacaacagagggaggttctgcctgaaaattaaaaaaaaaaaaaaaaaaaagaaaatacttgtgagtctctagaacctgaaaacctgaaagtcttctttactacttttgagtcgtgtgtaatgtgcggagagtggtacctatagcacagtgaggtggctcttctgagtaccactcatgccccttgcagctagtgggctataagtgtcatccctgtttcctggtgtcaggccccactcccttgttgtcctcctttactctggtgtgggagtggggtggagggcagcagctgggccccttacacttggtgccatctctgcaggtaaatgccatctgctatggggccaagattatgcttccaggtgttattcgatatgaggacggcattgaggtcaatcaggagattgtggttatcaccaccaaaggagaagcaatctgcatgggtnagaggggatgtttatttcccaaattctaaatgtttgtggttacatactaggtgtatatatttatggggttcatgagatgttttgatacaggcatgcaatacataataatcacatcatggagaatggggcatccatcttaagcatttatcctttgtgttacaaacaatcctattttactgttagttatttatcaccttagttattttaaaatatacacttaagttattattgattatagtcaccccgttgtgctattaaatagtctcactcttcttgttcattcttttggttttttggtggtggtgttttttttttttttttttttttgagacagagtctcgctctatcatccaggctggagtgcagtggtgcaatctctgctcactgcaagctccacctcccaggttcacgccattctcctgcctcagcctccaaagtagctggcactacaggtgcacaccatgacacccagcaaatttttttttatatttttagtagagacggggtttcaccatgttagccaggatggtctcgatctcctgaccttctgatccacccgcctcggcctcccaaagtgctgggattacaggagtgagccaccgcgcccagcctatttttatatatttttaagacggagtctctctctgtcgcccagagcaggggttgcagtgagccgagatcacgccactgcactctagcctgggtaacagcaagattccgtctcgaaaatttaaaaaaaaaaaaaaaagggggggccgttttaaaggatccaggtttacgtccgcgggcttgcaaggttt

SEQ ID NO: 149793 - DNA, 355 bp, Homo sapiens
gcaacgacccatagatgacacgaccaattcaaataacacccaggaaacaagaccggctctagcagccatcatgatcaaacaagaacccgtcaatctcatgccctcgcacatggggagaatgcgtctgccaggcaaccagtcgatcaacctggttcctgtaccccatgccgtcatatgccccgataaaacccacccctggagatgttcctggcaccgccccctcagggcgtccagactccaccccctcctagtagcacagactccagggcaccctgcccaagccagcccctcctctcctaggggtgttccccaaaccgctcctggctccactctttcccgagggcccaggacctgc

SEQ ID NO: 149794 - DNA, 354 bp, Homo sapiens
  misc_feature (1)...(354): n = a,t,c or g
aaacttaaannnnnnnnnnnnnnnnnnnnnnnnnnnnnnnnnnnnnnnnnnnnnnnnnnnnnnnnnnnnnnnnnnnnnnnnnnnnnnnnnnnnnnnnnnnnnnnnnnnnnnnnnnnnnnnnnnnnnnnnnnnnnnnnnnnnnnnnnnnnnnnnnnnnnnnnnnnnnnnnnnnnnnnnnnnngaacttagagtcagacaagcaattcaacatggaagaaagacagcccatcccctcccaattagtgtggaagatccatgtaggtgtggagtccccctccattgacctggtgtctggtctgtcaatgtaggtactactaacctggcttgctgatgatgtgcttcatcctgcccacg

SEQ ID NO: 149795 - DNA, 743 bp, Homo sapiens
gaaagtgaaacattgccaggtggggtggctcatgcatgtaatcccatcactttgggaggctgaggtgggcggatcacgaggtcaggggtttgagaccagccttaagtgatcaacccgccgaggcctcccaaggtgctaggatcacaaccgtgagccgccgcacctggccaaccgagggaatttaaatagggaaaaagtcacttcacatgtgactgttcaggaaaatatgttacatagaacaaagtgcaaaggttgctattaccagaatacaatgcccatcaacctgttaattacataacaaagttagccagttaattagagaggtggtttgcaaatagaaaacagaaacagcacgggatctggagttataattgctgaatgtgaatctaggttccacaaccatatttgtggccgtagacaggtttacaaactgcttatagcttccgttcaaaaccaaaaaatgggactaatctcactgcgtattttcggacgattaaagtacgataatgttttgaaagcctaatgctatataactattggttttattacttcgggctctctgtctagaacaatgaaattccaaatatcgaaacagcaccactagaattgaacacttttgtgcatttcttgggaatataagagtgtcagttttatgggttaaagaagagaaaaagggtgtaagttttctatatcaggttttttttagatccttccttggaggttgagaaatccggacgcgtggg

SEQ ID NO: 149796 - DNA, 753 bp, Homo sapiens
agagacaaggtcttcgctctgtcacacagactggagtgcagtggtgccatcatagctcactacaacctccaactcttgggctgaaacaatcatcgagtctcagactctccagtagctgggatggcaggtgtgtgccaccacacctaactagagcttttattccaaacattttcaaatctgttacctttaatatgcaactggcaagagagacaggccagatatggttcgaaaaagaaaatgatgtcagtttggagactacttccaatccagggcaatactctgactttcaactggagcttcaaggggatcattgcaacgaatcattctcttttccttcttattctaagttgtcttagttgtctttgtgtctttggaatctagcatagttcccactatgtggaataaacacatgctttcctagggatctttcaagctttccaggtgtccttaaattttttaaaattcctctgattattgccatttaacagatatggaaactgagacccattatgcaaatcatccgaagtcatctagcaactaactgggaaagtcaatgcatccataagaagtttgttaaactgatgtgtgtttatgatgagcacccaatacttttgaaggtattctcacaggcataggtgaaaattcttgtcactgttagagatccacagagaaatcaattactttctgtatattcctagaagaaacctggattcaggtagccatacacatacatatatcagtagaaaacagggt

SEQ ID NO: 149797 - DNA, 1087 bp, Homo sapiens
aacgcctttgaatgaggcccaggttcctcagtcctggttctcgatggtgacatagcccaggaacacggtggaaaggatggtgctgagcagctcagtgatgcttccctggggcctgggtccgactacagctcacacaagcttctgatgggccctggcagtgctcgagtagccagaggctccatcatgcaccacacgttgtcacactctacctgtgttgtgccttctccccttgctctccagtgaagctgagagacttcgagtcagccgtgaacaattttgagaaggccctggagagagcaaagcttgtgcataacaacgaggcgcagcaggccatcatcagtgccttggacgatgccaacaagggtatcatcagagaactgaggaaaaccaactacgtggagaatctcaaagaaaaaagcgagggagaagcttcactgtatgaagatagaataataacaagagagaaggacatgaggagagtgagagatgagcccgagaaggtggtgaagcagtgggaccatagtgaggatgagaaagagacagatgaggacgatgaggcttttggggaagctctgcagagcccagcaagcggaaagcagagtgtggaagcaggaaaagccagaagcgatttgggagcagttgccaagggcctgtcaggagaattaggcacaagatcaggagaaacaggcaggaagctactagaagctggcagaagagagtcaagagaaatttataggaggccttcgggagaattagagcaaagactctcaggagaattcagcagacaggaaccagaagaactaaagaaactttcagaagtgggcagaagagagccagaagaactgggaaaaacacaatttggagaaataggagaaacgaaaaaaacaggaaatgagatggaaaaggaatatgaatgaagccatcggtagagatgaggatcaggaagctggtgttcagagggatcatgggattttattaaactggattttcaagcgatttgtctgttataggaaaaatgagggttttacttctgctgctttccatcactattttgccattaaataggtgtctttcactcttgaaaaaa

SEQ ID NO: 149798 - DNA, 521 bp, Homo sapiens
ctttggttcaaatgcctctgacagtaggggccaagggaaaaacttcccctttgtcctctgaaggtttactgaaaaatcaactcacaaaatgcagattagtaggaaaaaggcatcaaaacttattaatgtgtacacaggggagaatcagagtgatcactcaatatcccaatggggcccaaatacttatatagccttatttgagaggggagtgaggagatggggaatataggtaattctgttgaggtacaataaacgattgctagggagaatgaatggatcagggaacagagattagcttgtaaatcgttctctttgaaaaaaagatttttttttttttttttgagacaggatcttgctctgtcccaaaggctggagtgcaatggtgtggtcacagctcactgcagccttgacctactgggctcatgtgatcctcttgtaaccacccatgggttcaccttgcctgctgcctagacagagccaatttatcaagacaggggaactgcagtagacaaagagtaatt

SEQ ID NO: 149799 - DNA, 403 bp, Homo sapiens
  misc_feature (1)...(403): n = a,t,c or g
aggagtcaatctaaattcgatgagcgcgtcgggctccaaggcaggcgctgtcagcccgggagggctgtctgggatttctagagggtcccagaacgggttcttcccaggccgatcccgcctgcttcctgccccgtctctccacccgcctcccgccctctgtaagggaccccgagggcggcgccggaaacacggagaaggcccagaacggcgcgggacccgagaggcctacgttggcaaacgcagcccgctgcccctttgctcgcttcccccgggcctggagtggctcctgtcgcttctggcgctccgatttcgagaaatgactttcagctgtgcaaggcgagaatgctactttagatgatgagaaaaaatctctcgaatggctcccaaaatgaggtccttgttn

SEQ ID NO: 149800 - DNA, 341 bp, Homo sapiens
cagaaattaaaaaagttagccaggcatggtggtgcatgtgcctgtggtcacaagctacttgggtggctaaggtggtaggatcacatgagcctgagaggtcaaggctgcagtgaatcgtgatcatgccgatgcactccagcctggacgacggagtgagaccctgtctatcagcataaaattctcagtttataagattttttaatataaaaagcaagtagtaacagatcatctgttatttatgagttgtgatcaatagacccctaaatatctacttaattagtctactgtatcaaatatcatcatcaaccctgctaatccaccatcagggtattgaagctcat

SEQ ID NO: 149801 - DNA, 370 bp, Homo sapiens
gagcgcagtggagagtggactcggacggggcacccaagaggatcgcagactcggccacgagccccaagctcctctatgtggatagagttgttcaggaaattctggaaaccgaaaggacttatgtacaagatttaaaaagcatcgtataggattaccttgactgcatcagggaccaaacaaaacttcccctggggaccgaagaaagatcagccctttttggaaacatacaggatatctaccacttcaatagtgaacttctgcaagatttggaaaactgtgaaaatgatcctgtggccatagcagagtgttttgtgtccaagagtgaagagttccacatttatacccagtattgcactaactatccaaggcg

SEQ ID NO: 149802 - DNA, 351 bp, Homo sapiens
  misc_feature (1)...(351): n = a,t,c or g
agtaaatcttaatgaccttagtcataatatgaccgtaaaagaccagtggggaaagaaaaaataggtaaactggactgcatgaaaacttaaaacttttgtgcttcaaagaacaccatcaaggaaatgaaaagacaacgcacagtttgggagaaaatatttgcacattatatatctgagaggaaacannnnnnnnnnnnnnnnnnnnnnnnnnnnnnnnnnnnnnnnnnnnnnnnnnnnnnnnnnnnnnnnnnnnnnnnnnnnnnnnnnnnnnnnnnnnnnnnnnnnnnnnnnnnnnnntgagacacaaaaggnnnnnnnnnnnnnnnnnnnnnnnnnnnnnnnnnnnnnnac

SEQ ID NO: 149803 - DNA, 684 bp, Homo sapiens
atgcacccaatcggcatagctttgtctaaggtacccgtggaatcaaaggaaggtgatatcatgagtcataccggtggtagcgtaccctacttggacaacttgaacaaggcttcagtttgtagagggcagagttgtcgggtatttcaagtgaaggagatggtcactcaggttgaatcagaaaataaccaagaagaacagaaacaggtgcgcttaccagaaagccgcctgacaccatgggaggtgtggtttattggcaaagaaaaagaagaacgtgaccggctgcaactgaaagctctagagtttaaagaagactggaagttactgaagcgacgtgttaccaagaaaagtggatcagtttcagtttccatcagtagccaagggcaacctgactgtttgcgactgctgcgaatcgtttcttttaacaaagccagtatcatgcaaacacttgataaaatcacacagctgtcctgcattggcagtggcttcttgcaaagacctgagggctactggtccgactgtggcacaaggtcccactctgattatgcagatgaagaagattcctttgtctcagacagttctgaccaggtttcctcacgccgaaccgtcacacactcgtacgcaccgccgcaatcgcagccccaccaccgccacacgcagaccggcacaaccgcaacctatctctga

SEQ ID NO: 149804 - DNA, 3020 bp, Homo sapiens
atgccgggcccgctagggctgctctgcttcctcgccctggggctgctcggctcggccgggcccagcggcgcggcgccgcctctctgcgcggcgccctgcagctgcgacggcgaccgtcgggtggactgctccgggaaggggctgacggccgtgcccgaggggctcagcgccttcacccaagcgctggatatcagtatgaacaacattactcagttgccagaagatgcatttaagaactttccttttctagaagagctacaattggcgggcaacgacctttcttttatccacccaaaggccttgtctgggttgaaagaactcaaagttctaacgctccagaataatcagttgaaaacagtacccagtgaagccattcgagggctgagtgctttgcagtctttgcgtttagatgccaaccatattacctcagtccccgaggacagttttgaaggacttgttcagttacggcatctgtggctggatgacaacagcttgacggaggtgcctgtgcaccccctcagcaatctgcccaccctacaggcgctgaccctggctctcaacaagatctcaagtatccctgactttgcatttaccaacctttcaagcctggtagttctgcatcttcataacaataaaattagaagcctgagtcaacactgttttgatggactagataacctggagaccttagacttgaattataataacttgggggaatttcctcaggctattaaagcccttcctagccttaaagagctaggatttcatagtaattctatttctgttatccctgatggagcatttgatggtaatccactcttaagaactatacatttgtatgataatcctctgtcttttgtggggaactcagcatttcacaatttatctgatcttcattccctagtcattcgtggtgcaagcatggtgcagcagttccccaatcttacaggaactgtccacctggaaagtctgactttgacaggtacaaagataagcagcatacctaataatttgtgtcaagaacaaaagatgcttaggactttggacttgtcttacaataatataagagaccttccaagttttaatggttgccatgctctggaagaaatttctttacagcgtaatcaaatttaccaaataaaggaaggcacctttcaaggcctgatatctctaaggattctagatgtgagtagaaacctgatacatgaaattcacagtagagcttttgccacacttgggccaataactaacctagatgtaagtttcaatgaattaacttcctttcctacggaaggcctgaatgggctaaatcaactgaaacttgtgggcaacttcaagctgaaagaagccttagcagcaaaagactttgttaacctcaggtctttatcagtaccatatgcttatcagtgctgtgcattttggggttgtgactcttatgcaaatttaaacacagaaaataacagcctccaggaccacagtgtggcacaggagaaaggtactgctgatgcagcaaatgtcacaagcactcttgaaaatgaagaacatagtcaaataattatccattgtacaccttcaacaggtgcttttaagccctgtgaatatttactgggaagctggatgattcgtcttactgtgtggttcattttcttggttgcattatttttcaacctgcttgttattttaacaacatttgcatcttgtacatcactgccttcgtccaaattgtttataggcttgatttctgtgtctaacttattcatgggaatctatactggcatcctaacttttcttgatgctgtgtcctggggcagattcgctgaatttggcatttggtgggaaactggcagtggctgcaaagtagctgggtttcttgcagttttctcctcagaaagtgccatatttttattaatgctagcaactgtcgaaagaagcttatctgcaaaagatataatgaaaaatgggaagagcaatcatctcaaacagttccgggttgctgcccttttggctttcctaggtgctacagtagcaggctgttttccccttttccatagaggggaatattctgcatcacccctttgtttgccatttcctacaggtgaaacgccatcattaggattcactgtaacgttagtgcatattaaactcactagcatttttattaatggccgttatctacactaagctatactgcaacttggaaaaagaggacctctcagaaaactcacaatctagcatgattaagcatgtcgcttggctaatcttcaccaattgcatctttttctgccctgtggcgtttttttcatttgcaccattgatcactgcaatctctatcagccccgaaataatgaagtctgttactctgatattttttccattgcctgcttgcctgaatccagtcctgtatgttttcttcaacccaaagtttaaagaagactggaagttactgaagcgacgtgttaccaagaaaagtggatcagtttcagtttccatcagtagccaaggtggttgtctggaacaggatttctactacgactgtggcatgtactcacatttgcagggcaacctgactgtttgcgactgctgcgaatccgtttcttttaacaaagccagtatcatgcaaacacttgataaaatcacacagctgtcctgcattggcagtggcttcttgccaaagacctgagggctactggtccgactgtggcacacagtcggcccactctgattatgcagatgaagaaagattcctttgtctcagacagttctgaccagggtgcaggcctgtggacgaagcctgcttctaccagaagtagaggattcccttttggtgcgctatgcttacaatctaccaagagttaaagactgaactactgtgtgtgtaaccgtttcccccgtcaaccaaaatcagtgtttatagagtgaaccctattctcatctttcatctgggaagcacttctgtaatcactgcctggtgtcacttaaaagaaggagaggtggcagtttatttctcaaaccagtcattg

SEQ ID NO: 149805 - DNA, 1321 bp, Homo sapiens
ggtcgacttttttttttttttgagacggagtctcgcgactgtcgcccaggctggagtgcagtggcgcgatctcggctcactgcaagctccgcctcccgggttcacgccattctcctgcctcagcctcccgagtagctgggactacaggcgcccgccaccacgcccggctaatttttttgtatttttttttttttagtagagatggggtttcaccgtgttagccaggatgatctcgatctcctgacctcgtgatccacccacctcggcctcccaaagtgctgggattacaggtgtgagcgaccgcacccggctagactttaaaaaaaaaaaaaaatactgtgggaaaaaggatattatgtatagaaaagtctacacttccttgatacaactaactaaaaaaagcctgatacactaaacaaaaccccaaataaatgtcttccctaaaagtggggtaaccttgaaaagcaattcgagcaaaaatcaaggagttcaattataaataagtatatcaacaaagtgaaagatgggtttaatttttcccacaaaaagttaaaagaaataacagcagttttagaggaagaggaaaaaataataagaaaattatatgcagttgcaaaatgtgtgactatttacaaactctaacatataactacaaaacggaccagaagaatcattatcataggaagcaaagggtcatttcaaaaatcagaggagggatgattcatatttaatttaattctgtgggaaaacatttaagtaacctttgaggacaaaaataggtgatatgttgaaatgcgggaaaccacagtggaaggaaaaagaattcaagaaagctcagtttcagtaaccagtatctagtaaaatcttcaggacctagaggctacaatctggcattaatagtgtctgaagacctagaaatgtcattaaataccattttggataattcttgtagacttgagatgatgtctatttaaagttacaagacaagtgcctgtatttctgtattcataacagaaaacaattggatatggaaaagaaactaacatgctatgccacaatctctaaagaaagattagggaagtttcagcttaaagcaagaataatcacaataaagttttacaaccctttgcaagcatatatgaaaaacttacaaaaagtttgtaatgatcttttcttaagctaagagaatggaaaaaatgagaaaaattaaattataaaatgaaactttggtttagaggtaagaaacatttgatgacagtcaagagatcagggttgtacagtgtattatgtgaatgttgtgactcattggtttcatcttgga

SEQ ID NO: 149806 - DNA, 301 bp, Homo sapiens
cgaaagatgttcggaaacgggcgtgcacggtcgggggtcattgttcttccctgcggtaaggggtaccagagttaataaggtggccaggctgtcgggtcgggatctgccagctgcctcccgctttctctctgcacatttccctaattcacaccttgctgaaaagccatgatcaggggactccctgattcatgacttgccgaaaatttgagcgcttgttgagtatgggccctggcctggacactgggggtattatggcggctagaacaacacttctgacctcatggagctcactcttctgggg

SEQ ID NO: 149807 - DNA, 375 bp, Homo sapiens
ggagaagccaccatgaacccctcacatgaagcagaagtagtgtgcgacgtgcctacctggtggcccccggtaagcaccagatgaatgggaggaagggagtgaaggaaagagagagcggagaaaggaagggggaagggaggaatggaaaaagagggtgcaggagaaagaagggggaaagagaagaatggagacagtagggagagagggagggagggtaagtcagtgacagacaactcaacttaaggagcagcagctggactcccacagtcaccttgccctatccaagcccggggggtacaaagtccacgcccacaagctatgagcaggggggaacctgagtacagtgggataggaggctgggggagtggagaggcc

SEQ ID NO: 149808 - DNA, 358 bp, Homo sapiens
  misc_feature (1)...(358): n = a,t,c or g
nnnnnnnnnnnnnnnnnnnnnnnnnnnnnnnnnnnnnnnnnnnnnnncctgtagtctgctattttgtgattatatagaaagttttgggatcattaattatatacataacctttgtattgcagccctggggcttcatatatgacacttactgcactgggccccacacaaactcaggttcctgaacaaagactattcgttacatgtatattgtgtcaagaggagcaagaagttaaagtggaaagcagggcaatggtcttggcagcatttgtacagagatcatctgtattatcaaaaaacagatgtaaatttatttaagatccaggtaagtcatagctagatcctcatcttcccttttaag

SEQ ID NO: 149809 - DNA, 483 bp, Homo sapiens
  misc_feature (1)...(483): n = a,t,c or g
gtacgggagatatgattgacgcctttaagctagnagtaacactacgattactgaaaagaatccggccctcgaggccaagaaggcggaacgaggtaacaagcttgcttagagatgcagcaaatattacggagatggatagtgaaaattctgcaaaagaaggtgatcctggaacaatattcttcttcagggaaggagctgctgtgtttcggaatgtgaaagacaaaactatgaagcatgtgatgaacgttctacaaaaacatgaaattcagccctatgaaatcgcactggtacactgggaaaatgaagaacttaactacatacaaatacagggacagtcaaaacttcacaggggggaaatcaagttaaattcatagctggatttacatgatgccattctagagaagtttgctttctccaatgctctatgcctttctgtaaaactggcaatttgggaagcatcactggataaatttattgaatcta

SEQ ID NO: 149810 - DNA, 386 bp, Homo sapiens
  misc_feature (1)...(386): n = a,t,c or g
tttttttttggattccacactaaaagcttaggccataaaagcaaaaataaataaatggaatgacgtcaaactgaaaagcttcttcaaaacaaaggaaacaatcaacaaaatgtaacaacctatggtctgggaaaacatatttgcaaaccatttatctgataagggannnnnnnnnnnnnnnnnnnnnnnnnnnnnnnnnnnnnnnnnnnnnnnnnnnnnnnnnnnnnnnnnnnnnnnnnnnnnnnnnnnnnnnnnnnnnnnnnnnnnnnnnnnnnnnnnnnnnnnnnnnnnnnnnnnnnnnnnnnnnnnnnnnnnnnnnnnnnnnnnnnnnnnnnnnnnnnnnnnnnnnnnnnnnnnnnnnnnnnnnnnnnnnnnnnnnnnnnnnn

SEQ ID NO: 149811 - DNA, 357 bp, Homo sapiens
  misc_feature (1)...(357): n = a,t,c or g
nnnnnnnnnnnnnnnnnnnnnnnnnnnnnnnnnnnnnnnnnnnnnnnnnnnnnnnnnnnnnnnnnnnnnnnnnnnnnnnnnnnnnnnnnnnnnnnnnnnnnnnnnggatctcagatggtatagtagctttctttggatgtgctgcataccaggtgccaaatggcatcctataaatggaagctcttgtgtgatgatggggatgatcaagtacgattttacgggccactggattgtaaagcacattggcctagctgccgacctggactccttctatgaatacctcttgaaatcttacattctctttggagaataagatgacctataaatgtttaatgctgcatatcagagtattcagag

SEQ ID NO: 149812 - DNA, 376 bp, Homo sapiens
gatgccaaagccaagtccccaccgaccatggtggacagcctcctggcagtcaccctggctggaaacctgggcctgaccttcctccgaggttcccagacccagagccatccagacctgggaactgagggctgctgggaccagctctctgcccctcggacctttacgcttttggaccccaaggcatctctgttaaccaaggccttcctcaatggcgccctggatggggtcatccttggagactacctgagccggactcctgagccccggccatccctcagccacttgctgagccagtactatggggctggggtggccagagacccagggttccgcagcaacttccgacggcagaacggtgctgctctgacttcagccc

SEQ ID NO: 149813 - DNA, 364 bp, Homo sapiens
cagaacattttccttcatctgttcttttgttcgtttacagcccaaaaatatccaatggtccatttattgcaaaaaagtgataactcatttaaccaggaactgttgaaaagtatggtaaaaagcattaaaatgaatgatgtctatggaccaatgagtcagattttagagacactgaataagtgtccacattttaaaagacagaggtaagtccttctcttagacgaatatattgttctcctaggcagattcatattgtttgcttagtaatttgttagaatatctcatgcttatgatagcattaaattttttatagggaacatatggactatatggatactaatattttctccatgactttttctcc

SEQ ID NO: 149814 - DNA, 355 bp, Homo sapiens
aaatggcacgcatgcgtcctatggggccttctacctggaatactctcttcttgcagaatttaccttggttgtgaagcacaagctaccaggcgtctatgtgcagccatcttatcgctctgcattaatgtgggttggagtcctatccatgtgggagggaggatagcggcaaggcctagttcgctcgacagtgggattgggaggcgctgtgctcagctcagaggatcgctcgtggggggtcggatccctgttatccagggcgtcggctcctcgactccctcttgcgcacttacgctgctagccgccgtaggggcggtcggcgatggtccttccgccggtgggaccaagtcctctcccg

SEQ ID NO: 149815 - DNA, 398 bp, Homo sapiens
  misc_feature (1)...(398): n = a,t,c or g
aaatgttttattttaaaaaatctccctgattctactatgcatttaaggaggaaattataccagttctctacagtctcttccagaaaatagaaacagggggaatacttcttaactcagcattactcttaataccaaagagtacctaataccgaagaccatacaagaaaggaaaactaaactacagaccaaaatcttttgtgaatataaatgtaaaaatcctcaaccgaatattagcaaatcaaatccaaaaatgtataaaaagaattacatactatagctnnnnnnnnnnnnnnnnnnnnnnnnnnnnnnnnnnnnnnnnnnnnnnnnnnnnnnnnnnnnnnnnnnnnnnnnnnnnnnnnnnnnnnnnnnnnnnnnnnnnnnnnnnnnnnnnnnnnnnn

SEQ ID NO: 149816 - DNA, 361 bp, Homo sapiens
aatttctcttccttgcttatacatggaaggatgcacactggagagaagccatatgaatgtaagaattgtgggaaagccttcacatctgccaagagccttcaaaatcatggaaggacacacaccggatagaaaccatgtgaatgcaagcaatgtggcaaagctttcatttgttccagttcctgtcagagacatgaagagacacattctgttaatatgcattcagttatcctaattcctttgaaacacagaaaaagagtagggaaaggacctctgagataactgttttctgagttgagaagagctacttgtgaatggacaattaaatctagatgtatttagatctgatacaattcatctgtat

SEQ ID NO: 149817 - DNA, 585 bp, Homo sapiens
tagctgtagcaggaactgacccaagagtaagaaagtaaaaatgggtgtcagaaagcggggttggaagacagggggaaggcctgtttcagcagtacaggttgcagaagataagaatttagatttgcagtcaagggtgtcagggtcaaatgtcaagtggtcaaacgtcagctggaatttgggagtcaagagctggcaagcagggaagagatagaaatctaggagattctggtgagaagcttaaggcaggaccctctgaggtcaaggaggggcaaaagacacacaggccgtaggtgggatggctcaggatggcgggcgacgggagcacgggagtagaggagggaatcgcggggttgggagatggaagccagggaggcaggaagaagaaagccagcaagtgagagaagaaaaggatccgggagaagagccggtgatttcctcgagccagcaacgagatctcgatccgagaaagaagtcaggactctggccaggaatgggcgtccctgagcgtccccaggcagccaccggagctcgcagtagcttcaaccccgggtagcttgcggaggccgggccgccacgaaatcgtcg

SEQ ID NO: 149818 - DNA, 951 bp, Homo sapiens
tcctttttagagactctgttgcccagactagggtgcagtgatgcgatcatggctcactgcagcctcgaactcctgggctatatgcgatcttgccacctcagcctcccaagctgagactacagacccacaccatcacgcctggctaattctttttttctaatacatgggggtttttttacattgtcctgggccgatctgcaactcctggggctcaagcaatccttccgaaagtcctggggacttacaggtgtgagccaccacgctcagcctttttttccttattacttgtactaggggacatttgtggggcttttcccacaatgaggcttaggtaggaggaaattgacagcttcccttgggccctatcctgaaatacactaaactaggcttcttcttctgccagggctaccgttttctccctaacctttgcagatgtatgtatccatataaatgtttctatttcaacaaactgtagaaagtatacagtctgtacagctccccttataatgctattacctgatgatcctgactacaagttggaattacctgccatacttggcaaaattccaaagtggtgggctgccctatgccctcggagagaataagcagcaaacccagcccagtccctaaatccgaatagcagctcttaaaagagaaatagggatgccccttggataggctttcctttaggactgatattccaatttctggggcttacccccgggtttatttcctacaagccctatatagagtgtaacgcctagaaaatattcagtgatgttaaaaataagcatagttactttgactcaagaccaattactctacacacacaggcaaatttctgcccaatggtctcaagtttagcattagttttgcccactttttcttttattcttaagtcagtttcactcttcacatgagcactccaccaacaccataaggttgaaaatt

SEQ ID NO: 149819 - DNA, 506 bp, Homo sapiens
  misc_feature (1)...(506): n = a,t,c or g
agataggggnnagnagggactgatnnccntnngaaactgagntgcntccgcaagaccnaccgnnnatggaattcccgggtcgacgatttcgtcttcgtgcgacgatttcgtcccaccgcggggtggtgctctgactgcggggaaccgttgaagagctgccgccggggagtcagcgaggcgccgctggtctcttagacatcttctcaagattatgctaagagaaatgactgcacccttttcctgagctatggcagtcagacctggcagtggtaactactctacagaactcccaaacctggcaaggatggtgcagattttggcagattatggctttgtccccacccagcactgatgatattataaacaactttcattgttagagagaggagagagagagaaacccttgttggntgacgtcacttggttcatgaagcccttccctagaagtgagctgctgaacaaccttgagagaatcatctcctgcttaatctgctgctggataagac

SEQ ID NO: 149820 - DNA, 534 bp, Homo sapiens
tttcgtgggaccgagagctgcgggcgggctggaggtaccccaccgcggttgtggtgctctgactgcgggaaccgttgaagagctgcccccggggagtcagcgaggcgccactggtctcttagacatcttctcaagattatgctaagagaaatgactgcacccttttcctgagctatggcagtcagacctggcagtggtaactactctacagaactcccaaacctgggcaaggatggagcatattttggcgagattatgggctttgtccccacccagcacttgatgatattataaaatatgacaccttcaagtataagcaaccaaagaaaactagataaattgggacctcataaagtaaaacaaacaaaaaccttttgcttcaaaggataccactaagcaagcgaaaagacaacacatagaatgtgagaaaaaggttgtaaatcctatatatgacaaggcacctgtatccagaataaagaacctcttaaaactcaacaataaaaacacaaataatctaattgtaaaaaaaaaaaa

SEQ ID NO: 149821 - DNA, 666 bp, Homo sapiens
aaattggctacaccccgacacagtagcatgtgtgcaattctgggttggaatggtgacaacatgctggagcaaagtgctaacatgccttggttcaagggatggaaagtcacccgtaaggatggcaatgccagtggaaccacgctgcttgaggctctggactgcatcctaccaccaactcgtccaactgacaagcccttgcgcctgcctctccaggatgtctacaaaattggtggtattggtactgttcctgttggccgagtggagactggtgttctcaaacccggtatggtggtcacctttgctccagtcaacgttacaacggaagtaaaatctgtcgaaatgcaccatgaagctcagaaggctaaatgaatattatccctaatacctgccaccccactcttaatcagtggtggaagaacggtctcagaactgtttgtttcaattggccatttaagtttagtagtaaaagactggttaatgataacaatgcatcgtaaaaccttcagaaggaaaggagaatgttttgtggaccactttggttttcttttttgcgtgtggcagttttaagttattagtttttaaaatcagtactttttaatggaaacaacttgaacaaaaatttgtcacagaattttgagacccattaaaaaagttaaatgagaaaaa

SEQ ID NO: 149822 - DNA, 1257 bp, Homo sapiens; identical to SEQ ID NO: 125428

SEQ ID NO: 149823 - DNA, 1718 bp, Homo sapiens
acgggtttgccgccagaacacaggtgtcgtgaaaactacccctaaaagccaaaatgggaaaggaaaagactcatatcaacattgtcgtcattggacacgtagattcgggcaagtccaccactactggccatctgatctataaatgcggtggcatcgacaaaagaaccattgaaaaatttgagaaggaggctgctgagatgggaaagggctccttcaagtatgcctgggtcttggataaactgaaagctgagcgtgaacgtggtatcaccattgatatctccttgtggaaatttgagaccagcaagtactatgtgactatcattgatgccccaggacacagagactttatcaaaaacatgattacagggacatctcaggctgactggtgctgtcctgattgttgctgctggttttgttgaatttgaaagctggtattctccaagaatgggcagacccgagagcatgcccttctggcttacacactgggtgtgaaacaactaattgtcggtgttaacaaaatggattccactgagccaccctatagccatgaagagatatgaggaaattgttaaggaaggcagcacttacattaagaaaattggctactattcccgacacattagcatttgagccaatttctggttggaatggtgacgacatgctggagccaagtgctaacatgccttggttcaagggatggaaagtcacccgtaaggatggcaatgccagtgggaaccacgctgcttgaggctctggactgcatcctaccaccaactcgtccaactgacaaggccttgcgcctgcctctccaggatgtctacaaaattggtggtattggtactgttcctggttggcccgagtggagactggtgttctcaaacccgggtatgggggtcaccttttgctccaagtcaacgtttacaacgggaagtaaaaatctgtcgaaatgcaccatgaagcctttgaagtgaagctctttcctgggggacaaatgtggggcttcaattgtcaagaaatgtgtctgtcaaggatgttccgtcgtggcaactttgctggtgacagcaaaaaatgacccaccaatggaagccagctggcttcacttgctcaggtgattatcctgaaccatccaagaccaaaaaaacgcccggcatatgccccttgaattggattgccacacggctcacattgcatgcaagtttgctgagctgaaggaaaagattgatcgccgttctggtaaaaagctggaagatggccctaaattcttgaagtctggtgatgctgccattgttgatattgtttctgggcaagcccatgtgtgttgagagcttctcagactatccacctttgggtcgctttgctgttcgtgatatgagacagacagttgcggtgggtgtcatcaaagcagtggacaagaaggctgctggagctggcaaggtcaccaagtctgcccagaaagctcagaaggctaaatgaatattatccctaatacctgccacccaactcttaatcagtggtggaagaacggtctcagaactgtttgtttcaattggccatttaagtttagtagtaaaagactggttaatgataacaatgcatcgtaaaaccttcagaaggaaaggagaatgttttgtggaccaccttggttttcttttttgcgtgtggcagttttaagttattagtttttaaaatcagtactttttaatggaaacaacttgacc

SEQ ID NO: 149824 - DNA, 1355 bp, Homo sapiens
  misc_feature (1)...(1355): n = a,t,c or g
agtacataccgaattccctggtcgactccacgcgtccggatctaggcaccggtccgagtgcctgccctctgtccccgcggctgggtctcgtctgctccggttcctgggctcctaattctcggtccagcttcttccaggtctgcgcgtctgttgttcccagcgctctgcgaagcctgaaaaggaggagcaacctgtccagaatccccgcaggacaggaaaaggaggggaaatctcgacatggaaaaactctacagtgaaaatgaaggaatggcttcaaaccacggaaagatggaaaatgaatagcagccacaagaccagagaaagccacaagtaactttgtactctgggagacaagaagttagaaaacgagggaaagacagaaaacaagggcaaaacaggagatgaggaaatgtttaaaggataaaaggaaagccagagagtgagggagaggcaaaagaaggaaagtcagagagggagggagagtcagagatggagggaggatcagagagagagggaaaaccagagatagagggaaagccagagagtgaaggagagccattggagtgaaacaaagggctgcaggaaagcgcccagctgacggatgatgtacccaggaaagccaaaaggaaaaactaataaggggctggctcattacctcaaggagtataaagaggcccatacacgatatgaatttcaggcaatgaggacatgataaggggaattttacaatatggctaaggtgcaggatgaggaagagaaaaagcaaacagaaaattggggggcgtttttgtgggatgcaaagaaatttaccaggacccctttttaccctagagggtccaagggaaattcagggggtggctgcaggggccccaccgaagggacatttaaaaacattccttatggtgtagtgtcccctggcaggcatttaccaggcccatgtgcttttaacgttacggtaaatacttttacttttagggcatcccctccctggttgctaagcnagccctttttgaccttatcctgcaaatgccaggtgttcctccagtagggaaatggtccatcctgttaccatgggaaaaaatggttgatgggtgcattgtaaaattaaaaaaacacaacttgcagaacccaaatatatggcatcagtacatttttgtaaaactacaaagatacttaccctagtaatatagtatagaaaacaattctgaaagctgtgtccactaaaagattaacagtggttatctctgggtgattttttctgttcttttttgttcatctgtccatttttctcctaaaaacagatttctttagtcataaaaataataaaatataaagtattggaaaacaaaaaaaaa

SEQ ID NO: 149825 - DNA, 336 bp, Homo sapiens
cgcgagaaaaagatcaacatacatagaccaatccagtccaacagactctggtacccatatggacaagtacaaggctccctgacacccatgaagacaaggcgttttctgctccccaaatcgaggaccgcgggacacctggactcggcagccggggtcccgctctgggtcccagccccacccctgactgcgctgggtaggtggtcgctgcgggacccggaccggcggaatcacaccccagagcccccaagcccacggcagggatgtcacccggggtggcgaggctctcaagcccgggttcaggctctcaggggagctggcagaaccaggagcgaccac

SEQ ID NO: 149826 - DNA, 498 bp, Homo sapiens
acatttcaacatgagggacccactgacagattgtccgtataataaagtatacaagaacctaaaggagttttctcaaaatggagagaatttctgcaaacaggtcacatctgttcttcagcaaagggcaaacctggaaattagctatgccaaaggacttcagaaactggcaagcaagctgagcaaagcattacagaacacgagaaaaagttgtgttagcagtgcctgggcctgggcctcagagggaatgaaatccacagcggacctgcatcaaaaacttggcaaagcaattgaattggaagcaataaaaccgacttatcaagtcctaaatgtacaagagaagaagagaaaatcacttgacaatgaagttgaaaagacagcaaatcttgtcattagcaactggaatcagcaaattaaggccaagaagaaattaatggttagtacccaggaaacatgaagcacttttcccagcttgtaggaaagctcccaaggcaatctatg

SEQ ID NO: 149827 - DNA, 390 bp, Homo sapiens
tgaaagtcaagaaagtgatgtatgaacaacatggaaatatcaatataaaaaccttgaaagaaaccagaaagaaattacagaactgaaaagtacaatagctgaaattgaaaacatcactagaggaatctgaaggtgatttgagcagacaaaagaataaattaatgagcttgaagataagataatggaaattttcaaagacaaaagatgaaagaaaggtgaaaagagcctaaggggcttgtggccaccatcaagagacaaggaagcatgcatgccgtggaagctgcaaacagaagagaaaaagaaaggtgcagagagactatctgaagaaataatggctgaaagcttctcaaatttgttggcagacatgaatataaacagttaagagctcag

SEQ ID NO: 149828 - DNA, 394 bp, Homo sapiens
ggaggggaagggggggaaggggctgaggctcggggactccaggctgaagtccaagcatgtgcggaagcctagaccctcccaccttaccacaaacttggctccaagtcccctctatgctgacgcatccttgccctcctcctcctccccactgccctccactagcccatcctccctcctccctcctcccctcaacacacatttatcactagtgacatctcagccccccctaccccaatccagggacacaggagggacacagtggggttagactgagggccactgatgtggcttcaccctcagtgcttgggcaattcccaagttacagcatctcagtccccagagaaggccatgctgccactgtagccgccaagggccccctggagtgcagggcaca

SEQ ID NO: 149829 - DNA, 1051 bp, Homo sapiens
  misc_feature (1)...(1051): n = a,t,c or g
acgagcaggaagtcgattatgatcccaaagagtttaatgctgaaacattcaccttccatgcagatatatgcacactttctgagaaggagagacaaatcaagaaacaaactgcacttgttgagcttgtgaaacacaagcccaaggcaacaaaagagcaactgaaagctgttatggatgatttcgcagcttttgtagagaagtgctgcaaggctgacgatgagatgcctgctgacttgccttcattagctgctgattttgttgaaagtaaggatgtttgcaaaaactatgctgaggcaaaggatgtcttcctgggcatgtttttgtatgaatatgcaagaaggcatcctgattactctgtcgtgctgctgctgagacttgccaagacatatgaaaccactctagagaagtgctgtgccgctgcagatcctcatgaatgctatgccaaagtgttcgatgaatttaaacctcttgtggaagagcctcagaatttaatcaaacaaaattgtgagctttttgagcagcttggagagtacaaattccagaatgcgctattagttcgttacaccaagaaagtaccccaagtgtcaactccaactcttgtagaggtctcaagaaacctaagaaaagtgggcagcaaatgttgtaaacatcctgaagcaaaaagaatgccctgtgcagaagactatctatcccgtggtcctgaaccagttatgtgtgttgcatgaaaaacgccagtaagtgacagagtcaccaaatgctgcacagaatccttggtgaacaggcgaccatgcttttcagctctggaagtcgatgaaacatacgttcccaaagagtttaatgctgaaacattcaccttccatgcagatatatgaaaatcaagattcgatctccagtaaactgaaggaatgctgtgaaaaacctctgttggaaaaatcccactgcattgccgaagtggaaaatgatgagatgcctgctgacttgccttcattagctgctgattttgttgaaagtaaggatgtttgcaaaaactatgctgangcaaaggatgtct

SEQ ID NO: 149830 - DNA, 15992 bp, Homo sapiens
gcacaatgaagtgggtaacctttatttcccttctttttctctttagctcggcttattccaggggtgtgtttcgtcgagatgcacgtaagaaatccatttttctattgttcaacttttattctattttcccactaaaataaagttttagtaaactctgcatctttaaagacttattttggcatttatttctaaaatggcatcgtattttgtatttgtgaagtcttacaaggttatcttattaataaaattcaaacatcctaggtaaaaaaaaaaaaaggtcagaattgtttagtgactgtaattttcttttgcgcactaaggaaagtgcaaagtaacttagagtgactgaaacttcacagaatagggttgaagattgaattcataactatcccaaagacctatccattgcactatgctttatttaaaaaccacaaaccctgtgctgttgatctcataaatagaacttgtatttatatttattttcattttagtctgtcttcttggttgctgttgatagacactaaaagagtattagatattatctaagtttgaatataaggctataaatatttaataatttttaaaatagtattcttggtaattgaattattcttctgtttaaaggcagaagaaataattgaacatcatcctgagtttttctgtaggaatcagagcccaatattttgaaacaaatgcataatctaagtcaaatggaaagaaatataaaaagtaacattattacttcttgttttcttcagtatttaacaatccttttttttcttcccttgcccagacaagagtgaggttgctcatcggtttaaagatttgggagaagaaaatttcaaagccttgtaagttaaaatattgatgaatcaaatttaatgtttctaatagtgttgtttattattctaaagtgcttatatttccttgtcatcagggttcagattctaaaacagtgctgcctcgtagagttttctgcgttgaggaagatattctgtatctgggctatccactaaggtcgtcactggtcacatggctattgagtacttcaaatatgaccagtgcaactgagaaacaaaaacttaaattgtatttaattgtagttaatttgaatgtatatagtcacatgtggctaatggctactgtattggacagtacagctctggaacttgcttggtggaaaggactttaatataggtttcctttggtggcttacccactaaatcttctttacatagcaagcattcctgtgcttagttgggaatatttaatttttttttttttttaagacagggtctcgctctgtcgcccaggctggagtgcagtggcgcaatctcggctcactgcaaactccgctcccgggttcacgccattctcctgcctcagcctcccgagtagctgggactacaggcgcccgccatcacgcccggctaatcttttgtatttttagtagagatggggtttcaccgtgtgccaggatggtctcaatctcctgacatcgtgatctgcccacctcggcctcccaaagtgctgggattacaggagtgagtcaccgcgcccggcctatttaaatgttttttaatctagtaaaaaatgagaaaattgtttttttaaaagtctacctaatcctacaggctaattaaagacgtgtgtggggatcaggtgcggtggttcacacctgtaatcccagcactttggaaggctgatgcaggaggattgcttgagcccaggagtacaagaccagcctgggcaagtctctttaaaaaaaacaaaacaaacaaacaaaaaaattaggcatggtggcacatgcctgtagtcctagctacttaggaggctgacgtaggaggatcgtttggacctgagaggtcaaggctacagtgagccatgattgtgccactgcactccagcctgggtgacagagtgagactctgtctcaaaaaagaaaaaggaaatctgtggggtttgttttagttttaagtaattctaaggactttaaaaatgcctagtcttgacaattagatctatttggcatacaatttgcttgcttaatctatgtgtgtgcatagatctactgacacacgcatacatataaacattagggaactaccattctctttgcgtaggaagccacatatgcctatctaggcctcagatcatacctgatatgaataggctttctggataatggtgaagaagatgtataaaagatagaacctatacccatacatgatttgttctctagcgtagcaacctgttacatattaaagttttattatactacatttttctacatcctttgtttcagggtgttgattgcctttgctcagtatcttcagcagtgtccatttgaagatcatgtaaaaattagtgaatgaagtaactgaatttgcaaaaacatgtgttgctgatgagtcagctgaaaattgtgacaaatcacttgtaagtacattctaattgtggagattctttcttctgtttgaagtaatcccaagcatttcaaaggaattttttttaagttttctcaattattattaagtgtcctgatttgtaagaaacactaaaaagttgctcatagactgataagccattgtttcttttgtgatagagatgctttagctatgtccacagttttaaaatcatttctttattgagaccaaacacaacagtcatggtgtatttaaatggcaatttgtcatttataaacacctctttttaaaatttgaggtttggtttctttttgtagaggctaatagggatatgatagcatgtatttatttatttatttatcttattttattatagtaagaacccttaacatgagatctaccctgttatatttttaagtgtacaatccattattgttaactacgggtacactgttgtatagcttactcatcttgctgtattaaaactttgtgcccattgattagtaacccctcgtttcgtcctcccccagccactggcaaccagcattatactctttgattctatgagtttgactactttagctaccttatataagtggtattatgtactgtttatctttttatgactgacttatttcccttagcatagtgcattcaaagtccaaccatgttgttgcctattgcagaatttccttcttttcaaggctgaataatattccagtgcatgtgtgtaccacattttctttatccattaatttgttgattgatagacatttaggttggttttctacatcttgactatcatgaatagtgttgcaatgaacacaggagagctactatctcttagagatgatatcatggtttttatcatcagaaaacacccactgatttctatgctaattttgttacctgggtggaataatagtacagctatatattcctcattttagatatctttgtatttctacatacaataaaaaagcagagtacttagtcatgttgaagaactttaaacttttagtatttccagatcaatcttcaaaacaaggacaggtttatctttctctcaccactcaatctatatatacctcttgtgggcaaggccagtttttatcactggagcctttcccctttttattatgtacctctccctcacagcagagtcaggactttaactttacacaatactatggctctacatatgaaatcttaaaaatacataaaaattaataaattcbgtctagagtagtatattttccctggggttacgattactttcataataaaaattagagataaggaaaggactcatttattggaaagtgattttaggtaacatttctggaagaaaaatctctatatcttaatagtcacttaatctatgatggattgtgttactcctcagttttcaatggcatatattaaaacatggccctctaaaaagggggcaaatgaaatgagaaactctctgaatgtttttctcccctaggtgaattcacctgctgcttagaagcttattttctcttgatttctgttataatgattgctcttaccctttagttttaagtttcaaaataggagtcatataactttccttaaagctattgactgtctttttgtcctgttttattcaccatgagttatagtgtgacagttaattcttatgaaaattatatagagatggttaaatcatcagaaactgtaaaccaacgattgggaggggaagcggatttttaaatgatttcctgaccaagcttaaccagtatattaaatcctttgtactgttctttggctataaagaaaaaaggtactgtccagcaactgaaacctagctttcttccatttagcataccctttttggagacaaattatgcacagttgcaactcttcgtgaaacctatggtgaaatggctgactgctgtgcaaaacaagaacctgagagaaatgaatgcttcttgcaacacaaagatgacaacccaaacctcccccgattggtgagaccagaggttgatgtgatgtgcactgcttttcatgacaatggagagacatttttgaaaaagtaagtaatcagatgtttatagttcaaaattaaaaagcatggagtaactccataggccaacactctataaaaattaccataacaaaaatattttcaacattaagacttggaagttttgttatgatgattttttaaagaagtagtatttgataccacaaaattctacacagcaaaaaatatgatcaaagatattttgaagtttattgaaacaggatacaatctttctcaaaaatttaagatagacaaattctttaatgtattccgcagatatgtatatatggttgttataattgatttcgttttagtcagcaacattatattgccaaaatttaaccatttatgcacacacacacacacacacacacacttaacccttttttccacatacttaaagaatgacagagacaagaccatcatgtgcaaattgagcttaattggttaattagatatctttggaatttggaggttctggggagaatgtcgattacaattatttctgtaatattgtctgctatagaaaagtgactgtttttcttttttaaaatttagatacttatatgaaattgccagaagacatccttacttttatgccccggaactccttttctttgctaaaaggtataaagctgcttttacagaatgttgccaagctgctgataaagctgcctgcctgttgccaaaggtattatgcacacgaatagaaaaaaagagtttattatccaacctgattttgtccattttgtggctagatttagggaccctgagtgtctgatacaaactttcccacatggtcaaaaaagccttccttttatctgtcttgaaaatctttcatctttgaaggcctacactctcgtttcttcttttaagatttgccaatgctgatctgtcagaggtaatcactgtgcatgtgtttaaagatttcaccactttttctgctggtgatcactatagtgaaatactgaaacttgtttgtcaaattgcacagcaaggggacacagttcttgtttatcttttcatgataatttttagtagggagggaattcaaagtagagaattttactgcatctagatgcctgagttcatgcattcattccataaatatatattatggaatgctttattttcttttctgaggagtttactgatgttggtggaggagagactgaaatgaattatacacaaaatttaaaaattagcaaaattgcagcccctgggatattagcgtactctttctctgacttttctcccacttttaaggctctttttcctggcaatgtttccagttggtttctaactacatagggaattccgctgtgaccagaatgatcgaatgatctttccttttcttagagagcaaaatcattattcgctaaagggagtacttgggaatttaggcataaattatgccttcaaaatttaatttggcacagtctcatctgagcttatggaggggtgtttcatgtagaatttttcttctaattttcatcaaattattcctttttgtagctcgatgaacttcgggatgaagggaaggcttcgtctgccaaacagagactcaagtgtgccagtctccaaaaatttggagaaagagctttcaaagcatggtaaatacttttaaacatagttggcatctttataacgatgtaaatgataatgcttcagtgacaaattgtacatttttctgtattttgcaaagtgctgtcaaatacatttctttggttgtctaacaggtagcactctaatagaggtcaaaatcagaatatcaatgacaatttgacattatttttaatcttttcttttctaaatagttgaataatttagaggacgctgtcctttttgtcctaaaaaaagggacacatatttaagttctatttatttataaaatcttggactcttattctaatggttcattatttttatagagctgtaggcatggttctttatttaattttttaaagttatttttaatttttgtggatatagagtaggtatacatatttacggggtatatgagatattttgatctaagtatacaacatatataatccctttatttaattttatcttccccccaatgatctaaaactatttgcttgtccttttctgtcttatagttaaattcagtcaccaactaagttgaagttacttcttatttttgcatagctccagctctgatcttcatctcatgtttttgcctgagcctctgttttcatattacttagttggttctgggagcatactttaatagccgagtcaagaaaaatactagctgccccgtcacccacactcctcacctgctagtcaacagcaaatcaacacaacaggaaataaaatgaaaataatagacattatgtatgctctctagaaactgtcaattgaactgtatttgctcatcattcctaccatctacaccaccaaaatcaacccaatttatgaaaaaaaaaccgccccaccatacaattctacacagataaacaggctatgattggttttgggaaagcagtcacctttacctgatttaggcaactgtgaaatgactagagaatgccgaaaattagacgtttacatcttgtcatagactttgcagatagtgctggatctttctttttataagtaagatcaataaaaactccctcattctgtagaagttatgatttcttttctaagagacctttagaagtcagaaaaaatgtgtttcccttgcgaaaaaagataactggagtttgtgtagtacttcccagattataaaatgcttttgtatgtattatctaatttaatcctcaaaacttcttcaatttagcatgttgtcatgacactgcagaggctgaagctcagagacgctgagccctctgctaacaagtcctactgctaacaagtgataaagcccgagctggaagtcacatctggactccaaacctgatgcttctcagcctgttgccccttttagagttcctttttaatttctgcttttatgacttgctagatttctacctaccacacacactcttaaatggataattctgccctcaggataagtgattaccatttggttcacaactcgaactaatgaattttaaaaattatttctgtatgtccattttgaattttcttatgagaaatagtatttgcctagtgttttcatataaaatctcgcatgataataccattttgattggcgattttctttttagggcagtagctcgcctgagccagagatttcccaaagctgagtttgcagaagtttccaagttagtgacagatcttaccaaagtccacacggaatgctgccatggagatctgcttgaatgtgctgatgacagggtaaagagtcgtcgatatgctttttggtagcttgcatgctcaagttggtagaatggatgcgtttggtatcattggtgatagctgacagtgggttggattgtcttctgtgctttcgtctgtcctatcttcaatctttccctgcctatggtggtggtacctttctgtttttaacctgctataaattaccagataaacccattcactgatttgtaactcctttcagtcatgctctaactgtaaatgaaggcttaaactgaagtagaacagttacaaggttttacttggcagaacatcttgcaaggtagatgtctaagaagatttttttttctttttttaagacagagtttcgctcttgtttcccaggctggggtgcaatggtgtgatcttggctcagcgcaacctctgcctcctgggttcaagtgattttcatgcctcagcctcccaagtagctgggattacaggcatgcgccaccacacctggctaattttgtatttttagtagaggcggggtttcaccatattgtccagactggtctcgaactcctgacctcaggtgatccacccgccttggcctcccaaagtgctgggattacaggcatgagccaccttgcccagcctaagaagattttttgagggaggtaggtggacttggagaaggtcactacttgaagagatttttggaaatgatgtatttttcttctctatattccttccctaaattcactctgtttgttagatgtgcaaatatttggaatgatatctcttttctcaaaacttataatattttctttctccctttcttcaagattaaacttatgggcaaatactagaatcctaatctctcatggcactttctggaaaatttaaggcggttattttatatatgtaagcagggcctatgactatgatcttgattcatttttcaaaaatcttctatattttatttagttatttggtttcaaaaggcctgcacttaattttgggggattatttggaaaaccagcattgagttttaatgaaaaaaacttaaatgccctaacagtagaaatataaaattaataaataactgagctgagcacctgctactgattagtctattttacttccgtgggaatgtttttgtagtcctatctccatctccaggtttaggagcaaacagagtatgttcatagaaggaatatgtgtatggtcttagaatacaatgaacatgttctgccaacttaataaaggtctgaggagaaagtgtagcaatgtcccttcgtgttgaacaatttccaccaacttacttataggcgccccttgccccgtatatctgtgaaaatcaagattcgctctccagtaaactgaaggaatgctgtgaaaaacctctgttggaaaaatcccactgcattgccgaagtggaaaatgatgagatgcctgctgacttgccttcattagctgctgattttgttgaaagtaaggatgtttgcaaaaactatgctcaggcaaacgatgtcttcctgggcatgtacgtagataagaaattattcttttatagctttggcatgacctcacaacttaggaggatagcctaggcttttctgtggagttcctacaatttccctgctgcccacaatgtttcttcctccttccctttcccacgctttcccaatttttgacatcgttaattcgttgaatacattgtcataacataatacatgttcacggcaaagctcaacattccttactccttaggggtatttctgaaaatacgtctagaaacattttgtgtatatataaattatgtatacttcagtcattcattccaagtgtatttcttgaacatctataatatatgtgtgtgactatgtattgcctgtctatctaactaatctaatctaatctagtctatctatctactctatgcaatgatagcaaagaagtataaaaagaaatatagagtctgacacaggtgctttatatttggtgaaaagaccagaagttcagtatcctggcaatatggtaggcaactcaattacaaaataaatgtttacgtattgtcagaagttgtggtgataaactgcatttttgttgttggattatgataatgcactaaataatatttcctaaaattatgtaccctacaagatttcactcatacagagaagaaagagaatattttaagaacatatctctgcccatctatttatcagaatccttttgagatgtagtttaaatcaaacaacctgttaataaaaataacaagtatcattcatcaaagacttcatatgtgccaagcagtgtgtgttttgtgtagattatgtcatatagttctcataatccaccttccgagacagatactatttattttttgagacagagttttactcttgttgcccaggctggagtgcaatggtgccatctcggctcactataaccttcgcctcccaggttcaagcgattctcctgcctcagcctcctgggattacaggcatgcaccaccatgcctggctaattttgtatttttactagagatggggtttcaccatgttggtcagactggtctcaaactcctgacctctggtgatatgcctgcctcagcctcctaaagtgctgggattacaggcatgagccactgtgcccagccgacagatactattattatttccattctaccgagaaggagactaaggctctgatcatttaaataagttgcctaaggtgatgcagtgatataagtagcagagctaggaattgagccttggtaactttaactctggaccccaagtccttagctactaagctttactgcatggggtttagtcaaattaagacttttggaatatgcgttacttttgagattagctttgtgatattttttgtgctcatttgtccaacaaagtctattttattttcatcttaattcgctttttgtatgaatatccaagaaggcatcctgattactctgtcgtgctgctgctgagacttgccaagacatatgaaaccactctagagaagtgctgtgccggtgcagatcctcatgaatgctatgccaaagtggtaggtttattgttcgcaaaaaatgtagttctttgactgatgattccaataatgagaaagaaaaataatgcaagaatgtaaaatgatatacagtgcaatttagatcttttcttgagatcgtttcaattctggaatcttaaacatgaaagaaaaagtagccttagaatgattaacaaaatttagactagttagaatagaaagatctgaatagagcaatctctacacacttttgatctttttttctctttttcacaatcctgagaacaaaaaaaaattaaatttaaatgttaattagaagatatttaacttagatgtaaagtgagttaacctgattccaggattcatcacgtactagaattagtatcttatggtaaattatagaacctatccctttagaatattttcaaatctttttgaggatgtttaggaatagttttacaagaaattaagttaggagaggaaatctgttctggaggatttttagggttcccactagcatatgtaatggtttctgaactattcagaatcagagaaaactcatttttcctgctttcaagaagctactgtatgccaggcaccatgcacaaacaatgaccaacgtaaaatctctcattttggagagcctggaatctaactggaaaggtgaactaataataatactatgtacaatcatagccatcatttattaaacttttcttctatgcaaggcactgtttaatttccttagcttacctggtttacagagcagctctatgagatgagtgccatctttgcccctattttagggataaggattccgaaatgtggagatggtaagtcaaattgcacaactgaagcatgacttacatgacttggctcaaatactggtcattgaactccagagcctgaatattcttaaccacttacatgatgcaagctgaccaaataaatagttcgaatgtattgtgacagagcggcattgatattcatctattcatgtggctttgagtaggaagaagaaaggatatcattctgaccagagcggtgaaaaacaacctgcatctgatcctgaggcataatactattaacacaattcttttatgtttcagttcgatgaatttaaacctcttgtggaagagcctcagaaatttaatcaaacaaaattgtgagctttttgagcagcttggagagtacaaattccagaatgcgtaagtaatttttattgactgattttttttatcaatttgtaattatttaagacttaatatagagccacctagcatagaacttttcagaatgaaaatacattgcatatttctaatcactctttgtcaagaaagataggagaggagagataaaatagttgatggggtggagaggtctatatttgwatgtagtctaaaaattgttctcttaagattggaagtatgtaggctgggagggtaaataccaaatcttggtatatcagaactgagcatgtcccttgacggttaagaaatagttaatgggcaaatagagcatggcaatattttgtagagcagcaagtagtaggccttgaatagatgtcgctcaaaaagtaatatgtaagctgaacacaaaaatgtaacaaatgaatttagatacatatttgaatattaaattcaggttgtttgggagatgcacctagtctttgatggttaaacctttccctccatagaagagacagagacagaatggcttgctggactaatgtcccaattcaatagagtcttatctacgaaggttaaaaacaagaagagacatattatacagtagatatttcttgtgtggctcatacacatggtgctcttctgattatggattttagagataataacagtgaacaagacatagtttctttcctcgagtagattaaagtcctacattgacttttaatggtgactggcattcttaatacatgattattatatattaggtactatgtcacattaattataatactttactatttttaatttaacccttgaactatccctattgagtcagatatatttccttccattttctacttgtatctttcaagtttagcatatgctgatacatatgaagctctctccaggttttattgaaagaagaaattaatcaatttattactgtccctgaattaggcaactcactttcccaagattatgcccgtggtacaggtggaactcaaagccaagtttaactagttgttcaggagaatgttttctaccctccactaacccactactctgcagatggagataatatgatgaatggaacatagcaacatcttagttgattccggccaagtgttctctgttttatctactatgttagacagtttcttgccttgctgaaaacacatgacttctttttttcaggctattagttcgttacaccaagaaagtaccccaagtgtcaactccaactcttgtagaggtctcaagaaacctaggaaaagtcagcagcaaatgttgtaaacatcctgaagcaaaaagaatgccctgtgcagaagactatgtgagtctttaaaaacatataataaattaataatgaaaaaattttccctttagatattgctaatgctacctttcataagcagaaggaagtaatgtgtgtgtgtgcatgttttgtgcatgtgtgtgtgcatgcacgtgtgtgtatgtgtgatattggcagtcaaggccccgaggatgataattttttttttttttttgagacggagtctcgctttgttgtccaggctggagtgcagtggtgccatctcggctcactgcaacctccgcctcccaagttcaagccattctcctgcctcagcctcccaagtagctgggactacaggtgcatgccaccatgcctggctaattttttgtatttttagtagaaaattttcagcttcacctcttttgaatttctgctctcctgcctgttctttagctatccgtggtcctgaaccagttatgttttgttgcatgagaaaaccgccagtaaagtgacagagtcaccaaaattgctgcacaagaacccttgggtgaacaggcgaccaatgcttttcagctctgggaagtcgaagaaaacataccgttccccaaagagttttaatgcttgaaacattccaccttccatgcagatatatgcacactttcttgaggaagggagagacaaatcaaagaaacaaacgtgaggagtatttcattactgcatgtgtttgtagtcttgatagcaagaactgtcaattcaagctagcaactttttcctgaagtagtgattatatttcttagaggaaagtattggagtgttgcccttattatgctgataagagtacccagaataaaatgaataactttttaaagataaaatcctctgttataatattgctaaaattattcagagtaatattgtggattaaagccacaatagaataacatgttagaccatattcagtagaaaaagatgaccaattaactgataaatttgtgcacatggcaaattagttaatgggaaccataggagaatttatttctagatgtaaataattattttaagtttgccctatggtggccccacacatgagacaaacccccaagatgtgacttttgagaatgagacttggataaaaaacatgtagaaatgcaagccctgaagctcaactccctattgctatcacaggggttataattgcataaaatttagctatagaaagttgctgtcatctcttgtgggctgtactcctcgtctaggcttaagagtaatattgcaaaacctgtcatgcccacaccaatctctccctggcattgttgtctttgcagatgtcagtgaacgcgacccagcagctcccatgagtttgcatagccttattttctatagcctccccactattagctttgaagggagcaaagtttaagaaccaaatataaagtttctcatctttatagatgagacccattttaaataaagtccaagataattaaatttttaaggatcatttttagctctttaatagcaataaaactcaatatgacataatatggcacttccaaaatctgaataatatataattgcaatgacatacttcttttcagagatttactgaaaagaaatttgttgacactacataacgtgatgagtggtttatactgattgtttcagttggtcttcccaccaactccatgaaagtggattttattatcctcatcatgcagatgagaatattgagacttatagcggtatgcctggcccaagtactcagagttgcctggctccaagatttataatcttaaatgatgggactaccatccttactctctccatttttctatacgtgagtaatgttttttctgttttttttttttctttttccattcaaactcagtgcacttgttgagctcgtgaaacacaagcccaaggcaacaaaagagcaactgaaagttgttatggatgatttcgcagcttttgtagagaagtgctgcaaggctgacgataaggagacctgctttgccgaggaggtactacagttctcttcattttaatatgtccagtattcatttttgcatgtttggttaggctagggcttacggatttatatatcaaaggaggctttgtacatgtgggcccgggatcttattttacacacaattgtcttacaaaatgactaaaacagcactttgtttttatctcctgctctattgtgccatactgttgaatgtttataatgcatgttctgtttccaaatttgtgatgcttatgaatattaataggaatatttgtaaggcctgaaatattttgatcatgaaatcaaaatattaatttatttaaacatttacttgaaatgtggtggtttgtgatttagttgattttataggctagtgggagaatttacattcaaatgtctaaatcacttaaaatttccctttatggcctgacagtaacttttttttattcatttggggacaactatgtccgtgagcttccatccagagattatagtagtaaattgtaattaaaggctatgatgcacgtgaaatcactttgcaatcatcaatagcttcataaatgttaattttgtatcctaatagtaatgctaatattttcctaacatctgtcatgtctttgtgttcagggtcaaaaacttgttgctgcaagtcaagctgccttaggcttataac

SEQ ID NO: 149831 - DNA, 332 bp, Homo sapiens
agaatgccctgtgcagaagactatctatccgtggtcctgacccagttatgcgtgttgcatgataaaacgccagtcagtgacatagtcgccaaatgctgctcagaatccttggtgaacagtcaagcatgcttatcagatctgtaagttaaagatgcatacgttcccaaagagtttaatactgaaacattcaccttccatgcagatatatgcgcactttctgagacggagagacggatcatgaaacaaactggacttgatgagttcgtgaaacacaagccctaggcttctgatgagcggctgagcgctgttatggatgatttcgcagcttttgt

SEQ ID NO: 149832 - DNA, 641 bp, Homo sapiens
ccatagacaactagagcagctggaagggaagcgctcagtcctggccaaggagctggtggaggtgagggaggcgctgagccgcgccacactgcaacgggacatgctgcaggccgagaaggccgaggtggccgaggcgctgaccaaggctgaggctggccgcgtggagctcgagctctccatgaccaagctgagggcagaggaggcctccctgcaggactccctgtccaagctgagcgccctcaacgagagccttgctcaggacaagttggatctgaaccgccttgtcacccaggccacagctggaggaagaaaagtgcgccctgcatggccggcagcggcaggcgaagcaggaggccacagtggcacgggaagagcaggagcggctggaggcgctgcggttggaacaggaggtggcgcggcagggcctggagggctccctatgagcggcggagcaggcccaggaggcagtggagcagcagctccccacgctgcatcatgagtgcagccggctgcaggagcagctagcgcagccacgaggaacagaatcatgcccaaaaccacgtgagcgagcttggaagcaaacgctttccctgctgggccttaagatgacagtgcggcctcgactgacaccttgactgcag

SEQ ID NO: 149833 - DNA, 1176 bp, Homo sapiens
atgggatctgcagactcagctctatcaggcttcccagaattgaggggcatgggttgttataggggacatttcctggtcacgtggcctagcagggttggtggcacaattgcccatgtatcccaggagcctaacctggcctcttctacctgggagaagagcaacctggcccacagcctgcaggtggcccagcagcaggccaaggagctacggcaggagcggaagaagctgcaggctgcccaggaggagctgcggcgccagcggtactggctgggggaagagcaggaggacgcagtgcaggatggtgtgcgggtgcgccgggagcttgagcacagccatagacaactggagcagctggaagggaagcgctcagtcctggccaaggagctggtggaggtgagggaggcgctgagccgcgccacactgcaacgggacatgctgcaggccgagaaggccgaggtggccgaggcgctgaccaaggctgatctttgtcacaggccacagacctctggacctctggtcccagccataagtggactgacctctctttatggccgtatccctgctgttctggatgctcctgggggcagtgcctatagctcagggctgagggcagaggaggcctccctgcaggactccctgtccaagctgagcgccctcaacgagagccttgctcaggacaagttggatctgaaccgccttgtcacccagtgtcccacacacccaagggccctgtccctcattgcctgggagcctcccctgggctattgtggctggccacagctggaggaagaaaagtgcgccctgcagggccggcagcggcaggcgaagcaggaggccacagtggcacgggaagagcaggagcggctggaggcgctgcggttggaacaggagggtgtcaacagaggtggatcagatgagaaacctggatttctacacacacctggctacaatgagatggcaccactcccctcccctgcagaagcagactcagaaaaaggcatctattcctgcctggtgtttatgagcctgagacttggcagggctgtcctggtatataactccatggctctgcagcaagactcgaataggctggtggtgacacttggtgtgaccacagtcaccttcaaagatgccattaagggttcacaagaaaatgaagggaaacagaaaaactga

SEQ ID NO: 149834 - DNA, 1245 bp, Homo sapiens
gtgcctgggagtttgtctggcatcccgggggctttgataggagttgtccgggaccccagggaggtgagggttcagagggtggtgagggcacataggaggggagtggaagcctggctctcaggcctaggcccctatcctgccccagggcaggtccaggccctggaccccgcctagcgtaggctagtgtgtatccctggaaccagaagagagtaggtgggctctggaggcctcaaaggacccccgctagactctgtgatccccacgccccagaacatgcgtgggcgctatgaggcaagccaggacctgctgggcaccctgcggaagcagcttagcgacagcgagagtgagcggcgggccctagaggaacagctgcagcgcctgcgggacaagaccgacagcaccatgcaggcccacgaggacgcccagcgcgaggtgcagcggctgcggagcgccaaagagctcctgagaagggagaagagcaacctggcccacagcctgcaggtggcccagcagcaggccaaggagctgcggcaggagcggaagaagctgcaggctgcccaggaggagctgcggcgccagcggtactggctgggggaagagcaggaggacgcagtgcaggatggtgtgcgggtgcgccgggagcttgagcacagccatagacaactggagcagctggaagggaagcgctcagtcctggccaaggagctggtggaggtgagggaggcgctgagccgcgccacactgcaacgggacatgctgcaggccgagaaggccgaggtggccgaggcgctgaccaaggctgatctttgtcacagaccacagacctctggacctctggtcccagccataagtggactgacctctctttatggccgtatccctgctgttctggatgctcctgggggcagtgcctatagctcagggctgagggcagaggaggcctccctgcaggactccctgtccaagctgagcgccctcaacgagagccttgctcaggacaagttggatctgaaccgccttgtcacccagtgtcccacacacccaagggccctgtccctcattgcctgggagcctcccctgggctattgtggctggccacagctggaggaagaaaagtgcgccctgcagggccggcagcggcaggcgaagcaggaggccacagtggcacgggaagagcaggagcggctggaggcgctgcggttggaacaggaggtggcgcggcagggcctggagggctccctatga

SEQ ID NO: 149835 - DNA, 795 bp, Homo sapiens
tcagcctttcttctgggtggatgttagttctgatatgtttgtcccttcggagacaaaaagtaaggccacaaaagttgtgagtgaccatttgaacaggttttttcacctcggggaaaaaagcagatctagaataaggcatgagatactggaaggtctccaagccttagacaggcaaggagacctaagcagtgagacactttcagggacaatcccagtgagatggaaagatgacctctaccacacagacatgggctgacatccttctttctgcttgtattactttctagtctgtgctctctctccttggccccaaaggactctcccccatatcatcctttcatttcatttgtaaaacgctggaaattttgctctactcccctttttgctaggtatacatttacaatgcctttcacactaggctataaacattacaaactaccagtaggtgccactgtccaacaaataatgctactgcatctcctggagagttagacgtttccagtttggaggacagacatgtgatcccccaaaaacaaccaagtaagctagatatggaacagataaaggctaacatcttgaagcttttaataaggtcttgttaaatgttatagcctggattcatctctgctataggggggcttgttggtttatcttcatatgatttttatgaatataaagaatatgaagataaaccaacaagcccccctatagcagagatgaatccaggctataacatttaacatgaccttattaaaagcttcaagatgttagcctttatctgttccatatctagct

SEQ ID NO: 149836 - DNA, 381 bp, Homo sapiens
tcgagttggagtttcactcttgtcacccaggctggagtgcagtggcacgatctcggctcactgcaacctctgccctccgagttcaagcgattctcctgcctcagcctcccaagtagctgggattgcaggcgcctgccaccacgcccggctaattttttgtatttttagtagagatggggtttcaccatcttgaccagcctggtcttgagctactgaccttgtgtttcacccacctcggcctcccaaagtgctgggattacaggcgtgagcgaccacgcacggctgattgtgggagatttcaatacacctcttttaataactgagaggtcaagcacccagaaaatataaaaggatacagaggatctttacatcaaattaaca

SEQ ID NO: 149837 - DNA, 1215 bp, Homo sapiens; identical to SEQ ID NO: 129552

SEQ ID NO: 149838 - DNA, 448 bp, Homo sapiens
ttcgatcccccaggatgtttctttacacctatcggtaatccctttggcccgttccaggggaatttccatttcaggaagaatggagttcaggcgatggtggaatttgactcagttcaaagtcgccaggcggccaaggcctctctcaatggggctgatatctattctggctgttgcactctgaagatcgaatacgcaaagcctacacgcttgaatgtgttcaagaatgatcaggatacttgggactacacaaaccccaatctcagtggacaaggtgaccctggcagcaaccccaacaaacgccagaggggaactgttatctcccaagattaaccttcacttttaaaaaattattgtacatgtgatttttttttttcctgttcatacatttgtgctgcccatgtactctgtggcacatttcaataaaattgtttggaaaataaaaaaaaaa

SEQ ID NO: 149839 - DNA, 2073 bp, Homo sapiens
ggacgagcagcggaggcggtcgggagcgatggtgaagatggcggcggcgggcggcggaggcggcggtggccgctactacggcggcggcagtgagggcggccgggcccctaagcggctcaagactgacaacgccggcgaccagcacggaggcggcggcggtggcggtggaggagccggggcggcgggcggcggcggcggtggggagaactacgatgacccgcacaaaacccctgcctccccagttgtccacatcaggggcctgattgacggtgtggtggaagcagaccttgtggaggccttgcaggagtttggacccatcagctatgtggtggtaatgcctaaaaagagacaagcactggtggagtttgaagatgtgttgggggcttgcaacgcagtgaactacgcagccgacaaccaaatatacattgctggtcacccagcttcttgtcaactactctaccagccagaagatctcccgcattgatgagtagaatgactaccgaaggcgtgaacagtgtgcttctgtttaccatagtgaacaccattaattggatcacgacggatgttctttacactatgtgtaatccttgtggccctgtacagagaattgtcatattcaggaagaatggagttcaggcgatggtggtatttgactcagttcaaagtgcccagcgggccaaggcctctctcaatgggggtgatatatattctggctgttgcactctgaagatcggatacgcaaagcctacacgcttgaatgtgttcaagaatgatcaggatacttgggactacacaaaccccagatctcagtggacaaggtgaccctggcagcaacgcccaacaaacgccagaggcagccccctctcctgggagatcaccccgcagaatatggagggccccacggtgggtaccacagccattaccatgatgagggctacgggccccccccacctcactacgaagggagaaggatgggtccaccagtggggggacaccggcagtgcccaagtcgctacggcccccagtatgggcaccccccaccccctcccccaccacccgagtatggccctcacgccgacagccctgtgctcatggtctatggcttggatcaatctaagatgaacggtgaccgagtcttcaatgtcttctgcttatatgggcaatgtggaagaaggtgaaattcatgaaaagcaagccgggggccgccatggtggagatggctgatggctacgctgtagaccgggccattacccacctcaacaacaacttcatgtttgggcagaagctgaatgtctgtgtctccaagcagccagccatcatgcctggtcagtcatacgggttggaagacgggtcttgcagttacaaagacttcagtgaatcccggaacaatcggttctccaccccagagcaggcagccaagaaccgcatccagcaccccagcaacgtgctgcacttcttcaacgccccgctggaggtgaccgaggagaacttctttgagatctgcgatgagctgggagtgaagcggccatcttctgtgaaagtattctcaggcaaaagtgagcgcagctcctctggactgctggagtgggaatccaagagcgatgccctggagactctgggcttcctgaaccattaccagatgaaaaaccccaaatggtccatacccttacactctgaagttgtgtttttcccctgctcagcacgccttcctaattaggtgcctaggaagagtcccatttgagcaggaaaacatttctctttcctttatgccattttttggtttttgtttttgttatttgcaaaagatcttgggatcccctttttttttttttttttttttttttttaaaagcaagggttgaagagggcttccctcccccttaatggaaaccctggaaatttgcagggtgagggagaggggaacatgttatctcccaagattaaccgttcacttttaaaaaagttattgtacatgtgagtttttgttttttccgtggttcatacatttgtgctgcccatgtactcttggcacatttcaataaaattgtttggaaaataaaaaaaaaaaaaaaaa

SEQ ID NO: 149840 - DNA, 337 bp, Homo sapiens
  misc_feature (1)...(337): n = a,t,c or g
ngacatgatattagcagaaagaggaggagtttgcgtcatgatgaaaactcaatgttgtactttcatcccaaacacctccaccactgatggaagtataacaagggcattgcaaggtctgactgctctgtccaatgagttagccaacaactcaggggtaaatgacccctttacaggatggctagaaaagtagttcagtaaatggaaaggaataatagcctcaattcttacttccctcgcagccgtaatgggtgtacttattcttgtcaggtgctgtgtcataccatgcctccaaaggttgatgcagaggctcataaaaatggcacttactcaaacctcc

SEQ ID NO: 149841 - DNA, 343 bp, Homo sapiens
aatacatcagtgataaagtcattcaatggactgggcacagcagagaaattaacaagtttgaagacagcttaacagaaatgacccaaatcgaaacaaaggaaaaaaagtgggaataaagcagtgtctgagattctggaacaattttatactaacatgtcttattggagtatcagaaatagaggagaaaaagaatggagcagaataaatctttgaggagataatgtccaaaaatttccccaaattgataaaatatatcaacccacaaatccaagaagcttagtgaactccaagcaagataaatacagagaaaaccacatttaggcattagataatcaaaggtaga

SEQ ID NO: 149842 - DNA, 560 bp, Homo sapiens
acagatgatgacctaaattggctggatcacagccgaacattcagagaacaaggagtagatgaaaccgaaacgtgtctgcttagacggaagttctcttactctgatcagaatgtagattcgagagaccccgtgcagctgaacttgctttatgttcaggcacgggatgacatcctgaatggctctcaccctgtctccttcgagaaagcttgtgagtttggtggatttcaagcccagatacaatttggacctcatgtggaacataaacacaaacctggatttttagagtaaatgacattttgtttctcttttttctcttttctcctgtcttctttctctttcagctttttatttttgagctaggtgtctaagatcataccctaatttcaatcatttgtgagaatgctagcttttcttccatcgagtagatgaccaaatttgcagattttggggaaagcaagagaaattcagaagtttcttttgctgaatagaaattcagtgatctgtgtccccctccaccccctttttttccttctacttcgtcttagtgaagaggaaagtaa

SEQ ID NO: 149843 - DNA, 341 bp, Homo sapiens
ctcctattatccacgtggtgaaatctctgtgccgttcttcaatatatgtcactttttcttgagttgtttttataacctttctcgtttcttctgtaagaaatctcctgcttcccccttgtgtttctctattaaaaaatcaccttttgtaaagattcatcttgtattctcgctagttacctcttcatttctgaaatgatttttcttttacttataattctttccagagtctgtcatttcatttggaagtttttctaattctgattgatgttgtgtttgccccacgcttcgtatctttttcttcttaccttttagtcactttggaggtaagtagggttttgaat

SEQ ID NO: 149844 - DNA, 349 bp, Homo sapiens
  misc_feature (1)...(349): n = a,t,c or g
cccttatcccacggggacaagggagtactgtggtcttaccatacaatccagcaacctcaatctttggtaatgacctaaatgagataaaaatgtatggccacgcaaaaacctgcatatggatgttcatgacatcttcattcattattgacagaactcggaagcgacagtgatgttcttcagttcgtgaatggataaacaaacagtgatgcattcagacaatggagttagtgtttggaagaaacnnnnnnnnnnnnnnnnnnnnnnnnnnnnnnnnnnnnnnnnnnnnnnnnnnnnnnggggggnnnnnnnnnnnaaaaattcaaatttttaaagaaataaacccacaacc

SEQ ID NO: 149845 - DNA, 411 bp, Homo sapiens
agtaaacagaatattatcaaacaatttattttggctttattgaaaaaagagtatttggtctaaatgtgccaccataggtgttaaattctcctatctgcaattgtctttatcctatattgtgttcatttcttttcttaataatttactttgttgtgtgtttctacactttcatccctgttttttatcttgtatatcatcaggaaattgtgatttaatcattaacattggttttttttgtgtgtgtggtaaaaatcaacactaggctcatggtacatatttttattctgtacatttgcttgtaactatcaatttgtaactctgtttatctactacatgtgcatatatacttagagcattttctctaacacattttaatggtagtattttttaaaaggtctgaccagtctagca

SEQ ID NO: 149846 - DNA, 369 bp, Homo sapiens
  misc_feature (1)...(369): n = a,t,c or g
tactaagctggacttcattgggattaagggcttctcctctgtgaaggacaatgtcaagggaatgagaagacaagctacagactgggagaaaatatttgcaaaagagacgtctgataaaggactattatccaaaatatactaaaaacccttcaagctcagcaaacaacccaattaagnnnnnnnnnnnnnnnnnnnnnnnnnnnnnnnnnnnntnnnnnnnnnnnnnnnnnnnnnnnnnnnnnnnnnnnnnnnnnnnnnnnnnnnnnnnnnnnnnnnnnnnnnnnnnnnnnnnnnnnnnnnnnnnnnnnnnnnnnnnnnnnnnnnnnnnnnnnnnnnnnnnnnnnnnnnnnnnnnnnnnnnnnnnnnnnn

SEQ ID NO: 149847 - DNA, 335 bp, Homo sapiens; identical to SEQ ID NO: 67579

SEQ ID NO: 149848 - DNA, 354 bp, Homo sapiens
cgattcatggtctgtgatttagtatgcaaaactacctagtatattatctgacacaaagtaggcccatgataaattatattctatagttcgttaattttaaggtacttgctaatttaccatgtagccattgatagctaatctccttgtttaccatattgttgccttctatgctataggtatggtgatggccgcatcatgattggtttttcatgtggacattaagtggtcatttctactcatactggagagcttggtcaagagatatttcaggctcgtaaccataaagataatctaaccagcattgcagtatctcagactcatatcaaagttgctacatgtgaaaataacttacca

SEQ ID NO: 149849 - DNA, 359 bp, Homo sapiens
cattctagctggggcaattatataagataatgaaataaaactcatgtagattgaaaaggaagttgtaaaactatttctgtttacggatgacatgattttgtgtgtagaaaattctaaggaacacacacacagtcatacacaactattagggctaataaacgagttcagcagagcttcagggtaaaagataaatgtacaaaaattgtttctatacaccaacaatgtacaatcaaagaatgaaattaaggaaccaagtttatgtacaaaagcatcaaaaagaataggatacttaggaatacatttaacaaaagaagtgtaagacttgtacagtgaaagaacaaaacctcattgaaagaaat

SEQ ID NO: 149850 - DNA, 364 bp, Homo sapiens
gactacagagtggttttaagcatagctatggaacaaaagagttagatggcaccaagtaatgtttaacacaaggatcccaacattggcagcatgtggcttcccgtagagtctagagtaccgtgacaccatcatataaggatctagcgatattaaccagacgaagcatgttagatcttgagtcaacagacaaatctgtagcaggacgacacagcagtcaccagaggattgtgacttcaagaaggacgggctggtgaagcggtgtatggggacccagacacgccaaagcctgtgagcttcacagtgaaggagacagtgtgccccaggacgacacagcgaccaaaggaaccataactgatttaatgag

SEQ ID NO: 149851 - DNA, 363 bp, Homo sapiens
ctcacttgttctggtgacaaagaacagataaaagataaatctcatgtcctgaagggaaagggcaactttgaacgtgagacatcctagaagaagaaatgatcgttaccgccatttgatgataatgtggaacccaatgatttatatgtggaggagaatatatgctctaaatctgattctgaacgacccagatctgccagctccagctccaggtccagctccagcttcacaccatcccagaccaggcaacaagggcctttgaagtctatgatgaatgacctgcattctgatgactacgaggaggaatcagatgaaatggaggataacggacctgactttgaaatggggaagcctgtaaatatacga

SEQ ID NO: 149852 - DNA, 376 bp, Homo sapiens
tgtacacctgggatggtgcatgttaccgttaaggacacatacggagtacgtaaaggccttatcatacgcctaggataaacaactaggagcatgagctgggttggacagacaaatattcctttgggatgcgaatactctatcagcattgactgcctcaaataacactgtaacaacttcttccttaagtggaaacacagattccatttatagactggccatgaatcaactggtaacaatcattgtatcagggtccaatgataaggcgctaagggtatgggatccactaacatgtgcgacactagtgaatcttaaagggcacactgataatgggaaggcattggtattcaacagagatgggacgcaatgcctgtcaagg

SEQ ID NO: 149853 - DNA, 531 bp, Homo sapiens
cagttagacaggaaaaataagctttagtgatttattgcatagaataatgactgtattaaataataatgcattgtatattttattttgttttgttatttattatttttgagacagagtctcacaatgttgtccaggctggtgtcaaacacctaggctcaagcgatcctctggccccatcctcctgagtagctgcccgatgggttcttcctgcccactgcacaaaaaaaatcagttcatggagaccatggcactgcagtaaagaaagaggttaattgacatgatgccagccacaccatgtgggacggcagagttattactcaaatcaaactcatctaaggcttggaggttagggatttttcaaaggtaatttggtaggtagcaggctagggtatggggagtgctgattggttgggtcagagatgaaatcatagggtgtcgaagctgtcctctttctctgagtcgcttctgggtggggacacagaagccgttggctgggtcccggtggagccatcggtcatcagacatgcaaaa

SEQ ID NO: 149854 - DNA, 470 bp, Homo sapiens
cgatggcgtgatcttggctcaccacaacctgctgggttcaggtgattctgttgcctcagcctcctgagtagctgggattacaggcatgcaccactcttttagcaattttatttatttattttgttattttgcaaaaagtatttttaacttttacctttagattaatggggtatatgtgcaggcttgcctatatgggtatattgtgtgatgctgaggtttggggtatgaatgatcctgtcagccagatcgtgagcatcgtacacaagcaattttaaaatatacaaatggtgtggtatggtgagtacatgcctgtggtcccagctactcggggaggatggggccggaggatccgctttgagcctaggtgtttgacaccagcctaggacaacattgtgagactctgtctccaaaaataataaataacaaaacaaaataaaatatacaatgcattattatttaaaaaaaaaaaa

SEQ ID NO: 149855 - DNA, 298 bp, Homo sapiens
  misc_feature (1)...(298): n = a,t,c or g
aactttttttacccccttccccgttgccaagccaaatccccgggggccaaaaacccctgccccttatttttccccccagggtccccaaaaaatttatccccccaaatttttgggccccccctttaatttccccccgccccttttgggtaaggtttttagggcccccaacccaagggtttaattaccccctggggccaggtnnnnnnnnnnnnnnnnnnttctccctgggttttaaaaaatccccaaaccccttttttattaaaaaaaaattttccccaccccccaaaaaacaaaaaaa

SEQ ID NO: 149856 - DNA, 372 bp, Homo sapiens
ctcttggttgtgcagctcttccatcctccgaagttcttcttggcgcctcatcaaatctaaaaaaacaacagactaagaatattcctcattgcttatataactaatgactttttaataaagatccagaaagcaaagaggatctaattcctttggaaccacctgtggtgtccagattccaaaatgaagttatacctatcatttccttctccacagaatccagtatctctgccacatctccaagcctatttatctaccaaaatcaacgcaaactaagtataaaagcagagatgtaggcccttctgttaattgatacaaagaaacccatttaaaaatgtcattttgtcctttcagctttaagacttacaggcctaa

SEQ ID NO: 149857 - DNA, 467 bp, Homo sapiens
tacgtgcattgtccctttagcagtcattaactcacagtgagttatcaatgggtgttagttctctgtgggtctgacaacttagtatagtgaaaagagtgctggcctgtggctgaacatgctggagaagagcttgcctggccacagggacacagccacgcagatccagcatgtgtctcccatgtgccaagtggagcccccagccaagaaggcagccacactagcagagggtgacaaggacaatgacatttgaccttgttttgttcagcgacaattgagggagggaagacaagggagggcagcccggctgtgggagaagtggctgaggtggtatgtggagaagaaggccaagaagactgcgttggtggtcaagtcctccatcccgctggacatcaagccttgggacaatgagaccaatatagcccaattggaggcctgtatgcgcttcatccagctggacgggctggtct

SEQ ID NO: 149858 - DNA, 359 bp, Homo sapiens
aagtatactctatcacgcctggccactgtgcccccgaccctcaacccagccgaatacaacatatctccggacacccgacgggcgcaagttgagcagttggccataagagccgggctgaaatgagagtacctgcttcagtacaacaaccccaaccgcagagggctcatcgaagatcctgccttgattcgttggacctatgcaagatcagcaaatgtctatcctaatttcagacccactcctaaaaactcactcttgggcgctctgtgtgcatttgggcccctcttcttctggtattgtgttttcaaaactgacatggatagaaaccaaaaacttatccgggaaggaaaattggatcaaac

SEQ ID NO: 149859 - DNA, 349 bp, Homo sapiens
catcaagcctggccactgtgcctgcgaacctcaacccagctgaatacagcatatctccggacaaccgacgggcgcaagttgagcagttggccataagagccgggctgaaatgatagtacctgcttcagtacaacaaccccacccgcatagggatcatcaaagatcctgccttgattcgttggacctatgcaagatcagcaaatgtctatcctaatttcagacccattcctaaaaactcactcttgggcgatctgtgtgcatatgggcccctcttcttctggtattgtgttttcaaacctgacatggatagaaaagaaacacttatcccggaaggaaaattggatcaaac

SEQ ID NO: 149860 - DNA, 497 bp, Homo sapiens
gggacgcggagggtcagagtgcagacctgagaccactgctcaccgacttcagactccagtttatctgtgccccagcttcctcacttagtctcagaagacttaggctgaggcctcagaaggagatctccatcctttgtccagagcagaacaggatggccaatgtcccaggaatcattgaccttcaaggacgtgtttgtggacttcaccctggaggagtggcagcaactggactctgcccagaagaacctctacagggatgtcatgcttgagaactacagccacctggtgtccgtggggtatctagttgcgaagccagatgtgatcttcaggttgggaccaggtgaagagtcctggatggcagatggggggaccccggtacggacctgtgcaggtgaggacaggccagatgtatccatttttgcctcattgtattttgaagtgctgttattagaagtctggcaagttgatgagcagatagatcactacaaggaaagcca

SEQ ID NO: 149861 - DNA, 415 bp, Homo sapiens
aatgcagtaattcaggtggctcaccccctggtgcagaagcagtaggttgattatatccataatgggttcctggtgcctgtcatgggtcctgccttgcacaagacctctgtggaggagatgatcgccagtaccgcctacctggaacttttcctacggagtatctcagagcctgctttgctccgtaccttactgcgattcctgttgttgcaccggcatgacacccacaccatcctcgacaccctcgttgctcgtattggcagtaactcccggctctgcatggtctctctgagtctcttcaagaccctcctgaacctcagctgtgaggatgtcctgctgcagctgggtctcaggtatcttgttccatgtaaccacgttatgctgagccagaaaccggctgttcgtgatgtggacctaa

SEQ ID NO: 149862 - DNA, 394 bp, Homo sapiens
aagaagctttttatacaacagatcgtggaatgataccgtcattacacgatctgttgtataataggcttcttgaacaccatcaccatgatgacggtatcattccataaatatggggaatactttcctggcacatgagacttgagggatattgatgctggaaaatgctaatactatgctgtcaattttccaatgagagatggtatagatgatgagtcatatgggcacatatttaagcctattatctcaaaggtgatggagatgtatcaacctattgctgtggtattacagtgtgacgcatactcattatatggcgattcacttgattgtttcaatctaactattatacgtcattctacccgcttatatcttatataatcatatcattttacttccc

SEQ ID NO: 149863 - DNA, 417 bp, Homo sapiens; identical to SEQ ID NO: 147333
  misc_feature (1)...(417): n = a,t,c or g

SEQ ID NO: 149864 - DNA, 1049 bp, Homo sapiens
  misc_feature (1)...(1049): n = a,t,c or g
gaatgccctgtcgccaattcgcgccagtctttcttgagctactctttcataatggaaatgaacttagtatcttgagagcttataacttggaaaatttaaatgagataatgcaggtgcaactgtgtgtccacaagtatggacatcaaatctgtgggaaaagaacaggtttgtattttcaggaaggagagaataacagtcttatagacagagggcacagctaagcacagctgccactgcaggagacaggccccatgtcaggatgccatagtgctgtggggagcacagtattacccagtgggtagggcttctgtcttccctgggagcagggatggtatcttagtcaatttttttcccttgagatgaggtctgtgcctgatgtacaacggatactccataaatgtttgacaaaccaacgaagaatgaaaaaaagcctagtcagactcccatcctaagtaggaactatctctttaacattcttgactcactatcactttacctcaaattgaacagattccatgacggaacttcattcttcacaaactagccagtgacatgtgggacagctctggccagggctctgggactgcagtgtacttgctctctgcacggtccaggagctgtgatgttggctgtggtctaggggaatcctgcctgccccatggagttgcgcagcacaaccctggctccaattgccagaaggctctttttaatgctgaaccaaaatgtgcctttttttttttttttttgagatgggagttcccttttgggcccccggccgggaggcaagggccccaatcaaacaaaagggaacccccggcccccagggtaaagggaatcccccccccacccccccccaagacgggggaaaaagaggatggcccaaccaccccaattaatttgggattttnnnnnnnnnnnngggttccccctgtgacagggggggggtataaacccccaccccgaccccccaaagggggggaaaaaacggggggaacccccggaacccaccacagggccctctaaaagaggaaaaaaacagggctttggtg

SEQ ID NO: 149865 - DNA, 398 bp, Homo sapiens
ctctttcccaaagtcaacctgagccccgtgacgcccgcaaaggacacggggctcaccgctgctccccaggaaccaaaggcccccaaagccagcccagtccagcacgccctaccgtcgtccctgagcgttccccacaccgccattctggtcacgggcgcgcagctctgtggcccggcagtcaacctgagccagatcaaggacaccgcgtgcaagtccctcctgggcttggaggagaaaaagcacgcggaagcaccagctgctgagaaccctcatggaggtccaggagactcgagtgcgccctattaatgaggtgatgccccaaagggccatgccatacgagctgtcgaagttcctgactaaagccgtattacgggccctgaatgagcgacttcactccg

SEQ ID NO: 149866 - DNA, 504 bp, Homo sapiens
  misc_feature (1)...(504): n = a,t,c or g
tttttttttttaaacagggttttgactctgatcacccaggctggagtgcagtggtgtgatcatggctcactgcagcctcgatctcttgggctcaagtgaccctcacatttcagcctcccaagtagctgagactacaggtgtgcaccaccacacttggctaacttttatattttttataaagatagatggggtttcaccatgttgcctagactggtctgggaactcctaggctccagtgatctgtccatcttggactcccaaagtgctgggattacaggcgtgagacaccacacatgggccaattttttcaactttttatgtgtatcaggaatcaactagaggaacttttataataaattcacatcgtggggctcacatccaaattcacagtattattcaggaatctcttgggggcagagcacaaacatcctattaggttattaacaaatttttcagggtggagggtcactatttcttanttagggccntttggttgtgggggcc

SEQ ID NO: 149867 - DNA, 553 bp, Homo sapiens
ttctatttctatttctttttttttcctctttttttttttttcaagccgcaggacgattttctggttcccggggatcaaaaccagcggccaggcggttctatgccgcttggcaccgctttcattttatttcaaatgaagacgttgagcttagtcagaaggggcataaatcaggacaattagcattggcgccaagaagatcctctaataccaatttcgcccgggtttccttcgcgcattcctccactcaagtcagaaatgtcactgccactaagcactgatggcagtgagacgcgacgcacccaaagtccgtttgatgaaatatacatggcccacgacgcttctggattgcggctcccggactccccgcccccaccagcggctcccggccgggaccctgctccgagcgggcagcgagctcctggcaaacttaggggccagtgccaattaaagagtgagcgcgagagccggaaagaggagcggcaaagaagcaagcccggggaagccgcagccctcggaggggtggcatgtacgtttcacttaaaaagcagatctt

SEQ ID NO: 149868 - DNA, 1695 bp, Homo sapiens
  misc_feature (1)...(1695): n = a,t,c or g
ttttttttcaaagcaactgacacaataaattttattgtttccataataataggctctggacaaagacaatggagacaatgacaacacatttaaactcctataacaaattaatctgttacaaattttccagtggctcaacatattaaaatgcaaaacatataaagaaaaaaacaagaaatataaatattcagatttttgcagtacaatgaaatgtcttttaaaaaaagtttgttgtaattgtgtatgtaattctgacagtaattcaaaacacaagatcacacattttccctaacttcccatgttctggatctggggactgcaatattacagaaatatgcaaaaataagtttagtgctcagagataaataattttccttatttcaatgcatcaatgcgcaaaaaatttcaattcaaaaaagccaacccctgctatatgcagataaataaaacatttgacaacacttttataatcaaacccaacattatacaaaaaatgtgtggcacatgcacatacgtgtgcatatgtgtatgcaatgcctattttagaaaaaaggtgtcttgatgaaaatgattttgaaaatagtcactgacacccattatatacaaaaccttttatataaaaaattaaactattttcaatgaaattccatgttcacatcctatctgaaaattgcaattgaattcataaataggtctactaacgaaatcatggctaaggcagttctctttccaagggttttcttttatatccacctgatgtcactaatactaatgtagtcaaatatacagatgcaacctgacatgcctatgcgttattacctggagctctgttcactgttataatgggagaatttacagttgctacaaagaatatttttcttttttaaaatatactggtttctctattccaaattaagcacttacttaagacattaagaggctgagaagccactccatttggtgtcaatatcaatagccctataagaaagaactctgtattggaattgtctagaaaagttctcactaaagtgagaactttagtgcatccttcacctgcatagaatcagtttgggctaatagctctttgccccagaacaccagtctgggagttcaaatagggctcctgaaagttcatctcaggataaggaaaaaaacatctcacaggaaggcaatgtaagggacacacagggataattaaaatgggtttaaaatctgttttgatggggtctttactttacagcattccctcatttgggggggcgcctgcctanagggttaaggtggaaacaaaaatggaaaagatccaggggccaattaaagttgaagttggcccaagtatttacgcccagtaaccatttcaataagtctttaagcaaacaactgcaatgaccctggtacctctaagctcatcattctacaagcactgaggatatgaagcttaaaaggtgaaaacttgaatacccttagaaaaggggaacagtctgaggcaaaagttgtaggcctgtaaatatatattttattttattttcatcttttttgagacggagttttgctcttgttgcgcaggctggagtgcagtggtgtgatctcggctcactgcaacccccacctcccggcttcaagtgattctcgtgcctcagcctcccgagtagctgggattataggtacccgccactatgcccagctaatttttgt

SEQ ID NO: 149869 - DNA, 370 bp, Homo sapiens
  misc_feature (1)...(370): n = a,t,c or g
cgccgttttgtttctcaagagactgggaatctgtatattgccaaagtagaataatcagatgttgggaattatacctgtgtggttaccaataccgtgacaaaccacaaggtcctggggccacctacaccactaatattgagaaatgatggagtgatgggtgaatatgagcccaaaatagaagtgcagttcccagaaacagttccgactgcaaaaggagcaacggtgaagctggaatgctttgctttaggaaatccagtaccaactattatctggcgaagagctgatggaaagccaatagcaaggaaagccagaagacacgagggttgcgaaatgtgannatatcttgagaatcccttaattttcagcagga

SEQ ID NO: 149870 - DNA, 313 bp, Homo sapiens
attcaggccaccaacgccctgtaaatccccaagccaacgaggatttataagagttaagtaatttgctaatgtactgaaaagtgacatacatacagaagaatgtatatagtaagtgcacagctgggtgggttttcacacaaagggctcgtgtaggcagcagggaacccttcccagcggcgccctcccctgggcctcacggtggggatcctccctccccaccacaactagggtagccgctgtctccacttccacagccagctccagttagactcccctcacctgttatgatgtcagagaggattctccctttcat

SEQ ID NO: 149871 - DNA, 320 bp, Homo sapiens
  misc_feature (1)...(320): n = a,t,c or g
aaatattctcccaggaaaatctataatatagtgatggctcagacattttaggattactagcattacaggctgaagaaaatcttggtatggtgatgatttttactctagtgacagctgtgcaagaaaaattaaatgaaatagtagatcagataaaaactnnnnnnnnnnnnnnnnnnnnnnnnnnnnnnnnnnnngcagaagaagctgaaaagcaattattccatggtactccagttacaattgagaatgtcttaaattgggaaagccaaggttggcgccggcaaacctttcttgggaaaattttagaaaaggaaaaaggg

SEQ ID NO: 149872 - DNA, 1118 bp, Homo sapiens
gcgcgccgcctaggtgtctgggcgatctatgggcaagagcaagggccacgatgacagattacggcgaggagcagcgcaacgagctggaggccctggagtccatctaccctgactccttcacagcttgattgcacattgatccaaccctcctaacaactagtcttccaaaatataaatggactctcctgataccacattctccttcagtagtgcttcacttgacaaggtccctgctaagtattatcagaaaatccaccccagcttcaccattactgtgacgtctgaggctgggagaaaatgatgaaagtattcacatcaaactcttatcttgtgtcttagctgtccagactaccctcaagtttacatacagtgaaaaatacccagatgaagctcccctttatgaaatatttctcccagggaaaatcctagaagataatggatgtctcagacattttaaaattactaagcattacaggctgaagaaaatcttggtatggtgatgatttttactctagtgacagctgtgcatgaaagaattaatgtttttagtagatcacataataactagatgtgaagtagaaatgaaactataggataaagaagcagaagaagctgtaaagcaattattccatggtactccagttacaattgagaatttcttaaattggaaagcccaagttttgatgcagaactcttggaaattaaaaagaaaaggatgaaagaagaagaacatgcaggacttgataaaaaaaagtgggaaacaactatttgaaacagatcataatcttgacacatctgatatccagttcttggaggatgctggaaacaacgtggacggtagatgagtctttgttccaagaaatggatgacttggagctggaggatgatgaagatgatccagactataatcctgctgacccagagagtgactcagctgactaatggactgtccccatctgcagagaggcttgactgccacagcatctgtggctaatgctcagaggggttatgattttcctttctttttttctaagaaaaaattattttcaggagaattttcctcctgatagctttcatcattgaacttaataaactgaccttaaaatttcaaatataaa

SEQ ID NO: 149873 - DNA, 374 bp, Homo sapiens
  misc_feature (1)...(374): n = a,t,c or g
ttaaaaaaacacaaaagcacgagggttccctagaacgtgaaaagtgggaaataaaatttttcgcccccctttaaaattagaccgtgggcccaaaaaagggccaaaaaaaagggggccagagaaaaaaaggcggattaagaaaaaggggaatttgggaaattgnnnnnnnnnnnnngttttagaccgggtaaaaaggtttgaggttaaccaaagggttttcaaaggaattttgaaaaaaaacccgttaaatcccaagggccggttaatatgggggtaattccggcttttgaaaaaaaaccgaggattcccccggtggccaaaattcccatttaaggggcccnnnnnnnnnnngggcggccgctcgcgatctagaa

SEQ ID NO: 149874 - DNA, 375 bp, Homo sapiens; identical to SEQ ID NO: 67589
  misc_feature (1)...(375): n = a,t,c or g

SEQ ID NO: 149875 - DNA, 360 bp, Homo sapiens
aagggggcgccaaaacacggacaggcgccactgggcgatccacccagagctgtcggtgggcaagagcactaaggccccgcgcgggggcgagggccgggacctcgagagcctggctcagggcagacttcctcaccttgggtccacgtgcggccagggggtggaaagaatgactcagggaaagccaggccctgaatactcgacccaaagtccgtttcttgcatcccagctccctccagccacagacccctgtcatcccctacccctaatccctttccttgatcaagctatgaaggctcccccagaagcccacagccctggacccttcagccccagggcccctggcccccaagtcgccaagct

SEQ ID NO: 149876 - DNA, 271 bp, Homo sapiens
  misc_feature (1)...(271): n = a,t,c or g
aaaaaaaaaccccaaacctgggaaaaattagtttagggccttttttaaaaaaaaagaaatcccgggtgggggcaaagggtcccccccgttaccccccccctttggggggttaaaaaaaggggaggggtttttttccggggtttaaaaccccccttaaaaccaagggaaaacccctttttttcnnnnnnnnnnnnnnnnnnnnnnggnnnnnnnnnnnnnnnnnnnnnnnnnnnnnnnnnnnnnnnnnnnnnnnnnnnnnnnnnnnnnnnag

SEQ ID NO: 149877 - DNA, 108 bp, Homo sapiens
gatcaatagagtcacatcaacgtacccatgaaccagccctaagtcgtgtcccttggcccaggccaggtcaccaagggctgggaccagggtctgctggtcatgtgtgag

SEQ ID NO: 149878 - DNA, 336 bp, Homo sapiens
gaattcttaggagctgtagggttctgcagattgtggatcccaaactttgcagtattggctaagcccctgtacggagtcacaaagtgaggagacacagaacttttcaaatgggggtcccaacagcaatgagcttttcatgagttaaaagagaaactcatgtcggccccagccctggggctacctgacctaacaaaacctttcacactgtatgtgtcagagagagaaaaaatggccattggagttttaatccagatggtggggccctggccaagaccggtagcctacctctccaaagagctagatggagtttctaaggcaaggtctgaaggatgcgag

SEQ ID NO: 149879 - DNA, 122 bp, Homo sapiens; identical to SEQ ID NO: 67594

SEQ ID NO: 149880 - DNA, 134 bp, Homo sapiens; identical to SEQ ID NO: 67596

SEQ ID NO: 149881 - DNA, 327 bp, Homo sapiens
ttcttgcctggttttggttttgctttgtgtggagtatctttttccatacctacactttcagtccatatgtgtgtttacgggtgaagtgagttttttgcaggcagcatacagttgggtaatggggttttttgtttttttgtttattttaattcattcatactttctataacttttatgggggttattcatttcgctacatttatggctgtctttgacttgtgaagacttgttcttgttattttttagtcgttgtctgatttatatcatttgctttgtctttctcttatttatgtcattcttgatactttggagattgttggtatttcg

SEQ ID NO: 149882 - DNA, 331 bp, Homo sapiens
  misc_feature (1)...(331): n = a,t,c or g
cctgcannnnnnnnnnnnnnnnnnnnnnnnnnnnnnnnnnnnnnnnnnnnnnnnnnnnnnnnnnnnnnnnnnnnnnnnnnnnnaaggcagttcagcagctttctacagaactaaacatactctgaccttannnnnnnnnnnnnnnnnnnnnnnnnnnnnnnnnnnnnnngttaaaaacttccttccgtacaaaaacctgcacatgaatgctaacagcatctttatttgtaattgccaaaacctggaaacaaccaagatgtccttcagtaggtgaatgactaagtaatttgtagtatgtccagacaatggaatgttattcagtgctaaaaag

SEQ ID NO: 149883 - DNA, 408 bp, Homo sapiens
  misc_feature (1)...(408): n = a,t,c or g
agaggacctgcggcaggccctcttttgcagtctcttttgcccggtttccctcggcgtgctactgtgcgctcgatccatcaccatggggaagcgggacaatcgggtggcctatatgaacccaatagcaatggcgagatcaaggggtccaatccagtcttcagggccaacaatacaggattatctgaatcgaccaaggcctacctgggaagaagtaaaagagcaactagaaaagaaaaagaaaggctccaaggctttggctgaatttgaagaaaaaatgaatgagaactggaagaaagaactggaaaaacacagggagaaattgttaagtggaagtgagagctcatcccnnnnnnnnnnnnnnnnnnnnnnnnnnnnnnngaaatctggtaggttcttctgattctgaag

SEQ ID NO: 149884 - DNA, 138 bp, Homo sapiens
atttaataaaaatctatgatttctccttccagttgttttttctcttcctcgagcttccttatctcctcctgttgaatcattttaagatgctcgaatttgtcctgcaggtttcgctgtcacccctctagaatccacgta

SEQ ID NO: 149885 - DNA, 1053 bp, Homo sapiens
atgaacgaccggactcctgcaggcgctccgccaactgcagcgatctctggagccggcctgtcctccacagagatagggggcgctgtagcagagcgcggccgtcgagtccgcgtggtgccgctctctaggcggagtggggaggcggcaagaggacctgcggcaggccctcttcggcagtctctccggcccggtttccctcggcgtgctactgtgcgctcgatccagcaccatggggaagcgggacaatcgggtggtgagtactcagccgggaaaacagtggggcgacgcagggcccggcggcaggacagcgagaaccctcgctgttcccggccgggccggagggcaagcggcagccctcagacggaagaagtaaaagagcaactagaaaagaaaaagaaaggctccaaggctttggctgaatttgaagaaaaaatgaatgagaactggaagaaagaactggaaaaacacagggagaaattgttaagtggaagtgagagctcatccaaaaaaagacaggataagaaacaaggaaaacggagaaagaaaaagaagaaccgttcacataaatcttctgaaagctccatgtcagaaactgaatcagacagtaaggatagtttaaaaaagaaaaagaagtcaaaagatggaactgagaaagaaaaggatattaaaggactcagcaaaaagagaaagatgtattctgaagataaacctttatcatctgagtccttgtcagaatcagagtatattgaggagatatgcctacgagacatcccaggtagagctgttaatgaggcacttatcgtcctgaggtcaaagagtaggactgaatataaagatttgggcatcattggttttaagtggaatgtaaagcatgtgactgggagagtatgtggtaaacaatggaaggaagccccagaaaagccagccagaggaagaagagccagcaaaggaaatgaagaggtctttgtgatagaagaaaaccagcagagaggtgtcatggaagctaagaagaaaatgatttttagaagagagtgctcagctgtccttttatga

SEQ ID NO: 149886 - DNA, 704 bp, Homo sapiens
  misc_feature (1)...(704): n = a,t,c or g
ttgtttcttaaaggtaaataagctccctaaatttgtctgtaaattggaagtaactccagtgaaaatgccaacaggaatttttttttggcttgacaaactaaggctaaaattaatatagaaatgagcatacaataataggaacactatgaaaaagaagagtaatgagaggtgggaccaagtctataagatattaaagggtaagtctctccggcccggattccctcggtgtgctactgtgcgcgcgatccaacaccatggggaagcgggacaatcgggtggcctatatgaacccaatagcaatggcgagatcaaggggtccaatccagtcttcagggccaacaatacaggattatctgaatcgaccaaggcctacctgggaagaagtaaaagagcaactagaaaagaaaaagaaaggctccaaggctttggctgaatttgaagaaaaaaatgaatgagaactggaagaaagaactggaaaaacacagggagaaattgttaagtggaagtgagagctcatccaaaacaagaccgagaatgagaaaagaaaagaagaaatctggtaggcagttcttctgattctgaagatgaggataagaaacaaggaagacggagaaagaanaagaagaaccgctcacataaatcttctgaaagctccatgtcagaaaactgatcagacagtaagtttaaaaagaaaaagagtcaaa

SEQ ID NO: 149887 - DNA, 337 bp, Homo sapiens
ttcaaatttagtcatataaacactgaaacccaaaccaccagagccttctgtgcagagctttttgtggtgttcttattcttatactgccagtcttggctttgttaactcgtttgagttttggagaactaactctctataataaccatttcatctatatatttaaagctttttttaaatttatataggtctttaagtggacaggagataatatgttttttatcaaaggagacatggattcactagctttcggtggtggagggtaagtctcttgaacatttcactatgagatttttgaagaactttaaaaatgcatttggattatttataaattcagttg

SEQ ID NO: 149888 - DNA, 358 bp, Homo sapiens; identical to SEQ ID NO: 67599

SEQ ID NO: 149889 - DNA, 353 bp, Homo sapiens
  misc_feature (1)...(353): n = a,t,c or g
agcaaaacagataaaaaggaaaaattgttaagctggacttcatcaaaatttaaaactttttctctgcaaaagatcctgttaattattaaaaagacaattacaggctgagaaaaatgactgcaaatcacatatctgacaaagaatttgtatctaaaacatacaaagaatgtctaaaactcaaccttaaaaaattcatnnnnnnnnnnnnnnnnnnnnnnnnnnnnnnnnnnnnnnnnnnnnnnnnnnnnnnnnnnnnnnnnnnnnnnnnnnnnnnnnnnnnnnnnnnnnnnnnnnnnnnnnnnnnnnnnnnnnnnnnnnnnnagtatcatcaatcagaaaggctaaaataaaaa

SEQ ID NO: 149890 - DNA, 383 bp, Homo sapiens; identical to SEQ ID NO: 39715

SEQ ID NO: 149891 - DNA, 267 bp, Homo sapiens
tgacaattgtgcggccatatttactgaagaagaagacagggacaattgtggaagaaagagtaaatgcgcctggatggaatgaagatgatgatgtatctgtttcagatgagagtgagctccccacaagtaccaccctgaaggccttcgagaagtctacaatggaacagttggtggaaaaagcttgtttcagagactatcatcgtttaggtttatgaaccttaagtggcagctgttgccgttcataaccctagagccgacgcgtacagc

SEQ ID NO: 149892 - DNA, 492 bp, Homo sapiens
actgccgttccctcagctgcttcgatgacttctaccagggctgcttccgcatcttctgttcacgttcctgtttctgctcttggtgcaggatctgcagctactgctgcatcagaagaaatgcaaaccattcctcaagcaactgcagcaaaatatccccggaccattcatcctgaaagtagtacctcagcttccagatcacttggaaccagatcagctcacacccagtctctcacaagtgttcattccataaaagtggttgactaaagtgaatatgtccatagtggggtcttttaatccctctggtcttaccaagggttagaagtcttttggttttaacttttccatattgttagaacatcatggagacatcatgttcatctgttcaaaattacaagaggctttttcaagctctaccatgctttgtaactatatgtagaaattattttaatgttattttttatttaagcaattaagtaaaacttttttaaatta

SEQ ID NO: 149893 - DNA, 313 bp, Homo sapiens
ggagataatagaggtaagaggtaccttttaaaataaattgcacatagcagaagaggtaagtgacaaactttttaatatttcacatgagaataatctcaaagtatatatctatttttttgacagtattcttctttgtatctcaaattgttttgctttttaaacattcttattttagttatctggagctttggaaaatgcaaaagctgagattcaaagaatgcaacatgaaaaagagcactttgaagattccatgaaaaaagctttcatgaggggtgtatgtgcattaaatcttgaagccatgactatatttcaa

SEQ ID NO: 149894 - DNA, 1155 bp, Homo sapiens
atgggcaaggacttcatgtctaaaacaccaaaagcaatggcaacaaaagccaaaattgacaaatgggatctaattaaactaaagagcttctgcacagcaaaacaaactaccatcagagtgaacaggcaacctacaaaacgggagaaaattttcacaacctacttatctgacaaagggctaatatccagaatctacaatgaactcaaacaaatttacaagaaaaaagcaaacaaccccatcaaaaagtgggcaaaggacatgaacagacacttctcaaaagaagacatttatgcagccaaaaaacacatgaaaaaatgctcaccatcactggccatcagagaaatgcaaatcaaaaccacaatgagataccatctcacaccagtttatgaaggtaaactagctgaccagtactaccagagaactttactgaagaaagtctggaaagtctggcgttccgtagtgcaaaagcagtggaaagatgtggtagaaagagcttgtcaagcaagagctgaagaagtttgtatccagatttccaatgattatgaagccaaagttgctatgttatctggagctttggaaaatgcaaaagctgagattcaaagaatgcaacatgaaaaagagcactttgaagattccatgaaaaaagctttcatgaggggtgtatgtgcattaaatcttgaagccatgactatatttcaaaacagaaatgatgcagggatagactccacaaataataaaaaggaagagtatggtcctggtgttcaaggaaaagaacattctgctcatttggatccttcagctcctccgatgcccttaccagttacatcaccactgctgccatccccaccagccgccgtcggaggagccagcgcgactgccgttccctcagctgcttcgatgacttctaccagggctgcttccgcatcttctgttcacgttcctgtttctgctcttggtgcaggatctgcagctactgctgcatcagaagaaatgtcagacaaagaactcataacatgtacgagacaactaaaacgggatggatgcttcggacagtacacgaaccaaccgggcaccggaaatatggggaaaaaacagcctcgaataacactctgccctctgaataaaagaaaagttgtagctgtcaagccaaattga

SEQ ID NO: 149895 - DNA, 817 bp, Homo sapiens
caaggaaaagaacattctgctcatttggatccttcagctcctccgatgcccttaccagttacatcacccactgctgccaatccccaccagccgccgtttgattagccagcgcgactgccgttccctcagctgcttcgatgacttctaccagggctgcttccgcatcttctgttcacgttcctgtttctgctcttggtgcaggatctgcagctactgctgcatcagaagaaatgtatgtgccaagagttgtaacctctgcacaacagaaagcaggaagaactattacagcccggatcacaggaagatgtgattttgcttcaaaaaatagaattagcagcagtttagctataatgggagtttctcctccccatgagctcagttgttgtggaaaaacatcatcccagtccacagtgcaaacccattccctcaagcaactgccagcaaaatatccccggacccattccatccctgaaagtagtaccctcagccttcccagatcacttggaacccagatcagctcacacccagtctctcacaagtgttcattcccataaaagtgggtgaactaaagtgaatatgtcccatagtggggtcttttaatccctctggtccttaccaagggttagaagtcttttggttttaacttttccatattgttagaacatcatggagacatcatgttcatctgttcaaaattacaagaggctttttcaagctctaccatgctttgtaactatatgtagaaattattttaatgttattttttatttaagcaattaagtaaaacttttttaaattaaaaaaaaaaaaaaaaaaa

SEQ ID NO: 149896 - DNA, 323 bp, Homo sapiens
tctcatgcggggcatcaaagcttaatatatcaaatatatatgcattctaaaattatatgtattgataggcgaagcttgtgacataccccttaagtcataggctatcggaatattcgatgcactatattgacaagcacaattacttctagtcttagcatcttataactaaatcactaaccagagacgagactcagtgagtgagcaggtgtttaggacaaaggactggttgttgctcagatgatgtggttgatggatcatatttttaagtacacaaactttggaattgtttctctagttcatggagacttctttataagacaggg

SEQ ID NO: 149897 - DNA, 319 bp, Homo sapiens
catggtgctcgtgactcttgatgataagtatgccgttgctgccctgtggggcaaggtcaaggtggatgaagttgatggtgaggccctgggcaggctgatggtggtgtacccttggactcagaggttctgggagtcctagggggatctgtcccctcctgatgctgatatgggcaaccctaaggttaaggttcatggcaataaagtgctcggtgccgttagtaatggccaggctcacgtggacaacctcaagggcacgtttgccacagtgagtgagatgcactgtgacaagctgcacgttgcccaggagcctgaagttctc

SEQ ID NO: 149898 - DNA, 297 bp, Homo sapiens
  misc_feature (1)...(297): n = a,t,c or g
cgggatctacagcattttccaagtagtgtagcgatgtaagatcagacgcagaatgacattgctagtactagtaaccacgagagtatcctgcaagggatcaagggccagagtcagctctaggaggaagtccaactaatggaatgagcacccgtcgactgtnnnnnnnnnnttgttaatatgaaacaaaaaaagcaaatgaagagaaaaaaatcttactatgattaataactcgctccaattcaagtccaccactacaaggttcttcatcacttctcacattctatatatgcaccccca

SEQ ID NO: 149899 - DNA, 282 bp, Homo sapiens
  misc_feature (1)...(282): n = a,t,c or g
agtttgcaaagnnnnnnnnnnnnnnnnnnnnnnnnnnnnnnnnnnnnnnnnnnnntcactctaaacatcttattaatgcctactgcttatgataagttttactcggaatgccaacctatttaggctccatggcactcacactgacacttttaaatgccttgaatatgaaaaatgctttaactgtaactcagatcttattgtacatcacagaattaacatggaccataatccacatcagacgtctgcgtgagatagtggcttacttctaggaatgcactttgg

SEQ ID NO: 149900 - DNA, 156 bp, Homo sapiens
agcggaggcgtcgacgagcagatgatgcgcgagaaggaggagttgatgctgtggttgcaggactatgaggagaagataaagaaggcagagagagagctctaggagcagattaagagggaaatgaagaaaaaccaaaagagaaaaagggaaaagaag

SEQ ID NO: 149901 - DNA, 322 bp, Homo sapiens
  misc_feature (1)...(322): n = a,t,c or g
aaatccaccataggcagggatagtgggacgtgcccgttaatccaggtaatcgggggggttaggccggaaaaacgccttaaacccggaggccaagggtgccacaaacccaaattcagggacaggcattccacccggggggcaaaattaagctccaattccggnnnnnnnnnnnnnnnngaacaaagttgggggattgacactaccaaactgcaagacttactataaagctacaataatcaagacagtgtggtactggagaaagaaaagacaaataggtcagtgaaacagaatagagagcccagaaatagatccacataaatac

SEQ ID NO: 149902 - DNA, 397 bp, Homo sapiens
cagagatcgagaaagtgatagagatgggcagaggagagagagagaaaggagaaccagaaagtggtctaggtccagatctcattataggtccccctcaagatgtagaacaaaaagtaagagttcatcatttggtagaattgacagagatagttactctccccggtgaaagggaagatgggcaaatgatggttggagatgtccacgaggaaatgatcggtacagaaagaatgacccagagaaacagaatgaaaatgcaagaaaagaaaaaaatgacatccatctagatgctgatgatccaaattctgctgacaaacatagaaatgactgtcccaattggataacagaacccataaactgtgggcccgatccaagaaccagaaatccagaaaagttgtaa

SEQ ID NO: 149903 - DNA, 389 bp, Homo sapiens
ggcacgagctgccccatccagggctggggctgaagagggggtgctgggtattggaggtggctgagcatgtggtcttgggtaaagcgcttctgatattgcttccatacagattcaagcggaacatcctggccatggacgacaagacgggtatgaccaggaaccctcatttcagccacaacaactgtataccaacctttttcagcacccagtatttctggatcatctttaaggtccgttggccgcgactaaaggacacaactgatctaaggattctggccccaaactgcctcgcggaccggctctcacgacacaggtgcaacatttggcagtttatgcaaggcattaggccactggtgctgaattttggaagttgtacctgaccttcattt

SEQ ID NO: 149904 - DNA, 360 bp, Homo sapiens
  misc_feature (1)...(360): n = a,t,c or g
ggcacgaggatagatgctgctgaagatcttttcttagccttagccttcttgcagctctaatatgtctctaactcaaaatgtagcaatcatagaaaatgaagtctcnnnnnnnnnnnnnnnnnngaaagggaatccagttttgtaccacaggttgaattgcatggacgggatttgggttaactacaactttggctcccgggtttcgggaaattccccggcctaaccccccttagaaacggggatgacgggcccaggccacaacccccggcaaatttggggcttctagtaaaaacggggttttcccccgtggcccatctgggtgtaaacctcgggaccttgggggattgcccagccttaccg

SEQ ID NO: 149905 - DNA, 351 bp, Homo sapiens
  misc_feature (1)...(351): n = a,t,c or g
ggcacgaggatagatgctgctgaagatcttttcttagccttagccttcttccagctctaatatgtctctaactcaaaatgtagcaatcatagaaaatgaagtctcnnnnnnnnnnnnnnnnnggaaagggagtttcgttttgtcccacaggttgaattgcatgaccgtgatctgggttcattacaccctgggaccccgggtttaaggaaattctccggcctaaccctccctagaagcggggataacgggcccgggccaccacccccggttaatttggggtttttagaagaaacgggtttttcccacgtggcccattttggtttaaactttgggacctgaggggattgcccg

SEQ ID NO: 149906 - DNA, 403 bp, Homo sapiens
gtgttatcactactatgggagtttgccctcgagccaagagttcggcacgagctgactctgtcactccttttccgtaagcggagagctgacatgccacgggtgttagtgtttcgtgcccttttgatggtcctcatctttctctttgtggcttcctattggcttttttacggagtccgcattttggactctcgggaccggaattaccacggcattgtgcaatatgcagtctcccttgtggatgccctcctcttcatccattacctggccatcgtcctgctggagctcaggcagctgcagcccatgttcacgctgcaagtggtccgctccaccgatggcgagtcccgcttctacagcctgtgacacctgagtatccagcgagcagcattggtggtcctagaaaatt

SEQ ID NO: 149907 - DNA, 388 bp, Homo sapiens
ggcacgagcggcacgagcggcacgagggggccctcagccaagatgcactcttgagaatctccatcccactggactcaaacatgaggccagagaagtgtcgtcgctttgttcatcctcagcggcagctccttcacctgaatgggacctttcccaacacaagtgacgcagacatggagccctgtgtggatggctgggtgcatgacataatttccttctcatccaccatcgtgactgagtgagatctggtatgtgactctcaatcactgacttcagtggctaaatgcgctttcatgactggatagacggcggatggtttcctaggcgctcacttatcacacagggtacgtgccagttccaacgtttgtatgggtggctcgattgtttgccg

SEQ ID NO: 149908 - DNA, 269 bp, Homo sapiens
ggagcgcccatttcggctccctctccaggaatacatccagaagctgatgcccccactgatccagagtggaatgagctcaaggacgaagacaaggacctcttccccctgctggaatgtacacccagcacctgagcagtatgaggctcccgacaaggacttcatgatcgtagcactggattgctcagcggcctggccgagggcctgggtggtcacgtggagcagctggtgcccgcagcaacatcatgacattgctgttccagtgcatgcag

SEQ ID NO: 149909 - DNA, 253 bp, Homo sapiens
atgtacacccagcacctgagcagtatgaggctcccgacaaggacttcatgatcgtagcactggattgctcagcggcctggccgagggcctgggtggtcacgtggagcagctggtgcccgcagcaacatcatgacattgctgttccagtgcatgcagccgagttcatgcccattctgggcaccaacctgaacccagagttctctccgtctgcaacaacgccacctgggccattggtgaaatctgcatgcaatgg

SEQ ID NO: 149910 - DNA, 394 bp, Homo sapiens
ggcacgaggcgtggtaagtgctgtgcttcgggaaccaggaggtggtaacccaggctcccggggggtggggtggggcgggcggtgcttggacaggtgagaagaatgaaggcctcgaggtctggccagatggcaggcctttcagggtcccatgagccacggtgaggcagctcaggccttatcactcgtgcaacaggtacctgagtcacagtctgccagcccgacccacggagcgcccatttcgtgctccctctgcaggaatacatccagaagctgatgcccctactgatccagaactggaatgagctcaaggactaagacaaggacctcttccccctggctgaaggtgagtgggctcctgcccctcacccgaaacccatcctgcccaccctgcctg

SEQ ID NO: 149911 - DNA, 3097 bp, Homo sapiens
cgcggggaaccggaaacctaggaatcccaaccgctccttcagggtgttttccgcgattctccgagtggagttaggggcgtgcagacacttccctaaccttggaggcccgggagtggattttcatgaatgaacggagccgggactgactttgcctacggcaaagaaggaaaaacggtgccctactgtcttcagacgtcgcaaggatcaagaaaatttctttcttcatgaccctgcccttgccagaatttcctgcgctgttccacctcattcaacttcagcttgccttgcgccatggactggcagccagacgagcagggcctgcagcaggtcctgcagctgctcaaagactcacagtcgcccaacacagccactcaccgcatcgtgcgggataaactcaaacaactcaatcagtttcctgacttcaacaactacctgattttcgtcctgaccagactcaagtcagaagatgagccaacgcgctctctcagtggcctcatcctcaagaacaacgtgaaggcacactatcagagcttcccaccccctgtggcagacttcatcaaacaggagtgtctcaacaacattggcgatgcctcctcgctcatccgagccaccattggcattctcatcaccaccatcgcttccaagggtgagctgcagatgtggcccgagctgctgccccagctctgcaacctgcttaactcggaggattacaacacttgtgagggagcctttggagccctgcagaagatctgtgaagactcatcagagcttctggacagtgacgccctcaacaggcccctcaacatcatgatccccaagttcctgcagttcttcaagcactgcagtcccaagatccggtcccacgccatcggctgcgtgaaccagttcatcatggaccgggcccaggcgctgatggacaatattgacaccttcatcgagcacctatttgccctggctgtggatgatgaccccgaggtgcggaagaatgtgtgccgtgccctggtgatgcttctggaagtgcggattgacaggctcatcccccacatgcacagcatcatccagtacatgctgcagaggacccaggaccatgatgagaacgttgcccttgaggcctgtgagttctggctgacgctggccgagcagcccatctgcaaggaagtcctggcctcccatctggtccagttgatccccatcttggtgaatgggatgaagtactcggaaattgacatcatcctgctcaagggggatgtggaggaggatgaggctgtccccgacagtgagcaggacatcaagccacgcttccacaagtcacgcacggtcacactgccccacgaggctgagcggcctgatggctccgaggacgcggaggatgacgatgatgatgatgctctgtccgactggaatttgaggaagtgctcagcggctgcactggacgtcctcgccaatgtcttccgggaggaactgctgccccacctactcccactactcaaaggcctcctcttccaccccgagtgggtggtcaaggagtcgggcatcctggtgctgggcgccattgctgagggctgcatgcagggcatggtgccctacctgcctgagctgatcccgcacctgatccagtgcctgtcggataagaaagccttggtccgctccatcgcctgctggacgctgagccgctatgcccactgggtggtcagccagccacccgacatgcacctcaagcccctgatgacagagctgctcaaacgcatcctggatggcaacaagaaggtacaggaggcggcctgcattgcttttgccaccctggaagaaaaggcctgtacggagctggtgccctacctcagctacatcctggacacccttgtctttgcctttgggaaataccagcacaagaacctgctcatcctctatgacgccattggcaccctggccgactctgttggccaccacctcaaccagccggaatacatccagaagctgatgcccccactgatccagaagtggaatgagctcaaggacgaagacaaggacctcttccccctgctggagtgtctgtcatcggtggccaccgccctgcagagtggcttcctgccttactgtgagcccgtctaccagtgctgtgtcaccctggtgcagaagcacactggctcaggccatgatgtacacccagcaccctgagcagtatgaggctcccgacaaggactttatgatagtagcactggatctgttcagcggcctggccgagggcttgggaggtcacgtggagcagctggtggcccgcagcaacatcatgacattgttgttccagtgcatgcaggactcgatgcctgaggtccggcagagttcttttgccttcttgggagacttcaccaaagcctgttcatcccatgtcaagccctgtatcgccgagttcatgcccattctgggcaccaacctgaacccagagttcatctccgtctgcaacaacgccacctgggccattggtgaaatttgcatgcagatgggggcagagatgcagccttatgtgcagatggtcctcaacaacctggtggaaatcattaaccgacccaacacacccaagacactgctggaaaacacaggtcgcctgacgagtccctctgccattccagccatcaccatcggccgcttgggctacgtgtgcccccaggaggtggcacccatgctgcagcagttcatccggccttggtgcacgtccctcaggaacatccaggacaacgaggagaaggactcagccttccgcggcatctgcatgatgatcggtgtcaacccggggggcgttgtgcaggactttattttattctgcgatgctgtagcctcctgggtgagcccgaaggatgaccttcgggacatgttttataagattctccacggcttcaaagaccaagttggggaagataactggcagcagttctctgagcaattcccgccgctgctcaaggagaggctggcggctttctatggggtctaggtgatcatggagactgccaggtttctgtctgcgtcgtcgtcggagggattactggggagtgcgctgcatccggaagtcgctgtgccctggttgaggggggttagggaggag

SEQ ID NO: 149912 - DNA, 411 bp, Homo sapiens; identical to SEQ ID NO: 144748

SEQ ID NO: 149913 - DNA, 1020 bp, Homo sapiens
gacttgcttccccgtctgactgtccttgacttctagaatggaagaagctgagctggtgaagggaagactccaggccatcacagataaaagaaaaatacaggaagaaatctcacagaagcgtctgaaaactaggggaagacaaacctaaagcaccagcctttgaagacaaaggcccttgagggagaaatggccttcctagatggaatccagccagcggaaaagaacaggaagagatgaagaagcaaaatcaacaagacccagcacccagatcccaggttcctagaacaaagtatccctcaggcttgagaaagagatcccaagatcttgaaaaagctgaactgcaaatctcaacgaaggaagaggccattttaaagaaactaaagtcaattgagcggacaacagaagacattataagatctgtgaaagtggaaagagaagaaagagcagaagagtcaattgaggacatctatgctaatatccctgaccttccaaagtcctacataccttctaggttaaggaaggagataaatgaagaaaaagaagatgatgaacaaaataggaaagctttatatgccatggaaattaaagttgaaaaagacttgaagactggagaaagtacagttctgtcttcaatacctctgccatcagattactttaatgttacaggaataaaagtttatgatgaggggcagaagtcagtgtatgcagtaagttctaatcacagtgcagcatacaatggcaccgatggcctggcaccagttgaagtagaggaacttctaagacaagccttagagagaaactctaaatccccaacagagtatcatgagcctgtatatgccaatcccttttacaggcctacgaccccacagagagaaacggtgacccctggaccaaactttcaagaaaggataacgattaaaactaatggactgggtattggtgtaaatgaatccatacacaatatgggcaatggtctttcagaggaaaggggaaacaacttcaatcacatcagtcccattc

SEQ ID NO: 149914 - DNA, 95 bp, Homo sapiens
  misc_feature (1)...(95): n = a,t,c or g
ggcacgaggacatttttgaggacctacttatctgaaattgccagacgacatcctgagttttatgccccggaactcctttgatttgctaaaaggtn

SEQ ID NO: 149915 - DNA, 338 bp, Homo sapiens
ggcacgagcctttctgcttgaggcctgaacatagatgggcaactggggcttgggcacacagaggatatcccatattataccccctgcagatccctctttggctgacccatccaacaggtggcctgtggctggcatgttacgattatgctcacagaacatggtcaagctctattatgtggatgcaactccattgtccagttagcaggtcctcatggacatctaagacgcgtgggtacctaaacgatcgaacttcgtagagagaacgctgtacatatcggtgctgcactgatgcctcacgtagctcttaccactagccgaagcatttttcagtgtcgtac

SEQ ID NO: 149916 - DNA, 472 bp, Homo sapiens; identical to SEQ ID NO: 144679

SEQ ID NO: 149917 - DNA, 15977 bp, Homo sapiens
gcacaatgaagtgggtaacctttatttcccttctttttctctttagctcggcttattccaggggtgtgtttcgtcgagatgcacgtaagaaatccatttttctattgttcaacttttattctattttcccactaaaataaagttttagtaaactctgcatctttaaagacttattttggcatttatttctaaaatggcatcgtattttgtatttgtgaagtcttacaaggttatcttattaataaaattcaaacatcctaggtaaaaaaaaaaaaaggtcagaattgtttagtgactgtaattttcttttgcgcactaaggaaagtgcaaagtaacttagagtgactgaaacttcacagaatagggttgaagattgaattcataactatcccaaagacctatccattgcactatgctttatttaaaaaccacaaaccctgtgctgttgatctcataaatagaacttgtatttatatttattttcattttagtctgtcttcttggttgctgttgatagacactaaaagagtattagatattatctaagtttgaatataaggctataaatatttaataatttttaaaatagtattcttggtaattgaattattcttctgtttaaaggcagaagaaataattgaacatcatcctgagtttttctgtaggaatcagagcccaatattttgaaacaaatgcataatctaagtcaaatggaaagaaatataaaaagtaacattattacttcttgttttcttcagtatttaacaatccttttttttcttcccttgcccagacaagagtgaggttgctcatcggtttaaagatttgggagaagaaaatttcaaagccttgtaagttaaaatattgatgaatcaaatttaatgtttctaatagtgttgtttattattctaaagtgcttatatttccttgtcatcagggttcagattctaaaacagtgctgcctcgtagagttttctgcgttgaggaagatattctgtatctgggctatccactaaggtcgtcactggtcacatggctattgagtacttcaaatatgaccagtgcaactgagaaacaaaaacttaaattgtatttaattgtagttaatttgaatgtatatagtcacatgtggctaatggctactgtattggacagtacagctctggaacttgcttggtggaaaggactttaatataggtttcctttggtggcttacccactaaatcttctttacatagcaagcattcctgtgcttagttgggaatatttaatttttttttttttttaagacagggtctcgctctgtcgcccaggctggagtgcagtggcgcaatctcggctcactgcaaactccgctcccgggttcacgccattctcctgcctcagcctcccgagtagctgggactacaggcgcccgccatcacgcccggctaatcttttgtatttttagtagagatggggtttcaccgtgtgccaggatggtctcaatctcctgacatcgtgatctgcccacctcggcctcccaaagtgctgggattacaggagtgagtcaccgcgcccggcctatttaaatgttttttaatctagtaaaaaatgagaaaattgtttttttaaaagtctacctaatcctacaggctaattaaagacgtgtgtggggatcaggtgcggtggttcacacctgtaatcccagcactttggaaggctgatgcaggaggattgcttgagcccaggagtacaagaccagcctgggcaagtctctttaaaaaaaacaaaacaaacaaacaaaaaaattaggcatggtggcacatgcctgtagtcctagctacttaggaggctgacgtaggaggatcgtttggacctgagaggtcaaggctacagtgagccatgattgtgccactgcactccagcctgggtgacagagtgagactctgtctcaaaaaagaaaaaggaaatctgtggggtttgttttagttttaagtaattctaaggactttaaaaatgcctagtcttgacaattagatctatttggcatacaatttgcttgcttaatctatgtgtgtgcatagatctactgacacacgcatacatataaacattagggaactaccattctctttgcgtaggaagccacatatgcctatctaggcctcagatcatacctgatatgaataggctttctggataatggtgaagaagatgtataaaagatagaacctatacccatacatgatttgttctctagcgtagcaacctgttacatattaaagttttattatactacatttttctacatcctttgtttcagggtgttgattgcctttgctcagtatcttcagcagtgtccatttgaagatcatgtaaaaattagtgaatgaagtaactgaatttgcaaaaacatgtgttgctgatgagtcagctgaaaattgtgacaaatcacttgtaagtacattctaattgtggagattctttcttctgtttgaagtaatcccaagcatttcaaaggaattttttttaagttttctcaattattattaagtgtcctgatttgtaagaaacactaaaaagttgctcatagactgataagccattgtttcttttgtgatagagatgctttagctatgtccacagttttaaaatcatttctttattgagaccaaacacaacagtcatggtgtatttaaatggcaatttgtcatttataaacacctctttttaaaatttgaggtttggtttctttttgtagaggctaatagggatatgatagcatgtatttatttatttatttatcttattttattatagtaagaacccttaacatgagatctaccctgttatatttttaagtgtacaatccattattgttaactacgggtacactgttgtatagcttactcatcttgctgtattaaaactttgtgcccattgattagtaacccctcgtttcgtcctcccccagccactggcaaccagcattatactctttgattctatgagtttgactactttagctaccttatataagtggtattatgtactgtttatctttttatgactgacttatttcccttagcatagtgcattcaaagtccaaccatgttgttgcctattgcagaatttccttcttttcaaggctgaataatattccagtgcatgtgtgtaccacattttctttatccattaatttgttgattgatagacatttaggttggttttctacatcttgactatcatgaatagtgttgcaatgaacacaggagagctactatctcttagagatgatatcatggtttttatcatcagaaaacacccactgatttctatgctaattttgttacctgggtggaataatagtacagctatatattcctcattttagatatctttgtatttctacatacaataaaaaagcagagtacttagtcatgttgaagaactttaaacttttagtatttccagatcaatcttcaaaacaaggacaggtttatctttctctcaccactcaatctatatatacctcttgtgggcaaggccagtttttatcactggagcctttcccctttttattatgtacctctccctcacagcagagtcaggactttaactttacacaatactatggctctacatatgaaatcttaaaaatacataaaaattaataaattcbgtctagagtagtatattttccctggggttacgattactttcataataaaaattagagataaggaaaggactcatttattggaaagtgattttaggtaacatttctggaagaaaaatctctatatcttaatagtcacttaatctatgatggattgtgttactcctcagttttcaatggcatatattaaaacatggccctctaaaaagggggcaaatgaaatgagaaactctctgaatgtttttctcccctaggtgaattcacctgctgcttagaagcttattttctcttgatttctgttataatgattgctcttaccctttagttttaagtttcaaaataggagtcatataactttccttaaagctattgactgtctttttgtcctgttttattcaccatgagttatagtgtgacagttaattcttatgaaaattatatagagatggttaaatcatcagaaactgtaaaccaacgattgggaggggaagcggatttttaaatgatttcctgaccaagcttaaccagtatattaaatcctttgtactgttctttggctataaagaaaaaaggtactgtccagcaactgaaacctagctttcttccatttagcataccctttttggagacaaattatgcacagttgcaactcttcgtgaaacctatggtgaaatggctgactgctgtgcaaaacaagaacctgagagaaatgaatgcttcttgcaacacaaagatgacaacccaaacctcccccgattggtgagaccagaggttgatgtgatgtgcactgcttttcatgacaatggagagacatttttgaaaaagtaagtaatcagatgtttatagttcaaaattaaaaagcatggagtaactccataggccaacactctataaaaattaccataacaaaaatattttcaacattaagacttggaagttttgttatgatgattttttaaagaagtagtatttgataccacaaaattctacacagcaaaaaatatgatcaaagatattttgaagtttattgaaacaggatacaatctttctcaaaaatttaagatagacaaattctttaatgtattccgcagatatgtatatatggttgttataattgatttcgttttagtcagcaacattatattgccaaaatttaaccatttatgcacacacacacacacacacacacacttaacccttttttccacatacttaaagaatgacagagacaagaccatcatgtgcaaattgagcttaattggttaattagatatctttggaatttggaggttctggggagaatgtcgattacaattatttctgtaatattgtctgctatagaaaagtgactgtttttcttttttaaaatttagatacttatatgaaattgccagaagacatccttactttttatgccccgggaactccttttctttgctaaaaggtataaaagctgcttttacagaaatgttgccaagctgctgataaagctgcctgcctgttgccaaaggtattatgcacacgaatagaaaaaaagagtttattatccaacctgattttgtccattttgtggctagatttagggaccctgagtgtctgatacaaactttcccacatggtcaaaaaagccttccttttatctgtcttgaaaatctttcatctttgaaggcctacactctcgtttcttcttttaagatttgccaatgctgatctgtcagaggtaatcactgtgcatgtgtttaaagatttcaccactttttctgctggtgatcactatagtgaaatactgaaacttgtttgtcaaattgcacagcaaggggacacagttcttgtttatcttttcatgataatttttagtagggagggaattcaaagtagagaattttactgcatctagatgcctgagttcatgcattcattccataaatatatattatggaatgctttattttcttttctgaggagtttactgatgttggtggaggagagactgaaatgaattatacacaaaatttaaaaattagcaaaattgcagcccctgggatattagcgtactctttctctgacttttctcccacttttaaggctctttttcctggcaatgtttccagttggtttctaactacatagggaattccgctgtgaccagaatgatcgaatgatctttccttttcttagagagcaaaatcattattcgctaaagggagtacttgggaatttaggcataaattatgccttcaaaatttaatttggcacagtctcatctgagcttatggaggggtgtttcatgtagaatttttcttctaattttcatcaaattattcctttttgtagctcgatgaacttcgggatgaagggaaggcttcgtctgccaaacagagactcaagtgtgccagtctccaaaaatttggagaaagagctttcaaagcatggtaaatacttttaaacatagttggcatctttataacgatgtaaatgataatgcttcagtgacaaattgtacatttttctgtattttgcaaagtgctgtcaaatacatttctttggttgtctaacaggtagcactctaatagaggtcaaaatcagaatatcaatgacaatttgacattatttttaatcttttcttttctaaatagttgaataatttagaggacgctgtcctttttgtcctaaaaaaagggacacatatttaagttctatttatttataaaatcttggactcttattctaatggttcattatttttatagagctgtaggcatggttctttatttaattttttaaagttatttttaatttttgtggatatagagtaggtatacatatttacggggtatatgagatattttgatctaagtatacaacatatataatccctttatttaattttatcttccccccaatgatctaaaactatttgcttgtccttttctgtcttatagttaaattcagtcaccaactaagttgaagttacttcttatttttgcatagctccagctctgatcttcatctcatgtttttgcctgagcctctgttttcatattacttagttggttctgggagcatactttaatagccgagtcaagaaaaatactagctgccccgtcacccacactcctcacctgctagtcaacagcaaatcaacacaacaggaaataaaatgaaaataatagacattatgtatgctctctagaaactgtcaattgaactgtatttgctcatcattcctaccatctacaccaccaaaatcaacccaatttatgaaaaaaaaaccgccccaccatacaattctacacagataaacaggctatgattggttttgggaaagcagtcacctttacctgatttaggcaactgtgaaatgactagagaatgccgaaaattagacgtttacatcttgtcatagactttgcagatagtgctggatctttctttttataagtaagatcaataaaaactccctcattctgtagaagttatgatttcttttctaagagacctttagaagtcagaaaaaatgtgtttcccttgcgaaaaaagataactggagtttgtgtagtacttcccagattataaaatgcttttgtatgtattatctaatttaatcctcaaaacttcttcaatttagcatgttgtcatgacactgcagaggctgaagctcagagacgctgagccctctgctaacaagtcctactgctaacaagtgataaagcccgagctggaagtcacatctggactccaaacctgatgcttctcagcctgttgccccttttagagttcctttttaatttctgcttttatgacttgctagatttctacctaccacacacactcttaaatggataattctgccctcaggataagtgattaccatttggttcacaactcgaactaatgaattttaaaaattatttctgtatgtccattttgaattttcttatgagaaatagtatttgcctagtgttttcatataaaatctcgcatgataataccattttgattggcgattttctttttagggcagtagctcgcctgagccagagatttcccaaagctgagtttgcagaagtttccaagttagtgacagatcttaccaaagtccacacggaatgctgccatggagatctgcttgaatgtgctgatgacagggtaaagagtcgtcgatatgctttttggtagcttgcatgctcaagttggtagaatggatgcgtttggtatcattggtgatagctgacagtgggttggattgtcttctgtgctttcgtctgtcctatcttcaatctttccctgcctatggtggtggtacctttctgtttttaacctgctataaattaccagataaacccattcactgatttgtaactcctttcagtcatgctctaactgtaaatgaaggcttaaactgaagtagaacagttacaaggttttacttggcagaacatcttgcaaggtagatgtctaagaagatttttttttctttttttaagacagagtttcgctcttgtttcccaggctggggtgcaatggtgtgatcttggctcagcgcaacctctgcctcctgggttcaagtgattttcatgcctcagcctcccaagtagctgggattacaggcatgcgccaccacacctggctaattttgtatttttagtagaggcggggtttcaccatattgtccagactggtctcgaactcctgacctcaggtgatccacccgccttggcctcccaaagtgctgggattacaggcatgagccaccttgcccagcctaagaagattttttgagggaggtaggtggacttggagaaggtcactacttgaagagatttttggaaatgatgtatttttcttctctatattccttccctaaattcactctgtttgttagatgtgcaaatatttggaatgatatctcttttctcaaaacttataatattttctttctccctttcttcaagattaaacttatgggcaaatactagaatcctaatctctcatggcactttctggaaaatttaaggcggttattttatatatgtaagcagggcctatgactatgatcttgattcatttttcaaaaatcttctatattttatttagttatttggtttcaaaaggcctgcacttaattttgggggattatttggaaaaccagcattgagttttaatgaaaaaaacttaaatgccctaacagtagaaatataaaattaataaataactgagctgagcacctgctactgattagtctattttacttccgtgggaatgtttttgtagtcctatctccatctccaggtttaggagcaaacagagtatgttcatagaaggaatatgtgtatggtcttagaatacaatgaacatgttctgccaacttaataaaggtctgaggagaaagtgtagcaatgtcccttcgtgttgaacaatttccaccaacttacttataggcgccccttgccccgtatatctgtgaaaatcaagattcgctctccagtaaactgaaggaatgctgtgaaaaacctctgttggaaaaatcccactgcattgccgaagtggaaaatgatgagatgcctgctgacttgccttcattagctgctgattttgttgaaagtaaggatgtttgcaaaaactatgctcaggcaaacgatgtcttcctgggcatgtacgtagataagaaattattcttttatagctttggcatgacctcacaacttaggaggatagcctaggcttttctgtggagttcctacaatttccctgctgcccacaatgtttcttcctccttccctttcccacgctttcccaatttttgacatcgttaattcgttgaatacattgtcataacataatacatgttcacggcaaagctcaacattccttactccttaggggtatttctgaaaatacgtctagaaacattttgtgtatatataaattatgtatacttcagtcattcattccaagtgtatttcttgaacatctataatatatgtgtgtgactatgtattgcctgtctatctaactaatctaatctaatctagtctatctatctactctatgcaatgatagcaaagaagtataaaaagaaatatagagtctgacacaggtgctttatatttggtgaaaagaccagaagttcagtatcctggcaatatggtaggcaactcaattacaaaataaatgtttacgtattgtcagaagttgtggtgataaactgcatttttgttgttggattatgataatgcactaaataatatttcctaaaattatgtaccctacaagatttcactcatacagagaagaaagagaatattttaagaacatatctctgcccatctatttatcagaatccttttgagatgtagtttaaatcaaacaacctgttaataaaaataacaagtatcattcatcaaagacttcatatgtgccaagcagtgtgtgttttgtgtagattatgtcatatagttctcataatccaccttccgagacagatactatttattttttgagacagagttttactcttgttgcccaggctggagtgcaatggtgccatctcggctcactataaccttcgcctcccaggttcaagcgattctcctgcctcagcctcctgggattacaggcatgcaccaccatgcctggctaattttgtatttttactagagatggggtttcaccatgttggtcagactggtctcaaactcctgacctctggtgatatgcctgcctcagcctcctaaagtgctgggattacaggcatgagccactgtgcccagccgacagatactattattatttccattctaccgagaaggagactaaggctctgatcatttaaataagttgcctaaggtgatgcagtgatataagtagcagagctaggaattgagccttggtaactttaactctggaccccaagtccttagctactaagctttactgcatggggtttagtcaaattaagacttttggaatatgcgttacttttgagattagctttgtgatattttttgtgctcatttgtccaacaaagtctattttattttcatcttaattcgctttttgtatgaatatccaagaaggcatcctgattactctgtcgtgctgctgctgagacttgccaagacatatgaaaccactctagagaagtgctgtgccggtgcagatcctcatgaatgctatgccaaagtggtaggtttattgttcgcaaaaaatgtagttctttgactgatgattccaataatgagaaagaaaaataatgcaagaatgtaaaatgatatacagtgcaatttagatcttttcttgagatcgtttcaattctggaatcttaaacatgaaagaaaaagtagccttagaatgattaacaaaatttagactagttagaatagaaagatctgaatagagcaatctctacacacttttgatctttttttctctttttcacaatcctgagaacaaaaaaaaattaaatttaaatgttaattagaagatatttaacttagatgtaaagtgagttaacctgattccaggattcatcacgtactagaattagtatcttatggtaaattatagaacctatccctttagaatattttcaaatctttttgaggatgtttaggaatagttttacaagaaattaagttaggagaggaaatctgttctggaggatttttagggttcccactagcatatgtaatggtttctgaactattcagaatcagagaaaactcatttttcctgctttcaagaagctactgtatgccaggcaccatgcacaaacaatgaccaacgtaaaatctctcattttggagagcctggaatctaactggaaaggtgaactaataataatactatgtacaatcatagccatcatttattaaacttttcttctatgcaaggcactgtttaatttccttagcttacctggtttacagagcagctctatgagatgagtgccatctttgcccctattttagggataaggattccgaaatgtggagatggtaagtcaaattgcacaactgaagcatgacttacatgacttggctcaaatactggtcattgaactccagagcctgaatattcttaaccacttacatgatgcaagctgaccaaataaatagttcgaatgtattgtgacagagcggcattgatattcatctattcatgtggctttgagtaggaagaagaaaggatatcattctgaccagagcggtgaaaaacaacctgcatctgatcctgaggcataatactattaacacaattcttttatgtttcagttcgatgaatttaaacctcttgtggaagagcctcagaaatttaatcaaacaaaattgtgagctttttgagcagcttggagagtacaaattccagaatgcgtaagtaatttttattgactgattttttttatcaatttgtaattatttaagacttaatatagagccacctagcatagaacttttcagaatgaaaatacattgcatatttctaatcactctttgtcaagaaagataggagaggagagataaaatagttgatggggtggagaggtctatatttgwatgtagtctaaaaattgttctcttaagattggaagtatgtaggctgggagggtaaataccaaatcttggtatatcagaactgagcatgtcccttgacggttaagaaatagttaatgggcaaatagagcatggcaatattttgtagagcagcaagtagtaggccttgaatagatgtcgctcaaaaagtaatatgtaagctgaacacaaaaatgtaacaaatgaatttagatacatatttgaatattaaattcaggttgtttgggagatgcacctagtctttgatggttaaacctttccctccatagaagagacagagacagaatggcttgctggactaatgtcccaattcaatagagtcttatctacgaaggttaaaaacaagaagagacatattatacagtagatatttcttgtgtggctcatacacatggtgctcttctgattatggattttagagataataacagtgaacaagacatagtttctttcctcgagtagattaaagtcctacattgacttttaatggtgactggcattcttaatacatgattattatatattaggtactatgtcacattaattataatactttactatttttaatttaacccttgaactatccctattgagtcagatatatttccttccattttctacttgtatctttcaagtttagcatatgctgatacatatgaagctctctccaggttttattgaaagaagaaattaatcaatttattactgtccctgaattaggcaactcactttcccaagattatgcccgtggtacaggtggaactcaaagccaagtttaactagttgttcaggagaatgttttctaccctccactaacccactactctgcagatggagataatatgatgaatggaacatagcaacatcttagttgattccggccaagtgttctctgttttatctactatgttagacagtttcttgccttgctgaaaacacatgacttctttttttcaggctattagttcgttacaccaagaaagtaccccaagtgtcaactccaactcttgtagaggtctcaagaaacctaggaaaagtcagcagcaaatgttgtaaacatcctgaagcaaaaagaatgccctgtgcagaagactatgtgagtctttaaaaacatataataaattaataatgaaaaaattttccctttagatattgctaatgctacctttcataagcagaaggaagtaatgtgtgtgtgtgcatgttttgtgcatgtgtgtgtgcatgcacgtgtgtgtatgtgtgatattggcagtcaaggccccgaggatgataattttttttttttttttgagacggagtctcgctttgttgtccaggctggagtgcagtggtgccatctcggctcactgcaacctccgcctcccaagttcaagccattctcctgcctcagcctcccaagtagctgggactacaggtgcatgccaccatgcctggctaattttttgtatttttagtagaaaattttcagcttcacctcttttgaatttctgctctcctgcctgttctttagctatccgtggtcctgaaccagttatgtgtgttgcatgagaaaacgccagtaagtgacagagtcaccaaatgctgcacagaatccttggtgaacaggcgaccatgcttttcagctctggaagtcgatgaaacatacgttcccaaagagtttaatgctgaaacattcaccttccatgcagatatatgcacactttctgagaaggagagacaaatcaagaaacaaacgtgaggagtatttcattactgcatgtgtttgtagtcttgatagcaagaactgtcaattcaagctagcaactttttcctgaagtagtgattatatttcttagaggaaagtattggagtgttgcccttattatgctgataagagtacccagaataaaatgaataactttttaaagataaaatcctctgttataatattgctaaaattattcagagtaatattgtggattaaagccacaatagaataacatgttagaccatattcagtagaaaaagatgaccaattaactgataaatttgtgcacatggcaaattagttaatgggaaccataggagaatttatttctagatgtaaataattattttaagtttgccctatggtggccccacacatgagacaaacccccaagatgtgacttttgagaatgagacttggataaaaaacatgtagaaatgcaagccctgaagctcaactccctattgctatcacaggggttataattgcataaaatttagctatagaaagttgctgtcatctcttgtgggctgtactcctcgtctaggcttaagagtaatattgcaaaacctgtcatgcccacaccaatctctccctggcattgttgtctttgcagatgtcagtgaacgcgacccagcagctcccatgagtttgcatagccttattttctatagcctccccactattagctttgaagggagcaaagtttaagaaccaaatataaagtttctcatctttatagatgagacccattttaaataaagtccaagataattaaatttttaaggatcatttttagctctttaatagcaataaaactcaatatgacataatatggcacttccaaaatctgaataatatataattgcaatgacatacttcttttcagagatttactgaaaagaaatttgttgacactacataacgtgatgagtggtttatactgattgtttcagttggtcttcccaccaactccatgaaagtggattttattatcctcatcatgcagatgagaatattgagacttatagcggtatgcctggcccaagtactcagagttgcctggctccaagatttataatcttaaatgatgggactaccatccttactctctccatttttctatacgtgagtaatgttttttctgttttttttttttctttttccattcaaactcagtgcacttgttgagctcgtgaaacacaagcccaaggcaacaaaagagcaactgaaagttgttatggatgatttcgcagcttttgtagagaagtgctgcaaggctgacgataaggagacctgctttgccgaggaggtactacagttctcttcattttaatatgtccagtattcatttttgcatgtttggttaggctagggcttacggatttatatatcaaaggaggctttgtacatgtgggcccgggatcttattttacacacaattgtcttacaaaatgactaaaacagcactttgtttttatctcctgctctattgtgccatactgttgaatgtttataatgcatgttctgtttccaaatttgtgatgcttatgaatattaataggaatatttgtaaggcctgaaatattttgatcatgaaatcaaaatattaatttatttaaacatttacttgaaatgtggtggtttgtgatttagttgattttataggctagtgggagaatttacattcaaatgtctaaatcacttaaaatttccctttatggcctgacagtaacttttttttattcatttggggacaactatgtccgtgagcttccatccagagattatagtagtaaattgtaattaaaggctatgatgcacgtgaaatcactttgcaatcatcaatagcttcataaatgttaattttgtatcctaatagtaatgctaatattttcctaacatctgtcatgtctttgtgttcagggtcaaaaacttgttgctgcaagtcaagctgccttaggcttataac

SEQ ID NO: 149918 - DNA, 349 bp, Homo sapiens
ggcacgagcaagaagttggccaacaaggtcgtgtacaacgtgggactctgcatttgtctgtttgatatcaccaaactggaggatgcctatgtattccctggggatggcgcatcacacaccaaagtccattttcgctgcgtggagtgtcatccattcctacatgagattctaactgggaagataaaaggctgcagtccagaaggagcgcaccaccctctacgctaacaccctgactttccactcttctcaagaccccctgcattcctcagcccaagccagtacatcttgtctccccgagagatcctcgtccacccctccatactaaaatttcgaactcggcggccgtacc

SEQ ID NO: 149919 - DNA, 410 bp, Homo sapiens
attgagcatggcatcgtcaccaactgggacgacatggagaagatctggcaccacaccttctacaacgagctgcgcgtggccccggaggagcacccagtgctgctgaccgaggcccccctgaaccccaaggccaacagagagaagatgactcaggctctgttcctctcccggcatttcctccctgaagcctccagattatgtttgagaccttcaacaccccggccatgtacgtggccatccaggccgtgctgtccctctacgcctctgggcgcaccactggcattgtcatggactctggagacggggtcacccacacggtgcccatctacgagggctacgccctcccccacgccattctgcgtatggacctggctggccgggacctgaccgactaccttatgaagatcctt

SEQ ID NO: 149920 - DNA, 512 bp, Homo sapiens
gactcctacgtgggctttaggcccagttttgcgtggcatcctgaccctgaagtaccccattgagcatggcatcgtcaccaactgggacgacatggagaagatctggcaccacaccttctacaacgagctgcgcgtggccccggaggagcacccagtgctgctgaccgaggcccccctgaaccccaaggccaacagagagaagatgactcaggtgaggctcggcagacgcccgtgctcctcccgtcctttccccagtcattttctgcccatcttgatttctgacgggtcgtcccctgcagggcgtcatggtgggcatgggccagaaggactcctacgtgggcgacgaggcccagagcaagcgtggcatcctgaccctgaagtaccccattgagcatggcatcgtcaccaactgggacgacatggagaagatctggcaccacaccttctacaacgagctgcgcgtggccccggaggagcacccagtgctgctgaccgaggcccccctgaacccc

SEQ ID NO: 149921 - DNA, 1974 bp, Homo sapiens
tgacatgctcacgccaagcttggcacgagggctgccagctctcgcactctgttcttccgccagctccgccgtcgcgtttctctgccggtcgcaatggaagaagagatcgccgcgctggtcattgacaatggctccggcatgtgcaaagctggttttgctgggggcgacgcgtccccgagccagtgtttccttccatcgtcgggcgccccagacaccagggcgtcatggtggggcatgggccaaaaaggactcctacgtgggcgacgaggcccagagcaagcgtggcatcctgaccctgaagtaccccattgagcatggcatcgtcaccaacttgggacgacatggagaagatctggcaccacaccttctacaaccgagctgcgcgttggccccggaggaagcacccagtgcttgctgaccgaggccccccttgaaccccaaggccaaacaagagagaagatgactcagaattatgtttgagaccttcaacacccccggccatgtaccgtggcccatccagggccgtgctgtccctctaaagcctctgggcgccaccactgggcattgtcatgggactctgggagacggggtcacccacacggtgcctatctacggagggctaccacactgctccacgccatttctgcgtctgggacctggcttggcccgggacctgaccgactacctcatgaagatcctcacttgaagcgaaggctacagcttcaccacccacgggccgagcgggaaattcgtgcgcgacattcaaggagaagctgtgctacgtcgccctggactttcgagcaggagatggccaccgccgcatcctcctcttctctggagaagagctacgagctgcccgatggccaggtcatcaccattggcaatgagcggttccggtgtccggaggcgctgttccagccttccttcctgggtatggaatcttgcggcatccacgagaccaccttcaactccatcatgaagtgtgacgtggacatccgcaaagacctgtacgccaacacggtgctgtcgggcggcaccaccatgtacccgggcattgccgacaggatgcagaaggagatcaccgccctggcgcccagcaccatgaagatcaagatcatcgcacccccagagcgcaagtactcggtgtggatcggtggctccatcctggcctcactgtccaccttccagcagatgtggattagcaagcaggagtacgacgagtcgggcccctccatcgtccaccgcaaatgcttctaaacggactcagcagatgcgtagcatttgctgcatgggttaattgagaatagaaatttgcccctggcaaatgcacacacctcatgctagcctcacgaaactggaataagccttcgaaaagaaattgtccttgaagcttgtatctgatatcagcactggattgtagaacttgttgctgattttgaccttgtattgaagttaactgttccccttggtatttgtttaataccctgtacatatctttgagttcaacctttagtacgtgtggcttggtcacttcgtggctaaggtaagaacgtgcttgtggaagacaagtctgtggcttggtgagtctgtgtggccagcagcctctgatctgtgcagggtattaacgtgtcagggctgagtgttctgggatttctctagaggctggcaagaaccagttgttttgtcttgcgggtctgtcagggttggaaagtccaagccgtaggacccagtttcctttcttagctgatgtctttggccagaacaccgtgggctgttacttgctttgagttggaagcggtttgcatttacgcctgtaaatgtattcattcttaatttatgtaaggttttttttgtacgcaattctcgattctttgaagagatgacaacaaattttggttttctactgttatgtgagaacattaggccccagcaacacgtcattgtgtaaggaaaaataaaagtgctgccgtaacc

SEQ ID NO: 149922 - DNA, 418 bp, Homo sapiens
agggataagttggttctttgggtttttcaagatttggcctgtttcaaagataaattcacattttacagaggtttgcccatggttatacacaaatggagtacactgatgttctcagaggtgatggaaaacttggtatagctaaattccctgatggaaaatttcccagatccacagggaaaggtgagatatttagataccagttacccagaggaagactatttataagctctgtttatgaagttccaaaggattaaactttttttttcttagaagtatgagtagagcattcaattagcaataaagaaaatttcttaggccagggcaccggttgtcacgcctgtaatctcaacactttgggaggccgaggtgggcggatcacctggaggtcaggagtttgagaccagcttgaccaacatgg

SEQ ID NO: 149923 - DNA, 530 bp, Homo sapiens
  misc_feature (1)...(530): n = a,t,c or g
gccaaacagagactcaagtgtgccagtctccaaaaatttggagaaagagctttagtgttcgatgaatttaaacctcttgtggaagagcctcagaatttaatcaaacaaaattgtgagctttttgagcagcttggagagtacaaattccagaatgcgctattagttcgttacaccaagaaagtaccccaagtgtcaactccaactcttgtagaggtctcaagaaacctaggaaaagtgggcagcaaatgttgtaaacatcctgaagcaaaaagaatgccctgtgcagaagactatctatccgtggtcctgaaccagttatgtgtgttgcatgagaaaacgccagtaagtgacagagtcaccaaatgctgcacagaatccttggtgaacaggcgaccatgcttttcagctctggaagtcgatgaaacatacgttcccaaagagtttaatgctgaaacattcaccttccatgcagatatatgcacactttctgagaaggaganacaaatcnagaaacaaactgcacttgttga

SEQ ID NO: 149924 - DNA, 736 bp, Homo sapiens
  misc_feature (1)...(736): n = a,t,c or g
gagacttgccaagacatatgaaaccactctagagaagtgctgtgccgctgcagatcctcatgaatgctatgccaaagtgttcgatgaatttaaacctcttgtggaagagcctcagaatttaatcaaacaaaattgtgagctttttgagcagcttggagagtacaaattccagaatgcgctattagttcgttacaccaagaaagtacccctgtcgtgctgctgctgagacttgccaagacatatgaaaccactctagagaagtgctgtgccgctgcanatcctcatgaatgctatgccaaagtgttcgatgaatttaaacctcttgtggaagagcctcagaatttaatcaaacaaaattgtgagctttttgagcagcttggagagtacaaattccagaatgcgctattagttcgttacaccaagaaagtaccccaagtgtcaactccaactcttgtagaggtctcaagaaacctaggaaaagtgggcagcaaatgttgtaaacatcctgaagcaaaaagaatgccctgtgcagaagactatctatccgtggtcctgaaccagttatgtgtgttgcatgagaaaacgccagtaagtgacagagtcaccaaatgctgcacagaatccttggtgaacaggcgaccatgcttttcagctctggaagtcgatgaaacatacgttcccaaagagtttaatgctgaaacattcaccttccatgcagatatatgcacactttctg

SEQ ID NO: 149925 - DNA, 1166 bp, Homo sapiens
  misc_feature (1)...(1166): n = a,t,c or g
cggacctngccaagtatatctgtgaaaatcaagattcgatctccagtaaactgaaggaatgctgtgaaaaacctctgttggaaaaatcccactgcattgccgaagtggaaaatgatgagatgcctgctgacttgccttcattagctgctgattttgttgaaagtaaggatgtttgcaaaaactatgctgaggcaaaggatgtcttcctgggcatgtttttgtatgaatatgcaagaaggcatcctgattactctgtcgtgctgctgctgagacttgccaagacatatgaaaccactctagagaagtgctgtgccgctgcagatcctcatgaatgctatgccaaagtgttcgatgaatttaaacctcttgtggaagagcctcagaatttaatcaaacaaaattgtnagctttttgagcagcttggagagtacaaattccaggnagtttccaagttagtgacagatcttaccaaagtccacacggaatgctgccatggagatctgcttgaatgtgctgatgacagggcggaccttgccaagtatatctgtgaaaatcaagattcgatctccagtaaactgaaggaatgctgtgaaaaacctctgttggaaaaatcccactgcattgccgaagtggaaaatgatgagatgcctgctgacttgccttcattagctgctgattttgttgaaagtaaggatgtttgcaaaaactatgctgaggcaaaggatgtcttcctgggcatgtttttgtatgaatatgcaagaaggcatcctgattactctgtcgtgctgctgctgagacttgccaagacatatgaaaccactctagagaagtgctgtgccgctgcagatcctcatgaatgctatgccaaagtgttcgatgaatttaaacctcttgtggaagagcctcagaatttaatcaaacaaaattgtgagctttttgagcagcttggagagtacaaattccagaatgcgctattagttcgttacaccaagaaagtaccccaagtgtcaactccaactcttgtagaggtctcaagaaaacctaggaaaagtgggcagcaaatgttgtaaacatcctgaaagcaaaaagaaatgccctgttgcagaaaaactatctatccgtggtcctgaaccagttatgtngtgtttgcatgaaaaaaacnccgt

SEQ ID NO: 149926 - DNA, 772 bp, Homo sapiens
  misc_feature (1)...(772): n = a,t,c or g
cgtgctgctgctgagacttgccaagacatatgaaaccactctagagaagtgctgtgccgctgcagatcctcatgaatgctatgccaaagtgttcgatgaatttaaacctcttgtggaagagcctcagaatttaatcaaacaaaattgtgagctttttgagcagcttggagagtacaaattccagaatgcgctattagttcgttacaccaagaaagtaccccaagtgtcaactccaactcttgtagaggtctcaagaaacctaggaaaagtgggcagcaaatgttgtaaacatcctgaagcaaaaagaatgccctgtgcagaagactatctatccgtggtcctgaaccagttatgtgtgttgcatgagaaaacgccagtaagtgacagagtcaccaaatgctgcacagaatccttggtgaacaggcgaccatgcttttcagctctggaagtcgatgaaacatacgttcccaaagagtttaatgctgaaacattcaccttccatgcagatatatgcacactttctgagaaggagagacaaatcaagaaacaaactgcacttgttgagcttgtgaaacacaagcccaaggcaaaatgcgctattagttcgttacaccaagaaagtaccccaagtgtcaactccaactcttgtagaggtctcaagaaacctangaaaagtgggcagcaaatgttgtaaacatcctgaagcaaaaagaatgccctgtgcngaanactatctatccgtggtcctgaaccanttatgtgtgttgcatga

SEQ ID NO: 149927 - DNA, 398 bp, Homo sapiens
  misc_feature (1)...(398): n = a,t,c or g
ggcatcctgattactctgtcgtgctgctgctgagacttgccaagacatatgaaaccactctagagaagtgctgtgccgctgcagatcctcatgaatgctatgccaaagtgttcgatgaatttaaacctcttgtggaagagcctcagaatttaatcaaacaaaattgtgagctttttgagcagcttggagagtacaaattccagaatgcgctattagttcgttcaaaagancaactgaaagctgttatggatgatttcgcagcttttgtnnaaaantgctgcnaggntgacnataaaggagacctgctttgncgaaggaaggtaaaaaacttgttgctgcaagtccaactgcccttaggcttttaacatcncntttnaaagcctctccgcctaccctga

SEQ ID NO: 149928 - DNA, 656 bp, Homo sapiens
  misc_feature (1)...(656): n = a,t,c or g
ggcatcctgattactctgtcgtgctgctgctgagacttgccaagacatatgaaaccactctagagaagtgctgtgccgctgcagatcctcatgaatgctatgccaaagtgttcgatgaatttaaacctcttgtggaagagcctcagaatttaatcaaacaaaattgtgagctttttgagcagcttggagagtacaaattccagaatgcgctattagttcgtttgggcagcaaatgttgtaaacatcctgaagcaaaaagaatgccctgtgcagaagactatctatccgtggtcctgaaccagttatgtgtgttgcatgagaaaacgccagtaagtgacagagtcaccaaatgctgcacagaatccttggtgaacaggcgaccatgcttttcagctctggaagtcgatgaaacatacgttcccaaagagtttaatgctgaaacattcaccttccatgcagatatatgcacactttctgagaaggagagacaaatcaagaaacaaactgcacttgttgagctcgtgaaacacaagcccaaggcaacaaaagagcaactgaaagctgttntggatgatttcgcngcttttgtagagaagtgctgcaagggtgacganaagggagaactgctttgncgaagganggtanaaaacttgttg

SEQ ID NO: 149929 - DNA, 607 bp, Homo sapiens
  misc_feature (1)...(607): n = a,t,c or g
gcaaaaactatgctgaggcaaaggatgtcttcctgggcatgtttttgtatgaatatgcaagaaggcatcctgattactctgtcgtgctgctgctgagacttgccaagacatatgaaaccactctagagaagtgctgtgccgctgcagatcctcatgaatgctatgccaaagtgtgggcagcaaatgttgtaaacatcctgaagcaaaaagaatgccctgtgcagaagactatctatccgtggtcctgaaccagttatgtgtgttgcatgagaaaacgccagtaagtgacagagtcaccaaatgctgcacagaatccttggtgaacaggcgaccatgcttttcagctctggaagtcgatgaaacatacgttcccaaagagtttaatgctgaaacattcaccttccatgcagatatatgcacactttctgagaaggagagacaaatcaagaaacaaactgcacttgttgagctcgtgaaacacaagcccaaggcaacaaaagagcaactgaaagctgttntggatgatttcgcngcttttgtagagaagtgctgcaagggtgacganaagggagaactgctttgncgaagganggtanaaaacttgttg

SEQ ID NO: 149930 - DNA, 532 bp, Homo sapiens
  misc_feature (1)...(532): n = a,t,c or g
gcaaaaactatgctgaggcaaaggatgtcttcctgggcatgtttttgtatgaatatgcaagaaggcatcctgattactctgtcgtgctgctgctgagacttgccaagacatatgaaaccactctagagaagtgctgtgccgctgcagatcctcatgaatgctatgccaaagtgtgccctgtgcagaagactatctatccgtggtcctgaaccagttatgtgtgttgcatgagaaaacgccagtaagtgacagagtcaccaaatgctgcacagaatccttggtgaacaggcgaccatgcttttcagctctggaagtcgatgaaacatacgttcccaaagagtttaatgctgaaacattcaccttccatgcagatatatgcacactttctgagaaggagagacaaatcaagaaacaaactgcacttgttgagctcgtgaaacacaagcccaaggcaacaaaagagcaactgaaagctgttatggatgatttcgcagcttttgtagagaagtgctgcaaggctgacganaaagga

SEQ ID NO: 149931 - DNA, 740 bp, Homo sapiens
gcctgctgacttgccttcattagctgctgattttgttgaaagtaaggatgtttgcaaaaactatgctgaggcaaaggatgtcttcctgggcatgtttttgtatgaatatgcaagaaggcatcctgattactctgtcgtgctgctgctgagacttgccaagacatatgaaaccactctagagaagtgctgtgccgctgcagatcctcatgaatgctatgccaaagtgttcgatgaatttaaacctcttgtggaagagcctcagaatttaatcaaacaaaattgtgagctttttgagcagcttggagagtacaaattccagaatgcgctattagttcgttacaccaagaaagtaccccaagtgtcaactccaactcttgtagaggtctcaagaaacctaggaaaagatgctgcacagaatccttggtgaacaggcgaccatgcttttcagctctggaagtcgatgaaacatacgttcccaaagagtttaatgctgaaacattcaccttccatgcagatatatgcacactttctgagaaggagagacaaatcaagaaacaaactgcacttgttgagcttgtgaaacacaagcccaaggcaacaaaagagcaactgaaagctgttatggatgatttcgcagcttttgtagagaagtgctgcaaggctgacgataaggagacctgctttgccgaggagggttaaaaacttggtgctgcaagtcaagctgccttaggcttatacat

SEQ ID NO: 149932 - DNA, 588 bp, Homo sapiens
gccaagtatatctgtgaaaatcaagattcgatctccagtaaactgaaggaatgctgtgaaaaacctctgttggaaaaatcccactgcattgccgaagtggaaaatgatgagatgcctgctgacttgccttcattagctgctgattttgttgaaagtaaggatgtttgcaaaaactatgctgaggcaaaggatgtcttcctgggcatgtttttgtatgaatatgcaagaaggcatcctagcaaatgttgtaaacatcctgaagcaaaaagaatgccctgtgcagaagactatctatccgtggtcctgaaccagttatgtgtgttgcatgagaaaacgccagtaagtgacagagtcaccaaatgctgcacagaatccttggtgaacaggcgaccatgcttttcagctctggaagtcgatgaaacatacgttcccaaagagtttaatgctgaaacattcaccttccatgcagatatatgcacactttctgagaaggagagacaaatcaagaaacaaactgcacttgttgagcttgtgaaacacaagcccaaggcaacaaaagagcaactgaaagctgttatggatgatttc

SEQ ID NO: 149933 - DNA, 1677 bp, Homo sapiens
ccgctgcagatcctcatgaatgctatgccaaagtgttcgatgaatttaaacctcttgtggaagagcctcagaatttaatcaaacaaaattgtgagctttttgagcagcttggagagtacaaattccagaatgcgctattagttcgttacaccaagaaagtaccccaagtgtcaactccaactcttgtagaggtctcaagaaacctaggaaaagtgggcagcaaatgttgtaaacatcctgaagcaaaaagaatgccctgtgcagaagactatctatccgtggtcctgaaccagttatgtgtgttgcatgagaaaacgccagtaagtgacagagtcaccaaatgctgcacagaatccttggtgaacaggcgaccatgcttttcagctctggaagtcgatgaaacatacgttccaagtgtcaactccaactcttgtagaggtctcaagaaacctaggaaaagtgggcagcaaatgttgtaaacatcctgaagcaaaaagaatgccctgtgcagaagactatctatccgtggtcctgaaccagttatgtgtgttgcatgagaaaacgccagtaagtgacagagtcaccaaatgctgcacagaatccttggtgaacaggcgaccatgcttttcagctctggaagtcgatgaaacatacgttcccaaagagtttaatgctgaaacattcaccttccatgcagatatatgcacactttctgagaaggagagacaaatcaagaaacaaactgcacttgttgagctcgtgaaacacaagcccaaggcaacaaaagagcaactgaaagctgttatggatgatttcgcagcttttgtagagaagtgctgcaaggctgacgatgagatgcctgctgacttgccttcattagctgctgattttgttgaaagtaaggatgtttgcaaaaactatgctgaggcaaaggatgtcttcctgggcatgtttttgtatgaatatgcaagaaggcatcctgattactctgtcgtgctgctgctgagacttgccaagacatatgaaaccactctagagaagtgctgtgccgctgcagatcctcatgaatgctatgccaaagtgttcgatgaatttaaacctcttgtggaagagcctcagaatttaatcaaacaaaattgtgagctttttgagcagcttggagagtacaaattccagaatgcgctattagttcgttacaccaagaaagtaccccaagtgtcaactccaactcttgtagaggtctcaagaaacctaggaaaagtgggcagcaaatgttgtaaacatcctgaagcaaaaagaatgccctgtgcagaagactatctatcccgtggtcctgaaccagttatgtgtgttgcatgagaaaacgccagtaagtgacagagtcaccaatctcaagaaacctaggaaaagtgggcagcaaatgttgtaaacatcctgaagcaaaaagaatgccctgtgcagaagactatctatccgtggtcctgaaccagttatgtgtgttgcatgagaaaacgccagtaagtgacagagtcaccaaatgctgcacagaatccttggtgaacaggcgaccatgcttttcagctctggaagtcgatgaaacatacgttcccaaagagtttaatgctgaaacattcaccttccatgcagatatatgcacactttctgagaaggagagac

SEQ ID NO: 149934 - DNA, 2621 bp, Homo sapiens
  misc_feature (1)...(2621): n = a,t,c or g
ccgctgcagatcctcatgaatgctatgccaaagtgttcgatgaatttaaacctcttgtggaagagcctcagaatttaatcaaacaaaattgtgagctttttgagcagcttggagagtacaaattccagaatgcgctattagttcgttacaccaagaaagtaccccaagtgtcaactccaactcttgtagaggtctcaagaaacctaagaaaagtgggcagcaaatgttgtaaacatcctgaagcaaaaagaatgccctgtgcagaagactatctatccgtggtcctgaaccagttatgtgtgttgcatgaaaaacgccagtaagtgacagagtcaccaaatgctgcacagaatccttggtgaacaggcgaccatgcttttcagctctggaagtcgatgaaacatacgttcccaaagagtttaatgctgaaacattcaccttccatgcagatatatgaaaatcaagattcgatctccagtaaactgaaggaatgctgtgaaaaacctctgttggaaaaatcccactgcattgccgaagtggaaaatgatgagatgcctgctgacttgccttcattagctgctgattttgttgaaagtaaggatgtttgcaaaaactatgctgaggcaaaggatgtcttcctgggcatgtttttgtatgaatatgcaagaaggcatcctgattactctgtcgtgctgctgctgagacttgccaagacatatgaaaccactctagagaagtgctgtgccgctgcagatcctcatgaatgctatgccaaagtgttcgatgaatttaaacctcttgtggaagagcctcagaatttaatcaaacaaaattgtgagctttttgagcagcttggagagtacaaattccagaatgcgctattagttcgttacaccaagaaagtaccccaagtgtcaactccaactcttgtagaggtctcaagaaacctaggaaaagtgggcagcttcgatgaatttaaacctcttgtggaagagcctcagaatttaatcaaacaaaattgtgagctttttgagcagcttggagagtacaaattccagaatgcgctattagttcgttacaccaagaaagtaccccaagtgtcaactccaactcttgtagaggtctcaagaaacctaggaaaagtgggcagcacaccaagaaagtaccccaagtgtcaactccaactcttgtagaggtctcaagaaacctaggaaaagtgggcagcaaatgttgtaaacatcctgaagcaaaaagaatgccctgtgcagaagactatctatccgtggtcctgaaccagttatgtgtgttgcatgaggaaaacgccagtaagtgacagagtcaccaaatgctgcacagaatccttgggtggaacagggcgaccatgcttttccagctctgggaagtcgatggaaacatacgttccccaaagggtttaatgctggaaacattcaccttccctggcggnttttgcacatttcttgggagggggagccaatcgattactctgtcgtgctgctgctgagacttgccaagacatatgaaaccactctagagaagtgctgtgccgctgcagatcctcatgaatgctatgccaaagtgttcgatgaatttaaacctcttgtggaagagcctcagaatttaatcaaacaaaattgtgagctttttgagcagcttggagagtacaaattccagaatgcgctattagttcgttacaccaagaaagtaccccaagtgtcaactccaactcttgtagaggtctcaagaaacctaggaaaagtgggcagcaaatgttgtaaacatcctgaagcaaaaagaatgccctgtgcagaagactatctatccgtggtcctgaaccagttatgtgtgttgcatgagaaaacgccagtaagtgacagagtcaccaaatgctgcacagaatccttggtgaacaggcgaccagtttgctgaagtttccaagttagtgacagatcttaccaaagtccacacggaatgctgccatggagatctgcttgaatgtgctgatgacagggcggaccttgccaagtatatctgtgaaaatcaagattcgatctccagtaaactgaaggaatgctgtgaaaaacctctgttggaaaaatcccactgcattgccgaagtggaaaatgatgagatgcctgctgacttgccttcattagctgctgattttgttgaaagtaaggatgtttgcaaaaactatgctgaggcaaaggatgtcttcctgggcatgtttttgtatgaatatgcaagaaggcatcctgattactctgtcgtgctgctgctgagacttgccaagacatatgaaaccactctagagaagtgctgtgccgctgcagatcctcatgaatgctatgccaaagtgttcgatgaatttaaacctcttgtggaagagcctcagaatttaattggcatagcattcatgaggatctgcagcggcacagcacttctctagagtggtttcatatgtcttggcaagtctcagcagcagcacgacagagtaatcaggatgccttcttgcatattcatacaaaaacatgcccaggaagacatcctttgcctcagcatagtttttgcaaacatccttactttcaaaaaaatcggccgcg

SEQ ID NO: 149935 - DNA, 2362 bp, Homo sapiens
atgaagaaagtcaaggagagggactctttcatcatggaagatctgggggcagagggacttaaaagctcggcttattccaggggtgtgtttcgtcgagatgcacacaagagtgaggttgctcatcggtttaaagatttgggagaagaaaatttcaaagccttggtgttgattgcctttgctcagtatcttcagcagtgtccatttgaagatcatgtaaaattagtgaatgaagtaactgaatttgcaaaaacatgtgttgctgatgagtcagctgaaaattgtgacaaatcacttcataccctttttggagacaaattatgcacagttgcaactcttcgtgaaacctatggtgaaatggctgactgctgtgcaaaacaagaacctgagagaaatgaatgcttcttgcaacacaaagatgacaacccaaacctcccccgattggtgagaccagaggttgatgtgatgtgcactgcttttcatgacaatgaagagacatttttgaaaaaatacttatatgaaattgccagaagacatccttacttttatgccccggaactccttttctttgctaaaaggtataaagctgcttttacagaatgttgccaagctgctgataaagctgcctgcctgttgccaaagctcgatgaacttcgggatgaagggaaggcttcgtctgccaaacagagactcaagtgtgccagtctccaaaaatttggagaaagagctttcaaagcatgggcagtagctcgcctgagccagagatttcccaaagctgagtttgcagaagtttccaagttagtgacagatcttaccaaagtccacacggaatgctgccatggagatctgcttgaatgtgctgatgacagggcggaccttgccaagtatatctgtgaaaatcaagattcgatctccagtaaactgaaggaatgctgtgaaaaacctctgttggaaaaatcccactgcattgccgaagtggaaaatgatgagatgcctgctgacttgccttcattagctgctgattttgttgaaagtaaggatgtttgcaaaaactatgctgaggcaaaggatgtcttcctgggcatgtttttgtatgaatatgcaagaaggcatcctgattactctgtcgtgctgctgctgagacttgccaagacatatgaaaccactctagagaagtgctgtgccgctgcagatcctcatgaatgctatgccaaagtgttcgatgaatttaaacctcttgtggaagagcctcagaatttaatcaaacaaaattgtgagcttttttgagcagcttggaaagtacaaattccagaatgccgctattagttccgttacacccaagaaagtaccccaagtgtcaactcaactcttaactccaactcttgtagaggtctccaagaaaccctaggaaaagtgggcagcaaatgttgtaaacatcctgaaagcaaaaagaaatgccctgttgcagaaaaactatctatcccgtggtcctgaaccagttatgttttgttgcatgagaaaaccgccagtaagtgacagagtcaccaaaattgctgcacaagaacccttgggtgaacaggcgaccaatgcttttcagctctggaagtccgatgaaacataccgttcccaaaagaggttaatgcttgaaacattccaccttccatgcagatatatgcacactttcttgagaaggagagacaaatccaggaaacaaactgcacttgttgagctcgtggaaacacaagccccaaggcaacaaaaagagcaactgaaagcttgttatgggatgatttcgcagcttttgttaaaaaaattgctgccaaggcttgacgataaggagacctgctttgccgaggagaccatttcagggaatggagctaagaaagctatctttctggttaatgatgagttcatactgatgtctctgactctaatccagaaccacaggacttattctagccttcctccttgcctctatgacagcaagaaacttctcttccactatctagcctccatctacccatttgttccacctcaggatgcatgtaaaggagtttcagagttataacaactgaaagctgttatggatgatttcgcagcttttgtagagaagtgctgcaaggctgacgataaggagacctgctttgccgaggagaccatttcagggaatggagctaagaaagctatctttctggttaatgatgagttcatactgatgtctctgactctaatccagaaccacaggacttattctagccttcctccttgcctctatgacagcaagaaacttctcttccactatctagcctccatctacccatttgttccacctcaggatgcatgtaaaggagtttcagagttataa

SEQ ID NO: 149936 - DNA, 339 bp, Homo sapiens
cgaagaagaagaaaaaaaaatgagaagaggaaaagacagaggaagataaaagacgaaaaaagtagaaagaactcactgagagtagaaatgagagagacatggagacagagagagaaacagaaagaggaagatagagagaagagaaagggacaacaagaaaaagaaagaaggaaaagagaaattgaagaaaaggagagtacatgatgcgaacaaatggaaatagggaagacaaagaaagtaaacatccattgtaggtggcagacccaactaaaactcaagttccatctcttttctttgttctccatcaaaatgtctctaagttctttttcaactcgtgcc

SEQ ID NO: 149937 - DNA, 335 bp, Homo sapiens
  misc_feature (1)...(335): n = a,t,c or g
ggcacgaggtggggatgctggagatgcctttgatggctttgggtttggggacgatcctagtgactagttatcatcatgccatatcgatgtgcacaggtacttgttttctgcattgtgtgattgctatactttctactttgtccatatcagagttttccttttaagcatgaggcttgctgatactgcctaaaaaacttacaagtcttccagagattcaaggtaatttggaagtacagttttgctgaccaccttgagaaaatgccagctggaggcattctgtaaaaggacacttgtattactaccagctgtaggactggttataagtcaatagggcn

SEQ ID NO: 149938 - DNA, 350 bp, Homo sapiens
  misc_feature (1)...(350): n = a,t,c or g
ggcacgagctagagacctttcctgtcctcctggatgctcattattagaagagctggtggattgagactcattattcaacgtgataatactttcataaacatggtccataacttttcggacttggagcatgtcactagcagagagtctatctctgtaaaaaagcaatggcatattgtgacatcagggaaatcactagatattattcattccatattatttttctttgatgcaaacattttaaagatgaaaaataaaccaataaatgtttttagtcattaccttaatccatttttagagctgcggaaagattttctacagtgtccttctaagacacagtttatgtacaactn

SEQ ID NO: 149939 - DNA, 468 bp, Homo sapiens
cgtattcatggatgcagatactctggtcctagcaaatattgatgatctttttgacagagaagaattgtcagcagcaccagacccagggtggcctgactgcttcaattccggagtcttcgtttatcagccttcagttgaaacatacaatcagctgttgcatcttgcttctgagcaaggtggggaccaaggcatactgaacacattttttagcagctgggcaacaacagatatcagaaaacacctgccgtttatttataacctaagcagcatctctatatactcctacctcccggcaatttaaagtgaagatgtctcaggagccatatcacatctggtccccttggggggagattcccaagctatggcacaagccgttttggtattcctcgggaaggaaccgggaaggggaaccgaatgggggaacaaggggccaagggcttgatttatattggggagccagatttccct

SEQ ID NO: 149940 - DNA, 549 bp, Homo sapiens
gtcctagcaaatattgatgatcttttgaccagagaagaaatgtcagcagcacagacccaggggtggcctgactgctcaattccggagtcttcgtttatcagccttcagttgaaacatcaatcagctgttgcatcttgcttctgagcaaggtagttttgatggtggggaccaaggcatactgaacacattttttagcagctgggcaacaacagatatcagaaaacacctgccgtttatttataacctaagcagcatctctatatactcctacctcccagtgctgccagagtgagtgagtgtaattctcctttcaggtaaagataggctatctcaacactgctgagtgattcataaacatatcaaccaatagcattaacccattttatttcctgtccttagtgtctgaagatgctcaccagttttctgtgtacagtaaggcagcatgctaaaatgcttttgttcagttctgtatatttgaaaatagcagtgtgttctctgatggttacctgcagtggcaccctgtacaaaaaataaaagacttattgctgt

SEQ ID NO: 149941 - DNA, 1862 bp, Homo sapiens
cctccacaacccacactgcccccacatccccgccgtgcctcctcgctggccgcgctccctcccggtgccggcttctctgagtcaccaacctgaggctgccccggccgcctgcgcatttcgttattaccatgacagatcaggcctttgtgacactaaccacaaacgatgcctacgccaaaggtgccctggtcctgggatcatctctgaaacagcacaggaccaccaggaggctggtcgtgctcgccacccctcaggtctcagactccatgagaaaagttttagagacagtctttgatgaagtcatcatggtagatgtcttggacagtggcgattctgctcatctaaccttaatgaagaggccagagttgggtgtcacgctgacaaagctccactgctggtcggcttacacagtattccaaatgtgtattcatggatgcagatactctgggtcctagcaaatattgatgatcctttttgacagagaaagaattgtcagcagcaccaagacccaggggggcgctgactgcttcaattccgggagtcttccgtttatcagccttcagtttgaaacatacaatcagctgttgcatcttgcttcctgagcaaggtagttttgatggtgggggaccaaggcatactgaacacatttttttagcagctggggcaacaacaagatatcagaaaacacctggcgtttaatttataacctaagcaacatctccatatactcctacctcccggcatttaaagtgtttggtgcaagtgccaaagttgtgcatttcctggggacgagtcaaaccatggaattatacttatggatcccaaaacaaaaagtgtcaaaaagtgaggcccatgatcccaacatgactcatccagagtttctcatccctgtgggtgggaacatcttttaccaccaacgttttacctctgctttcaacaatttgggccttggtcaaaagacaccttgctcatatgtaaatggtgggaagatgtctccagggagccatatcacatctgtcccttggggaagatcccagcctatggcacagccgtttggtatcctcggaagaacggaaggaacgatgggaacagggccaggctgattatatgggagcagattcctttgacaacatcaagaggaaacttgacacttacctccagtagaaacactgcatttttctgtgaacacatccacttcacaagccttgtttctgatacttagtatctagagctgggttgagaaaagtctgttacagttgctagaggttttcattaaaacttatcagatgagaggcttttttaggataagaggtgagaactgggcaaaagttgtgaagcagcaattctgttatatggacagtgttctgctttttaatcctatttagcttgtttcagaaattctcacttttgttgactgccaacatacaaagtaagggaaactcaagatattaagatggctgtatcagttcttaaaatctgcagagcctggttcaaaatcagtcactcccttcagaagcagacatggcatctgttccttgcttgcttgttggttgtgtacctttcacgagacctgaattttagaattgcccagtgctgccagagtgagtgagtgtaattctcctttcaggtaaagataggctatctcaacactgctgagtgattcataaacatatcaaccagtagcattaacccattttatttcctgtccttagtgtctgaagatgctcaccagttttctgtgtacagtaaggcagcatgctaaaatgcttttgttcagttctgtatatttgaaaatagcagtgtgttctctgatggttacctgcagtggcaccctgtacaaaaaataaaagacttattgctgt

SEQ ID NO: 149942 - DNA, 361 bp, Homo sapiens
ggcacgagcaacagtgagcatgcgctggacgatagaagtacagcccaatgtagagtacaaatgcaggttgtacagcagttatagctacagcttgcaaaagacaaagaacgcctgcaagccatgatgacccacctgcatgtgaagtctacagaacccaaagccgcccctcagcccttgaatctggtatcaagtgtcactctctccaagtccgcattggaggcttatgcactagagcttacctaatacttctacgaacgctacacggctcctgactcccttaaactaaggtccgtctgcgatcatcacaaccgtcatactacgtgttagcccaaaggctctcgtgttattcatttagatggtg

SEQ ID NO: 149943 - DNA, 343 bp, Homo sapiens
ggcggtcaataagcctgtcctcgttctcctccaccagacccacgcttgggatgctgctttccaccacctccagctgtctgctgagctcctgctggtcctcatccagatgggaccacgtctctagaatgtactccagctccacacccctcttgtgagcccgtttcagtacagcagaagcctgagccatcagctctgtatggaactgggtttccttttggactgcaaagctgattatctttctgaagagtgtttcagtcaagatcatatgagattccaggccctgaaagtattccttatgtttgtcaagtagttgctggatttcctctttggaagacctcgtgcc

SEQ ID NO: 149944 - DNA, 344 bp, Homo sapiens
gggttgggatcgggaacttcttcgtcgtctgttaagtcctccatatctccaaagagagtggccagatggtccttttcgtctcgtgtctgtcctgtttgtccgtcatcagccttatctgtataagattcacggtcgccgtaggcatcaaagagctcatcaaatgcgtcgggctcgccattttgccgcgtcaagaagttattgtcttgtgaattgcaatccaaggctgactcattttcgtccagcagtgcggtcagcagagacagattgtcttcctcctcatccatgctgtcaagaggacagctgtgacaggaaacttcgaaggaggctcagatgcccagatgagc

SEQ ID NO: 149945 - DNA, 349 bp, Homo sapiens
cctttatttcccttctttttctctttagctcggcttattccaggggtgtgtttcgtcgagatgcacacaagagtgaggttgctcatcggtttaaagatttgggagaagaaaatttcaaagccttggtgttgaaattttcttcccccaaatctcttaatagcttctagtgctgctacaatctaagtcaggtcaccagagggaagagaacatggcattaaaagaatcacatcttcagaagagaagacactaatattattacccatatacatgatttcagaagatgacataagattcctcttaaagaggaaatgtcaggaatcaagccactgaatccttaaagagaaaagtt

SEQ ID NO: 149946 - DNA, 1614 bp, Homo sapiens
  misc_feature (1)...(1614): n = a,t,c or g
tcagcatagtttttgccaaacatccttaattttcaaccaaaatcagcagttaatgaaggcaagtcagccaggcatntcatcattttccacttcggcaaggccagtggaattattccaacagaggttgttcacagcattccttcagtttactggagatcgaatcttgattttcacagatatacttggcaaggtcccgccctgtcatcagcacattcaagcagatctcccatggcagcattccgtgtggactttggtaagatctgtcactaacttggaaacttctgcaaactcagctttgggaaatctctggctcaggcgagctactgcccatgctttgaaagctctttctccaaatttttggagactggcacacttgagtctctgtttggcagacgaaaccctccccctccacccccaaattccaccgaaccttggccaaacaggcaggccagctttaatccagcaagcttggccaacattcctgtaaaaagcagctttaataccctttttagcaaaagaaaaaggagttcccggggccataaaagtaaaggatgtccttcctggcaatttccataataagtattttttccaaaaatgtctccttcattgtcatgaaaagcaagtgcacatcacatcaaacctctggtctcacccaatcgggggaggtttgggttgtccttcttgtggttgcaaaaaagcattcatttctctcaggttctttgttttgcacaagcagtcagccatttcaccataggtttcacgaaagagttgcaactgtgcataatctgtctccaaaaagggtatgaagtgatctgtcacaattttcagctgactcatcagcaacacatgtttttgcaaattcagttgcttcattcgctaattttacatgatcttcaaatggtcactgctgaagatactgagcaaaggcaatcaacaccaaggctgtgaaatcttcttctccctaaatctttaaaccgatgagcaacctcactcttgtgtgcatctcgacgaaacacacccctggaataagccgagctaaagagaaaaagaagggaacatcaaggttacccacttcattgtgccaaaggcgtgtggggttgacagaagagaaaagctgcagcccagagctgcagcagaagttccgcagtgagaccatcactgaggaggagctggtggggctcatgaacaagtttgtggaggatacaaagaagggagtgcaccagaaggagggctggcccagcagcgcatacggggtgacgaagattggcgtcaccgttctgtccaggatccacgccaggaaactgagtgagcagaggaaaggggacaagatcctcctgaatgcctgctgcccagggtgggtgagaactgacatggcgggacccaaggccaccaagagcccagaagaaggtgcagagacccctgtgtacttggcccttttgcccccagatgctgagggtccccatggacaatttgtttcagagaagagagttgaacagtggtgagctgggctcacagctccatccatgggccccattttgtaccttgtcctgagttggtccaaagggcatttacaatgtcataaatatccctatattagaaaaaaaaatgatctct

SEQ ID NO: 149947 - DNA, 321 bp, Homo sapiens
ggcacgaggctaaaagctccccaaatttggtgaaagccataatcctacagattcaagaagctacacaaatccccaggagaataaataaaaataaatccacactaagacacataagaattgaatttctgaaaactaaagacaaggaaaaatccttgagaacacccagagagatttactacctatagggaaacaaaatttcgataacagtgaacttagaatctgaatctatgggaacctgattgaagtgtgccggtgatagactgattctaaaattgtgctgttatactaatagaagcctgtagcgaaatgattgtagaaaag

SEQ ID NO: 149948 - DNA, 322 bp, Homo sapiens
ggcacgaggctaaaagctccccaaatttggtgaaagccataatcctacagattcaagaagctacacaaatccccaggagaataaataaaaataaatccacactaagacacataagaattgaatttctgaaaactaaagacaaggaaaaatccttgagaacacccagagagatttactacctatagggaaacaaaatttcaataacagtgaatttatcatctgaaactatggaagccagaaagaagtggcacaattatcaaatgataatagaaaagaactgtcaacctacaatcctacatccagcaaaattatcctttaagag

SEQ ID NO: 149949 - DNA, 351 bp, Homo sapiens
  misc_feature (1)...(351): n = a,t,c or g
nctgtgggcagaggcaggcagagccacctgtcacactcccatcctcctacggaccccaaaggacagcaggcaagtccaggctggaacccaggcgtcagaatgcttcccgggctgaagtggcttcctcagcctcccgcagcgtccctgtcctgagtcccatcatcacccacccaacaaacatctgcagggcacctgctttccatgtctcacgaagccctgacatgggtggacagagccactggcctggctggcaacggggaggcctgtgtctccgggacacagcgccatcctggactctccctcgcccctccaggctgtgccccttctcccagttctcgtgccgctcgtgcc

SEQ ID NO: 149950 - DNA, 434 bp, Homo sapiens
  misc_feature (1)...(434): n = a,t,c or g
ggcacgaggaacaacctgaaggtctatctccaaatctagacaggtttttaggagatagacattgtaaccaattctcttcacgtgattaacctatcttcttggctcgttgtagccatgaatattctggcagacaccctcggcttgctgactcaatattactannnnnnnnnnnnnnnnnnnnnnnnnnnnnnnnnnnnnnnnnnnnnnnnnnnnnnnnnnnnnnnnnnnnnnnnnnnnnnnnnnnnnnnnnnnnnnnnnnnnnnnnnnnnnnnnnnnnnnnnnnnnnnnnnnnnnnnnnnnnnnnnnnnnnnnnnnnnnnnnnnnnnnnnnnnnnnnnnnnnnnnnnnnnnnnnnnnnnnnnnnnnnnnnnnnnnnnnnnnnnnnnnnnnnnnnnnnnnnnnnnnnnnnnnnnnnatgctgcatgtagcctggcg

SEQ ID NO: 149951 - DNA, 362 bp, Homo sapiens
ggcacgagataagatgctattctaggtgatagggatatagcagtgggttctgcagtaagatcaagctaactgagcatagtttctattgggtggtggcaatggagataataagaacgagaacaacgctttacaggattaaatgatgttcattacttgcctataatgtacatagtggtaggatgtgcgatcttcattacatgagtataacggggctggtccagccctaccaaatgcaggtccactgacacttactgtgtgaatccgtccacacgactgcacgcttatatggcgccccgacacaagcttcactctcactgtgctgagagagaccctgatcaatttacgcttctaagacactgccg

SEQ ID NO: 149952 - DNA, 463 bp, Homo sapiens
  misc_feature (1)...(463): n = a,t,c or g
tcgatgccatggtcggggttgcaagctgaagncgatggtgatggcgtaacggtgccccagtggaccttctccaacgcggtgtaggttctcggaccccgaggtgaagaaggagacgcgaccagctctcggctccaccgtcttgttggcacccttcctccatgaacatgaaccgccctccgccgaagtccttccaggtagttggagaggtacagcagcgaggtgtagtcgaaggagccgtaggtcaccttgtccacgtgcgcatgccagtactcgtcngtgccgtccgcgcttccgtgcggtataaccggaagtcctcctctgagaagatgttctgtattttatccccgaagtatctgtacaggttcacaaagtgcttcccgacagacagggcccctgagtgcaagtccagaatggatgcccctccgtcagatcctcccagggagagcccctttntncactacgc

SEQ ID NO: 149953 - DNA, 713 bp, Homo sapiens
  misc_feature (1)...(713): n = a,t,c or g
ttgatgtcnnntgnnnaggtggtggaattcctttgtgaacctgtacagatacttcggggataaaatacagaacatcttctcagaggaggacttccggttataccgggaggtgcggcagaaggtccagctcaccattgctgaggcttttggcatcagcgcatcctcggtgcatctgaccaagcccaccttcttctgccgcataaacaggacggaagcgcggacggcgcacgacgagtactggcatgcgcacgtggacaaggtgacctacggctccttcgactacacctcgctgctgtacctctccaactacctggaggacttcggcggagggcggttcatgttcatggaggagggtgccaacaagacggtggagccgagagctggtcgcgtctccttcttcacctcggggtccgagaaccttacaccgcgtggagaaggtccactggggcacccgttacgccattaccagtcgccttcagctgcaaccccgaccatggcatcgaggacccagcgttcccgtagccagcagccgggccaaggtaacttcaggagggcccgtgtggaggcagccgcgccagtcgtgcacccacccccacgtccacccgctcctgttgcacagagtgccttaggaattctctgattttgatttgctgacgtgttaatcttttcatctgtgagtaaatgaagggaaccagcaaaacaaaaaaaaaaaa

SEQ ID NO: 149954 - DNA, 599 bp, Homo sapiens
ggttcatgttcatggaggagggtgccaacaagacggtggagccgagagctggatgtttttgtttccggatgatgtcttatgggttccaagaagttaatggaccgagagccagtgaagctgctggtgcgaaggctggagtcaggtgtcctccggggactcaccacccgcccgagaggggagagacacatgcgatttctggaaactgagagcattgcttattgttgattcccttggttgcccgtgctgagtcctgcttttaaggaagcaggtcgcgtctccttttttcacctcggggtccgagaacctaccccgcgtggaaaaggtccactggggcacccgttacgccatcaccaatcgccttcagctgcaaccccgaccatggcatcgaggacccagcgttcccgtagccagcagccgggccaaggtaacttcaggagggcccgtgtggaggcagccgcgccagtcgtgcacccacccccacgtccacccgctcctgttgcacaaagtgccttaggaattttctgattttgatttgctgacgtgttaatcttttcatctgtgagtaaatgaagggaaccagcttttcacttctccaaaaa

SEQ ID NO: 149955 - DNA, 357 bp, Homo sapiens
  misc_feature (1)...(357): n = a,t,c or g
ccgtgatttcagaaaatctccgccctcccacagagatccgattacacacataacacaccgcatacagaccccgcacgtgtgtcttataaacacgctggtgccaatcacacacacatacacacccctatgactaatgtatccacaaccatatacccgccacacgcctatctgcatacccacactcaaaaaacaccaccacatatatacagcacacacgcgccctagatataactatttatctccacatatgctcacacaaagaatgnnnnnnnnnnnnnnnnnnnnnnnnnnnnnnnnnnnnnnnnnnnnnnnnnnnnnnnnnnnnnnnnnnnnnnnnnnnnnnnnnnnnntcgtgcc

SEQ ID NO: 149956 - DNA, 744 bp, Homo sapiens
ggcacgagggtttctcctgcgttgctccgagggcccaatcctcctgccatcgccgccatcctggcttcgggggcgccggcctccaggcccccgggaggagaactcctagggctactaaatcctcgctggaggcggtggcttcttatgcgggaggacgtggcggagggcctgactttgggagccggggtcagacggcctctgaggtgatctgtgaaaatggttcgctattcacttgacccggagaaccccacgaaatcatgcaaatcaagaggttcccaatcttcgtgttcactttaagaacactcgtgaaactgctcaggccatcaagggtatgcatataccgaaaagccaccgaagtatctgaaagatgtcactttacagaaacagtgtgtaccattccgacgttacaatggtggaatttggcaggtgtgcgcaggccaagcattggggctggacacaaggtcggtgagccataaagagtgctgaattctctggtcattgagcatatccaagtgaacaaagcacctaagatgcgccgccggacctacagagctcatggtcggattaacccatacatgagctctccctgccacattgagatgatccttacggaaaaggaacagattgttcctaaaccagaagaggaggttgcccagaagaaaaagatatcccagaagaaactgaagaaacaaaaacttatggcacgggagtaaattcagcattaaaataaatgtaattaaaagg

SEQ ID NO: 149957 - DNA, 650 bp, Homo sapiens
ggcacgaggagcaagcctggagggtgcctggattggtgagggcccgtgtggctacttctgtggaagcagtgctgtagttactggaagataaaagggaaagcaagcccttggtgggggaaagtatggctgcgatgatggcatttcttaggacacctttggattaataatgaaaacaactactctctgagcagctgttcgaatcatctgatatttatactgaatgagttactgtaagtacgtattgacagaattacactgtactttcctctaggtgatctgtgaaaaatggttcgcttattcaacttgaacccggagaaacgccaacgcaaatcatggcaaatcagagggttccaatcttcgtgtttcactttaggaacactcgtgaaacttgctcaggccatcaagggtatgcatatacgaaaagccacggaagtatctgaaagatggtcactttacagaaacagtgtgtaccattccgacggtaacaatggtggagttggcaggcgtgcgcaggccaagcaatgggggctgggacacaaggtcggtgggcccaaaaaagagtgcttgaattttttgctgcacatgctttaaaaacgcagagagtaatgctgaccttaaggggttttagatgtagattctctggtcattga

SEQ ID NO: 149958 - DNA, 338 bp, Homo sapiens
ggcacgagcatatacaacgtactctacgaggtgccgctcccacctcctggccggtccttgaagttttctggggtctatgggccaataatctgccagagaccaagtaccaatgagcttcccctatttgactttcctgtcaaagaggtttttgaactgctcggtgtggataatgtgtaccagctttttacttgggcccttctgcagaagtatatcctgctctacgtgcagcgttagtgtaatgttactaaagccctagaactatctaatttactcttatttcacatatgcgatatcaagctagtctagatcatataatgatatgagttcttagatgcaag

SEQ ID NO: 149959 - DNA, 334 bp, Homo sapiens
cccgaagcccgtaactctcctgccccgaccaggtgcatccccactcactagtgccctatcccgaaccgcgacgggcgacagcctcggtccctgagacctccggtcctccattcccacacccaaggcgcccatacgccactactcccccggcgctaggtcacaatccccatgcttgactttccagctccttcgcaggctctcggtacaagttgggggaaatgttacacatctaaggagcctcagtttcttcctctgtaaatggggtaaaaatgcctacctcaaggggctattgtaaggattcaaggaaggcactacctgggcagcctctcgtgcc

SEQ ID NO: 149960 - DNA, 342 bp, Homo sapiens
ggcacgaggtaaaatataaaaaccctgcccagtagcagtggcatcgcttggggcctgatgcccatgttccagaggaattccgataccacaaacagctaatacaatcccagcttttcttacactatcacctatctcaaactttcacattacaggaaagtgcagacctgcaaaatgctttcctgaactcaggtcagtgcatactgaacaagcccctgaaatttgctgatctacatagcgacttcatgaaaacaatataactcgactcccggtataaaatagaattttgaacaaatgttcaaaaaaatattgcaccctattaatagaacaacccaggtagagacc

SEQ ID NO: 149961 - DNA, 334 bp, Homo sapiens
taattataaaattcatatggaatccaaaaagagcctgaatagctgaagcaattttaagcaaaaagaacatagctggaggcatcacattacctgacttcagattatacaacaaggctatagtaatctaaacagcatggtactggcataaaaatagacacatagatcaatggaacagaatactgaacccagaaataaagtcacatacttacagtcaacggatctttgacaaaattgacaaaaacatacactagggaaaggacacccttttcaataagtggtgctgggaaagatggattgccatatgcagaagaataaaactggactccctcgtgcc

SEQ ID NO: 149962 - DNA, 344 bp, Homo sapiens
caaaaatcaagatggtagacccccccaaatagttacatgaaagtgaatgtgcctgagaagtctcggaacggagaaaccagtctccgaaccaaaatcgcggtatgccagtattatatgtagtttgcctttactaaatattttgcctagttactcaagaattgaatgttctatattgagaatatttgaaagtggcatccttcctaacaccacataactttcatgtaacactggagctgaaattatgcaaatttcaagacctagttagagctgataacagctgatattgcaatttccactcacacaactgttcccgacaaaggaacagttctaagttgcctcgtgcc

SEQ ID NO: 149963 - DNA, 349 bp, Homo sapiens
ggcacgagcctgccaatgctgactttgccttccgcttctactacctgatcgcttcggagaccccggggaagaacatctttttctccccgccgcgcttcccggcggcctacgccatgctttccctgggggcctgctcacacagccgcagccagatccttgagggcctgggcttcaacctcaccgagctgtctgagtccgatgcccgtaggcggtgtcggcagtgagtgggcactctcgacctgaccggacatggactgcaaacgcgcggcgggcagggcccgtggcctcgggcgcgcccgtcgcgcggaggcgacgccgctgccgggtcggctcggcttcctccgagggg

SEQ ID NO: 149964 - DNA, 499 bp, Homo sapiens
  misc_feature (1)...(499): n = a,t,c or g
ttcccgttcgacgatttcgtgctttcctttgaggcctggaatgccaaaatcacggacctaaaacagatagttgaaaatctcttcaatgagaaatgtggtaagtctattttgaaaccttcttactgccacgcagggtgccttcatgggagtaggagggagcagagtgggatactgagcgttggagtatccctgtcattggcaacgtgtgggtttttcgggattgaatggcgtcatttcgcccatgttctgtttcgtgtacgcggctgttttgcaggggaagctcttggccttaaacaagctgtgaaggtgccgttcgcgttatttgagtctttcccggaagacttttatgtggaaggcttacctgagggtgtgccattccgaagaccatcgactnttggcattccgaggctggagaagatactcagaaacaaagccaaaattaagttcatcattaaaaagcccgaaatgtttgagacggcgattaaggagagcacctcct

SEQ ID NO: 149965 - DNA, 1068 bp, Homo sapiens
  misc_feature (1)...(1068): n = a,t,c or g
tttcgtataaaatcaagttcgttgttaaaaaacctgaactagttatttcctacttgcctcctgggatggctagtaaaataaacactaaagctttgcagtcccccaaaagaccacgaagtcctgggagtaattcaaaggttcctgaaattgaggtcaccgtggaaggccctaataacaacaatcctcaaacctcagctgttcgaaccccgacccagactaacggttctaacgttcccttcaagccacgagggagagagttttcctttgaggcctggaatgccaaaatcacggacctaaaacagaaagttgaaaatctcttcaatgagaaatgtggggaagctcttggccttaaacaagctgtgaaggtgccgttcgcgttatttgagtctttcccggaagacttttatgtggaaggcttacctgagggtgtgccattccgaagaccatcgacttttggcattccgaggctggagaagatactcagaaacaaagccaaaattaagttcatcattaaaaagcccgaaatgtttgagacggcgattaaggagagcacctcctctaagagccctcccagaaaaataaattcatcacccaatgttaatactactgcatcaggtgttgaagaccttaacatcattcaggtgacaattcccagatgatgataatgaaagactctcgaaagttgaaaaagctagacagctaagagaacaagtgaatgatctctttagtcggaaatttggtgaagctattggtatgggttttcctgtgaaagttccctacaggaaaatcacaattaaccctgggctgtgtggttgttgatgggcatgcccccgggggtgtcctttcaaagcccccagcttacctggaaatcagctccatgagaaggatcttagactctggccgagtttatcaaatttcacggtcattagaccatttccagggacttgtgattaattaaccagctggtttgatccagagtgagtcaaaaggccccgttgatacaagtattcagctggaaccaaggccagttgggagttccagccacagaagagataaaagngcttgatg

SEQ ID NO: 149966 - DNA, 306 bp, Homo sapiens
ggcacgaggtgtgtgtggtgggtgtagatgtttgggtttctgtggctctgttgttggggacctaatgtactaaaacagctttgactgctttaagaaagttttgcgttattagggcttctttggactctactggggtctgataccataacttatatggtttgctcctgaacaggccatttatctgactgataatgtttttgttcgtgacaaatttacctgaagagatggctctgactcactttcagctgaagttcttgctggaggctgtgctttaggctctctggtcattgttaccaactcattgtg

SEQ ID NO: 149967 - DNA, 304 bp, Homo sapiens
  misc_feature (1)...(304): n = a,t,c or g
ggcacgagggaaaagagccagacattcctctgtacgagactgtgcagacagtgggcccatcccatgcccgaacctacactgtggctggncattnagagggaagatgaacgatctgttagcaatttctctgtttgctacacacgccagtccatcattctgtcatctaggtgtactattttccctagcaccctataaaagtaatctctatagtcccacacctcctaaaagattctctatcctaagcctataagaaggcctcatacggctaacaaggcctcccacggcagtccacggccctaagttc

SEQ ID NO: 149968 - DNA, 366 bp, Homo sapiens; identical to SEQ ID NO: 145060

SEQ ID NO: 149969 - DNA, 393 bp, Homo sapiens
  misc_feature (1)...(393): n = a,t,c or g
ctgaacccgccccctttggatcttcatgccctgggttctgcccgcacggacccccatttttgggacttcctggagactcccttcctagatgaggaagtgaagcttatcannnnnnnnnnnnnnnnnnnnnnnnnnnnnnnnnnnnnnnnnnnnnnnnnnnnnnnnnnnnnnnnnnnnnnnnnnnnnnnnnnnnnnnnnnnnnnnnnnnnnnnnnnnnnnnnnnnnnnnnnnnnnnnnnnnnnnnnnnnnnnnnnnnnnnnnnnnnnnnnnnnnnnnnnnnnnnnnnnnnnnnnnnnnnnnnnnnnnnnnnnnnnnnnnnnnnngnnnnnnnnnnnngaaaaggaatttgaaaagttgattaaaatgaaattttagtgaagaaaactcagtctt

SEQ ID NO: 149970 - DNA, 715 bp, Homo sapiens
  misc_feature (1)...(715): n = a,t,c or g
ggcacgagcggcacgagactggaagaattattccaccgacgtggaggcagccgtcaacagcctggtcaatttgtacctgcaggcctcctacacctacctctctctgggcttctatttcgaccgcgatgatgtggctctggaaggcgtgagccacttcttccgcgaactggccgaggagaagcgcgagggctacgagcgtctcctgaagatgcaaaaccagcgtggcggccgcgctcatcttccaggacatcaagaagccagctgaagatgagtggggtaaaaccccagacgccatgaaaagctgccatggccctggagaaaaagctgaaccaggcccttttggatcttcatgccctgggttctgcccgcacggacccccatctcatgtgacttcctggagcctcacttcatagatgaggaagtgaagcttatcaagaagatgggggaccacctgtccaacctccacagggctgggtggccccganggctgggcctgggcgagtatctcttcgaaaggctcactctcaagcacgactaagagccttctgagcccagcgacttctgaagggccccttgcaaagtaataggggcttctgcctaagcctctcccttcaagccaataggcagccttttttactatcctaaaaaaacctttggccaaaatggaaataaagctttttgttgcaaaaaaaaaaaaaaaaaaaaaaaaagggcg

SEQ ID NO: 149971 - DNA, 331 bp, Homo sapiens
ggcacgagcagtaccctggctctattagcatctctctgactgacctgggttgtcctgacatgcctgtcattatagctagatagaccgctgctgcggatgaatcccttgtgcccaccaggcttatgttacagcttgccgactatgggccagtgatctacagccttgtaatctgagtgtgcctgactgcagctttcacactggctcagcagcacagcaaaatggaaatctatgcagatattattggttctgaagacactactaatgaagactatcggagcattgccttatactttgaacgagaaatgagatatcttcaggctgcaaaattctt

SEQ ID NO: 149972 - DNA, 343 bp, Homo sapiens
ggcacgagcagagttggaaggcagagaatgaagccttcaccctggctgacctgaagcaactgccggagctgaacccaccagtgctgatgcccagagggaatgtggggactcccctgcgggtctttttggagttgatccgggcctgccgcctaccccctcggatcatcacccagctgcatttccagatccccaagataggttactccctgcgctactgcaatgtgccttttgagtatgaggactcagatactgcggtgcaggaatagcttgcgtatccggcgctaggtgaacacacacacgagtgcacctacctggacgaggtaccggccattctctgagcctt

SEQ ID NO: 149973 - DNA, 478 bp, Homo sapiens
cgtcgacttttttttttttttttttgagacagagtctcgctctggtcgcccaggccggactgcggactgcagtggcgcaatctcggctcactgcaagctccgcctcccgggttcacgccattctcctgcctcagcctcccaagtagctgggactacaggcgcccgccaccacgcctggctaagttttttttttttttttttttttgtatttttagcagagacggggtttcactgtgtgttagccaggatggtctcgatctcctgacctcgtgatcaacccgcctcagcctcccaaagtgctgggattacaggcgtgagcgactgacgcccggcccagatttcaacttttattttatttcctttcatttattaaataatataaataatgacagatttattttaggtgttagcctatttttgcatgagagatttacagaggtggaaattctcatgcttaacttatgcaatgagacaattg

SEQ ID NO: 149974 - DNA, 337 bp, Homo sapiens
ggcacgagcggcacgaggacactctcaccctgaaggaacggaatcgtgggaacaaagggatactggatgacattgacgatcataacatcataatctatcacttacctgatgcataatcagaagaatatgaatattttaaagagcagactacacttctcagggctagcatcccattctctgtgggtggatccaatcagttaattgaagccataggaaaaatggtcagaggccggctctacccctggagtgatgtgaaagtggagaacccacagcacaatgactttatgaagctcataaccatgctcatcacccacatgcacgatctacaggatgtgac

SEQ ID NO: 149975 - DNA, 571 bp, Homo sapiens
ttttttgagagctagtctcactctgtcacccaggctggagtacagtgctggcaccgcctccatgcccagctaatttttttgtattttttagtagagacggggtttcaccgtgttagccaggatggtctctatctcctgacctcatgatccgcccgcctcggcctcccaaagtgctgggattacaggcgtgacgaccatgcctggccagtccagtttttttttaaatgtagtaccccaaggccccaggctatccttgattttgcatttacttctcatgaactctgcttgggatccatgaggctactgaagagttagtatactaagtgcccttttatttccaggagaccaggcataaggagaaaagagagttgggtttcttgaggtttctattatctcagtcagagtagaaactacagtcctcattcaccagacagcaagagggaataataaaaagcctagtgagatgtctgacaatagccagccctttcctgctgaagatagaaagaaagtacgcagcatacaggctcaggttctgaggtcacgcgccgcaatttagtagtagtagtcaccg

SEQ ID NO: 149976 - DNA, 1787 bp, Homo sapiens; identical to SEQ ID NO: 144180

SEQ ID NO: 149977 - DNA, 1553 bp, Homo sapiens; identical to SEQ ID NO: 144181

SEQ ID NO: 149978 - DNA, 1862 bp, Homo sapiens; identical to SEQ ID NO: 147222

SEQ ID NO: 149979 - DNA, 1295 bp, Homo sapiens; identical to SEQ ID NO: 144182

SEQ ID NO: 149980 - DNA, 1149 bp, Homo sapiens; identical to SEQ ID NO: 148133

SEQ ID NO: 149981 - DNA, 2372 bp, Homo sapiens; identical to SEQ ID NO: 148135

SEQ ID NO: 149982 - DNA, 2589 bp, Homo sapiens
tttttttttttttttttggagtgacgctaatagcattgtgtttattagaaattgggcaccaagtcgtctttcaccagtgacaacagaaggaacagaaaacctccatggccacccttccccaccacgctgcgtgttcaggaagagtcttgtccaaatccccaccccctgagaagatgaggattgctctgtggaaaatacactcagcagaccagacacagctcagcgcccacgtctgttagccttaggcactggggaatgttttttttcccagagaaagaaagcacttttaaaaagcagtaatcaattaattcagaatgagcaaaggcttaacctctattctccctgccctctgcagagttcacactgcagagcccttcttcctttgagacacccctaggagcagctttctcctggctctcccctgctgctgtgactgtcactgtcctctgatctccacctggatctccttgcctgctgcatacctgccagcatggatgctccccactgctcaggcccagcccttcccctcctcaatgtgcaggcagcctctccctgggactcttgcccgctgtcagggctttggctgtgacctatgccctgaggacaccccctttcccgcaatgagcaccagatccatgtttccaacagtttacatccttgtcactcaaagtgtggttcagggaccagaagcatggacatccctgggagcttgttagaaactcagaatcccaggtcctatcccagacctcctgagccaggatctacattttttttttttttttttgagacggaatctcactctattgcccaggctggagtgcagcagcacgatctcggctcactgcaagctccgcctcccgggttcatgccattctcctgcctcagcctcccgagtagctgggactacaggcacccaccaccatgcctggctaattttttgtatttttagtagagacagggtttcaccgtgttagccaggatggtctcgatctcctgacctcatgatccgcccgcctcagcctcccaaagtgctgggattacaggcgtgagccaccgtgcccacccaggatctacattttaacaagatctcgatgatttgtgcatgcattaaaggttgagaaagcactagtctacatgcccatctatctggacaccccacagccactccagcccagcatggccatgctgaatgcagacccctcccctagaccacaaatttctgtttggttttccttcctgatgaacagtttctatcctatgtatggagatgggagtgtggtctggagtggggtcaatgtccccgccatgtggctgcctcactttttaatgggctccaaatgacacagagctgggtcacctgggtctcactgcagtttcctggatcagggatactggaaagatgtcatgttccacatggacaccagcctaagctttaggctgacacaaaaagactccctccagcatgcaagtggcatggctcttttttgttaccacgctgttcccttccacttattggtgccagtgcccctcagtcctcctctggtcctgttggtgtccctctccaaatctgaggcctcccttccttagggagagcatcagtcctggagccctccatcgggagctctccattaagaagggcatcttcagaacccagggtggggcccactcgggcagcaggacacacggtgcagcaggagctcaggggctgcaatgcagccactgggtgtgacctaattgggcaccctgggtactgatatcagtattttgtttgtttgtttgtttgttttgcttcctgttctgggaagcaactttgatgcatactgtattcatattctttatgcaacctgactggcttgaccaaaaccaggatttaaacagcagagtaattagagagtttatggaagagaagagtctggggatgttagggacttgggtagagtcctgcccttccaggacattctcctccctgctgcttgctcagtgtctgttgccttccaaggcttctccactaggcaggagatgtggcaacagatagatatgtgccattccagcttcactgcccaaggcaaagatgatttctttctccccaggattttgatattccagggggccatgtgcatgcttaggaccatttctggcatgagctccattcttggctcagcctaggttacagtcatgcatatcagaggctgtgatgagcagggccatgaataattcccaaagcgagggggtctttgggctcattgctgtgtgggccagcccacattatcatacactaaaaatatattttctaaatgccccatgttgtcttcactctcacaagagtcaagaggtgggaggcctggcttttccttattttccttgtgagctaacagagtggcggtacattcgtaaaaaggtgactctaaggaatcccaggcctctcctccactacagctgcttcagggcaggcctcggggctttggcttggcaagacagtttcacccaggtggatgccccttcatacctcccggcttcctgtgctgactccatgccaaccatgccaaggccaaaactcaccaccaaatctgagagcatctgctgtctgcc

SEQ ID NO: 149983 - DNA, 3345 bp, Homo sapiens
gagggagcagtgcccgagcgcggtttctcttaaggttctgcagggcaaggctgtctgggacaggcttggccatggatccgctctcagagctgcaggatgatctgaccttggatgacaccagcgaggctctgaaccagctgaagctggcctccatcgatgagaagaactggccctcggatgaaatgcctgacttccccaagtcagatgactccaaaagcagctccccggaacttgtcacacacctgaagtgggatgacccatactatgacatcgcccggcaccagatcgtggaggtggcaggagatgacaagtatgggcggaagatcattgtgtttagtgcctgtcgaatgccccccagccaccagctcgaccacagcaagctcctggggtacctgaagcacaccctggaccagtacgtggagagtgactacacacttctgtatctgcaccacggcctgaccagcgacaacaagccctccctcagctggctccgtgatgcctaccgggagtttgaccgcaagtacaagaagaacatcaaggccttgtacatcgtgcatccaaccatgttcatcaaaactctgctcatcctcttcaagcccctcatcagcttcaagttcgggcagaagatcttctatgtgaattacctgagcgagctgagcgagcacgtgaagctggagcagctggggatccctcgccaagtgctcaaatatgacgacttcctgaaatccacacagaagagccccgcgacagcccccaagcccatgcccccacggccccccctgcccaaccagcagtttggagtctcgctgcagcacctccaggagaagaatccagagcaggagcccattcccattgtactcagggagactgttgcctacttacaggcccacgctctcaccaccgagggcatcttccggaggtcggccaacacccaagtggtccgggaagtgcagcagaagtacaacatggggctgcctgtggatttcgaccagtacaatgagctgcacctgccagcagtcatcctcaagaccttcctccgggagcttcctgagcccctgctcacctttgacctctacccccatgtggtgggcttcctcaacattgatgaaagccagagggtgccagcgacactgcaggtcctccagacgctgcccgaggagaactaccaggtgcttcgtttcctgactgctttcctggtgcagatttctgcacacagtgaccagaacaagatgaccaacactaacctggctgttgttttcggccctaacctgctgtgggccaaggatgcggccatcaccctcaaggccattaatcccatcaacaccttcaccaagttccttctggatcaccaaggggagctgttcccaagcccggaccccagcgggctctgaacctggcccctgccccaccagccccttctctggtagcccgggtttggactcttcctcctggcatcaggggccatgaagccccctggagagagatgttggagccacccatcaggcatgctctcccccacctctgtccagcccgcctcacggccctggcggcctcgctgttaccagaagacgtttttctctgccttacacttctcactgcctctctggacaccgggcttttgctgggctctccagagctgggcttggctcttccagctggagaaggactgagccccagtaacccctttcctgctttttcctgcctctgtttccctagcaagtgtggatgaatcaaatgactgccggctgggctggtagcaggggccagtcctcccctcttgattgctgggaatgagcagctgagctctttggtgtggacaccgccccaagctgaggtgcctccctatctggtaggctgccctgctttgcagaagccccactgcatgaaggcctgagtgcaagcacccttgctcctgtactgcccccagcagcgcagtctggggtatttcccctgctgaggagtgacagggctggagactgtgtctgctttctgcctcctcttccacacatcctgggtcagcctttcccaagtgatactgcccctggggtgtcctaaccccttggttgtgcagggactggtagcttggatgacatggctcagagtcccagcatccacttgaaacctccctctccacctccccgcccccgagagctacagcgtgtgatggaatcagtgaccggccaggttagcctctcccctcttggcctcctttcccacacgggcagatcatcagccttcatgttcttgtggacctgtctgttacggagtcacactggcccctgccccagccagaggtgactcagtgcctcaggatcttatggctccttcctccagctgggggactcttaaaggggctggggtagagactaagagtgcccgtaggaggggcagagattgtgctgataggtcagtccagataggtgggttctagcaatttccccaggggattaaggggctctagggccacctttttttttttttttctgagatggagtctcgctctgtcaccaggctggagtgcagtggcgcgatctcggcacacctccgccttctgggttcaagcaattctcctgcctcagcctcctgagtagctgggactataggtgcatgccaccatgcccagctaatttttgtatttttagtagagacggggtttcaccatgttggccaggatggtctcgatctcctgacctcatgatccacccacctcggcctcccaaagtgctgggattccaggcgtgagccactgcgcccggccagccctgttgtctttcaaagaacctcggccccagtgatggctgatctcactcccactgtctcgtagaattacactccttcctggggatccctcttcctgcagccttgtccttggggagtacagggaagtacctgcagtgaccctgcccccatgaccttggccaggcaggatgattccagagcccgtactgtggggatcctcactgaccagcccagccccatccgcaagccaggctgggcctgggcataacttcgctgggctctcccaagaccatcagcagtgcatccagccccctggggcctgggctgctgctggttcttcatcagtcccttggtctctagcctcggccagggctgctctgctctccgccctcctttgtgtatcaagtgtcgctcacagccccattcactggggagcctttcggatctatttggtctttctcatgtcccccactggtctgtaccccagggagcgggtgcttgtactgtgtgaatccagtgttcacattcacacttaatgacttccttggcaccaatcatgtatttcaccgtttgcactttttgtatttcaataaaaatgttgatgca

SEQ ID NO: 149984 - DNA, 3669 bp, Homo sapiens
ttttttttttcaacaaggaaatgtatttattttttctttagaatttggctcagaacagtaacaaaaatatttacattaaaataaattaacatgcaattacttaaccatatgtaataatttacgttggaatatattagccttcccatgagtttaataaaaacctaatatttggtttagattcaataccatcctttcaaatatttggtatgaaacttggtagcaatgcaattgtctgatgtacagagcagatttcaccatgagagattacaccaaagaacagatgtccttccagaacattatctcaccccagactcagaaactgagcagccaagcttccttcccaggaatcaccatggaatgtctgaacaataaccaggcctggagattactgcagggctggcagagttttaggaatcagccaaactctttttcacactaacccactaggaaggatatagttcaaatgtaatgttgagtccttcagtttatttgaacactgaaacaatatgttgtagaaaccttcattttccaaaatagaaatctgaaagatatatgcacatgatttcttagatcatctaaaagtacccataaaaacctgtcactagggccaggtgtgatggcttacacctgtaatccagcaccttgggaggcagaggcgggcggatcacctgaggtcaggagttcaagaccagcctggccaacatggtgaaaccctgtccactaaaaatacaaaaaaaaatcagccgggcgtggtgcatgtgcccgcaatcccagccactcaagaggctgaggcaggagaatcaccgaacccggggggcagaggttgcattgagccactgcactccagcctggggttcatgccattctcctgcctcagcctcccgagtagctggacccgccaccacacccagctaattttttgtatttttagtagagacggggtttcaccatgtttcaccatgttagccagggcggtctcgatctcctgacctcgtgatccgcccgcctcggcctcccaaagtgctgggattacaggcgtgagccactgtgcccggcctggaaggattattaatgcaaacttcaggatgaagtgatatcccagcaaggcctgaaggtctcagtggtattaatacattagtaagcagagttctaagaaggcttcctctctattattgtagctgctttggcacagaaaattgtgactgtaacttacagggtttgagctaaaatgacccctagtaagaagacatcagaaagaatagcatctacaaaaataggagtggggaaaggtgactctggaagaggagaccaaaagtgaaaacatttctctgccaaagtcacctgcagttcaataccagatttgattgttaagaaacggtcatcctaaagacaagaacttgattccactcaggagctctggagagaaggtccatgtctgttcctggaggtctagtagatcctgcgtgttgtgtagtccagaaccatgctggcagcacccagcagggcggggtcaaccaaatccgaaaccaccacatccacgtcctgcacggaggacaaggcctgctggcgaatgacgtctttgacaatgtggatatagtgactggccaggactccggagaggatcacaagggagggattcatggtatggaggatgttcacaaccccaagacccaaagctgttccagctgttcttaggatgctctgggccttcgcattgccaagtttcgcagcttggatgagatggagcgcacccacagcctcatcttttggcactgacatcccttccaccaagagcaggtcctcatcatggagcttttttgcctccctctgcaaggccattccagaggcgtatgcttcaatgcacccatggcttccacaggaacaatcaggcccatccagagacacaacaaggtggcccagttctgcagcacagaaggagcttccgtggatcaattcatgctgatggataattccaccaccgattcctgtgcctgtgataagtgtaacaaagttttccagtccctttccttggccaaatttcctttccgccagggcagcacagttgccatcattgtctacccacacagggagatgcaaagtgtcagaaaggggggtcctaaggtccacagagttccactcttggatcagtttggttgaatgcagcacaattccttcccgaggatttacacggccacctgtggaaatgcctactcccaaaattctgcagttcagttttacagcttctgctgcagcttccacacacatctgtaggattaaattaatcctctcttcataggttttaggattgaactgagtatacttcttaactatttcacccttcatgctgactattgcaactcggaggttcgtcccgccaagatcaacggccaaggcacttagagtttcaagaatatggtcaatatcttgagagatattctccttcacaggaggaaagcagaatttcttttgcagtggctcttgaagatcgatagatttgagaaacttcaaaatccttggaacagcatttccatccccatatatctttgaacaagggtactgtttaccaaactgaaggtgcagtgcttgcaatattttgtcttgggtgtcagcatcccggacatgaagaacattctcccctgtttctcttccaatctgacgtgttcccaggttgatcacaggtgttccaaaagctccaacttctcgaaccccacagctgctgttcccaatcatacagccagcatgggcaaccaactgtataaactggtcaaatgggacgtgtttaactgcacgaaagttgggatgatgctcaatgcccttcttccgcatcactcgaaccatctctttgctccctgcgtcaatatttggaaacaggactagggtccgcttgttaaatgagataagtgcatccaatgttaattcaaacatttttatggaatgcttaatgtcagtggtcacagggtgctgtagtgcaacaatgtaatctttagattttacatcatcacctagccacatgcgaatgatgctcatgtagtctttgttcttggctgagagaagtttgtcataggaagggcagcctgccaaaaggatgcgatcatggtcctcacacatggatatcaggtgctgctctgcactgcgggtgcagcacacatgataatgagccagttttgttatggcatgtctgatagagtcatcaatggtcccactgacttccccaccttcaatgtgaaggattcggatgttcatcaaggcagcagatgtggccagagccagggcatcaaacctgtctccatgaacaatcatgatatcaggcttcaggcgattaaggacatctggcagcttcactagggccaggcctactgactccaccatggctgcctcatcttctcccctcacaattgtgtgtagcctggtgttaatgtcaaagtcatcttgttcaatcattcgatatgtatttccatagtcatctatcaggtgagagccaagtaccacaacatcaagttcaaagaactcaggttcggttttaatgccaaacatgatcggggcaagtttagaataatctgcacggttacaagtagcaacacaaacccgcagctttcggttatttccattcttctccatgatttgcttgtttcgttttgagaggttcttaaaatagagttccagacgccg

SEQ ID NO: 149985 - DNA, 1991 bp, Homo sapiens
ggcagacaggaagacttctgaagaacaaatcagcctggtcaccagcttttcggaacagcagagacacagagggcagtcatgagtgaggtcaccaagaattccctggagaaaatccttccacagctgaaatgccatttcacctggaacttattcaaggaagacagtgtctcaagggatctagaagatagagtgtgtaaccagattgaatttttaaacactgagttcaaagctacaatgtacaacttgttggcctacataaaacacctagatggtaacaacgaggcagccctggaatgcttacggcaagctgaagagttaatccagcaagaacatgctgaccaagcagaaatcagaagtctagtcacttggggaaactacgcctgggtctactatcacttgggcagactctcagatgctcagatttatgtagataaggtgaaacaaacctgcaagaaattttcaaatccatacagtattgagtattctgaacttgactgtgaggaagggtggacacaactgaagtgtggaagaaatgaaagggcgaaggtgtgttttgagaaggctctggaagaaaagcccaacaacccagaattctcctctggactggcaattgcgatgtaccatctggataatcacccagagaaacagttctctactgatgttttgaagcaggccattgagctgagtcctgataaccaatacgtcaaggttctcttgggcctgaaactgcagaagatgaataaagaagctgaaggagagcagtttgttgaagaagccttggaaaagtctccttgccaaacagatgtcctccgcagtgcagccaaattttacagaagaaaaggtgacctagacaaagctattgaactgtttcaacgggtgttggaatccacaccaaacaatggctacctctatcaccagattgggtgctgctacaaggcaaaagtaagacaaatgcagaatacaggagaatctgaagctagtggaaataaagagatgattgaagcactaaagcaatatgctatggactattcgaataaagctcttgagaagggactgaatcctctgaatgcatactccgatctcgctgagttcctggagacggaatgttatcagacaccattcaataaggaagtccctgatgctgaaaagcaacaatcccatcagcgctactgcaaccttcagaaatataatgggaagtctgaagacactgctgtgcaacatggtttagagggtttgtccataagcaaaaaatcaactgacaaggaagagatcaaagaccaaccacagaatgtatccgaaaatctgcttccacaaaatgcaccaaattattggtatcttcaaggattaattcataagcagaatggagatctgctgcaagcagccaaatgttatgagaaggaactgggccgcctgctaagggatgccccttcaggcataggcagtattttcctgtcagcatctgagcttgaggatggtagtgaggaaatgggccagggcgcagtcagctccagtcccagagagctcctctctaactcagagcaactgaactgagacagaggaggaaaacagagcatcagaagcctgcagtggtggttgtgacgggtaggaggataggaagacagggggccccaacctgggattgctgagcagggaagctttgcatgttgctctaaggtacatttttaaagagttgttttttggccgggcgcagtggctcatgcctgtaatcccagcactttgggaggccgaggtgggcggatcacgaggtctggagtttgagaccatcctggctaacacagtgaaatcccgtctctactaaaaatacaaaaaattagccaggcgtggtggctggcacctgtagtcccagctacttgggaggctgaggcaggagaatggcgtgaacctggaaggaagaggttgcagtgagccaagattgcgccccctgcactccagcctgggcaacagagcaagactccatctcaaaaaaaaaa

SEQ ID NO: 149986 - DNA, 1502 bp, Homo sapiens; identical to SEQ ID NO: 148387

SEQ ID NO: 149987 - DNA, 2553 bp, Homo sapiens
tttttttttttttttttattgttaacaattataaacatttattaagcaccaagaatatactgtggtggttgctatatgaaaacataattaccaatatagtatccctgccattgagcttacaatctaaaacgaaatacaaggctatgagcctatctaaaaacttccttaacttagaaatggctactttggcaaatgagtgaggcaaaatgacctattattcaggtgcagtgctaataaggctttgaatatcatccaaagaatgttttacttgtacccattgttcctgattatgttacacttgctaagaaaaacagtacttagaattttggcatgaacaatgaattatttcaaattgtcttgtaggactttaaacaaagagatgcttactggcctaagttttccagcagccagggaaagccctattaaaaatattatgaactagaccaagtttctcttttaatccacttacacttttttttttttttttgagacggagtcttgctctgtcgcccaggctggagtgcagtggtgcaatctcggctcactgcaagctccgcctcctgggttcaagccattctcctacctcagcctcccgagtagctgggactacaagcgcccgccaccacgcctggctaatgtttttttttgtatttttagtagagacggggtttcaccttgttagccaggatagtctggatctcctgacctcgtgatccgcccccctcggcctcccaaagtgctgggattacaggcatgagccaccacgcccggcccacttacactttttaaacttcttcctcttctcctatacctaagggctccaatgatactacttatcagggaagaaagtactgtatctagataaactacccttaagtattacaggcttagcaagttgaatttctagaaaatactcattcataatttatttatttattttttttgagacagagtcttgctctgttgcccaggctggagtgcagtggcgtgatcttggctcactgcaagctctgcctcccgggttcccaccattctcctgcctcagcctcccgagtagctgggactgcaggtgcccgccaccacgcccggctaaattttttttgtatttttagtagagacggggtttcaccatgttagccaggatggtctcgatctcctgacctcgtgatccacccgcctcggcctcccaaagtgctgggattacaggcgtgagccaccgcgcccggccccctcctccccaatttttcatacagttgcccctatacaatatacacacccttgagggcaggtagaagtccagcccacctgcgccagggacgctgtggggagcatttttctctgagttgctaagagaaccctgatgggcggtgagcagaggaaccacagaacagccagggctcaaggctggcagcggataggccaggagagatcgctaggccccagaaagccccctactttcagtcagggtgggcaagagggtcttcgcagtgaagtgggaggcaggccctggaggagggagccagggagacccctgggagccctgaggttgggggccaggcagggagatggggatagcagctgcctcagtacttggggaccttgctgtagtcttcggaatggacgtgccggcacaagcagatggacaggaccatccccaggagctcgatgatggccacacccacgcccacgccgaggatgatgcccaggttctcctgcagccacgcctgcaccttctccatgcagccctcctggtacacaggccagtcctcagggtggttgccactctgggtcctgttgccgggggcctcgcagaagcccttcctcacagaaaggctgttgtcctcttcccccttgacttcgcaggaacaggggtaggtgacctcagggcgattcatgagctcagcgttgtctgtccagttgtagaagctgacccagccgcagcacttcacctgagcctgcacgtagtcccaggcatcctgcaggctgtcctcgcgactgctgttgtagtctcgaatgagctcagtcacgatgccgcccatctcctgcttcagcttgcccatgttgaagtagaagagggccccggccgtcacctgggcaatgaggatcaggagcaggaaagcaaagtacagccccagcaggcagcggacctcgttgacggcgccgatgcagcccaggaagcccatgagcatagtgactgcccccacgccgatgaagacataggcccccatcctaagcgagctggaggaggtttgcaggacagagatgaaactgctcttgtcggccaggatccacaccccgaagcccaggatcactgcgcccaggataaagaagatcaagttgaagaggaagagaaagtatttggtgactttgatacaggctgagcccatcccgccagtcctggagcttccttccacgaaaccagtgcagctggtcacagggcccacttctgcctgtgcccacgtgtcgtccacacagcagcagggaggactctgcgggttctgctttctgctccgcgctgcaggcccagcgtcacccgctcgtgcctcagtcggc

SEQ ID NO: 149988 - DNA, 22525 bp, Homo sapiens
  misc_feature (1)...(22525): n = a,t,c or g
ctagtggcagccacaggcccggaccaccatgtttctgtatttcttcaggatgacgttggagctgtcatcgaagtagaggacggagatggcattgagctgcgtgggcgcacagcagggcttgggcaccgtttccgggttgatgaagtggacctgaaacacacaccaaaacatgggcagtggtgagaagcggtgagtcgttctaactggcctccacgtttctataaagaaacatcctgtctgggcataatgaatgactgcaggtgacactccccaagccaagcactccctgttctaagcactttacatggacaactcagttctgggattatccctgttttgcagacaaggggaacaaagcatagaggttttcacattatacagtggggaaggaaggggccagatccgacattcaggaccaggtaattctctgttggggaactgccctgtgcactgtagattgctgaatagtgtccctgacttggacccactagaagtgctccatcttgctcatggacttctctgcaccttacagaggatgtgggacagggacacatagactcaaatgcctatgagtgcctcgtgaggtccactgataagcaaaatagaccgaggtaagacaatagggaatagcggggactaagcaaactaagggaagaccgccactcaacctaagctgacggcagccaaccaagatcagtgttagcagatctgccacgtgttcaagacagggccagagattccactgtcctgttgttttcaacgtgaaacttctgggtttccagcaactgtaggtgccaggcttgagcatcagtgactggcactctgttaccacctccaggctgtgactgctgacataggccagcatgctttttacacattttatgatggacaatttcaaactcttacacatccatacccttccccacctgctccaccttgaatgattttaaagcaaattccagccatcagctcatttcctctggaagcatttcatcaggactctctagaagacagttgcccccttttaaacatgaccacaatcgcatcatttcacaatccctggagaattcactttgatcctgcagatctctggtgaaatactgatggaagtaggtgcacacagggcgatggcactcctgttccatgggccatgaaggcaggggttggagaaggatagagatgtgtcccctggcagccggggagacatgcctggcaccttccaggggatactggcacagcacagcacatccaggccagggaacaggttggggaggactcttctgtttccagcctaaggaccttcaatcccaatgagggctttgaagtttcaattgaggaggggagcaagggctttggaaaaccaacacttaaaaaaacaaacaaagaaacaaaaacccctgccctcaaagagcagaatcaaatgaaagggatagatgagatttttctccaggacttaacacacaggacagggacaagaaaagaaggaggcagattactaaatgaaaggagggagtagtcctggtagtgagctctctgtcactagaagcattcaaggcagggtggatgatcagtaggcaggaaaggctcagatgatgttcatgacagggagctacataaccaaggtccttgaaccttggattctaagcaaaaggacaaaatccctaacagctcttatcaactatggttgctgttggcagagcaggaataacacctactgagtgtcgccgtgactgggcacgttaatctcattatcacatggaatcttcctggtgacccgactgaaatttaacttgaaatggcccatgggtccccactcatctctccatcccattatcctgctggcccgcttctgatcactgtgcccctcactgaaatttctcatctgtttacctgtttcctctactggaaaatgaagcaggggcccagtgctcttaggcaccgtaaccagcacccacaatactacaagcatcctcaaaggagcccatacaacttttagttactttaaaaattaggagaaataaatgaactccagggtcgaagattatactcctctttataccaaaccagtcataaagtacaatttttgatttttttttaacggcgcaaggggcccccaaaagtcatgacatggcaatgggctgacatctactcaggccccagcttggaggcagcaggatctggtggccccgcagcctgcccggcccaggtgaccacaccccaagatggcgtgacacccaccagcgtctgcacgatggcgtggttggtggcgttcatgtaggagttcagagggaaggcacactccccctcacagtagtagcgcgcgtagccttcaggcgcgatgatccagtcctgaggaggagaagagagtgtgggaaaccatgcagaagcctgagcacagcatcccaaccccatgctgaaagaaaccaccacgaaggctcacgaccaaggtgaaagcctcagaccatgccttctgagcagcagggcccagcaggggcaggaaacatgggtggcctctcatggtcccaaaagaatggaaagaaggaccactctatagtcttggcctatagtccaagcttagtagactgagtgggaagacggctcaaagctgcggtgacgtatgatcacaccactgcaccccagcctgggtgacagagcaagaccccatttctaaaaaaacataaaataaaaatgaaggaaagccccacgggcttggctgatcctaaaatggacatccatggctgtgtcttctggacagaacgcggcacaggaaggagcctccggtgtgaggcaatcatcagctctacccccactaggtggtcacacactggcagttcaccttaaacaaacctccatgcctcggtttgcccacctgccagagaggctaataactcataatggcatcacccatgctggctccgggtgcactggtcagtaagggatccatgtgccatccttgcctctagggtctgggtggcacagaaatgttgcccaataatcaatatactcctcagtgatgcttaagcacatggaatcttccagcagaggcccctggagtttgggttctgtcccagctgcaggtagatgtggtcatcagtcctgagggcaggctcacaggagggctcagagctggctgtgtgcacgtacgccctgagtgtgtctgggcataatccccagggaagattctggactctcccactgaactacaagctccctgagggtagaataccaccagttgccctgatgacctcatgacaataccctctccagggatatttgagccccacagggcagacacattgcagtgttcatcgctgcatctccaatccagtacctagaacagggcccagaacgctcgagatgctcgtgactgctgaatgagaatcacgatccagagctcacggcaggtggatcacatgaccctcactcctctcctagattcatcccctgccttttgcctcactccatgcaaatggctccagagggggcagccatgtgccagtaacatgaccccacccctgaaacagttgactggttcaggaacaagcgcctgaaccaagctggggagatccgtccctcccgtgggaatgggaatggggtaaatgaagtcagagggcagagggggagatggctccccaggtatctacattcaaacacacggcccggcatcatcttgagaagcagccagccaagggatgggaatgaggtgcatgcagagaatggggttcagagtccaaagtgtttgggttcctggttcgagttcaagtctcaaccacatttctgctctcggatttcatgaggcctccctgtatccttagcccaagtccccttccctagcgaggccacttgatactggagtcttaactggcagagatgagaaacaagactgagcacagcacccgctgcctgtgggagcccacgccagagggcccacacccaagacagacccagccagccccttacctgccagcccaggtctcggaagctgacatacagctcgtgcttcttacaaggcctgcctctggtgcctgctgctgttctctgcattgacaaggaagtgaagaagcagagcccagtgaggagaaagaaacacacacacatcaaagttcctccatcttaggcagtgatgtgaacagcaatgaagcacagaacggctggggggtaaatttcccgattcaaaagccagttcgagggtctaacctgccttaaaactcatttctacccccagcaaaggccctactaagggaggtgccaatgccccattcctctctcatgtagtcttatcccataatactttctggaaccttctgcggacactggtttcttttatacacgtgtgttgtttaaatgctacatctgcctggattccataagggaatcgaaacccctccagcctcacacaaggccactgcaggcgccctgctcaaagagatctgcttatgaacaacctcaactcgtgaggccccaacacactcatccctctgcaggggcaagaggatgcgggacagggcctgggacaagcaaccatcaccaccaccagcaagaagaaatgagacagcagagagtcaaaacctgatgacctttcagaagaaaacactcccgaggtttctttgagtagtgaaaatgatacagggggttttccagaactacgtaaatttggaagcattcgggtcagggcctgagcacttgtaaacattgagaagtgtctgtctgtctgtcttgtctctctctcacacacactgcaaccttccttccaccccacaacagagggattgcttttttcctagtcatgacctgtctttcctccacctacaacttcccaggggctctctgtcatactcagagcaggcccaggctgtgcctgctgacagggcccggtgtgctctgacaactgattgaccaaacaccaagctcactcccacgcagggctcttgcatgtgccgtttcctccacctgcaatgcccctccctgcaatctttgttgtgtctgctcaagccttggttccaatgtcaccttctcaaagaggctttgtaaagtcactattagatccccaaagctaagctcatcagtgcacatcctgtccaggagtcaggaagtggttcaggaagggcaagtgacccaacacaaactaaaagacatagagacttctggaaaaagttcccacattcctaagaaagacccatggagagacattcattctcttcctcctactgcccaggagcaaaaaataatgaagcccccctggccaactacagctgtggccttgagaggaagcagcactgaagatggtggggtggggcagaaggagctggggctcagaggacactgttgagctcctggatcaaccaaccctaatgtccacccaaccttagctctgcgggctggtgaattttctactggttgaagcgcatttgacttgggtttctgatgtctacagccaaacctcaacccatcccaactggctgccctgtgaaggctcatcccatatagaaaacggcagtctgcttgagcccagtgtcgcccttagaggtgtagaccctggagacagtcagcctctgagtggagtctaactcgtgagtcaagaccaggtcttggggactgctcgagctctcggagtcaaacccccagctctccttagatcttcggactcctggtttgctaaaatcgaagagagctcagagcatcttggtgagcactgaatgattttagtcagtctcctgcggtcgccggggcctgctgggttcctgtggtgggtctgtgatccctcccacctaagataccctgccacgttggccatccgagggcttcctggttcttgggcgtcttggagcggttctggctgcgctgtttgctccccgtggaccggatgctgcggaagtggacctccgtggccttgaagaaagccaccatgaagggctgcttgttctggggcccgtgccgcccaatcaggcccgccaacttggggttgatcgtctgccctggacaggaagcagccaagtgcacagaagagcagttacaggagggccacgagcgggacagggctgcaggatcaaaaggctgaacatggagtactggttgggaggggcggggaagcctgtttgtagtgaagcaagcatgagcactgctgagaccctcctgaagtccaggagcacaggctgcattaggactggcagtggcgggggactcaccatccagcgtctccaccgagagctgcaggcccaggttgtgccgcggattgaccacccagtggttgctggtggctgtgatgtcaaacaccagccagccctcctccgaggcccagaggtacggctgtcgagcaggaagagatccgattccctgcgagagaggaggagagacacgggcttcgcgttagcaggtcacagctccactaccccaacagatgggaagcagagctcatggggtgggaggggagggaaaccctcaccaccttcttcctctgcccccagaggaaactcagcacctctcccagatacccgtatagcacccacctgcccaagtgctcctggagcacctgataaacgctgatccggaacgtctcattgtcgaagcgttcccggatgtagtccttgtagatccggaattcggctgccgtgacagcttccccttctgggatcttggaaagatcaaaccggaactctcgatggtggtagcgtgggtggaagaattccttgtcatgttccactggaagaggaagagaacacacaccaacaccgacagctcattagtgtctgggtttcactctctggctctgagtctaagcatcttgcctaagctagatggaggcatgcccattgccagtgaccccagtgacaactgctccttcctcaccaacacactgtagactggagggtcacaggctcagacccatggtccccatggtcatcctgaacgacaagagcatgattctgcatccaacctgctgggaaaagtagggcactaaccacagccatccaagaggtcctggaagcttcttaagtagcacaggctctggatgtgagcagtggccttgttcctgatcccaacaccgtgcctggctctaagaggtgccctgtaagcctgtgatgaaagaagaggtgaaggtgggggaaggaggggagggtagactatgttattgaaaattgtagatcttctccttcgagtctagagtttgactcctttaattaactgagatacttagaggtcatttccaaagccagagtaagtgccacagcttctcatcttgaaactctgcccctgttatcaagatgctttccaggaggcttcagttcacttgctggtccttctctttttcagaccattgagccaaaagtgaaagttttcatcttcaaccttaaaacctcccagactgcccctccaccatgaagaacccagccagtctgctcttcagcctttttgaaggtgagtgggccattgctgaagaggttttgagtgacatctggtgcactggtgtgctaggtagcagtcttgaaagtccggggttccaatgggaggaggagcatgggaggaagactagtctaaaagcccaccccagactgggttagtgtactatgccttcctactgatggtcccttgcaaccatcccccattgacccaagaaagaggagaggttcgacacaaggatgcctcttatggacataaagatagttaggcctcagctgtgagttgtaagcatggaaaatcatctttgcctccttttattacctctccctccaaggtctctcatctctgctcctcttggcagggctttcctctgcccgtctctctccagccagccctctccacttacccttgttccatgtccccattatctcagtttgcacatggccctggtgggtacctgaccaagatgctaagaactttcaagtgtaggactcacagctcaagggccatcttcctagtgtctcttagttcaaattcttgaaagtgaatctgattgttggccatggatcaggaggctgcttctggtccaatcaagtcaggggaaaggtggggtctatgatagcattagctggcagtcactggagactctgcaagaagggaggaaggggcagagaggaatgtgcctgagggccctgatattcactcttgtctgtctgtcactcttgtccataggccagagtatgggagaagtcagtagtgttctttctaccactgtgtcttagtctgtcttgtgttgctataatagaatactctagactgcgtaatttatagagaaaaaaggtttatttagctcatggttctggggactgggaagttcaagatcaggcagccacatctggtcagcttctggtgagggcctcatgctgcatcctaacctggcagagaagtggaaggggaaggaagtgcctgcaaacagataaaacaccagaagcagcctcactttataacaaccactgtatggtaactaatccagtcccactagaatgggaactcactcactccctggagactgcactaatccctgaaggtggatccctcatgacccaaatgcctcttaaaagtccataacctctcaataatgttacactggcaattaaatttcaacatgagtttttgtagggacaaaccacatccaaaccatagcacacctggaccccatcccagcattgggttgctccacagggcccctgaagtttatccatagataccatttaataatgcttatctgaactcacctttgatggcataacaatttctgttcttagatcccacctctctctaagtggttaaaattgtaccttttctgtttatgcgtattttaccacaattttaaaaatattccacccctttctgatctttgagttcttctaaatcaattgttcccaaagttgtggtcccaagaccgacgactaacacttagactcacctggagctcattagaaatgcatattcttgagccctacttgagacctactgactcaagacactcttggggtggaccagcaacctgtgttttaacaagctctacagatgattttgattcaccttgaagtttgagaaccacttttaagtaataagtaagtagaattcacttctaagcttttaaagtcgttagcccatggtattttccaaaggggcttggaaccactgcttgagtttgggtgtgtcgtatgagcgaggaaaactgttgatttcagacttcgatgttcttagttggcatttacatagagttaattcaatttcttctcttacagccataaataaagaccaagtgctcaccattgggtttgatattaatgagtttctgagttgttcatcaagttccaagaaaaggtaatgtcaggttgcctattgaactatcaataactgatatttgtagaatactctgtttcttttacatgtataatcttataggactgttgtcatcaactcttgggccaccaagttgtttattgccattcaattgatgagaaacaaagactcagaaagaaagtagggagtctcttactgagtggactcacgaggttctgctttctcatctgtcagtttcgcccaactgtgcgcaactagcatgatggctcacacctgtaatcccggcactctggtaggcaaaggtgggaagattgcttgagtccaggagttcaagactgggctgggcaacatggtgaaactctgtctctacaaaaaattacaaaaatacaaaaattagccaggcatagtggtgcatgcctatggtcccagctacttgggagactgaggtcagaggatcgcttgagcccaggaggcagaaggtgctgtgagccgagatttggccactgcaccagctaggatttgaactcctgccttctagtttaagatcttgctggagtcagtgtgagcttgtggaagagtggccaggttaaagatagatctgaccatcccactgaagttacatgatgagtaagagaaatgggttctctgtgcccatttcctcaatatgaagggtgaaacatcctccctggaaggagacagcatagacaggaaagccagctgttgctgcaagccagatgcctaactcgacaacattctaggacagaggtttgaatctatggtggggttgtaaataatatcttactgagtgactcaagtgcccaaagtttgcaaatgatatctttaaaaaattagagcagattccgggcacggtggctcacgcctgtaatcccagcactttgggaggccgaggcgggcggatcacaaggtcaggagatcgagaccatcctggctaacctggtgaaaccccgtctctactaaaaatacaaaaaaattagctgcgcgtggtggtgagcgcctgtagtcccagctactggggaggctgaggcaggagaatggcgtgaaccctggaggtctgagcttgcagtgagctgagatcgcgccattgcactccagcctgggtgatggagcgagactccatctccaaaaaaaaaaaaaattagagcaggttttgaggttgtgcccataattacattgctttcatgcacgcatatcccaatacgctcttgagtgaatgagaaaagaatggcatggtagccagcactgggaattcccagaacctcagcgctcctggagggatgttacatgcatgaagttcatgctccatcccttagggtgggacaaaagctggagacaataattgacttccagaccttcgactagagttctctttgtcactcacctctgatatttccagggcagccctgttcagggtcattcagtgccaacacctctttgtacctttccctcttccagtacttgactgtcctgagccatatcctccttctattgttccatcctctcaatccacttcaaatcagcagttcagatcaacatgatttgcaatccaaggaaaaacactatagcagtactttctcagcaaactcagtggccagacaagtctcctacacctccccccaaccctctccaaccctactgccacccccaagtccctcctatggagaaattccaagctacaacaggatagaagggacaggccatttatttgtgtgctgctgcttagcagaaattaaaggccaacattagaagcatctacaggaagtgtctcgccaaactgcagcccaggtcttcacctaactaatgacctcgagtttagggacagagagagaaagaaaacaaggtcagtgcgctctgttaaaagccactctgccatctaatttggagtgatgtcccagaaagctagacctgagaaagtcagggtccccaaagcccaaagccagcctgactgattaagaggctcagacaagccggtctttgtcctttcaagatgaaagaaatggattgaaaggtgtatgtacagccagaggaggaaaaccacccagctgtggccttcccaaacaagtcccagcttgctcctgccgccatggggggagcaaatagcccgcaccaaagttcccagaggcaccctccgagcaacctggtctttctcttggggacagggagccccgggcctagcccacactgccggcccataagcactgggggcttttttgctcttggtttgcagggccttctgcagaagccagagattacaaatacctttttaatgattccagccaggctctgaaggcagccactgggacctgcacattcagtgggagtccggggtacccaacagaagggaagatgctataaatcccccaccagagaaagggccctggctaaccccaggcttcaggagggcgacagagctctgcggttcattatttatatgtatgtatttggaattttcctttattttttggtatagttaataaatacacattgttttaaaaaaatcacaaatacagaagtgcagacgacgaaaaatcagaccccacctcccactccgtaagccccagctatgcccccgccatatacccctccagtaaaatctctctccagttcctggtgtcttcctccaggaggacacgatgatatacaagcacacatgcagcccactcatctgcaccttgcttctttccacctcatacatcttggagatggttctaaatcaggtcatatattgctgcttccttcttaactggctgcttagtataatttaaacttttttgaaggtaattttggcatctaaacctccctccccttgcctcgctgaagcttggttcactagttggatttagttattattaagtacagacaatggctcccgggaactccagggaccttatcaggaggaggggaagcatgaaggcggatctgcgcttcccccgcgcccccagtccacgccccaggtgcccagcgtggggcttcagtatcattatttccatgttgacacaggcccgtgggcgtgagtttgctgtcttgacttggttcgggttttcgcagcaagttacacaagtagaatgaaagcggctcaggaaacagcgctatcggggtgtgttatctcggaaaccaaatatttgatcatcagtcccagcccgtgcgctgctccggggggttagtttgagcaagtctggagaatgtgcgcgcacatatggagggggagctccccggccctcggctgcagccccaggctgccgtcgccggggtcgtcgcggctccagtcggaaaccgggacccccaggcccccgcggtcgtcagctctgagatcccgcgcaacccaatcgccaaaacctgtggtttgcgcgccacacgtggtaaatgctgaaaatagattctgccggcccgggacctaccactaaatacttaaaatagaagactagcggcagggcacagcttcacgcctgtaatcccagcaccactttgggaggctgaggcgggaggatcacctgagatcgggagttcgagaccagcctgcctaacatggagaaaccctgtctctactaaaaatacaaaaacaaaattagctgggtgtggtggtgggggtgggcgcctgtgatcccagctacgtgggaggctgaggcagcagactggtgtgaacccgggaggtggagcttgcagtgagccgagatcgcgccactgcactccactccagcctgggcgagcaagagtgaaactccgtctcaaaaaaaaaaaaaaaaaaaaaacaccaccaccaaaaaaccaaaagaatgaacaagaagagtgagactatttaatagcacaacggggtgactataatcaataataacttaagtgtatattttaaaataactaaggtgataaataactaacagtaaaataggattgtttgtaacacaaaggataaatgcttaagatggatgccccattctccatgatgtgattattatgtattgcatgcctgtatcaaaacatctcatgaaccccataaatatatacacctagtatgtaaccacaaacatttagaatttgggaaataaacatcccctctnacccatgcagattgcttctcctttggtggtgataaccacaatctcctgattgacctcaatgccgtcctcatatcgaataacacctggaagcataatcttggccccatagcagatggcatttacctgcagagatggcaccaagtgtaaggggcccagctgctgccctccaccccactcccacaccagagtaaaggaggacaacaagggagtggggcctgacaccaggaaacagggatgacacttatagcccactagctgcaaggggcatgagtggtactcagaagagccacctcactgtgctataggtaccactctccgcacattacacacgactcaaaagtagtaaagaagactttcaggttttcaggttctagagactcacaagtattttcttttttttttttttttttttaattttcaggcagaacctccctctgttgtccagggtggagtgcagtggcacattctcggctcactgcaacctccatctcccaagttcaagtgattctcagtctcccaaggagctgggattacaggcacgtgccaccacgcccagctaatttttgtatttttaatagagacagggtttcaccatattgcccaggctggtctcaaactcctgagctcaagcaatttgcctggcccggcctcccaaagcgctgggattatgggtgtgagccaccgcacgtggtccatattttcatttgaaacataaaaatagccttggcattccttaattactcctctctcctccttatgaggagaaagaacagatttactggagatccaggcaataacaggctcttaaagaacttgagaacaagattactgagccctgttgaaccaatcacacaaaagtcttggtgcagaatttataggtcagtgggtacaagttaaggctacctctccagaggttcaatggtacccaatgcacccatctgcctcataccatctccactcacctagacctcttttgatcacattctcccctccctttacattcacccagaagccaatggtttgataaggagaggacatcacatttatgttgtccactgttttgtgactgagttttttcaactattatggtgccatctttcagtatttattacagcctatacacatacaaaaaatgtgaacatctatacaagatttgaatataaataattaccaactacaaacattttaaatatccagaaatttttatccctcaagttagagaaaaagacaatgttttaatttataaaaggccaactctctgatcatcataaaaacacagctcacagccttgatctcctgggctcaagctggtctcaaactccttcctggactcaagtgatcctcttgcctcagcctgccaaagtgctaggattataggcatcagccactgtgcctggcctaatgtgccttatttttaagtatgcctaccattaaacttttactttaaattaatatacttggtttggacttgaaaaaaataaaataaaacccaaggaaaacaataaaaagagcaagcgtcatctttggagtacgttctttccaaatataaactcctaacccggaacttactgcactgtctttcataaccagccgtttatgagatgtcaacagcttttccaaagggtaaacaactcgccgtaggtaactctcatccttgtggttatcatacagccactgagcatcaagcacatcatgcattgtcaccatgtggtcctgaaaagcagccatgtatgaaaataattcagtttatttgtatctcagcccatcagaccccaaacttcctaaaactgaatgtcacttgtttactagtccaagctcattatgttttcagcctcttcagtcctggctcttccaggcatctttttttttttttttttttttttttgagacggagtctcgctctctcgctctgtctcccaggttcggactgcggactgcagtggcacaatctcggctcactgcaagctccacctcccggggttcacgccattctcctgccttcagcttcgggagtagctggcactacaggcgcccgctatccgcgcccggctaattttttgtgtgtatttttttagtagagacgggggtttcacggtgttagccaggcctggtctcgatctcctgacctcgtggatccgcccgcctcggcctcccaaagtgctgggattacaggtgtgagccaccgcgccctcttccaggcatctttaaccgttgaagtattagaccccaagcaggcatttttgtaggctgggaggcaaatgaatagaataatactttctacccaatcatctcccttagcccattttaatgtcccaaagtttaattaacagaacagggaagctgccctggactgaactcaacactttggaaagcatctttcccacgacatgaagcaagtggagtgccatcaaaggctggcagatggtaagaaccagctctaaaacttctagccccgtaacacataccttttcactcatgactccagaacgaaccctccgaagctcctgcatctgaccaccaactcccaataacaaaccaaggtgcacacataatgtccgactgtaggtgtcagcctcacaactcacccaaaagattcctaagatacacacacacaaaagaaaagcagcacctactgtaaatacatcactggttgagaaatgcagttatccttcatctgagccaccaagactagaggtgacagacacacttcttaaaatataagcatttgctgtaaagatctgtaattctggccaggcacggtggctcacgcctgtaattccagcactttgggaggcagaggcgggtggatcacgacgtcaggaggtcaagaccatcctggctaacatggtgaaaccccgtctctactaaatgtacaaaaaattagccgggcatgatggcgggcgcctatagtcccagctacttgggaggctgaggcaggaaaatggtgtgaacccgggagacagagtttgcagtgagccgagatcatgccaccgcactccagcctgggcgacagagcgagactccgtctcaaaaaaaaaaaaaaaaaaaaaaagatctgtaattctgatattagcagaatttttaacacttaagttgcaggtatattcagcatggtatgtttcatggatgggaggaaaattggcattgtcttaaatttacttctgacaacagaaacttctaagcagtcaaaattgcagcaaataaaaaacacatgcaaaacatactttggtgaaaacacttacctttgaacaaagcaccgaactacacaaatgcagaatgaaaacatttcaactccagcagaagcagtcatcataaaaggtgtaaaagccatctcactttactaggcactgttcactttttcaacaaaagataacaaaaactatcgcccacagacaatatcccagctgtagggcaggttttagaaagtcttcaacttcaagggcatctacttttaataagagaacagaatcctgaagaatgtgttcatacccactcacaggcctaatgactcacctaatcttctttcaggatcgtattcaatcattttgctctcgtagatggtcctcactcggagctgcctctttactgcagcaataagtgggggtcgctggaataaggcacctgtcagagtttctagggcctaagaacaaacacaaatgaaaacaaacacctcatcagaatgtacatgtgcagtcactggtccaggctggctgcagcagccgactgaaaaggggacaaaaggagtcagtcaggacagctaacccatctccagatgtttaggggctcagagatccaagtcaacaaagggtgtcctccctacaattgcagacttaccctagaaagctgggtccccccttcaatagcattgtgcagccggacaatccccacatactctttgcctgaaaaatgacaaaagagtagtcaggtgtggccactgagttttctgttttccatatttcttatatgctcagtcactcccattttgcacagcaggaaaagcggcagtttgaccttgtgtttctataaaatttgcattaagagagatttcatggtgatgatgtgggaaagaatgaagacactttctcactgggaattcaatgtactaacagggacagttgggagtactcagtgtagaagctgcgtggaaaaagccttgcaagataagcaggcttttctcagataaaaatgaacgaaggatactttaggcagaagcggtagcacagagtgagaagcctggagtgacaagctgagagctgaacccggacaaatggatccagtcagcttgatgaatacatgcttagtatgtggaattccaaaaagcgcggaccaccaagatctggcaggggacagaacgtacacagaaaccaaaacaatatccttgctttaggatttttttttttcttaatgaagaaatagtttccagcagacaaaacatagaagggaaatacagaaagcttttcactctagccagtccttccctccctctcccacatacctgcactctgttgtgacttcaccaagcgagtggctcgttctatgcacacgattaaacaaccagtcaccttgggatccagagtaccactgtgccctgtcttctccacccgaagtatccgtcgaatccaggctaccacctcatgggaagaggggttagagggcttgtcaagattaatgaaacctgtcctggaatggaaaaaaaaaaaattaatgtatcacccactcttaatgctccagtgaaacaacaaatctgaaaagttaaaaagaaaaataattcactgcgggtacaggttatatattcaagacaaagctattctggcatgccactgccttcctgaatagctgatgtgaaagcattttcaaaagaaagtaagtttgcacagtgcctcctcccaacacttacctgatatagtccccaatctctctcttcagaggattttaaccacatgcaagaggtgtatagtgtgttgtccttacattcagcttatcaaaattctacaaagcaacgacacaacacaaaacaaaataccatgtcgtgagcacatgtaaaaaaagagtcagtaccactatgtggcccacaaactggcataggtctgcaagatggactaagtacaaaaactgagaactgttgacaaactcagcaatttaacattgtggggacatgtgttctacaacagtgttgagtgcactgccaattttttaaaaacttggttctcatttcagataccttaaggaatcctgctttaaactgtatcagtgggcacttcccaaagtcaaggatgccagcagtaagcattctcaatcaattgtttaacacttggaaataacgtaaaagcaggcattcatctgatgcacgattttaaccacatacctttagcaaaaggggccactgagacgtgtccaacttagcaactttggattcaggtttgataagaaattcttcagcgtgttgtatttccttcgacaggacagaaatataacctattaaacttcccacccgattttgaacaattccattactgccatggaaatgtatgccttttaaacagaaaacaaggcttcctatgccttttcactgggacctccaagggaaagagagagaagaaatgaaccaggagtacagaggggaagtgaaatgtcactaagatgggtccaaacatttaaagagaaagggggatggcgggtctgtgggtggcataaggaagacaaattcagagacagcagttggtaaggccagcaccatttagtaagctatgcctgaaggacacttggactgtctggggctgtgtcatttcagtgctttttcgaatctacacaatgactaccaatgctggcccattccttggaaacctttaaaaacacttctttcctttagtttgttatttaagtaaactttctttttagtcaaagtgaagtcaaacacattactactcacggctacatcttcttctggcaatgacttccgctcctttttcttcttatgtttctttggcaaaataattactaaaaaaacaaacacaggatttgggaattttccccaagaataaatgaaacaagggtttaaaataaagaccgaaattagggcaggtaggaaatggattttaggtctacaattacagtcacatgccacataatgttttgcaagtacagactgcgtatgtgatggtggcccccataagattataacagagctgaaaaattcctatctcctagtgatgtcttgatgatcctgaccctgtgtaggtcaaggctactgtgtgtgctgtgtttgtgtcttagttaacaaaaaaaaattttttaagaaaaaaattaaaaaattttaaaatagaaaacttataaataaggagataagcagagaaaatatttacgtacagctaaataatgtgtttgttttaagctaagtattattacaacagtcgaagtaaaaagtttataaagttacagtaagctaaggttgatttattctgaagaaaaatatatttttataaatttagtgtagcctaggtgtacagattataaagtctccagtagtgtaatgtctgaggccttcacattcagtcaccgactcaaccagggcaacttccagctcagcaagctccattcatggtaagtgccctcctcttcgggtgcaccacttataaccttgtgtactatatatatataatatacatacatataatacatacatatataatatacatatatacacacacatatttatatatatataattttttttttttgagacggagtttcactcttgctgcccaggctggagtgcaatggtgcaatgatctcggctcactgcaacctctgcctcctgggttcaagtgattctccagcctcagcctcccgagtagctgggattacaggcgtataccaccacgcccacctaaattttttgtattttttttttttagtagagatggggtttcgccaggttggccaggctggtcttgtgaactcctggcctcaggtgatctgcccacctcatcctccaaaagtgctgggattacaggcatgagccactgcccccggcctgcattttgtttttgtttggaggaacaaaaaagggaaagaaaaaacaaaaccacaggaaaataaagaggagaaaccctgaggcaaaaatggcttttccttttgagtcttcgtggagctgtgagctggatcacaaggtccctggggcattctgggcgggaaggccctcctccatccagagggcggcggccgagctgctccggggagtgcgcctgtggatgcgccgcagccgcagcaggtacagcaggatggccagcagcaccaccaggaagcagccagagaacaggtagtggttgtagacaaaggaaacgccccgccagtgggtgtgactggctcggaaggcctcctgctggatgtctcttaatggtagaaagcgggtcctgtagaggatggctccaagggtccactgaacctccttgtcgtaaacttgcaaggcagtctttaagcttttatagttgacaggaaacgaaaagcccctatgaaacacctcaaacatccaggccgatttgaagcactgatacttaagcctgtggaggtcagcatgagaggcgtacagtcctcggtcaaagcgttcccgcaaaatggaccactttgttgcacagtaatcctttgcagctttagtaaatttagcagcattgtagtctccccccattcgtaacacatcctcggtgcagtagtagaattcggagaagccatagaattcactgttctggaagtgaattgggggctggtagaccccattgagggaagtctgggtctcgtttgttttattcatgaaaggctggatagtctctcgacacaggtcaaagtctccagtccctcgtaggtatatggtttgtccattttgctggatttcatctttaatgtctaggggtaggcaggggtccaagtacggcatatcaggagtcagaccagtctgtttacccaggagcctgttcttttgaatggtgttggcaaatattctgtcttcgtatctctgtcgagcagcattgccaccaaacccaagaaacgtggccacatagactcgatacacatgctcagtttggtgaacatcacatcccaagttaaattcagctaacaagtttttagctacttcttcctgctgtgaggacgcaaagcttacagttttggggacttcgtacgctatctgagtcgacacgccgcccatgtcgagaatgcccgctgtccttttacggacaatggcttcgctgctttcacttccaggaatgttaacttccacaacggcctcatcatcatcttcaatatgctcaaatcgtccaaggacaaaattaatgccaatccaagcatacacaccttcctgtttcccagaaattacttctgcatgagagtcagaaaacagaaagtcaaagtgcacggggatatcggtcagaaggtcttccagaatagctttctgctggctttcggggaggattctcattccagccgtgcagagaatgtagagaggtgtctctttgtgttttgcccgtggcacatgctctgcagcaaagttcaaaagtggagaaatgtaatcactgactttctctggagaggtagcaaattctgaaatgcccggttttattttcatgaccactggctttcggtttttatccctcatttgcctgatatccaacagatcatgtggattgccattatgccttggccagcagtaaacaaatactcgagacccactgctaccacagtccaccacgatcccatagttcacattggggttattggtgtctgtagcttcaatgtcggtaactcgtgccaggtacctttgaaatttcttgtctctggttagtcgcccatacttatttcggattatgacaacagaaaaatataaaagtgaaacagcagcagccaggacactaatgaccataatttggcgtaaattggtattcagaattcgaggacaccctactggagatatgctaaaatgccaagaagcaggaaaaagacaggagatgccaatcctccccatactgaaaggtcagcaacaaggcaatgctctgggattcagtccttctcacaaacaattatagaaataatgctggggtcctcacggagttagagccctcctgcttggccggccggggaccccgggagcgggggaccaccagtgggcagcatcacggccagccggctcgtgc

SEQ ID NO: 149989 - DNA, 382 bp, Homo sapiens
ctgaagacaagcgagaagtggagaaacagacaggacaaaagcaataagggaagtaagaaggcggaaaagaggagagcgacacacgcagaccgcaacagggaagcggcaagaatacgaaggaaaacctacacaaacgaaagaaaacactacgaacaccaccggacagcgggtaaagaccaagatgaaagagcaacagaggacagcagagagtgaagcagaagcacccgtgtcagagcacccagaccatcaaatatcacaagcaggatgaactgacaagcacgcacacccaggcgagttccccatgctcgtccccacgttgatatctcagactctacaagtcttcagctgctgcctaggactctgtaagtccttgactcgtgcc

SEQ ID NO: 149990 - DNA, 373 bp, Homo sapiens
ggcacgagagtgtcatcacctttgtaaaatcaactacatggatttagtgaaagaatttatgaccctgaatgcctccgcacccctgcggtcaagcttctcagacactatgatcagactacccgctctgacgtatccgttattcccagcgctcgctacctgtgccggctattcagataaagcttgatcttctatatcttatgtattgcacaattctgccctatggcgtgcatctggccccacggatcatcgagatgctccagcgtaagcatgactagagtcacgtaggtccacgctacgaatatgcgaacttcggacactatacagcctgattaaatcaactgcatcaaactttgaccctataaagctattctcg

SEQ ID NO: 149991 - DNA, 1138 bp, Homo sapiens
  misc_feature (1)...(1138): n = a,t,c or g
acaggggccggggttggggagactatgtcgccagatgccaggacgccctcaccccgtttgcatatgcaatgctagcatgggaccccgaaaatagacgctctgctgcactgagacttcttgtcaatgcccaaccggcgggggggtgtctccctgcccccgacccccccataaccccctttctctgtgacacacaccatcttctcggtctctttttcttttcattggttaaagggaagctttttaagaaggcaattttcatattgtttctacgggatggttttggttcccttcccttcccacccccccttaagcctgtcagccccctccaaatgtctcaggatcccccctctcccctggggctgggtgacagcaccccggctgcgttcacaccccagtgtcacagggcgagctgttctggagagaaaaccatctgtgcgtggctgagcggggagcttgaacacccaggccagggacacccctccccagctcccagagaggccccctgaggggtgagccctctttccacctttcccctattccatggcacccccttcgcaattaaaaccaactttaaaaatcacagctgttcgttcctaggccagtgggggggcgaccggacttggggggtggagccctctgggacttccgtaggaacaagggctgcggcccaccgcgacacttacacagacctcggggattgcactaaaccctcgttcccttantcccgcacctcagcttcgcctgtcctgcccgccccactttgccttaactacccgcgccgtccctggggggccacagcctcttgcatggggcccagagccggggacccccccagcccagccccggccctccccagactccgcgcaatcacatactgtatatagacgtgaatcgattttattttttattctttaaaattaaggtcgtgataaaagtgttgccaaagataactggtggaattcttcgcgtttcaggaaacaaacaaacaaaaaaaaaatgatatttgaggagggtcgtgttgactccaatatgaaaggacacagctcaaagcttttttggtttggttgtttgggggttttttgtgtttccttttttgggggggttttttttttaactggcctggtaacaaaaaaaaaag

SEQ ID NO: 149992 - DNA, 345 bp, Homo sapiens
ctctttctggctgctctgtgggtcttcctgttctgacttacgctcctgtcaagtacttaaatgcacccggaacatcccatacagtcttgtccccacagcttcatgtgaacatctccatgggccatgcatatatcgtccctgcagtgtgcaaagcgtgctcacctgcactgctgcacaggcaaccaacatacttagtgcccagagccttctctctgggcccacgactcagtgatggggccttacttacccctgcctcctggttggggcggccgacctcactcctcccacaactccccctccacccacacccgcgcccccacacctcccctccacccccccgccccc

SEQ ID NO: 149993 - DNA, 483 bp, Homo sapiens
aaaactatgctgaggcaaaggatgtcttcctgggcatgtttttggatgaatatgcaagaaggcatcctgattactctgtcgtgctgctgctgagacttgccaagacatatgaaaccactctagagaagtgctgtgccgctgcagatcctcatgaatgctatgccaaagtgttcgatgaatttaaacctcttgtggaagagcctcagaatttaatcaaacaaaattgtgagctttttgagcagcttggagagtacaaattccagaatgcgctattagttcgttacaccaaaaagaatgccctgtgcagaagactatctatccgtggtcctgaaccagttatgtgtgttgcatgagaaaacgccagtaagtgacagagtcaccaaatgctgcacagaatccctggtgaacaggcgaccatgcttttcagctctgaagtcgatgaaacatacgttccaagagttaatgctgaacattcaccttcat

SEQ ID NO: 149994 - DNA, 408 bp, Homo sapiens
  misc_feature (1)...(408): n = a,t,c or g
aactgaaggaatgctgtgaaaaacctctgttggaaaaatcccactgcattgccgaagtggaaaatgatgagatgcctgctgacttgccttcattagctgctgagtgctggaccagaatcccattttatttatttacttctacctgtatcatgctctgggaatcagcatttcctacactataaaggaaatttccaaggcagagcagctaattttaccctggatattctcagcacctcatttctaatccttgtggcatacagttcttttattgacccctatattctcaaacacatctcccacttgagctatgtttctttggggtgtacttctgtggcactctgcagtatcctcagtatctttctattatggccattggattccactgggatcgggatatccngtcatttt

SEQ ID NO: 149995 - DNA, 1311 bp, Homo sapiens
  misc_feature (1)...(1311): n = a,t,c or g
cttttctttgctaaaaggtataaagctgcttttacagaatgttgccaagctgctgataaagctgcctgcctgttgccaaagctcgatgaacttcgggatgaagggaaggcttcgtctgccaaacagagactcaagtgtgccagtctccaaaaatttggagaaagagctttctaagcatgggcagtagctcgcctgagccagagatttcccaaagctgagtttgcaagaagtttccaagttagtgacagatcttaccaaagtccacacggaatgctgccatggagatctgcttgaatgtgctgatgacagggcggaccttgccaagtatatctgtgaaaatcaagattcgatctccagtaaactgagaggaatgctgtgaaaaacctctgttggaaaaatcccactgcattgccgaagtggaaaatgatgagatgccctgctgacttgccttcattagctgctgattttgttgaaagtaaggatgtttgcaaaaactatgctgaggcaaaggatgtcttcctggggcatgttttttgtatgaatatgcaagaaggcatcctgattactctgtcgtgctgctgcttgagacttgccaagacatatggaaaccactcttaggagaaagtgctgtgcccgcttgcagatcctccatggaatggctatgcccaaagtgtttcgatggaattttaaacctcttgtgggaaggagcctcaggaatttaaatccaaacaaaattgtggaggctttttggagccagcttgggaggagttacaaattcccaggaatgcgctatttagtttcgtttacacccaaggaaagttaccccaagtgttccaacttcccaactctttgtaggagggtcttcaaggaaacctaggggaaaagtgggggccagccaaatgttttgttaaaacatccttgaaggccaaaaaggattgcccctgttgcaggaaggactattctatcccgtggtcctgaaaccagtttattgtgtgttgccatgaggaaaacgcccagaaggggaccagngtcaccaaatgctgcacagaatccttgggtgaacaggcgaccatgcttttcagctctgggaagtcgaagaaaacatacgttccccaaagaatttaatgctgaaacattccaccttccatgcagatatatgcacactttctgagaaggagagacaaatccagaaaacaaactgcacttgttgaagcttgtgaaacacaagccccaaggcaacaaaagaacaactgaaagctggttatgggatgatttcgcagcttttgttaaaaaaattgctgccaggctgaa

SEQ ID NO: 149996 - DNA, 407 bp, Homo sapiens
ggcacgaggaacgacaaaatggagccaggcctggaacaaggcacgataccaagactagatagcgtcaccagcagcgaatgctttgcgagctccggctttcatgaagatagaagtctgagtgatgttgaggaacaggaggattctgacggtttctacaaggagcccatcactatggaagatctgatttcttacagttttcaagtggccataggcatggagtccctgtcttccagactgtgcatacatcgggacctggaagcgagaaactttcatttatctggaaactactgcgacactagcctggaattctagattgagaactatgatatttatctctgatgattcaatatctactctcctacaaagctcaagcctgaagatacgagactattaaaagaaacctgact

SEQ ID NO: 149997 - DNA, 424 bp, Homo sapiens
  misc_feature (1)...(424): n = a,t,c or g
ggcacgagccaagattcatctcacaccagagaaattgagagcgnnnnnnnnnnnnnnnnnnnnnnnnnnnnnnnnnnnnnnnaggcaaaagaaagagaaaagagaatagctctctctcctgcagagagagagagagggacacctgaatgggtctcccagtttcatgttgaaatgctcagggttttataggttagcttgaggagtttgtgtgtgagtctcattcgtgctttgatattgacatatattgatatacagtatgcttactgttttaatattgtgtatttatttttttaatatgttaatttctggtatctatactgattatgcttatttttatatatgttatatttattattactgctatatattctaatttattcttctttgtttttatactttgatgactattttttttggcctcatt

SEQ ID NO: 149998 - DNA, 361 bp, Homo sapiens
  misc_feature (1)...(361): n = a,t,c or g
ngccagggaaacagtgaaaagaatccaatatccaattcccttagaaggtagattaggtttaaaacctctaattgagagccttatctgagatgggctacttgaactgtgcatgtctccctatactactccaatattacttgtaaagtagtcagattggtgatactgacttgtagaagatcttcaagccattaatcaaactgttcaaaccactcatcctgttgttcccaatccatatactattctcagcaaaattccatatgaccatcagtggtttacagaaatagacctgaaagatgccttctgggcatgtcctttagctgaagatagttaggatatattcacttttgaatgggctcgtgcc

SEQ ID NO: 149999 - DNA, 354 bp, Homo sapiens
cccaaagtcagagttggtggagacagaaaggggtgtcgagagctggggctggccctatccacccgcaaggtcttttgttcggtttctcctagggtgaccttggacccctgggcactcttggggagcagggcctcattgggcaacggggagagcctggcctcgagggtgacagtggccccatgggacctgatgggctgaagggggtcaggggagacccagggcctgatggagaacatggcgagaaaggccaggaagggctgatgggtgaggacgggccccccggcccccctggcgccgcaggtgtccggggtcttcacggaaaatcagggtattgaaggctctctctcgtgccgt

SEQ ID NO: 150000 - DNA, 497 bp, Homo sapiens
  misc_feature (1)...(497): n = a,t,c or g
gaggaggggccccagctaagatncccatantgaganacnttcgcaangngccggaanncgtaccactcagaagccttcactgtcaacttcggggacaccgaagaggccattaaacagatttttgattacgtggagaagggtactcaagggaaaattgtggatttggtcaaggagcttgacagagacacagtttttgctctggtgaattacatcttctttaaaggcaaatgggagagaccctttgaagtcaaggacaccgaggaagaggacttccacgtggaccaggtgaccaccgtgaaggtgcctatgatgaagcgtttaggcatgtttaacatccagcactgtaagaagctgtccagctgggtgctgctgatgaaatacctgggcaatgccaccgccatcttcttcctgcctgatgaggggaaactacagcacctggaaaatgaactcacccacgatatcatcaccaagttcctggaaaatgaagacagaaggtc

SEQ ID NO: 150001 - DNA, 951 bp, Homo sapiens
gaggtccgttcctaaagaaggcctaaaattagggataaattttgggggagtgttaaaagttggcccattcagaagcttccccggtcatttcgggggcctcgaagagggccaagaaacagatcaacgtatacgttgggaaggggtcctcaagggaaaaatggtggtttgggtaaagaagctagacagagacacagtttttgctctggtgaattacatcttctttaaaggcaaatgggagagaccctttgaagtcaaggacaccgaggaagaggactttcacgtggaccaggcgaccaccgtgaaggtgcctatgatgaagcgtttaggcatgtttaacatccagcactgtaagaagctgtccagctgggtgctgctgatgaaatacctgggcaatgccaccgccatcttcttcctgcctgatgaggggaaactacagcacctggaaaatagaactcacccacgatatgagtcaccaagttcctggaagaatgaagacagaaggtctgccagcttacatttacccaaactgtccattactggaacctatgatctgaagaaccgtcctgggtcaaactgggcatcactaaggtcttcagcaatggggctgaccatctccggggtcacagaggaggcacccctgaagctctccaaggccgtgcattaaggctgtgcttgaccatcgacggaggaaaggggactgaagcttgctgggggccatgttttttaggagggccattacccatgttttattcccccccgagggtcaagtttcaacaaaccctttgtctttcttaatggatttgaacaaaattaccaagttttcccctcttcatgggggaaaagtgggtgaatcccaccccaaaaataactggcctctcgctcctcaacccctcccctccatccctggggcccctccctgggatgacattaaagaaggggttgagctggaaa

SEQ ID NO: 150002 - DNA, 455 bp, Homo sapiens
agggtttgaccatgttgcccaagctggtcttgaacctctaggctcaagtgatctgcccccctcagcctcccaaagtgccgggattacaggcatgagtcaccacacccagcctgcttatattttaaaaattagtttcataactttacctttcataattaggtctttatcttgagtcccctttgtattcagtattatgtacaaatctagttttaatttttctccttgtggtgagtcagttttctcaactaatctacttaacaatgaataccttcttattgattggtggttacactttattatatattaaattcccatccatctctgagatctgcattttgtcccactgatctgtttgtctattcttatagtgtgtcttaaggcaaggtaagtccctgtcttggtagttgctttctctcttgctttagttttgaactttaggtagagaaaaaaataaa

SEQ ID NO: 150003 - DNA, 378 bp, Homo sapiens
atgactggaaatggcaaaggctatgcatttgtggagtttgagtctgaggatgttgccaagatagttgctgaaacaatgaacaactacctgtttggtgaaagactcttggagtgtcattttatgccacctggaaaaaaaacagaaagtatttcaaaaactaattgtcagacgtctacaaaaggccatcttttacataagaagaagaaaaaggttttaggcactcttgacactcctgagaagactgtggatatccagggcctcacaccagtttgtacaccaacatttttggagagacgaaaatctgaaatggctgaaatgaatgacgatgatgaagctaatgaaatagttttcaaacagcccatatcctatgtaaaataa

SEQ ID NO: 150004 - DNA, 426 bp, Homo sapiens
gcggcttttggcatggcgactttttctggcccggctgggccaatcctgtcgcttaatccgcaggaagatgtccagtttcaaaaggaggtggcgcaggttcgcaagcgcataacccagggtctcccaagtggattcgaccgaatcagggaccgacctcttaagcttgcaggccacggtttccgatacgaaagggtttacgctgtttgcgaaaaaaacctgaacgacttactcctggagtagtctatgtgcgccacctacctaacctacttgacgaaacccagatcttttcatatttctcccagtttggcactgtgacacggttcaggctgtccagaagtaaaaggactggaaatagcaaaggctatgcatttgtggagtttgagtctgaggatgttgccacaatagttgctgaaacaatgaacaacc

SEQ ID NO: 150005 - DNA, 426 bp, Homo sapiens; identical to SEQ ID NO: 141990

SEQ ID NO: 150006 - DNA, 1091 bp, Homo sapiens
gctgggagcccgacgtttccgggagcgccgcgtggttagcgtcggcggcttttggcatggcgactttttctggcccggctgggccaatcctgtcgcttaatccgcaggaagcatgtcgagtttcaaaaggaggtggcgcaggttcgcaagcgcataacccagcgaaaaaaacaagaacaacttactcctgggagtagtctatgtgcgccacctacctaacctacttgacgaaacccagatcttttcatatttctcccagtttgggcactgtgacacggttcaggctgtccagaaagtaaaaggactggaaataggcaaaggctatgcattttttggagtttgagtctgaggatgtttgccaaaatagttgcttgaaacaatggaacaactacctgtttggtggaaagactcttggaagtgtcattttatgccacctgaaaaagtacataaggaactcttttaaagactgggattttccctttaagcagccatcatatccatcagtgaaacgggtataatcggaatcggacactaacacaaaagctacggaatggaggagcgatttaaaaagaaagaaagattactcaggaagaaattagctaaaaaaggaattgactatgattttccttctttgattttacagaaaacggaaagtatttcaaaaactaatcgtcagacgtctacaaaaggccaggtttttacgtaagaagaagaaaaaagtttcaggtactcttgacactcctgagaagactgtggatagccagggccccacaccagtttgtacaccaacatttttggagaggcgaaaatctcaagtggctgaactgaatgatgatgataaagatgatgaaatagttttcaaacagcccatatcctgtgtaaaagaagaaatacaagagactcaaacacctacacattcacggaaaaaaagacgaagaagcagcaatcagtgattttcaatgtattatatttcttttgaaaaatataatatttttatgagagtggactttgtatttcactaggtacaatggaatacaacctttgacaagattttcagaggaaaaatacactgtttggtcaagttaaggaaa

SEQ ID NO: 150007 - DNA, 449 bp, Homo sapiens
ctttcttttttttttttttgagatggagtctcgctctgttgcccaggctggagtgcagtggtgtgatctcggctcactgcaacctccacctcccaggtttaagtgattctcctgccttagcctcctcagtatcttggattacagacgtgcgccaccatctctggctaatttttgtatttttagtagagacggggtttcgccatgttggccaggctagtctcaaactcccgacctcaggagatctacccaccttggcctcccaaagtgctgggattacaggcgtgagccactatgcctggctaatttttgtatttttagtagagacagagtttcaccatgttggccaggctggtctcgaactcctggccccaagtgatccacctgcctaggccttccaaagtgctgggattacaggcgtgagccactgcacccggctgacctgtgcccct

SEQ ID NO: 150008 - DNA, 863 bp, Homo sapiens
  misc_feature (1)...(863): n = a,t,c or g
ccttgnaactgtcncccttttaaaccccttaataacaaacactggcaaaggtaggtacccattaatcaatccccccatttaanaagacgaggaaactnaactgtaagcaatgggcgaaagtggtgaaaggtgggtgtcagctttcagggacaggagagcctcccatggactgagctagccctgggaggtacaaataatgttactctatgttgggctggaaccccaccacacacacatgttgagtctgtggcccccaaggctgatgtttccttccgtttttttttttttttttttttttttttttttgagacagggtctcgctctgttgcccaggctggagtgcagtggtgcaatcttggctcactgcaacctccacctcctgggttcaggtgattctcttgcctcagccttctaagtagctgggattacaggtgcctgccacgagacacccagctaatttttgtatttttagtagtaacggggtttcaccatgttggccaggctggtctcaaactcctgacctcaaatgatccgcccaacttggcctcccaaagtgctgggattacaaacgtgagccactgcgcccagccacctcctctcttttctaccacttcctgattctgtttcctccatctctcaccactttcacgtctttcaactctttttatctttttgttttataaaaaaataaatttgcccatgttcttggagagcctgctgtctcctaccccaattggtcagatctgggttctccccaagattcagtttagatggagttgaggataatggctctcaaatgaggggcctgaagttgtgtgtgaagccaaactatgttgaaaactcttagaaaatacgcaattaat

SEQ ID NO: 150009 - DNA, 1290 bp, Homo sapiens
ttttttttttttttttttggcaaacacgtaatggcttaattaagggttcccctggattgcagaattgtcagcagtgggcttgagaacccccagaagggcatagaggcagctgggcagcccccaggcccattgagggtatggagcagggagaagcagcagaaggaggtgatgcccctgccgctccctcccaaaagccaagccccgtcccccacgctccaaatgcccagggaggggtcaagggcccagaaaaggccctacatccttgagtggggcccgagtgtgcggggcaacctgtctgtcatccccaaggcctggactctggcagaggcgcttttccccaccctggtggctccccagggccgatttgctggtcaaaggagcccagatatactcttaaagacattgatgtggggttttatggggctcccctggctctgggaagtgggcagtgaggcacgcttgaggaagggcttccatctttggtttttgtgggaacctgccgtaatgaccgttggcaaagtgccttctcctgttttggggcatctgtcttctgctctgtaacatcgaaggggctgggcaggatgatctctcagcgtcttccaacctctatggtctaagacggccttccccactccagcactgcctcaaactgggatgatgaggacagtaaaagggcgttctttttttttttttttttaagacggagtctcgactctgttgcccaggctggagtgctagtggtgtactcttggctcactgcaacctccacttcccggggttcaagtgattctcctgcctcagcctcccgagtagctgggattagaggcgtgcaccaccatgcccggctaatttttgtatttttagtagagacagggtttcactatgttggccaggctggtcttgaactccctacttcaggtgattcccccgcctcggcctcacaaagtgctggggttacaggcgtgagccaccagtgcccagcctaaaaggacattgcttaagggcagaaagaaggggggcaggcaagggtgggtcttcagcccccagatgggaagtcagagtggggctgcaaaagatgcagatggggcagggcaggggagacaggtaaacagacagaaaagaccaaggtgccaagggaatcaggaaggagaggtgtcctggccagggaagagggcaccagagcccagcccacacaaccttttcggctacattccttgccctgctggagtcagggaaaacacatccactgtgtccttgggtgggaaatggctttttttaaaaaatagtttc

SEQ ID NO: 150010 - DNA, 921 bp, Homo sapiens
attcggcacgatgcagagcccgggcgcaggcggcggtatggagcggaacggctaggggtcttgagaagcaatggccacagaagcccctgtgaatatagcaccacctgagtgtagcactgttgtcagcacagcagttgacagcctcatttggcagccaaactcactaaatatgcacatgataaggcccaagtccgccaagggacggacaagaccgagtctgcagaaatcccagggcgtggaggtgtgcgctcatcatataccatctccgcctccagccattccctatgagttgccaagcagccaaaaaccaggagcctgtgcacccaaatctccaaaccagggagcttctgatgagatccctgagctgcagcagcaagtacccactggggcttcctcttctctcaataagtatccagtccttccttccatcaacagaaagaacctggaggaggaggctgtggaaaccgttgccaaaaaggccagctcactgcaactgagcagtatccgggctctttaccaagacgagacgggcaccatgaagacaagtgaagaagattccagagctcgagcttgtgccgtggagaggaaattcatcgtccgaaccaagaaacagggctcttccagggctggaaatctggaggaaccatcggaccaagaaccaaggttgctgcttgctgttagatcaccaacaggccaaaggtttgtacgccatttccggccaacagatgatttgcaaaccattgttgctgtggccgaacagaaaaacaaaaccttccttaccgacattgcagcattggaaacaatgggaggtgcccagggaggcgattttctggaccttcaccaaattttctggcaagagttgcagaatcccccacaagtctgtgctgggcatctcactggaagatggggaagggtggccct

SEQ ID NO: 150011 - DNA, 442 bp, Homo sapiens
aattacgagggagctaatataacctcagctctccagggcaacacggacaccttatgtcccgagccactccgcctgccctgccctggaagccatactgcaaaatgtaccccacgctgagtctgcgggaaacacctgttggcctgaccccttcctggctcccctgggagttctggagggctgcatctcacctgcctcagataccctcatactgaggcgctttcagtgtgcaccccattccaaaaggtcattcacatggcacaagcaaagcctcttctctgtgtgcagatgcaggacctgcaggacattttgcctcggtctacaacccgttgtcctggacggtcaccaccatcgtcaccctgacctgtagcttccctggagtccgcgtcacatatgaagcgggccacccagtgccctcgcaggtatggacacaaaatcctgctgg

SEQ ID NO: 150012 - DNA, 1509 bp, Homo sapiens; identical to SEQ ID NO: 139520

SEQ ID NO: 150013 - DNA, 645 bp, Homo sapiens
gatcggctcatctacatcccatttcctgatgagaagtcccttgttcccatcctcaaggctaacctgggcaagtcccccagttcccaaggatttggacttggagttcctggaccttgttccctggggttgtgggcgcttgcccaggagagggaaccaggggtgcgcccacagcctgctccattctccggccggccacgcgtgctacagtctgactctggacagggggtttctgttgcaaaaatccaaaccaaaagcggtaaaattaccgcgattttcatttggttaggcggagagtgaattaccaacagggaatctggccttgggcctatgccatttctgttgtagtttggggcagtgcaggggacctgtgtggggtgtgaaccaaggcacttctgccacctgccacagtaaagcatctgcacttgactcaatgctgcccgagccctcccttccccctatccaacctgggtaggtgggtaggggccacagttgctggatgtttatatagagagtaggttgatttattttacatgcttttgagttaatgttggaaaactaatcacaagcagtttctaaaccaaaaaatgacatgttgtaaaaggacaataaacgttgggtcaaaatggaaaaaaaaaaaaaaaaaaa

SEQ ID NO: 150014 - DNA, 418 bp, Homo sapiens
ccgtgttgccatcctcaaggctaacctgcgcaagtccccagttgccaaggatgtggacttggagttcctggctaaaatgactaatggcttctctggagctgacctgacagagatttgccagcgtgcttgcaagctggccatccgtgaatccatcctgtgagccaccatgcccagcccaggtcatcttttgagggcatggagagaagactttgagcatcccacttttgagattgtgtaccagtcgcaagcccctatggacacactttttccccaaagtaggagggctctgacttatgtttgatccccaaggagagatgggaaagagcattgaatgaggattccaaagtgattggggccttagttcgtttcctcatgttggtgttgtgaagaattctggttaggataacagcatgtgtgc

SEQ ID NO: 150015 - DNA, 9278 bp, Homo sapiens
  misc_feature (1)...(9278): n = a,t,c or g
atgctggcgcgcgcggcgcggggcactggggcccttttgctgaggggctctctactggcttctggccgcgctccgcgccgcgcctcctctggattgccccgaaacaccgtggtactgttcgtgccgcagcaggaggcctgggtggtggagcgaatgggccgattccaccggatcctggagcctggtttgaacatcctcatccctgtgttagaccggatccgatatgtgcagagtctcaaggaaattgtcatcaacgtgcctgagcagtcggctgtgactctcgacaatgtaactctgcaaatcgatggagtcctttacctgcgcatcatggacccttacaaggcaagctacggtgtggaggaccctgagtatgccgtcacccagctagctcaaacaaccatgagatcagagctcggcaaactctctctggacaaagtcttccgggaacgggagtccctgaatgccagcattgtggatgccatcaaccaagctgctgactgctggggtatccgctgcctccgttatgagatcaaggatatccatgtgccaccccgggtgaaagagtctatgcagatgcaggtggaggcagagcggcggaaacgggccacagttctagagtctgaggggacccgagagtcggccatcaatgtggcagaagggaagaaacaggcccagatcctggcctccgaagcagaaaaggctgaacagataaatcaggcagcaggagaggccagtgcagttctggcgaaggccaaggctaaagctgaagctattcgaatcctggctgcagctctgacacaacataatggagatgcagcagcttcactgactgtggccgagcagtatgtcagcgcgttctccaaactggccaaggactccaacactatcctactgccctccaaccctggcgatgtcaccagcatggtggctcaggccatgggtgtatatggagccctcaccaaagccccagtgccagggactccagactcactctccagtgggagcagcagagatgtccagggtacagatgcaagtcttgatgaggaacttgatcgagtcaagatgacttggtcccctgtccccaattttcaattactaaatatcccatcaaactggggccagccccacgctcctggccaaacttccaccgaggtgccggcagatggcgatggagccaccgacgggccactctgtctggcgcacgcatctctgtgctgccaggtcgcaggcgccgccgccgccgcacttccgggtgccattgcaggcggcgccgtcggctgggcccggattcccctgcggcttcgatccctttccactgggatgcagaaagcctcagtgttgctcttcctggcctgggtctgcttcctcttctacgctggcattgccctcttcaccagtggcttcctgctcacccgtttggagctcaccaaccatagcagctgccaagagcccccaggccctgggtccctgccatgggggagccaagggaaacctggggcctgctggatggcttcccgattttcgcgggttgtgttggtgctgatagatgctctgcgatttgacttcgcccagccccagcattcacacgtgcctagagagcctcctgtctccctacccttcctgggcaaactaagctccttgcagaggatcctggagattcagccccaccatgcccggctctaccgatctcaggttgaccctcctaccaccaccatgcagcgcctcaaggccctcaccactggctcactgcctacctttattgatgctggtagtaacttcgccagccacgccatagtggaagacaatctcattaagcagctcaccagtgcaggaaggcgtgtagtcttcatgggagatgatacctggaaagaccttttccctggtgctttctccaaagctttcttcttcccatccttcaatgtcagagacctagacacagtggacaatggcatcctggaacacctctaccccaccatggacagtggtgaatgggacgtgctgattgctcacttcctgggtgtggaccactgtggccacaagcatggccctcaccaccctgaaatggccaagaaacttagccagatggaccaggtgatccagggacttgtggagcgtctggagaatgacacactgctggtagtggctggggaccatgggatgaccacaaatggagaccatggaggggacagtgagctggaggtctcagctgctctctttctgtatagccccacagcagtcttccccagcaccccaccagaggagccagaggtgattcctcaagttagccttgtgcccacgctggccctgctgctgggcctgcccatcccatttgggaatatcggggaagtgatggctgagctattctcagggggtgaggactcccagccccactcctctgctttagcccaagcctcagctctccatctcaatgctcagcaggtgtcccgatttcttcatacctactcagctgctactcaggaccttcaagctaaggagcttcatcagctgcagaacctcttctccaaggcctctgctgactaccagtggcttctccagagccccaagggggctgaggcgacactgccgactgtgattgctgagctgcagcagttcctgcggggagctcgggccatgtgcatcgagtcttgggctcgtttctctctggtccgcatggcggggggtactgctctcttggctgcttcctgctttatctgcctgctggcatctcagtgggcaatatccccaggctttccattctgccctctactcctgacacctgtggcctggggcctggttggggccatagcgtatgctggactcctgggaactattgagctgaagctagatctagtgcttctaggggctgtggctgcagtgagctcattcctcccttttctgtggaaagcctgggctggctgggggtccaagaggcccctggcaaccctgtttcccatccctgggcccgtcctgttactcctgctgtttcgcttggctgtgttcttctctgatagttttgttgtagctgaggccagggccacccccttccttttgggctcattcatcctgctcctggttgtccagcttcactgggagggccagctgcttccacctaagctactcacaatgccccgccttggcacttcagccacaacaaaccccccacggcacaatggtgcatatgccctgaggcttggaattgggttgcttttatgtacaaggctagctgggctttttcatcgttgccctgaagagacacctgtttgccactcctctccctggctgagtcctctggcatccatggtgggtggtcgagccaagaatttgtggtatggagcttgtgtggcggcgctggtggccctgttagctgccgtgcgcttgtggcttcgccgctatggtaatctcaagagccccgagccacccatgctctttgtgcgctggggactgcccctaatggcattgggtactgctgcctactgggcattggcgtcgggggcagatgaggctcccccccgtctccgggtcctggtctctggggcatccatggtgctgcctcgggctgtagcagggctggctgcttcagggctcgcgctgctgctctggaagcctgtgacagtgctggtgaaggctggggcaggcgctccaaggaccaggactgtcctcactcccttctcaggcccccccacttctcaagctgacttggattatgtggtccctcaaatctaccgacacatgcaggaggagttccggggccggttagagaggaccaaatctcagggtcccctgactgtggctgcttatcagttggggagtgtctactcagctgctatggtcacagccctcaccctgttggccttcccacttctgctgttgcatgcggagcgcatcagccttgtgttcctgcttctgtttctgcagagcttccttctcctacatctgcttgctgctgggatacccgtcaccacccctggtaaatatctcagctctgattcacttaaagacaatagtgatagtcaagggctgcggaagagacagcagcccccagggaatgaagctgatgccagagtcagacccgaggaggaagaggagccactgatggagatgcggctccgggatgcgcctcagcacttctatgcagcactgctgcagctgggcctcaagtacctctttatccttggtattcagattctggcctgtgccttggcagcctccatccttcgcaggcatctcatggtctggaaagtgtttgcccctaagttcatatttgaggctgtgggcttcattgtgagcagcgtgggacttctcctgggcatagctttggtgatgagagtggatggtgctgtacttttgagcagtgcaagtacagagcggcactgccagcagactacacgcggtagaaagccgaccttggtgagcgtgttggtgctcgacagtgagcagagaaaggatggacgattacggagcgccctcgtctccagttaccgctttctggaaacaccatccgccggggcggagctgttccgccccgcctcggccaccatgtcccgccagaccacctctgtgggctccagctgcctggacctgtggagggaaaagaatgaccggctcgttcgacaggccaaggtggctcagaactccggtctgactctgaggcgacagcagttggctcaggatgcactggaagggctcagagggctcctccatagtctgcaagggctccctgcagctgttcctgttcttcccttggagctgactgtcacctgcaacttcattatcctgagggcaagcttggcccagggtttcacagaggatcaggcccaggatatccagcggagcctagagagagtgctggagacacaggagcagcaggggcccaggttggaacaggggctcagggagctgtgggactctgtccttcgtgcttcctgccttctgccggagctgctgtctgccctgcaccgcctggttggcctgcaggctgccctctggttgagtgctgaccgtcttggggacctggccttgttactagagaccctgaatggcagccagagtggagcctctaaggatctgctgttacttctgaaaacttggagtcccccagctgaggaattagatgctccattgaccctgcaggatgcccagggattgaaggatgtcctcctgacagcatttgcctaccgccaaggtctccaggagctgatcacagggaacccagacaaggcactaagcagccttcatgaagcggcctcaggcctgtgtccacggcctgtgttggtccaggtgtacacagcactggggtcctgtcaccgtaagatgggaaatccacagagagcactgttgtacttggttgcagccctgaaagagggatcagcctggggtcctccacttctggaggcctctaggctctatcagcaactgggggacacaacagcagagctggagagtctggagctgctagttgaggccttgaatgtcccatgcagttccaaagccccgcagtttctcattgaggtagaattactactgccaccacctgacctagcctcaccccttcattgtggcactcagagccagaccaagcacatactagcaagcaggtgcctacagacggggagggcaggagacgctgcagagcattacttggacctgctggccctgttgctggatagctcggagccaagggtggggccctgtatgcctgaggtgtttttggaggcagcggtagcactgatccaggcaggcagagcccaagatgccttgactctatgtgaggagttgctcagccgcacatcatctctgctacccaagatgtcccggctgtgggaagatgccagaaaaggaaccaaggaactgccatactgcccactctgggtctctgccacccacctgcttcagggccaggcctgggttcaactgggtgcccaaaaagtggcaattagtgaatttagcaggtgcctcgagctgctcttccgggccacacctgaggaaaaagaacaaggggcagctttcaactgtgagcagggatgtaagtcagatgcggcactgcagcagcttcgggcagccgccctaattagtcgtggactggaatgggtagccagcggccaggataccaaagccttacaggacttcctcctcagtgtgcagatgtgcccagtctcagcgaagcgtctgcgaccgtcgtttgagtcgtcgctgccgctgccgctgccactgccactgccacctcgcggatcaggagccagcgttgttcgcccgacgcctcgctgccggccccggcccgcccgattggctcccttagaacggacgtctgggcctggccaggtcttccggcccactccgccggggcggcgccccggggctttggggcgccagtctgccgtccggcctaccacccgccgaaagcctttggtccccggagagagcaggccccgcgagcccgaggccccagccgggcccgaggaggacatcaaagttcagaggttaggtaacttgcccaagatcacaattaagcagtggcataattggaattcagacccaatgggtctgactatagagttcctgctcttaaccactcttctttcaaaaggtgatgacctatcaacagccattctcaaacagaagaaccgtcccaatcggttaattgttgatgaagccatcaatgaggacaacagtgtggtgtccttgtcccagcccaagatggatgaattgcagttgttccgaggtgacacagtgttgctgaaaggaaagaagagacgagaagctgtttgcatcgtcctttctgatgatacttgttctgatgagaagattcggatgaatagagttgttcggaataaccttcgtgtacgcctaggggatgtcatcagcatccagccatgccctgatgtgaagtacggcaaacgtatccatgtgctgcccattgatgacacagtggaaggcattactggtaatctcttcgaggtataccttaagccgtacttcctggaagcgtatcgacccatccggaaaggagacatttttcttgtccgtggtgggatgcgtgctgtggagttcaaagtggtggaaacagatcctagcccttattgcattgttgctccagacacagtgatccactgcgaaggggagcctatcaaacgagaggatgaggaagagtccttgaatgaagtagggtatgatgacattggtggctgcaggaagcagctagctcagataaaggagatggtggaactgcccctgagacatcctgccctctttaaggcaattggtgtgaagcctcctagaggaatcctgctttacggacctcctggaacaggaaagaccctgattgctcgagctgtagcaaatgagactggagccttcttcttcttgatcaatggtcctgagatcatgagcaaattggctggtgagtctgagagcaaccttcgtaaagcctttgaggaggctgagaagaatgctcctgccatcatcttcattgatgagctagatgccatcgctcccaaaagagagaaaactcatggcgaggtggagcggcgcattgtatcacagttgttgaccctcatggatggcctaaagcagagggcacatgtgattgttatggcagcaaccaacagacccaacagcattgacccagctctacggcgatttggtcgctttgacagggaggtagatattggaattcctgatgctacaggacgcttagagattcttcagatccataccaagaacatgaagctggcagatgatgtggacctggaacaggtagccaatgagactcacgggcatgtgggtgctgacttagcagccctgtgctcagaggctgctctgcaagccatccgcaagaagatggatctcattgacctagaggatgagaccattgatgccgaggtcatgaactctctagcagttactatggatgacttccgggtaaggaccacacccgtgcctcagtgggccttgagccagagtaacccatcagcactgcgggaaaccgtggtagaggtgccacaggtaacctgggaagacatcgggggcctagaggatgtcaaacgtgagctacaggagctggtccagtatcctgtggagcacccagacaaattcctgaagtttggcatgacaccttccaagggagttctgttctatggacctcctggctgtgggaaaactttgttggccaaagccattgctaatgaatgccaggccaacttcatctccatcaagggtcctgagctgctcaccatgtggtttggggagtctgaggccaatgtcagagaaatctttgacaaggcccgccaagctgccccctgtgtgctattctttgatgagctggattcgattgccaaggctcgtggaggtaacattggagatggtggtggggctgctgaccgagtcatcaaccagatcctgacagaaatggatggcatgtccacaaaaaaaaatgtgttcatcattggcgctaccaaccggcctgacatcattgatcctgccatcctcagacctggccgtcttgatcagctcatctacatcccacttcctgatgagaagtcccgtgttgccatcctcaaggctaacctgcgcaagtccccagttgccaaggcaggtgcaagatcatgggctgatgtgggacttgggagttcctgggctaaaaatgactaatggcttctctgggagctgaccctgacaagagattttgccagcgtgctttgcaaagctggcaatcccgtgaatccaatcgagaagtgaagattaaggcgaagaaccgagaagagggcaagacaaacccaatcaagccaatgggaaggtatgaatgatggattgatccagtgccttgagatccgttcgagattcacttttgaaggaagcccagtcgctntgcgcgccgtttctgttcagtgacaatgacattcgggaagtattgagatgtttgcccagaccctttcacaagaagtcggggctttggcagcttcagattcccttcagggaaccagggtggagctggccccagtcagggcagtggaggcggcacaggtggcagtgtatacacagaagacaatgatgatgacctgtatggctaagtggtggtggccagcgtgcagtgagctggcctgcctggaccttgttccctgggggtgggggcgcttgcccaggagagggaccaggcgtcgcgcccacagcctgctccactctccagctctgaacagtcagctaccagtctgactctgcacagcgtctttccgttgcaaacacaccaaccaaacgcgataaaataaaagcgattttcatttggt

SEQ ID NO: 150016 - DNA, 423 bp, Homo sapiens
gtgagccaccgcgcctagccgaatgttaattgtctaagaatttttcttctccaatgtcttctcctccacttttttcggaatttgtttcttcctaattacagcgcggtgtggaggaaactgcagctgagtgccgaaaactaggcgtcactgcgcatgcgtatgtggtagactgcagcaacagagaagagatctatcgctctctaaatcaggtgagactgcaggttcacaaatttcttcagattattttgtttcctaggacgctgacgtggaaaatgagaaaggtctttatgactgcctgatttaaattcgattttagctgctaactgaagtagttatgtcaccaaggaaggatatatactttttttcttgtatgtaatccactcagctctgcccattattattgtttcatattattaatcaatt

SEQ ID NO: 150017 - DNA, 376 bp, Homo sapiens; identical to SEQ ID NO: 109713
  misc_feature (1)...(376): n = a,t,c or g

SEQ ID NO: 150018 - DNA, 433 bp, Homo sapiens
ctaaacccagatatggtgcttaaaactacttctcgttacataagtggatatggctaaaagtggttctctttaaaaatatgtatattgttcgttgtatactgagggaaatgctttgaacatagtaattaaattattatttatgtttaggagagatacattcaaccacttgacaacctggttagaagatgcccgccagcattccaattccaacatggtcattatgcttattggaaataaaaggtaaaaaggctaatttagagcttacattgcattagtgatgaagactgtactgtttatttgactactttccttaacatttgttcaaatgtcgagttaccaagcctcttaaattataaaatttccggaaattctaaggtgtttcttttgatttttaaaatgatgttaataagctttgttggaaattattactgtc

SEQ ID NO: 150019 - DNA, 1203 bp, Homo sapiens
gctcggtcgggcgctgtctccctcggctctgcgggtgtcagttcgtccggcttcctcacagcccctcactcccggcggctgacagcagcagcggcggcggcgggcggcgcctggcgtttcgaggctgagcggcaccggggttggggcgcggaggaggagcagcagcgggaggaggagccgtgtgccctggcactgagcggccttgtgccatggcgtacgcctatctcttcaagtacatcataatcggccgaaccacaggtgttgggtaaaatccatgccctaatgccctacagtttacagacaaagaggtttccagcccagtgccatgacccttactattggtgtagagttcggtgcctcgaatgataactattgatgggaaacagataaaacttccagatatgggatacggcagggcaagaatcctttcgttcccatcacaaggtcgtattacagaggtgcagcaggagctttactagtttacgatatcacgagatggagatacattcaaccactttgacaacctggtttagaagatgcccgccagcattccaattccaacatgggtcattatgcttattgggaaataaaagtgattttagaatctagaagagaagtaaaaaaagaaagaaaggtgaagcttttgcaccgagaacatggactcatcttcatgggaaacgtctgctaagactggcttccaatgtaggaaggagggcattttatttaatacagcaaaagaaattttattgaaaaaatttccaaggaagggagtctttttgacatttaattaatggagggccaatgggcatttaaattgggccctcagcctgctgcttacccaattgcaacacatgcagggcaatcagggaggacagcaggctgggggcggctgctgttgagtctgtttttactgtctagcctgcccaacggggcctgactcacttattcttttcacccttctactcctgctcagctgagacatggaactatttgaaatgggctttatgtcacagaagactttaatccgtcaaattcttgtataactttgaataaatggttaatgttcacttaaaagacagattttggagattgtattcatatctatttgcatttgatttctaggtcaattgatgtgattatttttgttaaatgttgtcttgtgcccttaactacgaactgaattgtattaaacactacaaagtc

SEQ ID NO: 150020 - DNA, 408 bp, Homo sapiens
atgcaactcaagcgcgcgaacccgggcccccgaagggcccccgtccgggagacggtgatgctgttgctgtgctggggggtcccgcccggccgcccctacaaagtggacactgagagcgcgctgctttaccagggcccccacaacacgctgttcggctactcggtcgtgctgcacagccacggggcgaaccgatgtgggtgcgcccactgccaactggctcgccaacgcttcagtgatcaatcccggggcgatttacagatgcaggatcggaaagaatcccggccagacgtgcgaacagctccagctgggtagccctaatggagaaccttgtggaaagacttgtttggaagagagagacaatcagtggttgggggtcacactttccagacagccaggagaaaatggatc

SEQ ID NO: 150021 - DNA, 1026 bp, Homo sapiens
atggggcttggaatctatttagatcaatacacaaggcagaaaggacaagacccagttgctgaactgaaacaactgattccattggtagtctctctatcagcaccaaacctggaaatgccactcctcaagaaaaagaccaccaatccaagcacctttctaaaatcacttagtggaggcctgaatcttttcaattttccatttgttgagacttacactgttgaggaagtaaaagttcatccaaggaataatactggtggatataatccagaggaggaggaggatgaaactgcttcagaaaattgtttcccttggaatgtagatggtgacttaatggaagttgcatcagaggtccatattagaagagtacaaaagaaagagtacgtagaagagaataaaatacctaggaatccaacttacaagggatgtgaaggacctcttcaagagaactacaaaccactgctcaacaaaataaaagaggacacaaacaaatggaagaacattccatgctcatggataggaagaaccgataccgtgaaaatggccatactgcccaagcacgaccgagtagccgaacagcgtgttgtgggggccctggtaaagcagcgcgcttctcagtgtccacgttgtaggggcggccggtcgggacccccaggcacagcaacagcatcaccgtctcccggacggcggcccttcggggcggttatcgcgcctcgcttcccaagccatgcgctctcgagttggtatgctggctgtaatgctgaaaagtcagaagtaaacgcgttccccgggacccagggcatgcgcttcatctcagcggcttcttacaaggattgggtgcaagtgctgcagcagaaagatgtttccaggaacatgggaaccaaggctaggatgatgccgttgggctcctccggaggttgccacactatccgcacggaggttacacaggattccgagggtcagctggctgcagtaactaccacaggctacactgtcgtgggtttagaaccccctaaagtttcggactga

SEQ ID NO: 150022 - DNA, 684 bp, Homo sapiens
atgctgttgctgtgcctgggggtcccgaccggccgcccctacaacgtggacactgagagcgcgctgctttaccagggcccccacaacacgctgttcggctactcggtcgtgctgcacagccacggggcgaaccgatggaggcaggagggaaacgctgcgagagcagctcgctggaaatctgccagggaaactaacttatcttggggcgcagcgccccgggtgcgttatggtgcaaggtcttggagcttcgagtcgggggtggtgggcggaggaggaggtggggaagctgccctgctgcggactgcacatctgtggcgacagggagctcagtgggcagcacagctcacgtctgagcgcacgtgcacgtgtctcgctttaggctcctatgatcaatcccggggcgatttacagatgcaggatcggaaagaatcccggccagacgtgcgaacagctccagctgggccctcatccaatacgactggtgtccttataagaagaggaaatttggacataggaaaaggcatcggggatgaacagaggaaagaccactcacttgtgggtgctgtgagaaagcagccatgtgccagccagagagagaagactcaggacaaaccaaacctgctgacattgtcttgcagctctagcctccagaaccatgaaagaaatacatttctgtttgtttaa

SEQ ID NO: 150023 - DNA, 1302 bp, Homo sapiens; identical to SEQ ID NO: 148606

SEQ ID NO: 150024 - DNA, 1638 bp, Homo sapiens
atggaaatgagacgttatgaagaggacatgtactggaggagaatggaggaagaacaacatcattgggatgatcgccgccgaatgccagatggaggttatcctcatggtcctccaggcccattaggccttctgggagtccgaccaggcatgcctcctcagcctcaggggcctgcacccttacgtcgtcctgactcatctgatgaccgttatgtaatgacaaaacatgccaccatttatccaactgaagaggagttacaggcagttcagaaaattgtttctattactgaacgtgctttaaaactcgtttcagacagtttgtctgaacatgagaagaacaagaacaaagagggagatgataagaaagagggaggtaaagacagagctttgaaaggagttttgcgagtgggagtatttgcaaaaggattacttctccgaggagatagaaatgtcaaccttgttttgctgtgctcagagaaaccttcaaagacattattaagccgtattgcagaaaacctacccaaacagcttgcttttataagccctgagaagtatgacataaaatgtgctgtatctgaagcggcaataattttgaattcatgtgtggaacccaaaatgcaagtcactatcacactgacatctccaattattcgagaagagaacatgagggaaggagatgtaacctcgggtatggtgaaagacccaccggacgtcttggacaggcaaaaatgccttgacgctctggctgctctacgccacgctaagtggttccaggctagagctaatggtctgcagtcctgtgtgattatcatacgcattcttcgagacctctgtcagcgagttcccagcttggtcctgattttccaagctgggctatggagttactagtagagaaagcaatcagcagtgcttcctagccctcagagccctggggatgcacttgagaagagttttttgaatgcatttcttcaggggttattcttaaaaggtagtcctgggacttctggatccttgtgaaaaggatccctttgataccttgggccaacaatgacctgacccagcagcggtgaagacatcacatccagtgcacagtttgccattgagactccttgcatttccgccagatacacaaagttctaggcatggatccattaccgcaaatgagcccaacggtttaaccatccacaaccaccaggaccggaagaagagatagtgatggagttgatggatttgaagctgaggggaaaaaagacaaaaaagattatgataacttttaaaaagtgtctgtaaatcttcagtgttaaaaaaacagatgcccaatttgttggctgtttttcattcataataatgtctacattgaaaaatttatcaagaatttaaaggatttcatggaagaaccaagtttttctatgatattaaaaaatgtacagtgttaggtattatttgaatggaaagacacccaaaaaaaaaaatgtgctccgactagggggaaaacagtagttccgatttttttcccattatttttattttattttctggttgccctagcttccccccctatttttgtgtcttttattaactagtgcattgtcttattaaatcttcactgtatttaatgcaggatgtgtgcttcagttgctc

SEQ ID NO: 150025 - DNA, 522 bp, Homo sapiens
ggcctgttatctccttttgcgcgacacggtctcagctgttccgcctgaggcgagtgacgctggccgccggcgagggatacgtactgggaccctcgccctcagtctcgtctccggcgcggctacctgccccgttttccctgtgagttgacctgctccgggccgcgggccgccaatggcaggggccgctccgaccacggccttcgggcaggcggtgatcggcccgccgggctcagggaagaccacgtactgcacagaccctgccaagttcatttcagtactgtggacctacctggccaccatgctgcacgtggaactgccccacatgaacctcctttccacgatggacctcattgagcattatgggaagctggccttcaacctggactactacacagaggttttggacctctcctagctgcttgaccacctggcttctgaccctttcttacggcctaccgccaggtcactgagaagctagtgcagctcatcgaagactatattcttcgctgctttatccatccc

SEQ ID NO: 150026 - DNA, 2745 bp, Homo sapiens
atggcggtgcccggcgaggcggaggaggaggcgacagtttacctggtagtgagcggtatcccctccgtgttgcgctcggcccatttacggagctattttagccagttccgagaagagcgcggcggtggcttcctctgtttccactaccggcatcggcctgagcgggcccctccgcaggccgctcctaactctgccctaattcctaccgacccagccgctgagggccagcttctctctcagacttcggccaccgatgtccggcctctctccactcgagactctactccaatccagacccgcacctgctgctgcgtcatctcggtaagggggttggctcaagctcagaggcttattcgcatgtactcgggccgccggtggctggattctcacgggacttggctaccgggtcgctgtctcatccgcagacttcggctacctacggaggcatcaggtctgggctcctttcccttcaagacccggaaggaactgcagagttggaaggcagagaatgaagccttcaccctggctgacctgaagcaactgccggagctgaacccaccagtgctgatgcccagagggaatgtggggactcccctgcgggtctttttggagttgatccgggcctgccgcctaccccctcggatcatcacccagctgcagctccagttccccaagacaggttcctcccggcgctacggcaatgtgccttttgagtatgaggactcagagactgtggagcaggaagagcttgtgtatacagcagagggtgaagaaataccccaaggaacctacctggcagatataccagccagcccctgtggagagcctgaggaagaagtggggaaggaagaggaagaagagtctcactcagatgaggacgatgaccggggtgaggaatgggaacggcatgaagcgctgcatgaggacgtgaccgggcaggagcggaccactgagcagctctttgaggaggagattgagctcaagtgggagaagggtggctctggcctggtgttttatactgatgcccagttctggcaggaggaagaaggagattttgatgaacagacagccgatgactgggatgtggacatgagtgtgtactatgacagagatggtggagacaaggatgcccgagactctgtccaaatgcgtctggaacagagactccgagatggacaggaagatggctctgtgatcgaacgccaggtgggcacctttgagcgccacaccaagggcattgggcggaaggtgatggagcggcagggctgggctgagggccagggcctgggctgcaggtgctcaggggtgcctgaggccctggatagtgatggccaacaccccagatgcaagcgtggattggggtaccatggagagaagctacagccatttgggcaactgaagaggccccgtagaaatggcttggggctcatctccaccatctatgatgagcctctaccccaagaccagacggagtcactgctccgccgccagccacccaccagcatgaagtttcggacagacatggcctttgcggtgatcggcccgccgggctcagggaagaccacgtactgcctgggcatgagtgagttcctgcgcgcgctgggccggcgcgtggcggtggtgaacctggacccggccaacgaggggctgccgtacgagtgtgccgtggacgtgggcgagctggtggggctgggcgacgtgatggacgcgctgcgcctggggcccaacggcggcctgctctactgcatggagtacctggaagccaacctggactggctgcgtgccaagctcgaccccctccgcggccactacttcctcttcgactgcccaggccaggtggagctctgcacgcatcacggcgccttgcgcagcatcttctcccaaatggcgcagtgggacctcaggctgactgccgtccacctcgtggattctcactactgcacagaccctgccaagttcatttcagtactgtgtacctccctggccaccatgctgcacgtggaactgccccacatcaacctcctttccaagatggacctcattgagcattatgggaagctggccttcaacctgggactactacacagaggttctggacctctcctacctgctttgaccacctgggcttctgaccctttcttccgccactacccgcccagcttcaattgaggaagctagtgcaagctcatcgaagactataagccttgtctcctttatccctctcaacatccaggacaaggagagcatccagcgagtcctgcaggctgtggataaagccaatggatactgtttcggagcccaagagcagcgaagcttggaagccatgatgtctgccgcaatgggagccgacttccatttctcttccacactgggcatccaggagaagtacctggcaccctcgaaccagtcagtggagcaggaagccatgcagctgtagcaacaaggtggaccctggagagcaggatgcataatccagcactggggaaagtggaggctcctgatgcaggctgcagacccaagagcaagtcctcccagccagagctggcgggctggcaaggggatattcagctctgcaaaggacttttggccaaaaagccaaacatggtgccaagcagaaccccccccatactgtcagtggtgtccgtgagctttgggccctgcccccagaaagtcgagcactggtcctagtcaggctgtaatgaaatgtgctccaatacaagagtattattttctaaaaaaaaaaaa

SEQ ID NO: 150027 - DNA, 78 bp, Homo sapiens
ggaaaacatccttggagaggtcggagatgggtttaaggtggccatgaacatcctcaacagcggccggttcagcatggg

SEQ ID NO: 150028 - DNA, 253 bp, Homo sapiens
gcgtcgaccaggacatgaacctgaccccatactgtggttccctgcacttagaacagtgcctcacactgagctagatgctggaatggcctctgacccccagggcagtgcctgggcccagagcccagcccagactcccctgaagggggaggttcctcccactgtggcatgagcttactcagggggtctatcctgatccatgtcatgccgaagccgtgttattacaggattctgctggaattctcttcctcaaacc

SEQ ID NO: 150029 - DNA, 404 bp, Homo sapiens
ggcggcgggcctgctgctcggcgcgggcgcctgctactgcatttacaggctgacccggggtcggcggcggggcgaccgcgagctcgggatacgctcttcgaagtccgcagaagacttaactgatggttcatatgatgatgttctaaatgctgaacaacttcagaaactcctttacctgctggagtcaacggaggatcctgtaattattgaaagagctttgattactttgggtaacattgctgacttttcatttaaccaatgtatgctctgcacactgagggatataccaagtgtggtgaacaggtacctgcatgtgtaaacacaaacattatataggcgttaaatgctctccaggccgaagtgagaaccacgtccctggttcttggaccgaggtgttcacaatg

SEQ ID NO: 150030 - DNA, 729 bp, Homo sapiens
  misc_feature (1)...(729): n = a,t,c or g
gttttatttccttctctgcgttctcaggttgccctcggagtggagtctgaggctttccaccggagcagcgcccaggaagtgttttcgtgtgatgaaagtgtatgtctgaagttcgttatgaactcgtcctagctccagagctagtgtgcatgcatgtcactggtcgtacagataattgatgagcaattggtgtcgtctgaagcagtgacagcctgggtgtgtcagtgtctccaaaacggttccactgtggcatcctacaaatgggctgcgtcctgggagccattgataagttgtacctcctttacggagggttctctggaatagcaaattatggaaaatgcattctgaggttctgtatttacaatactaatttataagcaaataactcacatttcatcctcagtatttttcagtgctgtacaagcgtcttgaattactctggtagcttttccagaatgacccatgacttcaccacatttctcgagttacgatgaaggtcctctggatgtcagcatggcagccacaaacctggagaaccagctgcacagcgcacagaagaacctcctgttccttcagcgggagcatgccagcacgctcaaggggctgcactccgagatcaggcggctgcagcagcactgcacaggtacatcggggagcaggcccgggcaggcggngggcggcttagggcacggcagagcccagcgtcagaatgtgctaggcctgccctgc

SEQ ID NO: 150031 - DNA, 1576 bp, Homo sapiens
  misc_feature (1)...(1576): n = a,t,c or g
caggagcgccccggtggcctagcccggctttgtctgggatgctgtggggaggaggccgtctgaatccacatcgcctttttaaatgcttgttaccacccggggaaccttagagaccctccctgacaagttgtatcgcctcccgtcctggtagcctttccccaacagaatcctggatttgagtctgtcctttgaaagcatctctgctagagttcccacttccaaacccctttcagctcttcgggattcagcctccaggttgcccttggagtggagtctgtggctttccaccggagcagcgcccaggaagtgttttcgtgtgatgaaagttatttttcagtgctgtacaagcgtcttgaattactctggtagctttttcagaaagacccatgacttcaccacatttctcgagttacgatgaaggtcctctggatgtcagcatggcagccacaaacctggagaaccagctgcacagcgcacagaagaacctcctgttccttcagcgggacaatgccagcacgctcaaggggctgcactccgagatcaggcggctgcagcagcactgcacagatttaacatatgagctgacagtcaaaagttcggaacagacaggagacgggacttctaaaagcagtgaattaaagaaaagatgtgaagagctggaagcccaactgaaagtgaaagagaacgaaaatgctgagttgttgaaagaacttggagcagaaaaacgcgatgattcacagtgctggagaacaccatcaaggagccgagagaagaagtacctgggaggagcttgaaggcccaagagtcacaagcttgaccctggctgtctagcgagcttggagcagcgggccagcaccatcgcctacctgacctcccagctgcacgccgccaagaagaagctcatgagctccagcgggaccttcagatgccagcccgtcagggagcgccgtgctggccagcttcaaggcaagcggcccccaaagacaagctacccgaaacgcctcgccgccgcattgaaaaagagcctctcaggcccctttgcacccgggatttttgaagaggttttacagtttcggggggcagagagcaggaaactccttttgcgggaaccagtggatgctatgcccgaccccaccccatttctgctggctagggagtccgccgaggtccacctcatccaaagnaggaggcccctcgtcatcccccccatcgcctccgaccgaagcggcgagcagcacagcccggcccgcgaaaagccgcacaaggcccacgtcggggtggcacatcggatccaccacgccaccccgccgcaggcccagcccgaggtgaagaccctggcggtcgaccaggttaaacggaggcaaggtggttaggaaagcacttagggacggacagaactgtgtgaaagcccgccgtgccccaccccgcgctgtccatgcactgttgagcaccactgggaaatctcagccacaccttttctgtttaatcccatgcatgccaaacacttttcacacctaccggacccattctccttctgcttctcttgccctcttcttcacaccaaaatatgatcgtg

SEQ ID NO: 150032 - DNA, 478 bp, Homo sapiens
  misc_feature (1)...(478): n = a,t,c or g
tttnnnnnnnnnnnnnnnnnnnnnnnnnnnnnnnnnnnnnnnnnnngttttatnnnnnnnnnnnnnnnnnnnnnnnnnnnnnnnnnnnnnnnnnnnnnnnnnnnnnnnnnnnnnnnnnnnnnnnnnnnnnnnnnnnnnnnnnnnnnnnnnnnnnnnnnnnnnnnnnnnnnnnnnnnnnnnnnnnnnnnnnnnnnnnnnnnnnnnnnnnnnnnnnnnnnnnnnnnnnnnnnnnnnnnnnnnnnnnnnnnnnnnnnnnnnnnnnnnnnnnnnnnnnnnnnnnnnnnnnnnnnnnnnnnnnnnnnnnnnnnaaactttcatttgtataattttaggtataatttgggcgactacaatggagagatcgtgtctgaggttatggcacagagacagccaatgaaacctacttatgccatccccatcatccctattactaatagcagtcaatttaaacaccaggaagcaatggatgtgaaggagt

SEQ ID NO: 150033 - DNA, 399 bp, Homo sapiens
aggaagcagaatccccacagcgagaatgaagattcagactggctgataactggaggaagctcaggtgggagtgcagctgctgtatcagcgttcacatgctacgcggctttaggatcagatacaggaggatcgaccagaaatcctgctgcccactgtgggcttgttggcttcataccaagctatggcttaatatcccgacatggtcctattcccctggtgaattctatggatgtccctagtatctcatgcatatgtgtctatctatggcccctattgttggcttttctccccgtctttcctttggttctcttatttgcttttctttgcttttgtatccgtcgtcctttccttttagtctctacttttctttcacgttttcctcttctcatgtgtttttcg

SEQ ID NO: 150034 - DNA, 390 bp, Homo sapiens
acgcggtggcacgaggggcgtcctaggcaccagccgcacacgtccccggcgctgcgagggggccgggcctgtgctttttgctgtgggcggcgggagcctgtttgccatccacggagactgtgaggcctacgacacgcgcaccgaccgctggcacgtggtggcctccatgtccacgcgccgggcccgggtgggagtggctgcggtggggaaccggctctatgctgtgggcggctatgatgggacctcatacctggctaccgtggagtcctacgaccccgtgactaacacgtggcagccggaggtgtccatgggcacaaggcgaagctgcctgggtgtggccgccttgcatggactcctgtactcggccggcggctatgacagggcctcctg

SEQ ID NO: 150035 - DNA, 710 bp, Homo sapiens
gtggcggcaagatcatcgtgggcgacgccacagagaaagatgcatccaagaagtcagattcaaatccgcctgactgaaatacttaagtgtcctactaaagtggtcttactaaggaacatggttggtgcgggagaggtggatgaagacttggaagttgaaaccaaggaagaatgtgaaaaaatatggcaaagttggaaaatgtgtgataatttgaaattcctggtgcccctgatgatgaagcagtacgcatatttttagaatttgagagagttgaactcagcaattaaagcggttgttgacttgaatgggaggtattttggtggacgggtggtaaaagcatgtttctacaatttggacaaattcagggtcttggatttggcagaacaagtttgattttaagaactagagcacgagtcatctccggtgatccttaaatgaactgcaggctgagaaaagaaggaaaaaggtcacagcctccatggctgttgcataccaagactcttggaaggacttctaagatatatgttgattgatccctttttttattttgtggttttttaatatagtataaaaatccttttaaaaaaacaacaatctgtgtgcctctctggttgtttctcttttttattattactcctgagttgatgacattttttgttagatttcatggtaattctcaagtgcttcaatgatgcagcatttcttgcact

SEQ ID NO: 150036 - DNA, 1027 bp, Homo sapiens
tttgacaatgatttcaagttttatttgatgaagaaacaggaatgcttcatgattgaggatcagtatgatgactgaagaccttgattctagcgtgctcagtagtttagttccttagacatgcctttggtttcagtcatttggtgagtatttagtgcctctcacatgcactgcactgtgcggagagcacttggattacaggaagcatgctctgtactctcagtggtgtgttcagttgaagaaacacataaaataactgaaagatattcagttactagactaggtagtattgactaagttcaggagttgagaaaaggattagatcagtgaaaaaatagactgccttgtgagcaatagcagatatgggctgcgctttgaaacgaacaggtgggatttgcagggaagggtattctgattgggataatggctcgtaggagacagtgaagagtgaggactaccaaaatggaatggatgggcctgttggggattagcagaagtgcttaggtgggtggaattacagagggctaggaaagctagacagagctagtcaaaatgagacctgatgtgaaaggccactagggcaccagcctttttaatctgaaagctctgcttcctctgtttctttatcctgttgctgtttgttgaccacataattatttgtttacgtcatcagctggcacagggcctttatgaggtcagagactgcctagccctgtgttcctggcacctaacaatgcctgtcataaaaacaggcattcagtacgtttttgatgatgaacaaattatacttatttccttggtatttgacaactacttgactgtatatgatggataattagaatatccactctgagaaatcatttaaaagagaaaactcattcaatgcaatctcaaatgcctttactcatcacgctctcattttcttccagattcctggtgcccctgatgatgaagcagtacggatatttttagaatttgagagagttgaatcagcaattaaaggttagtggtacagctaaatattaaagaa

SEQ ID NO: 150037 - DNA, 380 bp, Homo sapiens
  misc_feature (1)...(380): n = a,t,c or g
gttggtggtgatgtgtttagcgcatgtgaatgtgtaagaaaatctccataggtgacttttttgatttacatgcttatctgtaatacgctgttagtgtccctcttccatagctggacgcggtagttttagccttaaactaatcatggtaaattttcatgcccttttgtatgtaggttctctccataaatgaagaagggctaaggcgatgcgaagagaatacaaaagtctttggtcggcctatcaggtagatgtgggattttgtttttcctttcaacttactgaaaacaccattaaaatatttgggggtgttgggagaaaaactacctttattttcccaggagctctttagggtgaccagaaatggacattgttttttcccn

SEQ ID NO: 150038 - DNA, 372 bp, Homo sapiens
cacctattcaacccagatctgttcttctccatcttccctatctcagtaactggtaccgcatttgctcaggtgcgggggatcgggcaggcttcctccctactcctcatcctgtgtccagtccctcagcaagcgttgtccttgtgctttgagacgtatctaggaattgaccactcctcaccatctccagtgccaacacccagtccagcccctgccgcctctcatccagcagggcttcctgggctgccaactggtctaccaacttctagtcttaacccccaaccaactcttttccaaccagcacttagagtatcccttaaaacacagatcctagctctctctggctcagcaccatctcccccatagtaaaagtct

SEQ ID NO: 150039 - DNA, 382 bp, Homo sapiens
gaagaaagcatccttgaagaagttggagaagctttaacttcagctggtgaagaaaaaaaaattgacagatttttttgtattgtggaaggcctccggcacaattcagttcaactgcaagtagcttgtatgcagctcatcaatgccctggttacatctcctgatgatttggatttcaggcttcacatcagaaatgaatttatgcgttgtggattgaaagagatattgccaaatttaaaatgcattaagaatgatggcctggatatccaacttaaaggctttgatgagcataaagaagaagatttgcttgagttatcccatcgccttgaagatattagagctgaacttgatgaagcatatgatgtttacaacatggtgtggagcc

SEQ ID NO: 150040 - DNA, 442 bp, Homo sapiens
atgtgacctacttaaaaaggaagtaatcattaataattaggaatgctcactactccataatgtatctgccagctcttcattctatgtgaaactagattcttatccactacatttgagcatttactgcatcttttattatagagttatttattaactggctccctatgataatcctttttctttatataaatcttatacaactcaatacaaggctttcataaggagaactttgggaacacaaggaatttgaaaagttatgttacatgcagcacccattgttcttagggatttgactaatagaagtcgacattaatagtgacagcctgttatcatctaagattgctcagacaaatattgggacttttcaaccaatggatcgcatggcttgggacaggcagaaattattattctattgctatgctcgccaaatgaagatactact

SEQ ID NO: 150041 - DNA, 347 bp, Homo sapiens
gccttcgtaccggactggctgaggggcaaggcggaagtcaatcaagagactatccagcggctccttgaggagaatgaccagctgatccgctgtattgtggagtatcagaacaagggccgcgggaacgagtgcgtgcagtaagtacccccacccccgcgcccctgacctgtgggtagaggggaagcctgtgtgatgcggtgctttctcgaactaagagtcttgggtgattgatcgcagttaagcccctctttgaactgaggaaagagaggctcaaagagtttgccaacctgcccaagaccatacaacgagtacactgcggagcctggagtcagacgtggctctttctt

SEQ ID NO: 150042 - DNA, 841 bp, Homo sapiens
atccaatcaacttcgagagcgtaggccccacctatcgtgggtcgagttgcttggcggtcgtggttccggagttcctcgggatgtcggtggccttcgtaccggactggctgaggggcaaggcggaagtcaatcaagagactatccagcgggctccttgagtagaatgaccagctgatccgctgtatttgtggagtatcagaacaaggcccgcgggaacgagtgcgtgcagtaccagcatgtgttacatagaaatctcatcctatttggctaccattgcagatgcccagtcccaaccagcactttcaaaagcaatgggaataatctttcaaaagcaatagaataatcttccatttggctgtccgtgaggagtaaattgaaatgtaatcccatctcttacaaaaatgaagccagggtctttaccaactcaactgggttaaaacatgaaatggaaacctctgtggctctttccgaaacgtggaaaatgtgaagtaaagctactaactttaagctggtatttctccatgtaaatatttttttaaataatttaaagcaaatccctccaataaggttgagcccaggtggtcctcctttcctgaacttggagcatggtttgggataacaaagacatcactgggatgttcaagtctacttttttaggtttcaacctggaagagggaactcagtaggtgttggggcaggaattgggggagattcccggacttgatagccttgctagctggtctggtaactgtgtgctccttcttatcagtttgtaaatgtggtccccctgactgatgttttcagatatgcttgtgaaataaagcatgtatttttctataaa

SEQ ID NO: 150043 - DNA, 465 bp, Homo sapiens
cccacgcgtccggaaaaactgatcagtcaaatacagccagaggtggaccgagaaagagctgttgtggaagtgaatatccctgtagaatctgaagttaatctgaagctgcagaatataatgatgctacttcgtaaatgttgtaatcatccatatttgattgaatatcctatagaccctgttacacaagaatttaagatcgatgaagaattggtaacaaattctgggaagttcttgattttggatcgaatgctgccagaactaaaaaaaagaggtcacaaggtgctgcttttttcacaaatgacaagcatgttggacattttgatggattactgccatctcagagatttcaacttcagcaggcttgatgggtccatgtcttactcagagagagaaaaaaacatgcacagcttcaacacggatccagaggtgtttatcttcttagtgagtacacgagctggtggcctg

SEQ ID NO: 150044 - DNA, 371 bp, Homo sapiens; identical to SEQ ID NO: 146374

SEQ ID NO: 150045 - DNA, 585 bp, Homo sapiens
ctgggagaccatccctgtgtgttagtgaggtcttgcattgtaaagatcttgaagaaaggagactgtgtctgtgagtcctcaacaaagcagacacctgattggagttaggagtccaaagggtttatccgaagtggcacttgctggtctgatccatgcacaaggcggggctgctaggcctctgtgcccgggcttggaattcggtgcggatggccagctccgggatgacccgccgggacccgctcgcaaataaggtggccctggtaacggcctccaccgacgggtgagtgctccggccggagtttctgaggccctggctgcctggaaacaggcactggcctctcatcctcggcctccggtgcccctgtcctcagaccttacacgctgccaaagtctggccctggaaaaaaggtagccacgtggtccgcctgaagccactccgaatcccctagccctggaccctcccttgccagccctcctgtccctgctacctctggcacaactgtgccacctctgtgcagccctatcgatctagtctccccagtgttctgggctccctagtctaccacgcctcggccaagcttgcgt

SEQ ID NO: 150046 - DNA, 1321 bp, Homo sapiens
  misc_feature (1)...(1321): n = a,t,c or g
tgcggccgctccaacatcagtggacccagacttgctggtctgatccatgcacatggccaggctgctaggcctctgtgcccngggcacggaagtcggtgcggatggccagctccaggatgacccgccgggacccgctcacaaataaggtggccctggtaacggcctccaccgacgggatcggcttcgccatcgcccggcgtttggcccaggacagggcccacgtggtcgtcagcagccggaagcagcagaatgtggaccagggcggtggccacgcttgcagggggaggggctgagcgtgacgggcaccgtgtgccatgtggggaaggcggaggaccggggagcggcttggtggccaccggctgtgaagcttcatggaggtatcgatatcctagtctccaatgctgctgtcaaccctttctttggaagcataatggatgtcactgaggaggtgttgggacaagactctggacattaaatgtgaaaggccccaagccctgaatgacaaaggcagtggtgccagaaatggagaaacgaggaggcggctccagtggtgatcgtttcttccatagcagccttcagtccatctcctggcttcagtccttacaatgtcagtaaaacagccttgctgggccttgcccagacccctgcccatagagcttggccccaaggaacattagggttgaactgcctagcacctgggacttatcaagactagctttcagcaggatgctctgggatggacaaggaaaaagaggaaagcatgaaagaaaccctgcggagtaagaaggttaggcgagccagaggattgtgctggcatcgtgtctttcctgtgctctgaagatgccagctacatcactggggaaacagtggtggtggggtggaggaaccccgtcccgcctctgaggaccggggagacagcccacaggccagagttggggctcttagctcctgggtgctgtttcctgcattcacccactggccttttcccacctctgctcaccttactgtttcacctcattcaaatcagttttgccctgtgaaaagatccagccttccctgccggtcaaggtggcgtcttactcgggattcctgctgttgttgtggccttgggtaaaggcctcccctgagaacacaggacaggcctgctgacaaggctgagtctaccttggcaaagaccaagatattttttcctgggccactggggaatctgaggggtgatgggagagaaggaacctggagtggaaggagcagagttgcaaattaacaacttgcaaatgaggtgcaaataaaatgcagatgattgcgcggctttgaaaaaaaa

SEQ ID NO: 150047 - DNA, 468 bp, Homo sapiens
tgataaaggcttcagtcagacatcacaacttcaagcccatcagagaggtcactctagagacaagacatacaaatgggaagtaagtgacaggatatttaataggaattctggtcttcaccagagagttcacactggagagaaaccatataaatgtgaggtatgtgataagggcttcagtaaggcctcaaatcttcaagcccatcagagaatccacactggagagaaaccctacaaatgtgatgtgtgtgataagaacttcagccgtaattcccaccttcaggcccatcagagagtccatacaggagagaaaccctacaaatgtgacacatgtgggaaggacttcagtcagatctctcatcttcaggcccatcagagagttcacacaggagagaagccatacaaatgtgagacatgtgggaagggctttagtcagagttcgcatctccaagaccatcagcaagtccatac

SEQ ID NO: 150048 - DNA, 391 bp, Homo sapiens
agtcagcgaggcctacgtgagcctcctatgggaaaagaatgaggctcagagaggtgaagtaagctgctcaggattgcacagctgacctcacgcccaccatcttggattggatctcgatcccgtaccccatttacgccatctttggcttgaataccattcacctatctgtccgaaattatcttccgatcctgggcggtcgatctcctgtgagtgcttaggtatcacttttctataatttttgtgcgttagttcttcctatcattcgttgacatgattactgttagtgctattttgttttgtatgcactgtattttttgtatttgttcttgatcttgatgatcaagatttgctttgtatctttctcgagagttgactgatatctccttttccg

SEQ ID NO: 150049 - DNA, 558 bp, Homo sapiens; identical to SEQ ID NO: 145991

SEQ ID NO: 150050 - DNA, 912 bp, Homo sapiens
ttatgagaccaatgtgaagtctgtaggaattcggaggtgcgtcctgctgcctgccccggtcactctggctccccagctcaaggtcccccacggcccttcaggatgaaagctgcggtgctgaccttggccgtgctcttcctgacggggagccaggctcggcatttctggcagcaagatgaacccccccagagcccctgggatcgagtgaaggacctggccactgtgtacgtggatgtgctcaaagacagcggcagagactatgtgtcccagtttgaaggctccgccttgggaaaacagctaaacctaaagctccttgacaactgggacagcgtgacctccacctttcagcaagctgcgcgaacagctcggccctgtgacccaggagttctgggataacctggaaaaggagacagagggcctgaggcaggagatgagcaaggatctggaggaggtgaaggccaaggtgcagccctacctgggacgacttccagaagaagtgggcaggaggagatggagctctaccgccagaaggtggagccgctgcgcgcagagctccaagagggcgcgcgccagaagctgcacgagctgcaagagaagctgagcccactgggcgaggagatgcgcgaccgcgcgcgcgccccatgtggacgcgctgcgcacgcatctggccccctacagcggcgagctgcgccagcgcttgggcgcgcgcccttggggctttaagggaaaacgggggggccagaatgggccagtaccacgccccaggccaccgagcatctgagcacgctcagcgagaaggccaagcccgcgctcgaggacctccgccaaggcctgctgcccgtgctggagagcttcaaggtcagcttcctgagcgctctcgaggagtacactaagaagctcaacacccagtga

SEQ ID NO: 150051 - DNA, 358 bp, Homo sapiens
gcattagtgttcttgaaatgagtcacaggtcatcagattttgccaagattattaacaatacagagaatcttgtgcgggaattgctagctgttccagacaactataaggtgatttttctgcaaggaggtgggtgcgggcacttaacagctgcgcggttcaagctgactagcttgccagcacgctggcctgcctgatctacctggacacgcacttgcttcgcttgggcccggtcaaattcaagctcctaagccactgtctgctggtgaccctgtccgcccacctgcccgacgatttcacccctgcggtgcacgcctccctggacaagttactggcttctgtgagcaccgtgctgacctcg

SEQ ID NO: 150052 - DNA, 534 bp, Homo sapiens
tggctattgtggaaacaaggggacccttacctacgtgccaaccgtgccaatggaggaattgtgatgggaattcgagattcccgggtctccttcacacctgtggccaggttaaacaaccatcgagcatgtgtcaatggcattgcttgggccccactttcatcctgccacatctgcactgcagcggatgaccaccaggctctcatctgggacatccagcaaatgccccgagccattgaggaccctatcctggcctacacagctgaaggagagatcaacaatgtgcagtgggcatcaactcagcccgactggatcgccatctgctacaacaactgcctggagatactcagagtgtagtgttggtggcgctgtgcccacgaggcaggggcttttgtatttcctgcctctgccccacccccaaagacgaagaaggaagatcatgcttgatacttacattggttttcccagggaagagggcggagcatagcatagtcactgtgaaccctgggccaggccctggctgggccagctcctgag

SEQ ID NO: 150053 - DNA, 2052 bp, Homo sapiens
  misc_feature (1)...(2052): n = a,t,c or g
ttttttcttttttttttttttgtattacatgttcaagttttattacaaagtatgatcgggcagaaaatacggtaattttttnatacagggggctgaaacagaatggaaggggtgaaaattaggtttaatttacttaggaaacaagaaatagaaagtcatagctataacactccactttcaggtgcccatgaagtagccttcaatgggagattccccatagttgtttcacagacacagtgttaaaattttattacaagcccctgtggtaccaatcagccccgtggaaaatatttattaaaaggaaaaatattacaggtacagttctgccagggggccagctttctctacaacttgaccgtgggatggccacaaaacctattaatataggaggggaaagtttaaatatataacaaggaaatgaagttcagacatactaggctaaagggacaccagaaaagggatcagttagagccttaacatttccagagcaaggaaatctcccattttcctacatagaggtttatactaatcatgctacaaaattcactctgggtggggtgggggaaggaaggtcactgacaagaggggtagtaaaatacacaggaaccaaagcaagtgagtcagactcaactaaatcgattcaaatgcttcagctcaacaattttcataacacatggtataccacaatcaacccaaggtgagaacatttcttttaaatagtagatatcacatgttcataatcatctgggttgtcccccaaaaggtggggtgcctataaactttccagctgttacatagactgtcaaacacctttccttccttgaagtttaaaactttcctttaaccttatttgtttcctccgttgggaataatacccagtcccaaccctctttggggaaaggcacctgccatgtttcccatattttaaaaaatgaacatcccagaaagtaagcctgagaggaccctggccccatccccatgtggcccacacatttgactttgaccattagcagcagtgacactgtgagagggggagaaggtgcaggtgggtgaagtgggcaagggtctgcaacacgagacgctctcaggaggctggcccaggccagggcctggccccaggttcaacagtgaactttgctctgctccgccctcttcccctgggaaaaaccaatctaaattatcaagcatgatcttccttcttcgtccctgganttacacacagttaaagggaaaagtctgctttgaggcttcctactttcaatggttttccccttaccccaaaacccaggaattgaaaggggctgcccaatattctcaaagtggggaaggcaagagggaacagtacttgggcttgcccttcccacggtgtggtaaaaccctgcagcttgcttacattgtcttcaacagccccaggaattccaaggccccaggtggcaagccaggaagaaacagtggaaaagcaagggcaagagaaaagagaaaaaggagcgggaaagtctgcatagctgtcataacctctgcttctcctgatctgtagcgaacccacaaccaggaagagtcatggtctggaacaatcatgggaccccaaacgcctgtaggttttttacctaccaaacatcacccatggctgctcctaaagctgtcaatttggttccccacagttacctaagcatcaacggatgccccaatttatggccccaggaagagctgaccccaggctaagggcagtctcactcccacagccatgcaatggacagtctgaaatgtttccctaccccagaccttcactgacctctactatttcctcctctgatataaagaaaacactttaattttctcctgcatcctacatctcctcctaaaattttggccctaattgtcatcaaaaccttgtaggattctgaattttttgtttcttcctgaatcttagccagttctctcagagccaatcctggatttataaggaattttcacctattttttttttttttttattttttgagacggagtcttgctctgtcgcccaggctggagtgcagtggcacgatcttg

SEQ ID NO: 150054 - DNA, 2050 bp, Homo sapiens
  misc_feature (1)...(2050): n = a,t,c or g
ttttttcttttttttttttttgtattacatgttcaagttttattacaaagtatgatcgggcagaaaatacggtaattttttnatacagggggctgaaacagaatggaaggggtgaaaattaggtttaatttacttaggaaacaagaaatagaaagtcatagctataacactccactttcaggtgcccatgaagtagccttcaatgggagattccccatagttgtttcacagacacagtgttaaaattttattacaagcccctgtggtaccaatcagccccgtggaaaatatttattaaaaggaaaaatattacaggtacagttctgccagggggccagctttctctacaacttgaccgtgggatggccacaaaacctatagttatagagggaaagtttaaatatataacaaggaaatgaagttcagacatactaggctaaagggacaccagaaaagggatcagttagagccttaacatttccagagcaaggaaatctcccattttcctacatagaggtttatactaatcatgctacaaaattcactctgggtggggtgggggaaggaaggtcactgacaagaggggtagtaaaatacacaggaaccaaagcaagtgagtcagactcaactaaatcgattcaaatgcttcagctcaacaattttcataacacatggtataccacaatcaacccaaggtgagaacatttcttttaaatagtagatatcacatgttcataatcatctgggttgtcccccaaaaggtggggtgcctataaactttccagctgttacatagactgtcaaacacctttccttccttgaagtttaaaactttcctttaaccttatttgtttcctccgttgggaataatacccagtcccaaccctctttggggaaaggcacctgccatgtttcccatattttaaaaaatgaacatcccagaaagtaagcctgagaggaccctggccccatccccatgtggcccacacatttgactttgaccattagcagcagtgacactgtgagagggggagaaggtgcaggtgggtgaagtgggcaagggtctgcaacacgagacgctctcaggaggctggcccaggccagggcctggccccaggttcaacagtgaactttgctctgctccgccctcttcccctgggaaaaaccaatctaaattatcaagcatgatcttccttcttcgtccctgganttacacacagttaaagggaaaagtctgctttgaggcttcctactttcaatggttttccccttaccccaaaacccaggaattgaaaggggctgcccaatattctcaaagtggggaaggcaagagggaacagtacttgggcttgcccttcccacggtgtggtaaaaccctgcagcttgcttacattgtcttcaacagccccaggaattccaaggccccaggtggcaagccaggaagaaacagtggaaaagcaagggcaagagaaaagagaaaaaggagcgggaaagtctgcatagctgtcataacctctgcttctcctgatctgtagcgaacccacaaccaggaagagtcatggtctggaacaatcatgggaccccaaacgcctgtaggttttttacctaccaaacatcacccatggctgctcctaaagctgtcaatttggttccccacagttacctcagcattcacggatgccccaatttatggccccaggaagagctgaccccaggctaagggcagtctcactcccacagccatgcaatggacagtctgaaatgtttccctaccccagaccttcactgacctctactatttcctcctctgatataaagaaaacactttaattttctcctgcatcctacatctcctcctaaaattttggccctaattgtcatcaaaaccttgtaggattctgaattttttgtttcttcctgaatcttagccagttctctcagagccaatcctggatttataaggaattttcacctattttttttttttttttattttttgagacggagtcttgctctgtcgcccaggctggagtgcagtggcacgatcttg

SEQ ID NO: 150055 - DNA, 115 bp, Homo sapiens
ggaatttacattgtgagacctacctatggcagctctcgccagggggattactatgacacaggatccgatctgaactatgatgactctcactactataacataacatacacacgat

SEQ ID NO: 150056 - DNA, 402 bp, Homo sapiens
ggcaagacgtccaagctggagttctctatttacctggcgccccattctaccacagctgctatcgagccctacaactcgatactcaccacccacaccaccctggagcactatgattgggcctttatggcatacaatggggccatctatgacatctgtcggagaaacctcgatattgggcgtaccacctatactaacctcaatacgttaataggtcaaatagagtcctccatcactgcttccctgagatttgatggagccctgaatggtgacctgacataatttcagaccaacctggtgccctatccccgcatacacttccctctggccacatatgcccctgtcatctctgctgaaaaagcctaccatgaacagctttctgtagcagagatcaccaatgcttgc

SEQ ID NO: 150057 - DNA, 448 bp, Homo sapiens
  misc_feature (1)...(448): n = a,t,c or g
ctcattacgccattgcttggcacgaggcctgaagcccaagctggagcgaggtatttacccggcgccccatgtttccacagctgtagttgagccctacaactccatcctcaccacccacaccaccctggagcactctgattgtgccttcatggtagacaatgaggccatctatgacatctgtcgtagaaacctcgatattgagcgtccaacctatactaacctgaataggttaataggtcaaattgtgtcctccatcactgcttccctgagatttgatggagccctgaatgttgacctgacagaattccagaccaacctggtgccctatccccgcatccacttccctctggccacatatgcccctgtcatctctgctgagaaacctaccatgaacagctntctgtagcagagatcaccaatgcttgcttgacccaccaaccagaatgag

SEQ ID NO: 150058 - DNA, 422 bp, Homo sapiens
  misc_feature (1)...(422): n = a,t,c or g
ggcaagaagtccaagctggagttctctatttacccggcgccccaggtttccacagctgtagttgaaccctacaactccattctcaccacccacaccaccctggagcactctgattgtgccttcatggtagacaatgaggccatctatgacatctgtcgtagaaacctcgatattgagcgtgcaacctatactaacctgaataggataataggccaaattgtgtcctccatcactgcttccctgagatttgatggagccctgaatgttgacctgacagaattccagaccaacctggtgccctatccccgcatgcacttacctctgggcacatatgnccctgtcatctgtgctgagaaagctaccatgaaacagcttttgtacaaaaaacaacatgcttgggttgacccagccaacagatgtgg

SEQ ID NO: 150059 - DNA, 1840 bp, Homo sapiens
acggtttcgctgatgctgaggggccactttctgtctcgcgttgttctctggggaccgggagaggaggaggcacccaaaaagagcgggggcgttgggcgagctcgggggacgtgggagggggaacgggaacaaagcgcagcctagggttagcgtgggaagaccctccgcggtctttggcgttttggaaagatacccacacattcccgggaaaacatgcgtgagtgcatctccatccacgttggccaggctggtgtccagattggcaatgcctgctgggagctctactgcctggaacacggcatccagcccgatggccagatgccaagtgacaagaccattgggggaggagatgattccttcaacaccttcttcagtgagacgggggctggcaagcatgtgccccgggcagtgtttgtagacttggaacccacagtcattgatgaagttcgcactgggcacctaccgccagctcttccaccctgagcaactcatcacaggcaaagaagatgctgccaataactatgcccgagggcactacaccattggcaaggagatcattgacctcgtgttggacccgaatttcgcaagctggctgacccagtgcacccggtcttcagggcttcttggttttccacagctttggtgggggaactggttctgggttcacctcccatgctcatggaaccgactctcaattagagggggggcgagaagtccaagctggagttctctatttacccggcgccccaggtttccacagctgtagttgagccctacaactccatcctcaccacccacaccacccatggagcactctgattgtgccattcatggtagacaatgaggccatctatgacatctgtcgtagaaacctcgatattgagcgtccaacctatactaacctgaatagggttattagggcaaaatggggccctccatcactgcttccctgagatttgatggagcgcctgaatgttgaacctgacagaattccagaccaaccctggtgcccctaccccccgcatccacttgccttctggccaacatatgcccctgttcatcttctggctggaggaaagccttaccatggaacagcttttctgtaggcaggaggattcaccaatggtttggttttggaggccaggccaacccagatgggtggaaatgttgacccttggccatggggtaaattacatgggcttgctggcctggttataccgtggtgacgtgggtttcccaaagatagacaatggctggccattgccaaccatcaaaaaccaagcgcagcattccagttttgtggattgggtggccccactgggctttcaaggtttgggcattcaacttaccagccttccactgtggtgcctgggttggagacctgggccaaggttacagagagctgtgtggcatgctggagcaacaccacagccattgctgaaggcctaggctcgcctggaccacaagtttgacctgatgtatgccaaacgtgccttttgttcactggtacgttggggaggggatgaaggaaggtgagttttcagaggcccgtgaggacatggctgcccttgagaaggattatgaggaggttggtgtggattctgttgaaggagagggtgaggaagaaggagaggaatactaaagttaaaacgtcacaaaggtgctgcttttacagggaagcttattctgttttaaacattgaaaatgttgtggtctgatcagttaatttgtatgtagcagtgtatcgctctcatatacaattagctgacctatgctctaaaacatgaatgcctttgttacagacccaagctgtccatttctgtgatgggttttgaataaa

SEQ ID NO: 150060 - DNA, 435 bp, Homo sapiens
agtacctacctcggaccagggaaccccgcgaaggtctctttgaacataggactacagctcatgctgatcatgtcagtcaggagtctgactggccaagtactgctgctgtcgtagcattgatggctgggacatgtacctagtgcctagactcaccttgattgggcaaggtagaaggaggagatcatgtgatgaagatgctgctggggagcccaaggccacgagaccaaaatatactacagataacaaggagcccattccagatgatgggatttattggcaggccaaccttgacagattgcaccaacacttccaggaccaagccattgtgaacgcagttgctaacaggatggaccagactagctgcgagattgtgcgaaccatgctccgaaggaacgagagtccgacttctgaattggcgccttcccccgccatgcc

SEQ ID NO: 150061 - DNA, 398 bp, Homo sapiens
aacaaatgaaatagaacctgaggaaaactgacatacaaaagcccggaacttccgccgatttgtcactgcaatcaacaatactccccggaacatccgcgaggatgagatcacctcctacaccactggattgccctgctggctgactgccccatcactgcacacatgtatgaggatgtggcactgatcaaagaccatacacttgacaattccttgattcgggagctgcagacattgcaggagttcaacatcacgctggagacggcccttgtcaagggcatcgacatatgacctcccagcaccagccagcagctagactgagaaagactcaccctgcagctctgaccttttttcccaaagggacttaatcgattgtgcaggagtaggagacaaaatgtacc

SEQ ID NO: 150062 - DNA, 4963 bp, Homo sapiens
aaggcatccaggatgcggtgcggggcggcccggtgcccccccgccccgtcacggcagccgcggcggccgaggggaccgggccagggccgggggcggcggcccgagccgcggtagcggcggcggcgggaggggcggcctgagggcggacgggcgggcgcccgggttgcgggggctcggtgccgctccgcactgcccggccggtctcggccccggcgccatgagtggcggcggcggcggagggggctcggcgcccagtcgcttcgccgactactttgtcatctgcggactggacacggagaccgggctggagccggacgagctgtcggcattatgccagtacatacaggcttctaaagccagggatggtgccagccctttcatttcaagtacgactgaaggagaaaattttgagcagacaccattgagaagaacattcaaatctaaggtccttgcacgatatcctgagaacgtagaatggaatccctttgaccaagatgcagtaggaatgctatgtatgccgaaagggctggcattcaagacccaggctgatcccagggagccccaattccatgcctttattatcacaagggaggatggctctcggacatttgggtttgccctcacattttatgaagaggtgactagcaagcagatctgcagtgcaatgcagaccctctaccacatgcacaatgctgagtatgatgtcctacatgctccccctgctgatgacagagaccagagcagcatggaggatggtgaagacactcctgtgaccaaactgcagcgcttcaactcctatgacattagccgggacactctctacgtctctaagtgcatctgcctcatcacacccatgtctttcatgaaggcatgtcggagcgtgctgcagcaactccaccaggcagtcacttcacctcagccccctccactgccccttgagagctacatatacaacgtactctacgaggtgccgctcccacctcctggccggtccttgaagttttctggggtctatgggccaataatctgccagagaccaagtaccaatgagcttcccctatttgactttcctgtcaaagaggtttttgaactgctcggggtggagaatgtgtttcagctttttacttgtgcccttctggagtttcaaatcctgctctactcacagcattaccagagactgatgactgtggcggagacgattacagctctcatgtttcctttccagtggcagcatgtctatgtccctattctcccagcttctctcctgcatttcttagatgctcctgttccatacctgatgggtttgcattccaatggcctggatgaccggtcaaagctggagctgcctcaagaggctaacctctgctttgtggacattgacaaccacttcattgagttgccagaggacttgccacagttccccaacaaattggagtttgtccaggaagtctctgagattctcatggcatttggaattccccctgaagggaatcttcattgcagtgagagtgcctccaagctgaagaggctgcgggcctctgagcttgtctcggacaagaggaatgggaacattgctggctcccctttgcattcctacgagcttcttaaggagaatgaaactattgcccggctgcaagccttggtcaagagaactggggtgagcctggaaaagttggaagtgcgtgaagaccccagcagcaataaggatctcaaagttcagtgtgatgaagaagaactcaggatttaccagctaaacattcagatccgggaagtttttgcaaatcgtttcactcagatgtttgcagattatgaggtgtttgtcatccaacccagccaggataaggaatcctggtttaccaacagggagcaaatgcaaaactttgataaagcatcttttctgtcagatcagcctgagccctacctgcccttcctctcaagattcctggagacccagatgtttgcatctttcattgacaacaaaataatgtgtcatgatgatgatgataaagaccctgtactccgggtatttgattcccgagttgacaagatcaggctgttgaatgttcggacacctactctccgtacatccatgtaccagaagtgtaccactgtggatgaagcagagaaagcaattgagctgcgtctggcaaaaattgaccatactgcaattcacccacatttacttgacatgaagattggacaagggaaatatgagccgggcttcttccctaagctgcagtctgatgtactttccactgggccagccagcaacaagtggacgaaaaggaatgcccctgcccagtggaggcggaaagatcggcagaagcagcacacagaacacctgcgtttagataatgaccagagggagaagtacatccaggaagccaggactatgggcagcactatccgccagcccaaactgtccaacctctctccatcagtgattgcccagaccaattggaagtttgtagagggcctgctgaaggaatgccgcaataagaccaagaggatgctggtggaaaagatgggccgagaagctgtggagctagggcatggggaggtgaacatcacaggggtggaagagaacaccctgattgccagcctttgtgatctcctggaaaggatctggagtcatggactacaagtgaaacaggggaaatcagccttatggtcccacctgttacattatcaggacaaccggcagagaaaactcacatcaggaagcctcagtacctcaggaatacttcttgattcagaacgtaggaagtctgatgccagctcactcatgcctcccctgaggatctccctgattcaggatatgaggcacatccagaacatcggggaaatcaagactgatgtgggaaaggccagagcatgggtgcgactgtccatggaaaaaaagttactttccagacacctgaagcagctcctctcagaccatgagctcaccaaaaagttatataagcgctatgccttcctgcgctgtgatgacgagaaggagcagttcctctatcacctcctgtctttcaatgccgtcgattacttttgcttcaccaatgtcttcacaactatcctgatcccgtaccacattctgatcgtaccaagcaagaagctggggggctccatgttcactgccaacccatggatctgtatatcaggagaattgggtgagacacagatcatgcagattcccaggaatgtgctagagatgaccttcgagtgccagaacttggggaagcttactactgtccagattggccatgataactctgggctgtatgccaaatggctggtggagtatgtgatggtcaggaatgagatcacaggacatacctacaagttcccgtgtggccggtggttagggaagggcatggatgatggaagcctggagcggatcctagttggggagctgctcacatcccagcctgaggtggatgagaggccatgccggaccccgccgctgcagcagtcccccagtgtcatccggaggcttgttaccatctcacccaacaacaagcccaagctgaacactgggcagatccaggagtccatcggggaggcagtcaatggcattgtgaagcacttccataagcctgagaaagagcgaggcagtctgacgctgttgctctgtggagagtgtggccttgtctcggccttggaacaggctttccagcatggatttaaatcgccccggctcttcaaaaatgtcttcatttgggatttcctggaaaaagcacaaacctattatgagacattagagaagaatgaagtagtccctgaggaaaactggcatacaagagcccggaacttctgccgatttgtcactgcaatcaacaatactccccggaacatcgggcaaggatggcaagtttcagatgctggtgtgcttggggagccagagatcacctcctacaccactgggatttgccctgctggctgactgccccataactgcacacatgtatgaggatgtggcactgatcaaagaccatacacttgtcaattccttgattcgtgtgctgcagacattgcagggagtttcaacatcacgctgggaggacgtccctttgtcaaggggcattcggacatcttgacctcccagcaccagcccggcagcagggattgaggaaagactcaccctggcagctctgacctttttttcccaaaggggactttaaggcgattgtgcaggagtaggagacaaaatgttacactcactgtaaaaagaaaactaggaggatttttgggaataaataatctattttagagtttatttgctgatttgctttttacacactttcatgtgaaagagtgatagggagagggagcgaggctggtgccgcttattttgaagctggtgccctccctcgccgtggccacatgctggaagcctgaggcctccctggactgagcctgtggcactgcgtgcgggacagttatgtttccttgccccgtcgcattaatgaggcccttccacatcatttttaaactaatgtttttctatattaacattattatggatatttggctttcataggccacacacaggtgtgctgcgcgggaagccccatgctccaatcaaagggatttttagtagtgcctctaagcaagcaccgatgagtcagtcccacgtattttcttttttgtcagtattgtttgggaaggagacatgccgggatgtgtcatcgtgccaaataccacatttcctgttggcacagtttcacagaagtaaacataagcatgttttaacaggtttttcttttcttttttcttttttaaaatgttttatttatttaacccgccattgtgtgtttttaagtattttctttttttaaggaaaggaaaagcttgtcacaatctaactggctatgttattattattaaatttatgttttgcaacttagaaaccagctacagtatggcccacttaataaaacacctgaaacaaaaaaaaaaaaaaaaa

SEQ ID NO: 150063 - DNA, 406 bp, Homo sapiens
ttttcttaagatctttctatcacgttttccctaaaccactttcccattgccgtctctttctgtgagttgtagtgttctttaacgggcaaggaggtaaacctctgactgtgtttctcatggttttcttagttggccgttggtggtttgtaattttattttttgtgttgctttttgccacaaagggtttctttgttttgttgtttttaatgtaataatccaataacttcttgattttaattcccatccttgacaacaaaagaaccaagggcaaccaggggtggcgggtttcctccatcctccttgctgacctcccttgtctgccctcccccagataccatggcctgggagaccatcctgatggatacactggaggacaacatcccccgtgctcgggctggccactgcg

SEQ ID NO: 150064 - DNA, 887 bp, Homo sapiens
tttttttttttttttttttgagacggggttttgtcatggtgcccaggttggtcttgaactcctgggctcaagcaatccacctgcctcagccacccaaagtactgggattacaggcgtgagtcaccacacctggcccttgcttactttcgtacttcccatgaggcaggttaccaaattggtgaaattaaccataacgtcattgtgatgggcaagcagatatattaaaagcaaagatacagcaggttaacattaaattttgctcatcccaggacaaacctggccacaggaggcctttgccagtattctgaaaagtgttgtgaccatctcctttaaagctcagttaaaggtttctggctggactccaggctgcttcaagctctttacttgtctttatcattctttaaggagggacccagacacagtatgcagaggcctgaatcctctagatcattctctctccaccatgagtcctgccgtggggacttttccagctccctttggccttatgagccagaaaatcaggctagagcctgagcaaagggagatactgtgagcacctgcaggatacacccatgttccaccacctgcctgaagaagcctgtggttcttgtcagcttctcaagggtgaagtgccaatccttttctgcttgagcagaagagcagaccaaagagctcattgactcaaggagcatcacggcaactgagctgcacctgcgtgatcacctccacaccttgactgccttcgtctgcagcacgctgctggtaaaggctgggtggctgcaccgtcgtcccctaacccaacattgctttcatctgggaaaattcgcttgatagccaattaagccatggaggctattacatttacacggggctacgcacaatctcag

SEQ ID NO: 150065 - DNA, 431 bp, Homo sapiens
gccgccggctccgcggcgatggcgctctataacccctaccgccacgacatggtcgcagttctaggggagaccacaggacaccgcaccctgaaggtcctcagggaccagatgaggagggatccagagggtgcccagatcctgcaggagcgtccccggatttcgacatccaccctcgacctgggcaagctccagagcctgccggaaggctccctcggtcgcgagtatctccgtttcctggatgtgaacagggtctccccagacacccgagcacccacccgcttcgtggatgatgaggagctagcgtatgtgattcagcggtaccgggaggtgcacgacatgcttcacaccctgctggggatgcccaccaacatcctgggggagatcgtggtgaaatggtttgaggctgtccagactggcctgcccatgtgcat

SEQ ID NO: 150066 - DNA, 429 bp, Homo sapiens
gaaagatacactcaccggagaaaagaagtttctgaagaaaaccacaaccatgccaatgaacgaatgctatttcatgggtctccttttgtgaatgcaattatccacaaaggctttgatgaaaggcatgcgtacataggtggtatgttcgtagctcgtgtttattatgatgacaactcttcctcttgcactcattctgtatatcgaaatgcttgtcagcatggctcctgaaaataggctatgcccagttctctgattagcccatcacgtcactccattactctgacatcttgcctcagtcatcactaatactgcccagccatatacatagctctctgcagccttgacacttctggttcatgcgatcatcctgccctcatctgtcatgtatcctgtgattaccagtctcataccaccatgcctggcccatct

SEQ ID NO: 150067 - DNA, 484 bp, Homo sapiens
  misc_feature (1)...(484): n = a,t,c or g
cgagaaaaaatggcccgcctgctgattcggcacgagctgagatcaacaagaagatttataagattggccagggctaccttatcaaggacggcaggctgatcaagaacaatgcctccactgactatgacctatctgacaagagcatcaaccctctgtccttgctggagcagaccaagcggcgggctctggagaagattgaccttaagttcattgacaccacctccaagtttggccatggccgcttccagaccatggaggagaagaaagcattcatgggaccactgaagaaagaccgaattgcaaaggaagaaggagcttaatgccaggaacagattttgcagttggcggggtctcaataaaagttattttccactgaaaaaaatgaaaaccaataccttgcctnnnnnnnnnnccgggcccccaatctcccttatnnnnnnnnnnttaacattctccgggccgcggtttaacaaggcgggggggg

SEQ ID NO: 150068 - DNA, 1333 bp, Homo sapiens
atgtctcacagaaagttctccgctcccagacatgggtccctcggcttcctgcctcggaagcgcagcagcaggcatcgtgggaaggtgaagagcttccctaaggatgacccgtccaagccggtccacctcacagccttcctgggatacaaggctggcatgactcacatcgtgcgggaagtcgacaggccgggatccaaggtgaacaagaaggaggtggtggaggctgtgaccattgtagagacaccacccatggtggttgtgggcattgtgggctacgtggaaacccctcgaggcctccggaccttcaagactgtctttgctgagcacatcagtgatgaatgcaagaggcgtttctataagaattggcataaatctaagaagaaggcctttaccaagtactgcaagaaatggcaggatgaggatggcaagaagcagctggagaaggacttcagcagcatgaagaagtactgccaagtcatccgtgtcattgcccacacccagatgcgcctgcttcctctgcgccagaagaagggcccacttgatgggagatcaggtggaacgaggggcactgtggcccgagaaagctgactggggcccgcgagagggcttgagcagcaggtacctgtgaaccaagtgttttgggcaggatgagatgatcgacgtcatcgggggtgacccaagggcaaaaggcttacaaaggggtcaaccagtcgttggcacacccaagaaagctgcccccgcaaagaccccaccgaaggcctgcgcaaaggtggcctgtattcgggcatggccatcctgctcgtgtagccttctctgtggcacgcgcctgggcaagaaaggctaccatcaccgcactgagatcaacaaagaagatttataagattggccagggctaccttatcaagggcgggcaagctgatcaagaacaatgcctccacttgactatgaccttatcttgacaagagcatcaacccctctgggtgggcttttgtccacttatggtgaaagtgacccaatgactttgtcatgcttgaaaggcctgtgtggtgggaaccaaaaaagcgggtgctcaccctccgcaagtcctttgctgggtgcagacgaaagcggcggggctttggagaagaattgaccttaagttccattgacaccacctccaagttttggccatggccgcttccagaccatggaggagaagaaagcattcatggggaccactgaagaaagaccgaattgcaaaggaagaaggagcttaatgccaggaacagattttgcagttggtggggtctcaataaaagttattttccactgaaaaaaacaaaaaaaaaaaaaa

SEQ ID NO: 150069 - DNA, 456 bp, Homo sapiens
gcatttgtaatatttgtagtgctctttttcttttttgtaatgctttatttctgaatttgggtggtggctactggtatttgtatattatttttggtacccttttatatgtctgaaatgtgtttaattttttaaagggccagtggatagcatacgtgcttatgtatccatgtgaactctgtttttcatgcagtcagctgagcaagttgcatgaagtttctctgaggaactgtgcagtaagttgcgctggtgaaaaaggaggagttgctgaagcatgtcctaatatcagaaaggtagatttgtcaaaaaacctgttgtcatcatggtatgaagtgatacacattgctgatcagctcagacacctggaagtccttaatgtcagtgaaaataaactaatatttccctccggttcagtattaactggaacgctttctgtactgaaggctttagtcctcaatc

SEQ ID NO: 150070 - DNA, 386 bp, Homo sapiens
gcaaaaaaatagatggacagcaaaccggtattgcatgcatagagggccatcagttccaagcaaaaaatttttggtaagttaaaattttggatattggggagttttggcattgttttaagtctttgtagttcttgctttagtgatttgggctacaccttgtttgtttatgattaagaacaatttagagatggtataaaattttagccttttgatataaggaaggtaaatttgctcaacagcctaatcactaaaggtagtggtaaatctgttgacattcagtggaaagagtatgggactagcaaacagcatcctgagggagcatgtgtgcctgcgagaacaccagttggcaatccatatgctcattctgtgaaggggctgttcctgaa

SEQ ID NO: 150071 - DNA, 993 bp, Homo sapiens
gtgctggaattccggggaagtcaggtggccgctgccgccgccgccgccgcggtttgtcgccagaaggaagatggcggatctggaggagcagttgtctgatgaagagaaggtgcgtatattttttgaaatttttcattcatgcccctcctggagaaataaatgagggtttcaatgatgttaggttactgcttaataatgacaatcttctcagggaaggagcagcccatgcatttgcacagtataacttggaccagtttactccattaaaaattgaaggtttatgaagatcaggtattgataacagaacatggccgacttggggaaatgggaaagtttttgggatccaaagaaccagaatctgttttaaattttgatcactttaaggaaggagggcaactgatcccaaggacccctgttgaagtaggaaaatgcagttgaatcatggagaacttcagtagaaactgctctgagagcttacgtaaaagaacattaccccgaatgggagtctggcactgtgtatgggcaaaaaaatagatgggacagccaaaccattattgcatgcataagaaagccatcagttccaagcaaaaaatttttggaatggtcgttggaggtcagaatggaagtttacaatcactccttcaaccactcaagtggttgggcatcttgaaaattcaggttcattattatgaagatggtaatgttcagctagtgagtcataaagatatacaagattccctaacagtgtctaatgaagtgcaaacagcaaaagaatttataaagattgtagaagctgcagaaaatgaataccagactgccatcagtgagaattatcagacaatgtcggacactactttcaaagccttacgtcgacagttgccagttacacgcactaagattgattggaacaagatccttagctacaagattggcaaagagatgcagaatgcataagatgaacattgcatgaccggatcattttagtgtctttgc

SEQ ID NO: 150072 - DNA, 553 bp, Homo sapiens
gcgaccttcaattatataatctgaggttagaaaacgaaaagctgcttgagagcaaagcctgcctacaggattcctatgacaacttacaagaaataatgaaatttgagattgaccaactttcaagaaacctccaaaacttcaaaaaagaaaatgaaactctgaaatctgatctgaataatttgatggagcttcttgaggcagaaaaagaacgcaataacaaattatcattacagtttgaagaagataaagaaaacagttctaaagaaatcttaaaagttcttgaggctgtacgtcaggagaaacagaaagagacggccaagtgtgagcagcagatggcaaaagtacagaaactagaagagagcttgcttgctactgaaaaagtgatcagttccctggaaaagtctagagattctgataagaaagttgtagctgacctcatgaaccagatccaggagctaagaacatcggtctgtgagaaaacagaaactatagacaccctgaaacaagaactgaaggacataaattgcaaatacaactctgctttggatgacaa

SEQ ID NO: 150073 - DNA, 522 bp, Homo sapiens
  misc_feature (1)...(522): n = a,t,c or g
tacaacggaagtaaaatctgtcgaaatgcaccatgaagctttgagtgaagctcttcctggggacaatgtgggcttcaatgtcaagaatgtgtctgtcaaggatgttcgtcgtggcaacgttgctggtgacagcaaaaatgacccaccaatggaagcagctggcttcactgctcaggtgattatcctgaaccatccaggccaaataagcgccggctatgccctgtattggattgccattgttgatatggttcctggcaagcccatgtgtgttgagagcttctcagactatccacctttgggtcgctttgctgttcgtgatatgagacagacagttgcggtgggtgtcatcaaagcagtggacaagaaggctgctggactggcaaggtcacaagttgccagaaantcagaaggctaaatgaatattancctaatactgccacccatcttaanagtggtggaagacggntcagactgtttgttnaattggccatttaagttagtagtaaagntgttaatgataca

SEQ ID NO: 150074 - DNA, 1257 bp, Homo sapiens; identical to SEQ ID NO: 125428

SEQ ID NO: 150075 - DNA, 1389 bp, Homo sapiens; identical to SEQ ID NO: 125531

SEQ ID NO: 150076 - DNA, 1827 bp, Homo sapiens
  misc_feature (1)...(1827): n = a,t,c or g
acgggtttgccgccagaacacaggtgtcgtgaaaactacccctaaaagccaaaatgggaaaggaaaagactcatatcaacattgtcgtcattggacacgtagattcgggcaagtccaccactactggccatctgatctataaatgcggtggcatcgacaaaagaaccattgaaaaatttgagaaggaggctgctgagatgggaaagggctccttcaagtatgcctgggtcttggataaactgaaagctgagcgtgaacgtggtatcaccattgatatctccttgtggaaatttgagaccagcaagtactatgtgactatcattgatgccccaggacacagagactttatcaaaaacatgattacagggacatctcaggctgactggtgctgtcctgaattgttgctgctggtgttggtgaatttgaagctgggtatctccaagaatgggcagacccgagagcatgcccttctggcttacacactgggtgtgaaacaaactaattgtccggtgttaacaaaatggattccactgagccaccctacagccagaagagatatgaggaaattgttaaggaagtcagcacttacattaagaaaattggctactattcccgacacattagcatttgagccaatttctggttggaatggtgacgacatgctggagccaagtgctaacatgccttggttcaagggatggaaagtcacccgtaaggatgggcaatgccagttggaaccacgctgcttgaggctctggcactgcaatcctaccaccaactcgtccaacttgacaagcccttgcgccatgcctctccagggatgtctacaaaattggtggtattgggtactgttcctgttggcccgagtggagactggtgttctcaaacccgggtatgggggtcaccttttgctccaagtcaacgtttacaacgggaagtaaaaatctgtccgaaaatgcaccatgaagcttttgagtgaagctctttcctgggggacaatgtgggcttcaaatgtcaagaatgtgtcgtgtcaaggatgttccgtccgtggcaacgtatagcatggtgacagcaaaatatgacccaccaatggaagccagctgggcttcactgctcaagtgattattcctgaaccatccagggccaaataaggcgcccggctaatgcccctggtattgggattgccacacggctcacaattgcatgcaaagtttgcctgagcctgaaggaaaagatttgattcgccgttcctggtaaaaaagcttggaagatggcccctaaattcttggaagtctgggtgatgctggccattggttgatatgggttcctgggcaagccccatgtgtgtttgagaagcttctcaagactatcccaccttttgggtcgctttgctggttcgtgataatgaggacagacagntttgcggttgggtgtcaatcaaaagcagttggacaaaaaaggctgctgggagctgggcaaaggtcaccaaagtctgcccaaaaaagctcagaaaggcttaaatggaatattatccctaatacctgccaccccactctttatcaggtgtgggaagaacggtctcaagaactgtttggttcaattggccatttaagtttaagtagtaaaagactggttaatgataacaatgcatcgtaaaacctttcagaaggaaaggagaatgttttgtggaccactttggttttcttttttgcgtgtggcagttttaagttattagtttttaaaatcagtactttttaatggaaacaacttgacccccaaatttgtcacagaattttgggacccattaaaaaagttaaatgagaaaaa

SEQ ID NO: 150077 - DNA, 5445 bp, Homo sapiens
aagatggccgcggcgcgcacggctcctgcggcggggtagaggcggaggcggagtcgagtcactcccgcacttcggggctccggtgccccgcgccaggctgcagcttactgcccgccgcggccatgcggggctccgtgcacggatgagagaagccgctgccgcgctggtccctcctcccgcctttgccgtcacgcctgccgccgccatggaggagccgccgccaccgccgccgccgccaccaccgccaccggaacccgagaccgagtcagaacccgagtgctgcttggcggcgaggcaagagggcacattgggagattcagcttgcaagagtcctgaatctgatctagaagacttctccgatgaaacaaatacagagaatctttatggtacctctccccccagcacacctcgacagatgaaacgcatgtcaaccaaacatcagaggaataatgtggggaggccagccagtcggtctaatttgaaagaaaaaatgaatgcaccaaatcagcctccacataaagacactggaaaaacagtggagaatgtggaagaatacagctataagcaggagaaaaagatccgagcagctcttagaacaacagagcgtgatcataaaaaaaatgtacagtgctcattcatgttagactcagtgggtggatctttgccaaaaaaatcaattccagatgtggatctcaataagccttacctcagccttggctgtagcaatgctaagcttccagtatctgtgcccatgcctatagccagacctgcacgccagacttctaggactgactgtccagcagatcgtttaaagttttttgaaactttacgacttttgctaaagcttacctcagtctcaaagaaaaaagacagggagcaaagaggacaagaaaatacgtctggtttctggcttaaccgatctaacgaactgatctggttagagctacaagcctggcatgcaggacggacaattaacgaccaggacttctttttatatacagcccgtcaagccatcccagatattattaatgaaatccttactttcaaagtcgactatgggagcttcgcctttgttagagatagagctggttttaatggtacttcagtagaagggcagtgcaaagccactcctggaacaaagattgtaggttactcaacacatcatgagcatctccaacgccagagggtctcatttgagcaggtaaaacggataatggagctgctagagtacatagaagcactttatccatcattgcaggctcttcagaaggactatgaaaaatatgctgcaaaagacttccaggacagggtgcaggcactctgtttgtggttaaacatcacaaaagacttaaatcagaaattaaggattatgggcactgttttgggcatcaagaatttatcagacattggctggccagtgtttgaaatcccttcccctcgaccatccaaaggtaatgagccggagtatgagggtgatgacacagaaggagaattaaaggagttggaaagtagtacggatgagagtgaagaagaacaaatctctgatcctagggtaccggaaatcagacagcccatagataacagcttcgacatccagtcgcgggactgcatatccaagaagcttgagaggctcgaatctgaggatgattctcttggctggggagcaccagactggagcacagaagcaggctttagtagacattgtctgacttctatttatagaccatttgtagacaaagcactgaagcagatggggttaagaaagttaattttaagacttcacaagctaatggatggttccttgcaaagggcacgtatagcattggtaaagaacgatcgtccagtggagttttctgaatttccagatcccatgtggggttcagattatgtgcagttgtcaaggacaccaccttcatctgaggagaaatgcagtgctgtgtcgtgggaggagctgaaggccatggatttaccttcattcgaacctgccttcctagttctctgccgagtccttctgaatgtcatacatgagtgtctgaagttaagattggagcagagacctgctggagaaccatctctcttgagtattaagcagctggtgagagagtgtaaggaggtcctgaagggcggcctgctgatgaagcagtactaccagttcatgctgcaggaggttctggaggacttggagaagcccgactgcaacattgacgcttttgaagaggatctacataaaatgcttatggtgtattttgattacatgagaagctggatccaaatgctacagcaattacctcaagcatcgcatagtttaaaaaatctgttagaagaagaatggaatttcaccaaagaaataactcattacatacggggaggagaagcacaggccgggaagcttttctgtgacattgcaggaatgctgctgaaatctacaggaagttttttagaatttggcttacaggagagctgtgctgaattttggactagtgcggatgacagcagtgcttccgacgaaatcatcaggtctgttatagagatcagtcgagccctgaaggagctcttccatgaagccagagaaagggcttccaaagcacttggatttgctaaaatgttgagaaaggacctggaaatagcagcagaattcaggctttcagccccagttagagacctcctggatgttctgaaatcaaaacagtatgtcaaggtgcaaattcctgggttagaaaacttgcaaatgtttgttccagacactcttgctgaggagaagagtattattttgcagttactcaatgcagctgcaggaaaggactgttcaaaagattcagatgacgtactcatcgatgcctatctgcttctgaccaagcacggtgatcgagcccgtgattcagaggacagctggggcacctgggaggcacagcctgtcaaagtcgtgcctcaggtggagactgttgacaccctgagaagcatgcaggtggataatcttttactagttgtcatgcagtctgcgcatctcacaattcagagaaaagctttccagcagtccattgagggacttatgactctgtgccaggagcagacatccagtcagccggtcatcgccaaagctttgcagcagctgaagaatgatgcattggagctatgcaacaggataagcaatgccattgaccgcgtggaccacatgttcacatcagaatttgatgctgaggttgatgaatctgaatctgtcaccttgcaacagtactaccgagaagcaatgattcaggggtacaattttggatttgagtatcataaagaagttgttcgtttgatgtctggggagtttagacagaagataggagacaaatatataagctttgcccggaagtggatgaattatgtcctgactaaatgtgagagtggtagaggtacaagacccaggtgggcgactcaaggatttgattttctacaagcaattgaacctgcctttatttcagctttaccagaagatgacttcttgagtttacaagccttgatgaatgaatgcattggccatgtcataggaaaaccacacagtcctgttacaggtttgtaccttgccattcatcggaacagcccccgtcctatgaaggtacctcgatgccatagtgaccctcctaacccacacctcattatccccactccagagggattcagcactcggagcatgccttccgacgcgcggagccatggcagccctgctgctgctgctgctgctgctgctgctgttgctgccagtcggcccagcccctctggtggtgactctgtgctgcccaaatccatcagcagtgcccatgataccaggggttccagcgttcctgaaaatgatcgattggcttccatagctgctgaattgcagtttaggtccctgagtcgtcactcaagccccacggaggagcgagatgaaccagcatatccaagaggagattcaagtgggtccacaagaagaagttgggaacttcggacactaatcagccagagtaaagatactgcttctaaactaggacccatagaagctatccagaagtcagtccgattgtttgaagaaaagaggtaccgagaaatgaggagaaagaatatcattggtcaagtttgtgatacgcctaagtcctatgataatgttatgcacgttggcttgaggaaggtgaccttcaaatggcaaagaggaaacaaaattggagaaggccagtatgggaaggtgtacacctgcatcagcgtcgacaccggggagctgatggccatgaaagagattcgatttcaacctaatgaccataagactatcaaggaaactgcagacgaattgaaaatattcgaaggcatcaaacaccccaatctggttcggtattttggtgtggagctccatagagaagaaatgtacatcttcatggagtactgcgatgaggggactttagaagaggtgtcaaggctgggacttcaggaacatgtgattaggctgtattcaaagcagatcaccattgcgatcaacgtcctccatgagcatggcatagtccaccgtgacattaaaggtgccaatatcttccttacctcatctggattaatcaaactgggagattttggatgttcagtaaagctcaaaaacaatgcccagaccatgcctggtgaagtgaacagcaccctggggacagcagcatacatggcacctgaagtcatcactcgtgccaaaggagagggccatgggcgtgcggccgacatctggagtctggggtgtgttgtcatagagatggtgactggcaagaggccttggcatgagtatgagcacaactttcaaattatgtataaagtggggatgggacataagccaccaatccctgaaagattaagccctgaaggaaaggacttcctttctcactgccttgagagtgacccaaagatgagatggaccgccagccagctcctcgaccattcgtttgtcaaggtttgcacagatgaagaatgaagcctagtagaatatggacttggaaaattctcttaatcactactgtatgtaatatttacataaagactgtgctgagaagcagtataagcctttttaaccttccaagactgaagactgcacaggtgacaagcgtcacttctcctgctgctcctgtttgtctgatgtggcaaaaggccctctggagggctggtggccacgaggttaaagaagctgcatgttaagtgccattactactgtacacggaccatcgcctctgtctcctccgtgtctcgcgcgactgagaaccgtgacatcagcgtagtgttttgacctttctaggttcaaaagaagttgtagtgttatcaggcgtcccataccttgtttttaatctcctgtttgttgagtgcactgactgtgaaacctttaccttttttgttgttgttggcaagctgcaggtttgtaatgcaaaaggctgattactgaaatttaagaaaaaggtt

SEQ ID NO: 150078 - DNA, 5299 bp, Homo sapiens
aagatggccgcggcgcgcacggctcctgcggcggggtagaggcggaggcggagtcgagtcactcccgcacttcggggctccggtgccccgcgccaggctgcagcttactgcccgccgcggccatgcggggctccgtgcacggatgagagaagccgctgccgcgctggtccctcctcccgcctttgccgtcacgcctgccgccgccatggaggagccgccgccaccgccgccgccgccaccaccgccaccggaacccgagaccgagtcagaacccgagtgctgcttggcggcgaggcaagagggcacattgggagattcagcttgcaagagtcctgaatctgatctagaagacttctccgatgaaacaaatacagagaatctttatggtacctctccccccagcacacctcgacagatgaaacgcatgtcaaccaaacatcagaggaataatgtggggaggccagccagtcggtctaatttgaaagaaaaaatgaatgcaccaaatcagcctccacataaagacactggaaaaacagtggagaatgtggaagaatacagctataagcaggagaaaaagatccgagcagctcttagaacaacagagcgtgatcataaaaaaaatgtacagtgctcattcatgttagactcagtgggtggatctttgccaaaaaaatcaattccagatgtggatctcaataagccttacctcagccttggctgtagcaatgctaagcttccagtatctgtgcccatgcctatagccagacctgcacgccagacttctaggactgactgtccagcagatcgtttaaagttttttgaaactttacgacttttgctaaagcttacctcagtctcaaagaaaaaagacagggagcaaagaggacaagaaaatacgtctggtttctggcttaaccgatctaacgaactgatctggttagagctacaagcctggcatgcaggacggacaattaacgaccaggacttctttttatatacagcccgtcaagccatcccagatattattaatgaaatccttactttcaaagtcgactatgggagcttcgcctttgttagagatagagctggttttaatggtacttcagtagaagggcagtgcaaagccactcctggaacaaagattgtaggttactcaacacatcatgagcatctccaacgccagagggtctcatttgagcaggtaaaacggataatggagctgctagagtacatagaagcactttatccatcattgcaggctcttcagaaggactatgaaaaatatgctgcaaaagacttccaggacagggtgcaggcactctgtttgtggttaaacatcacaaaagacttaaatcagaaattaaggattatgggcactgttttgggcatcaagaatttatcagacattggctggccagtgtttgaaatcccttcccctcgaccatccaaaggtaatgagccggagtatgagggtgatgacacagaaggagaattaaaggagttggaaagtagtacggatgagagtgaagaagaacaaatctctgatcctagggtaccggaaatcagacagcccatagataacagcttcgacatccagtcgcgggactgcatatccaagaagcttgagaggctcgaatctgaggatgattctcttggctggggagcaccagactggagcacagaagcaggctttagtagacattgtctgacttctatttatagaccatttgtagacaaagcactgaagcagatggggttaagaaagttaattttaagacttcacaagctaatggatggttccttgcaaagggcacgtatagcattggtaaagaacgatcgtccagtggagttttctgaatttccagatcccatgtggggttcagattatgtgcagttgtcaaggacaccaccttcatctgaggagaaatgcagtgctgtgtcgtgggaggagctgaaggccatggatttaccttcattcgaacctgccttcctagttctctgccgagtccttctgaatgtcatacatgagtgtctgaagttaagattggagcagagacctgctggagaaccatctctcttgagtattaagcagctggtgagagagtgtaaggaggtcctgaagggcggcctgctgatgaagcagtactaccagttcatgctgcaggaggttctggaggacttggagaagcccgactgcaacattgacgcttttgaagaggatctacataaaatgcttatggtgtattttgattacatgagaagctggatccaaatgctacagcaattacctcaagcatcgcatagtttaaaaaatctgttagaagaagaatggaatttcaccaaagaaataactcattacatacggggaggagaagcacaggccgggaagcttttctgtgacattgcaggaatgctgcctgaaatctacaggaagttttttagaatttggcttacaggagagctgtgctgaattttggactagtgcggatgacagcagtgcttccgacgaaatcatcaggtctgttatagagatcagtcgagccctgaaggagctcttccatgaagccagagaaagggcttccaaagcacttggatttgctaaaatgttgagaaaggacctggaaatagcagcagaattcaggctttcagccccagttagagacctcctggatgttctgaaatcaaaacagtatgtcaaggtgcaaattcctgggttagaaaacttgcaaatgtttgttccagacactcttgctgaggagaagagtattattttgcagttactcaatgcagctgcaggaaaggactgttcaaaagattcagatgacgtactcatcgatgcctatctgcttctgaccaagcacggtgatcgagcccgtgattcagaggacagctggggcacctgggaggcacagcctgtcaaagtcgtgcctcaggtggagactgttgacaccctgagaagcatgcaggtggataatcttttactagttgtcatgcagtctgcgcatctcacaattcagagaaaagctttccagcagtccattgagggacttatgactctgtgccaggagcagacatccagtcagccggtcatcgccaaagctttgcagcagctgaagaatgatgcattggagctatgcaacaggataagcaatgccattgaccgcgtggaccacatgttcacatcagaatttgatgctgaggttgatgaatctgaatctgtcaccttgcaacagtactaccgagaagcaatgattcaggggtacaattttggatttgagtatcataaagaagttgttcgtttgatgtctggggagtttagacagaagataggagacaaatatataagctttgcccggaagtggatgaattatgtcctgactaaatgtgagagtggtagaggtacaagacccaggtgggcgactcaaggatttgattttctacaagcaattgaacctgcctttatttcagctttaccagaagatgacttcttgagtttacaagccttgatgaatgaatgcattggccatgtcataggaaaaccacacagtcctgttacaggtttgtaccttgccattcatcggaacagcccccgtcctatgaaggtacctcgatgccatagtgaccctcctaacccacacctcattatccccactccagagggattcaggggttccagcgttcctgaaaatgatcgattggcttccatagctgctgaattgcagtttaggtccctgagtcgtcactcaagccccacggaggagcgagatgaaccagcatatccaagaggagattcaagtgggtccacaagaagaagttgggaacttcggacactaatcagccagagtaaagatactgcttctaaactaggacccatagaagctatccagaagtcagtccgattgtttgaagaaaagaggtaccgagaaatgaggagaaagaatatcattggtcaagtttgtgatacgcctaagtcctatgataatgttatgcacgttggcttgaggaaggtgaccttcaaatggcaaagaggaaacaaaattggagaaggccagtatgggaaggtgtacacctgcatcagcgtcgacaccggggagctgatggccatgaaagagattcgatttcaacctaatgaccataagactatcaaggaaactgcagacgaattgaaaatattcgaaggcatcaaacaccccaatctggttcggtattttggtgtggagctccatagagaagaaatgtacatcttcatggagtactgcgatgaggggactttagaagaggtgtcaaggctgggacttcaggaacatgtgattaggctgtattcaaagcagatcaccattgcgatcaacgtcctccatgagcatggcatagtccaccgtgacattaaaggtgccaatatcttccttacctcatctggattaatcaaactgggagattttggatgttcagtaaagctcaaaaacaatgcccagaccatgcctggtgaagtgaacagcaccctggggacagcagcatacatggcacctgaagtcatcactcgtgccaaaggagagggccatgggcgtgcggccgacatctggagtctggggtgtgttgtcatagagatggtgactggcaagaggccttggcatgagtatgagcacaactttcaaattatgtataaagtggggatgggacataagccaccaatccctgaaagattaagccctgaaggaaaggacttcctttctcactgccttgagagtgacccaaagatgagatggaccgccagccagctcctcgaccattcgtttgtcaaggtttgcacagatgaagaatgaagcctagtagaatatggacttggaaaattctcttaatcactactgtatgtaatatttacataaagactgtgctgagaagcagtataagcctttttaaccttccaagactgaagactgcacaggtgacaagcgtcacttctcctgctgctcctgtttgtctgatgtggcaaaaggccctctggagggctggtggccacgaggttaaagaagctgcatgttaagtgccattactactgtacacggaccatcgcctctgtctcctccgtgtctcgcgcgactgagaaccgtgacatcagcgtagtgttttgacctttctaggttcaaaagaagttgtagtgttatcaggcgtcccataccttgtttttaatctcctgtttgttgagtgcactgactgtgaaacctttaccttttttgttgttgttggcaagctgcaggtttgtaatgcaaaaggctgattactgaaatttaagaaaaaggtt

SEQ ID NO: 150079 - DNA, 425 bp, Homo sapiens
ggtgtctggttgagaagggagatgtggcctttgcgaaacaccagactgtccgacagaacactgggggaaaaaaccctgattcatgggctaagaatctgaatgagaaagactatgagtcgctgtgccttgatggtaccaggaaacctgtggaggagtatgcgaactgccacctggccagagccccgaatcacgctgtggtcacacggaaagataaggaagcttgcgtgcacaagatattacgtcaacagcagcacctatttggaagcaacgtaactgactgctcgggcaacttttgtttgatccggtcggaaaccaaggaccttctgttcagagatgacacagtatgtttggccaaacttcatgacagaaacacatatgagaaatacttaggagaagactatgtcaaagcttgtggtaacccgaat

SEQ ID NO: 150080 - DNA, 234 bp, Homo sapiens
acccttctcacttttgaccccccccgttatgatgggacaaaccttccccctctttttacccacccccctcacttctacctgaccccccgctctttccatgttaacgcccactgcttgaatgtggcccacgcgctgaccaacgccgtggcgcacgtggactacatgcccaacgcgctgtccgccctgagcgacctgcacgcgcacaagcttcgggtggacccggtcaacttcaag

SEQ ID NO: 150081 - DNA, 426 bp, Homo sapiens
cagccctttgtgtaacactatgcaaggagaggcatgtcagggatgtcccctgtggttatcacttttcttttcagaccactgcgtgcagtgtgaacaagcagcctgattttgccacttcaggccaatgggaagtggacactgaatctgaagggaataaagagatgaatgtctttgatggatacatgggtctcactgtccatcacatcattgctgatctacctatggatagcttacctggtgaacttcttacgcacgtatgagaactctagatccatgtactgttttctcgaccccttctttatgggaggatattgagtactctgcagctttctaagaatttgtcgactcaccttcttaaggtctatgcggaactacatgtgtttgtacctagtcactttagatcgcctgccctttgaagaaactgcg

SEQ ID NO: 150082 - DNA, 3572 bp, Homo sapiens
gaccggccgaattccggtcgaccacgcgccgcccttgcggccggctctacgttccctgttctcgcctgcagctccgccatggctcctaaaggcagctccaaacagcagtctgaggaggacctgctcctgcaggatttcagccgcaatctctcggccaatgcctccagcgctcttcttcggaaacggcgttcatcgtgtttgccatccccatctgggttatactggcgaatatggcatatggatctattcaagtctgctgttttgtatagtgtgatgacctagttaagcacatatttggtagcctttgccatacaagaatgtgaaatttgttgtcaagcacaaagtaggcacagaaggaggggaaggatgctgtttccaaaggaagtgactcgaaaacttttctggaagcttgattattaggaaaggtgttctcgggaagggaggaaagatggaaagaatcttgtggaaggaagaatgaagttggctgattatgaagctaccaacatttttccgatcttctataacaacactctgttccctggtccgtggtcattgttgcttccttcttccatattgaagaacttccaaccccacagtgtatccttttcaaggaactacatattgtccattagtggtttcatcaggactcatcgccctcctgtttactggctccaaatagaccatgtcagcttcaccccctggctttgtgtctatgggtggcctgtggtatatggaaaagtagcagggtggtcagggtgggagacacaagatgtttttatagtctagagccttttaaaaaacccagcagaatgtaattcagtatttggtttattggctggttttttggaccagattgttggaaattaaatgaattgaaagggaaactccagagtacttaggacgtttattaaaaggaaaaaaatgtcttgcaatgtgctgtaatcacaagaggagaaaataacttgtttccttgatctgtcagaggtcacagtaacctgggccgagctgttattatttattatataatagtagtaggaagttaataactggttctctgtgttccaagcacaatattacaactttttttgaaccgtaaatatcagaatgaatcctcttcccaggggattgaacagaagcttaatgtttacaagtgtttgaatttgtgatctgaaataacacaaaattaaaaacatgatttctctaattttccaactagaggaagagaaacttgtggaaaagttctttttttctcttttttttttcttaaagaagggcagccaaggtagtaacctaaaaatagtgcccaggcatatgagagttgtcctacgaggttaaagaacacactgttccactggtatggctttgggcctgaagtggccagggaggtcaacttgaccctgccatgttggtttgacttactaagacacaggaatcattgttttccttgaccagggtctcacaccctggaggaatgttaagtaagagaaagaacctctttcctgaatattgacatgtaaaagaccaaagtaatttttctgaacttctgcaattctgagaactctccaaggaatttacagtgattttacgtgcttgtcagcatttttccatgaggactttcatacatttgactctttagttcacaggttcccattgattgtgagcaagatatttatctctttagcccttggggatccaggctgagagcaatctcttgcatttttttacccgtgtatgtacagatatcatttcttgtgtatgccatgacttgaaaaagtttgggaagctctttagcaatatcagctaaaaggatatgaaatcacaggtgatagcagttgtcattcagtaatttcccacaagcagcaccccaaaggaaatatagtcctaatccttactatccacttctaaatttaatgtgaatttcatacatgttattagttgttttctttataattttataaaaattattcatcgggagtttaacttccacttccatgctatccggatgtgttgggctccatgcaagaacttggaaagaaaaacaggcaggaatgcatttgcataatgaccccagatcatcattttctgcaactgagaattatatttcatcattgcttctaagaagcctgcaattcttttacttttcttggcggcatgattatctaggtgccatcactggataatgtgggagtgactagagaagtcatatatccactgtaaggtacagtttagggtaacactttagaggtttattatttttaaaaaacttttcttgaactcctggcccaacatgtgtgaaaccccgtctctactaaaaataccaaaattagccaggcgtgatggtgggtgcctgtaatctcagctacttgggaggctgaagcagggagaactgcctgaacccgggaggcggaggttgcagtgagttcgagatcgtgctactactgcctgggtggcaagggtgagactccatctcaaaaaagaaacaaaaaaacccaaaagagttttctttacatgttggttaaaaaaaaaaagccagaccatagtttgactggtggcatggaatttgtgtatcaaataaatgcatttgcttatttgacaaaccatcagtgtccactatttgttaccagagttgggccactatcttttaaaattgctggtgaaaacttgccactagatggcagtgcctgtatagatggggaaaaaattgccaccattcttggtataatacagtgtagcctagatgaggtggtgaaataggggtatcagccgaatattcctaatatagtttctcttgaattaataaactgaagatttgtaggaaaatgagtgagcaaaatttgtttactgttgtgaatttttcctacagcactgtttttaatcttggtgttttccaactttctgtactaatagatacatttctgtgcataagattataaagcatatactcacagttcagtagttttcgttaaggatttactgtgtgagtactttactgtgaggaattgcagaaccttttcccctctactcttgtctaaaagttctgtgtggcacacagagatgcgacctactcaatctgacttagtaaaaccatgctgtagaatttttgtcttaaaaagaccacatacccagcacccatgaaataaaagattcatctgtaattgggattcaaagtgattaaattccattgttcatactcataaatagcactaaagtgttataacattttcatttacctatttttagttccttcattttaacttaataaaaatcttggattgatattcttttttttttttttttttttttttgagacagcgtctcgctctgtcacccaggctggagtacagtggctctatcttggctcactgcgagctccgcctcccaggttcacgccattctcctgtagtctcagctacttgggaggctgaagcaggagaactgcctgaacccaggaggcagaggttgcggtgagtcgagatcgtgctactactgcctgggtggcaagggtgagactccatctcaaaaaagaaacaataaaacccaaaaagttttctttactgttggttaaaaaaaaa

SEQ ID NO: 150083 - DNA, 4500 bp, Homo sapiens
atgaagaaaagaagagaaaaaagtagtcagagcttgggagtactgaaacgctttggactccagccagctgccatcactgagccacaaatcatcaaaatgacgaggattttgacagctttcaaagtggtgaggacactgaagactggttttggctttaccaatgtgactgcacaccaaaaatggaaattttcaagacctggcatcaggctcctttctgtcaaggcacagacagcacacattgtcctggaagatggaactaagatgaaaggttactcctttggccatccatcctctgttgctggtgaagtggtttttaatactggcctgggagggtacccagaagctattactgaccctgcctacaaaggacagattctcacaatggccaaccctattattgggaatggtggagctcctgatactactgctctggatgaactgggacttagcaaatatttggagtctaatggaatcaaggtttcaggtttgctggtgctggattatagtaaagactacaaccactggctggctaccaagagtttagggcaatggctacaggaagaaaaggttcctgcaatttatggagtggacacaagaatgctgactaaaataattcgggataagggtaccatgcttgggaagattgaatttgaaggtcagcctgtggattttgtggatccaaataaacagaatttgattgctgaggtttcaaccaaggatgtcaaagtgtacggcaaaggaaaccccacaaaagtggtagctgtagactgtgggattaaaaacaatgtaatccgcctgctagtaaagcgaggagctgaagtgcacttagttccctggaaccatgatttcaccaagatggagtatgatgggattttgatcgcgggaggaccggggaacccagctcttgcagaaccactaattcagaatgtcagaaagattttggagagtgatcgcaaggagccattgtttggaatcagtacaggaaacttaataacaggattggctgctggtgccaaaacctacaagatgtccatggccaacagagggcagaatcagcctgttttgaatatcacaaacaaacaggctttcattactgctcagaatcatggctatgccttggacaacaccctccctgctggctggaaaccactttttgtgaatgtcaacgatcaaacaaatgaggggattatgcatgagagcaaacccttcttcgctgtgcagttccacccagaggtcaccccggggccaatagacactgagtacctgtttgattcctttttctcactgataaagaaaggaaaagctaccaccattacatcagtcttaccgaagccagcactagttgcatctcgggttgaggtttccaaagtccttattctaggatcaggaggtctgtccattggtcaggctggagaatttgattactcaggatctcaagctgtaaaagccatgaaggaagaaaatgtcaaaactgttctgatgaacccaaacattgcatcagtccagaccaatgaggtgggcttaaagcaagcggatactgtctactttcttcccatcacccctcagtttgtcacagaggtcatcaaggcagaacagccagatgggttaattctgggcatgggtggccagacagctctgaactgtggagtggaactattcaagagaggtgtgctcaaggaatatggtgtgaaagtcctgggaacttcagttgagtccattatggctacggaagacaggcagctgttttcagataaactaaatgagatcaatgaaaagattgctccaagttttgcagtggaatcgattgaggatgcactgaaggcagcagacaccattggctacccagtgatgatccgttccgcctatgcactgggtgggttaggctcaggcatctgtcccaacagagagactttgatggacctcagcacaaaggcctttgctatgaccaaccaaattctggtggagaagtcagtgacaggttggaaagaaatagaatatgaagtggttcgagatgctgatgacaattgtgtcactgtctgtaacatggaaaatgttgatgccatgggtgttcacacaggtgactcagttgttgtggctcctgcccagacactctccaatgccgagtttcagatgttgagacgtacttcaatcaatgttgttcgccacttgggcattgtgggtgaatgcaacattcagtttgcccttcatcctacctcaatggaatactgcatcattgaagtgaatgccagactgtcccgaagctctgctctggcctcaaaagccactggctacccattggcattcattgctgcaaagattgccctaggaatcccacttccagaaattaagaacgtcgtatccgggaagacatcagcctgttttgaacctagcctggattacatggtcaccaagattccccgctgggatcttgaccgttttcatggaacatctagccgaattggtagctctatgaaaagtgtaggagaggtcatggctattggtcgtacctttgaggagagtttccagaaagctttacggatgtgccacccatctatagaaggtttcactccccgtctcccaatgaacaaagaatggccatctaatttagatcttagaaaagagttgtctgaaccaagcagcacgcgtatctatgccattgccaaggccattgatgacaacatgtcccttgatgagattgagaagctcacatacattgacaagtggtttttgtataagatgcgtgatattttaaacatggaaaagacactgaaaggcctcaacagtgagtccatgacagaagaaaccctgaaaagggcaaaggagattgggttctcagataagcagatttcaaaatgccttgggctcactgaggcccagacaagggagctgaggttaaagaaaaacatccacccttgggttaaacagattgatacactggctgcagaatacccatcagtaacaaactatctctatgttacctacaatggtcaggagcatgatgtcaattttgatgaccatggaatgatggtgctaggctgtggtccatatcacattggcagcagtgtggaatttgattggtgtgctgtctctagtatccgcacactgcgtcaacttggcaagaagacggtggtggtgaattgcaatcctgagactgtgagcacagactttgatgagtgtgacaaactgtactttgaagagttgtccttggagagaatcctagacatctaccatcaggaggcatgtggtggctgcatcatatcagttggaggccagattccaaacaacctggcagttcctctatacaagaatggtgtcaagatcatgggcacaagccccctgcagatcgacagggctgaggatcgctccatcttctcagctgtcttggatgagctgaaggtggctcaggcaccttggaaagctgttaatactttggagcacccagtggtgctgacaaaatttgttgaaggggcccgagaagtagaaatggacgctgttggcaaagatggaagggttatctctcatgccatctctgaacatgttgaagatgcaggtgtccactcgggagatgccactctgatgctgcccacacaaaccatcagccaaggggccattgaaaagacacctggagagcttgttaaacacattgctggactccatcccccagtttctgatttcatatttctggatcgggctccagaatttgcgtttttcacaagtcctaaggtgaaggatgctacccggaagattgcaaaggcttttgccatctctggtccattcaacgtccaatttcttgtcaaaggaaatgatgtcttggtgattgagtgtaacttgagagcttctcgatccttcccctttgtttccaagactcttggggttgacttcattgatgtggccaccaaggtgatgattggagagaatgttgatgagaaacatcttccaacattggaccatcccataattcctgctgactatgttgcaattaaggctcccatgttttcctggccccggttgagggatgctgaccccattctgagatgtgagatggcttccactggagaggtggcttgctttggtgaaggtattcatacagccttcctaaaggcaatgctttccacaggatttaagataccccagaaaggcatcctgataggcatccagctgtttgccacggaagccacatcagactggctcaacgccaacaatgtccctgccaccccagtggcatggccgtctcaagaaggacagaatcccagcctctcttccatcagaaaattgattagagatggcagcattgacctagtgattaaccttcccaacaacaacactaaatttgtccatgataattatgtgattcggaggacagctgttgatagtggaatccctctcctcactaattttcaggtgaccaaactttttgctgaagctgtgcagaaatctcgcaaggtggactccaagagtcttttccactacaggcagtacagtgctggaaaagcagcatag

SEQ ID NO: 150084 - DNA, 891 bp, Homo sapiens
gggagatgccactctgatgctgcccacacaaaccatcatacacggggccattgaaaaggtgaaggatgctacccggaagattgcaaaggcttttgccatctctggtccattcaacgtccaaattcttgtcaaaggaaaagatgtcttggtgattgagtgtaacttgagagcttctcgatccttcccctttgtttccaagactcttgggggtgacttcattgatgtggccaccaaggtgatgattggagagaatgttgatgagaaacatcttccaacattggaccatcccataattcctgctgactatgctgcaattaaagctcccatgttttcctggccccggctgagggatgctgaccccattctgagatgggagatggcttccactggagaggtggcttgctttggtgaaggtattcatacagccttcctaaaggcaatgctttccacaggatttaagataccccagaaaggcatcctgataggcatccagcaatcattccggccaagattccttggtgtggctgaacaattacacaatgaaggtttcaagctgtttgccacggaagccacatcagactggctcaacgccaacaatgtccctgccaccccagtggcatggccgtctcaagaaggacagaatcccagcctctcttccatcagaaaattgattagagatggcagcattgacctagtgattaaccttcccaacaacaacactaaatttgtccatgataattatgtgattcggaggacagcttgtgatagtggaatccctctcctcactaattttcaggtgaccaaactttttgctgaagctgtgcagaaatctcgcaaggtggactccaagagtcttttccactacaggcagtacagtgctggaaaagcacg

SEQ ID NO: 150085 - DNA, 10089 bp, Homo sapiens
gatggccgggtcaaatataccttgaacaagaacagtttgaaaattgagattcctttgccttttggtggcaaatcctccagagatctaaagatgttagagactgttaggacaccagccctccacttcaagtctgtgggattccatctgccatctcgagagttccaagtccctacttttaccattcccaagttgtatcaactgcaagtgcctctcctgggtgttctagacctctccacgaatgtctacagcaacttgtacaactggtccgcctcctacagtggtggcaacaccagcacagaccatttcagccttcgggctcgttaccacatgaaggctgactctgtggttgacctgctttcctacaatgtgcaaggatctggagaaacaacatatgaccacaagaatacgttcacactatcatgtgatgggtctctacgccacaaatttctagattcgaatatcaaattcagtcatgtagaaaaacttggaaacaacccagtctcaaaaggtttactaatattcgatgcatctagttcctggggaccacagatgtctgcttcagttcatttggactccaaaaagaaacagcatttgtttgtcaaagaagtcaagattgatgggcagttcagagtctcttcgttctatgctaaaggcacatatggcctgtcttgtcagagggatcctaacactggccggctcaatggagagtccaacctgaggtttaactcctcctacctccaaggcaccaaccagataacaggaagatatgaagatggaaccctctccctcacctccacctctgatctgcaaagtggcatcattaaaaatactgcttccctaaagtatgagaactacgagctgactttaaaatctgacaccaatgggaagtataagaactttgccacttctaacaagatggatatgaccttctctaagcaaaatgcactgctgcgttctgaatatcaggctgattacgagtcattgaggttcttcagcctgctttctggatcactaaattcccatggtcttgagttaaatgctgacatcttaggcactgacaaaattaatagtggtgctcacaaggcgacactaaggattggccaagatggaatatctaccagtgcaacgaccaacttgaagtgtagtctcctggtgctggagaatgagctgaatgcagagcttggcctctctggggcatctatgaaattaacaacaaatggccgcttcagggaacacaatgcaaaattcagtctggatgggaaagccgccctcacagagctatcactgggaagtgcttatcaggccatgattctgggtgtcgacagcaaaaacattttcaacttcaaggtcagtcaagaaggacttaagctctcaaatgacatgatgggctcatatgctgaaatgaaatttgaccacacaaacagtctgaacattgcaggcttatcactggacttctcttcaaaacttgacaacatttacagctctgacaagttttataagcaaactgttaatttacagctacagccctattctctggtaactactttaaacagtgacctgaaatacaatgctctggatctcaccaacaatgggaaactacggctagaacccctgaagctgcatgtggctggtaacctaaaaggagcctaccaaaataatgaaataaaacacatctatgccatctcttctgctgccttatcagcaagctataaagcagacactgttgctaaggttcagggtgtggagtttagccatcggctcaacacagacatcgctgggctggcttcagccattgacatgagcacaaactataattcagactcactgcatttcagcaatgtcttccgttctgtaatggccccgtttaccatgaccatcgatgcacatacaaatggcaatgggaaactcgctctctggggagaacatactgggcagctgtatagcaaattcctgttgaaagcagaacctctggcatttactttctctcatgattacaaaggctccacaagtcatcatctcgtgtctaggaaaagcatcagtgcagctcttgaacacaaagtcagtgccctgcttactccagctgagcagacaggcacctggaaactcaagacccaatttaacaacaatgaatacagccaggacttggatgcttacaacactaaagataaaattggcgtggagcttactggacgaactctggctgacctaactctactagactccccaattaaagtgccacttttactcagtgagcccatcaatatcattgatgctttagagatgagagatgccgttgagaagccccaagaatttacaattgttgcttttgtaaagtatgataaaaaccaagatgttcactccattaacctcccattttttgagaccttgcaagaatattttgagaggaatcgacaaaccattatagttgtactggaaaacgtacagagaaacctgaagcacatcaatattgatcaatttgtaagaaaatacagagcagccctgggaaaactcccacagcaagctaatgattatctgaattcattcaattgggagagacaagtttcacatgccaaggagaaactgactgctctcacaaaaaagtatagaattacagaaaatgatatacaaattgcattagatgatgccaaaatcaactttaatgaaaaactatctcaactgcagacatatatgatacaatttgatcagtatattaaagatagttatgatttacatgatttgaaaatagctattgctaatattattgatgaaatcattgaaaaattaaaaagtcttgatgagcactatcatatccgtgtaaatttagtaaaaacaatccatgatctacatttgtttattgaaaatattgattttaacaaaagtggaagtagtactgcatcctggattcaaaatgtggatactaagtaccaaatcagaatccagatacaagaaaaactgcagcagcttaagagacacatacagaatatagacatccagcacctagctggaaagttaaaacaacacattgaggctattgatgttagagtgcttttagatcaattgggaactacaatttcatttgaaagaataaatgatgttcttgagcatgtcaaacactttgttataaatcttattggggattttgaagtagctgagaaaatcaatgccttcagagccaaagtccatgagttaatcgagaggtatgaagtagaccaacaaatccaggttttaatggataaattagtagagttggcccaccaatacaagttgaaggagactattcagaagctaagcaatgtcctacaacaagttaagataaaagattactttgagaaattggttggatttattgatgatgctgtcaagaagcttaatgaattatcttttaaaacattcattgaagatgttaacaaattccttgacatgttgataaagaaattaaagtcatttgattaccaccagtttgtagatgaaaccaatgacaaaatccgtgaggtgactcagagactcaatggtgaaattcaggctctggaactaccacaaaaagctgaagcattaaaactgtttttagaggaaaccaaggccacagttgcagtgtatctggaaagcctacaggacaccaaaataaccttaatcatcaattggttacaggaggctttaagttcagcatctttggctcacatgaaggccaaattccgagagactctagaagatacacgagaccgaatgtatcaaatggacattcagcaggaacttcaacgatacctgtctctggtaggccaggtttatagcacacttgtcacctacatttctgattggtggactcttgctgctaagaaccttactgactttgcagagcaatattctatccaagattgggctaaacgtatgaaagcattggtagagcaagggttcactgttcctgaaatcaagaccatccttgggaccatgcctgcctttgaagtcagtcttcaggctcttcagaaagctaccttccagacacctgattttatagtccccctaacagatttgaggattccatcagttcagataaacttcaaagacttaaaaaatataaaaatcccatccaggttttccacaccagaatttaccatccttaacaccttccacattccttcctttacaattgactttgtagaaatgaaagtaaagatcatcagaaccattgaccagatgctgaacagtgagctgcagtggcccgttccagatatatatctcagggatctgaaggtggaggacattcctctagcgagaatcaccctgccagacttccgtttaccagaaatcgcaattccagaattccagcttccccacatctcacacacaattgaagtacctacttttggcaagctatacagtattctgaaaatccaatctcctcttttcacattagatgcaaatgctgacatagggaatggaaccacctcagcaaacgaagcaggtatcgcagcttccatcactgccaaaggagagtccaaattagaagttctcaattttgattttcaagcaaatgcacaactctcaaaccctaagattaatccgctggctctgaaggagtcagtgaagttctccagcaagtacctgagaacggagcatgggagtgaaatgctgttttttggaaatgctattgagggaaaatcaaacacagtggcaagtttacacacagaaaaaaatacactggagcttagtaatggagtgattgtcaagataaacaatcagcttaccctggatagcaacactaaatacttccacaaattgaacatccccaaactggacttctctagtcaggctgacctgcgcaacgagatcaagacactgttgaaagctggccacatagcatggacttcttctggaaaagggtcatggaaatgggcctgccccagattctcagatgagggaacacatgaatcacaaattagtttcaccatagaaggacccctcacttcctttggactgtccaataagatcaatagcaaacacctaagagtaaaccaaaacttggtttatgaatctggctccctcaacttttctaaacttgaaattcaatcacaagtcgattcccagcatgtgggccacagtgttctaactgctaaaggcatggcactgtttggagaagggaaggcagagtttactgggaggcatgatgctcatttaaatggaaaggttattggaactttgaaaaattctcttttcttttcagcccagccatttgagatcacggcatccacaaacaatgaagggaatttgaaagttcgttttccattaaggttaacagggaagatagacttcctgaataactatgcactgtttctgagtcccagtgcccagcaagcaagttggcaagtaagtgctaggttcaatcagtataagtacaaccaaaatttctctgctggaaacaacgagaacattatggaggcccatgtaggaataaatggagaagcaaatctggatttcttaaacattcctttaacaattcctgaaatgcgtctaccttacacaataatcacaactcctccactgaaagatttctctctatgggaaaaaacaggcttgaaggaattcttgaaaacgacaaagcaatcatttgatttaagtgtaaaagctcagtataagaaaaacaaacacaggcattccatcacaaatcctttggctgtgctttgtgagtttatcagtcagagcatcaaatcctttgacaggcattttgaaaaaaacagaaacaatgcattagattttgtcaccaaatcctataatgaaacaaaaattaagtttgataagtacaaagctgaaaaatctcacgacgagctccccaggacctttcaaattcctggatacactgttccagttgtcaatgttgaagtgtctccattcaccatagagatgtcggcattcggctatgtgttcccaaaagcagtcagcatgcctagtttctccatcctaggttctgacgtcctggtgccttcatacacattaatcctgccatcattagagctgccagtccttcatgtccctagaaatctcaagctttctcttccacatttcaaggaattgtgtaccataagccatatttttattcctgccatgggcaataatacctatgatttctcctttaaatcaagtgtcatcacactgaataccaatgctgaactttttaaccagtcagatattgttgctcatctcctttcttcatcttcatctgtcattgatgcactgcagtacaaattagagggcaccacaagattgacaagaaaaaggggattgaagttagccacagctctgtctctgagcaacaaatttgtggagggtagtcataacagtactgtgagcttaaccacgaaaaatatggaagtgtcagtggcaaaaaccacaaaagccgaaattccaattttgagaatgaatttcaagcaagaacttaatggaaataccaagtcaaaacctactgtctcttcctccatggaatttaagtatgatttcaattcttcaatgctgtactctacggctaaaggagcagttgaccacaagcttagcttggaaagcctcacctcttacttttccattgagtcatctaccaaaggagatgtcaagggttcggttctttctcgggaatattcaggaactattgctagtgaggccaacacttacttgaattccaagagcacacggtcttcagtgaagctgcagggcacttccaaaattgatgatatctggaaccttgaagtaaaagaaaattttgctggagaagccacactccaacgcatatattccctctgggagcacagtacgaaaaaccacttacagctagagggcctctttttcaccaacggagaacatacaagcaaagccaccctggaactctctccatggcaaatgtcagctcttgttcaggtccatgcaagtcagcccagttccttccatgatttccctgaccttggccaggaagtggccctgaatgctaacactaagaaccagaagatcagatggaaaaatgaagtccggattcattctgggtctttccagagccaggtcgagctttccaatgaccaagaaaaggcacaccttgacattgcaggatccttagaaggacacctaaggttcctcaaaaatatcatcctaccagtctatgacaagagcttatgggatttcctaaagctggatgtaaccaccagcattggtaggagacagcatcttcgtgtttcaactgcctttgtgtacaccaaaaaccccaatggctattcattctccatccctgtaaaagttttggctgataaattcattactcctgggctgaaactaaatgatctaaattcagttcttgtcatgcctacgttccatgtcccatttacagatcttcaggttccatcgtgcaaacttgacttcagagaaatacaaatctataagaagctgagaacttcatcatttgccctcaacctaccaacactccccgaggtaaaattccctgaagttgatgtgttaacaaaatattctcaaccagaagactccttgattcccttttttgagataaccgtgcctgaatctcagttaactgtgtcccagttcacgcttccaaaaagtgtttcagatggcattgctgctttggatctaaatgcagtagccaacaagatcgcagactttgagttgcccaccatcatcgtgcctgagcagaccattgagattccctccattaagttctctgtacctgctggaattgtcattccttcctttcaagcactgactgcacgctttgaggtagactctcccgtgtataatgccacttggagtgccagtttgaaaaacaaagcagattatgttgaaacagtcctggattccacatgcagctcaaccgtacagttcctagaatatgaactaaatgttttgggaacacacaaaatcgaagatggtacgttagcctctaagactaaaggaacatttgcacaccgtgacttcagtgcagaatatgaagaagatggcaaatatgaaggacttcaggaatgggaaggaaaagcgcacctcaatatcaaaagcccagcgttcaccgatctccatctgcgctaccagaaagacaagaaaggcatctccacctcagcagcctccccagccgtaggcaccgtgggcatggatatggatgaagatgacgacttttctaaatggaacttctactacagccctcagtcctctccagataaaaaactcaccatattcaaaactgagttgagggtccgggaatctgatgaggaaactcagatcaaagttaattgggaagaagaggcagcttctggcttgctaacctctctgaaagacaacgtgcccaaggccacaggggtcctttatgattatgtcaacaagtaccactgggaacacacagggctcaccctgagagaagtgtcttcaaagctgagaagaaatctgcagaacaatgctgagtgggtttatcaaggggccattaggcaaattgatgatatcgacgtgaggttccagaaagcagccagtggcaccactgggacctaccaagagtggaaggacaaggcccagaatctgtaccaggaactgttgactcaggaaggccaagccagtttccagggactcaaggataacgtgtttgatggcttggtacgagttactcaagaattccatatgaaagtcaagcatctgattgactcactcattgattttctgaacttccccagattccagtttccggggaaacctgggatatacactagggaggaactttgcactatgttcataagggaggtagggacggtactgtcccaggtatattcgaaagtccataatggttcagaaatactgttttcctatttccaagacctagtgattacacttcctttcgagttaaggaaacataaactaatagatgtaatctcgatgtatagggaactgttgaaagatttatcaaaagaagcccaagaggtatttaaagccattcagtctctcaagaccacagaggtgctacgtaatcttcaggaccttttacaattcattttccaactaatagaagataacattaaacagctgaaagagatgaaatttacttatcttattaattatatccaagatgagatcaacacaatcttcaatgattatatcccatatgtttttaaattgttgaaagaaaacctatgccttaatcttcataagttcaatgaatttattcaaaacgagcttcaggaagcttctcaagagttacagcagatccatcaatacattatggcccttcgtgaagaatattttgatccaagtatagttggctggacagtgaaatattatgaacttgaagaaaagatagtcagtctgatcaagaacctgttagttgctcttaaggacttccattctgaatatattgtcagtgcctctaactttacttcccaactctcaagtcaagttgagcaatttctgcacagaaatattcaggaatatcttagcatccttaccgatccagatggaaaagggaaagagaagattgcagagctttctgccactgctcaggaaataattaaaagccaggccattgcgacgaagaaaataatttctgattaccaccagcagtttagatataaactgcaagatttttcagaccaactctctgattactatgaaaaatttattgctgaatccaaaagattgattgacctgtccattcaaaactaccacacatttctgatatacatcacggagttactgaaaaagctgcaatcaaccacagtcatgaacccctacatgaagcttgctccaggagaacttactatcatcctctaattttttaaaagaaatcttcatttattcttcttttccaattgaactttcacatagcacagaaaaaattcaaactgcctatattgataaaaccatacagtgagccagccttgcagtaggcagtagactataagcagaagcacatatgaactggacctgcaccaaagctggcaccagggctcggaaggtctctgaactcagaaggatggcattttttgcaagttaaagaaaatcaggatctgagttattttgctaaacttgggggaggaggaacaaataaatggagtctttattgtgtatcat

SEQ ID NO: 150086 - DNA, 14152 bp, Homo sapiens
attcccaccgggacctgcggggctgagtgcccttctcggttgctgccgctgaggagcccgcccagccagccagggccgcgaggccgaggccaggccgcagcccaggagccgccccaccgcagctggcgatggacccgccgaggcccgcgctgctggcgctgctggcgctgcctgcgctgctgctgctgctgctggcgggcgccagggccgaagaggaaatgctggaaaatgtcagcctggtctgtccaaaagatgcgacccgattcaagcacctccggaagtacacatacaactatgaggctgagagttccagtggagtccctgggactgctgattcaagaagtgccaccaggatcaactgcaaggttgagctggaggttccccagctctgcagcttcatcctgaagaccagccagtgcatcctgaaagaggtgtatggcttcaaccctgagggcaaagccttgctgaagaaaaccaagaactctgaggagtttgctgcagccatgtccaggtatgagctcaagctggccattccagaagggaagcaggttttcctttacccggagaaagatgaacctacttacatcctgaacatcaagaggggcatcatttctgccctcctggttcccccagagacagaagaagccaagcaagtgttgtttctggataccgtgtatggaaactgctccactcactttaccgtcaagacgaggaagggcaatgtggcaacagaaatatccactgaaagagacctggggcagtgtgatcgcttcaagcccatccgcacaggcatcagcccacttgctctcatcaaaggcatgacccgccccttgtcaactctgatcagcagcagccagtcctgtcagtacacactggacgctaagaggaagcatgtggcagaagccatctgcaaggagcaacacctcttcctgcctttctcctacaagaataagtatgggatggtagcacaagtgacacagactttgaaacttgaagacacaccaaagatcaacagccgcttctttggtgaaggtactaagaagatgggcctcgcatttgagagcaccaaatccacatcacctccaaagcaggccgaagctgttttgaagactgtccaggaactgaaaaaactaaccatctctgagcaaaatatccagagagctaatctcttcaataagctggttactgagctgagaggcctcagtgatgaagcagtcacatctctcttgccacagctgattgaggtgtccagccccatcactttacaagccttggttcagtgtggacagcctcagtgctccactcacatcctccagtggctgaaacgtgtgcatgccaacccccttctgatagatgtggtcacctacctggtggccctgatccccgagccctcagcacagcagctgcgagagatcttcaacatggcgagggatcagcgcagccgagccaccttgtatgcgctgagccacgcggtcaacaactatcataagacaaaccctacagggacccaggagctgctggacattgctaattacctgatggaacagattcaagatgactgcactggggatgaagattacacctatttgattctgcgggtcattggaaatatgggccaaaccatggagcagttaactccagaactcaagtcttcaatcctgaaatgtgtccaaagtacaaagccatcactgatgatccagaaagctgccatccaggctctgcggaaaatggagcctaaagacaaggaccaggaggttcttcttcagactttccttgatgatgcttctccgggagataagcgactggctgcctatcttatgttgatgaggagtccttcacaggcagatattaacaaaattgtccaaattctaccatgggaacagaatgagcaagtgaagaactttgtggcttcccatattgccaatatcttgaactcagaagaattggatatccaagatctgaaaaagttagtgaaagaagttctgaaagaatctcaacttccaactgtcatggacttcagaaaattctctcggaactatcaactctacaaatctgtttctattccatcacttgacccagcctcagccaaaatagaagggaatcttatatttgatccaaataactaccttcctaaagaaagcatgctgaaaactaccctcactgcctttggatttgcttcagctgacctcatcgagattggcttggaaggaaaaggctttgagccaacattggaagctctttttgggaagcaaggatttttcccagacagtgtcaacaaagctttgtactgggttaatggtcaagttcctgatggtgtctctaaggtcttagtggaccactttggctataccaaagatgataaacatgagcaggatatggtaaatggaataatgctcagtgttgagaagctgattaaagatttgaaatccaaagaagtcccggaagccagagcctacctccgcatcttgggagaggagcttggttttgccagtctccatgacctccagctcctgggaaagctgcttctgatgggtgcccgcactctgcaggggatcccccagatgattggagaggtcatcaggaagggctcaaagaatgacttttttcttcactacatcttcatggagaatgcctttgaactccccactggagctggattacagttgcaaatatcttcatctggagtcattgctcccggagccaaggctggagtaaaactggaagtagccaacatgcaggctgaactggtggcaaaaccctccgtgtctgtggagtttgtgacaaatatgggcatcatcattccggacttcgctaggagtggggtccagatgaacaccaacttcttccacgagtcgggtctggaggctcatgttgccctaaaacctgggaagctgaagtttatcattccttccccaaagagaccagtcaagctgctcagtggaggcaacacattacatttggtctctaccaccaaaacggaggtgatcccacctctcattgagaacaggcagtcctggtcagtttgcaagcaagtctttcctggcctgaattactgcacctcaggcgcttactccaacgccagctccacagactccgcctcctactatccgctgaccggggacaccagattagagctggaactgaggcctacaggagagattgagcagtattctgtcagcgcaacctatgagctccagagagaggacagagccttggtggataccctgaagtttgtaactcaagcagaaggtgcgaagcagactgaggctaccatgacattcaaatataatcggcagagtatgaccttgtccagtgaagtccaaattccggattttgatgttgacctcggaacaatcctcagagttaatgatgaatctactgagggcaaaacgtcttacagactcaccctggacattcagaacaagaaaattactgaggtcgccctcatgggccacctaagttgtgacacaaaggaagaaagaaaaatcaagggtgttatttccataccccgtttgcaagcagaagccagaagtgagatcctcgcccactggtcgcctgccaaactgcttctccaaatggactcatctgctacagcttatggctccacagtttccaagagggtggcatggcattatgatgaagagaagattgaatttgaatggaacacaggcaccaatgtagataccaaaaaaatgacttccaatttccctgtggatctctccgattatcctaagagcttgcatatgtatgctaatagactcctggatcacagagtccctcaaacagacatgactttccggcacgtgggttccaaattaatagttgcaatgagctcatggcttcagaaggcatctgggagtcttccttatacccagactttgcaagaccacctcaatagcctgaaggagttcaacctccagaacatgggattgccagacttccacatcccagaaaacctcttcttaaaaagcgatggccgggtcaaatataccttgaacaagaacagtttgaaaattgagattcctttgccttttggtggcaaatcctccagagatctaaagatgttagagactgttaggacaccagccctccacttcaagtctgtgggattccatctgccatctcgagagttccaagtccctacttttaccattcccaagttgtatcaactgcaagtgcctctcctgggtgttctagacctctccacgaatgtctacagcaacttgtacaactggtccgcctcctacagtggtggcaacaccagcacagaccatttcagccttcgggctcgttaccacatgaaggctgactctgtggttgacctgctttcctacaatgtgcaaggatctggagaaacaacatatgaccacaagaatacgttcacactatcatgtgatgggtctctacgccacaaatttctagattcgaatatcaaattcagtcatgtagaaaaacttggaaacaacccagtctcaaaaggtttactaatattcgatgcatctagttcctggggaccacagatgtctgcttcagttcatttggactccaaaaagaaacagcatttgtttgtcaaagaagtcaagattgatgggcagttcagagtctcttcgttctatgctaaaggcacatatggcctgtcttgtcagagggatcctaacactggccggctcaatggagagtccaacctgaggtttaactcctcctacctccaaggcaccaaccagataacaggaagatatgaagatggaaccctctccctcacctccacctctgatctgcaaagtggcatcattaaaaatactgcttccctaaagtatgagaactacgagctgactttaaaatctgacaccaatgggaagtataagaactttgccacttctaacaagatggatatgaccttctctaagcaaaatgcactgctgcgttctgaatatcaggctgattacgagtcattgaggttcttcagcctgctttctggatcactaaattcccatggtcttgagttaaatgctgacatcttaggcactgacaaaattaatagtggtgctcacaaggcgacactaaggattggccaagatggaatatctaccagtgcaacgaccaacttgaagtgtagtctcctggtgctggagaatgagctgaatgcagagcttggcctctctggggcatctatgaaattaacaacaaatggccgcttcagggaacacaatgcaaaattcagtctggatgggaaagccgccctcacagagctatcactgggaagtgcttatcaggccatgattctgggtgtcgacagcaaaaacattttcaacttcaaggtcagtcaagaaggacttaagctctcaaatgacatgatgggctcatatgctgaaatgaaatttgaccacacaaacagtctgaacattgcaggcttatcactggacttctcttcaaaacttgacaacatttacagctctgacaagttttataagcaaactgttaatttacagctacagccctattctctggtaactactttaaacagtgacctgaaatacaatgctctggatctcaccaacaatgggaaactacggctagaacccctgaagctgcatgtggctggtaacctaaaaggagcctaccaaaataatgaaataaaacacatctatgccatctcttctgctgccttatcagcaagctataaagcagacactgttgctaaggttcagggtgtggagtttagccatcggctcaacacagacatcgctgggctggcttcagccattgacatgagcacaaactataattcagactcactgcatttcagcaatgtcttccgttctgtaatggccccgtttaccatgaccatcgatgcacatacaaatggcaatgggaaactcgctctctggggagaacatactgggcagctgtatagcaaattcctgttgaaagcagaacctctggcatttactttctctcatgattacaaaggctccacaagtcatcatctcgtgtctaggaaaagcatcagtgcagctcttgaacacaaagtcagtgccctgcttactccagctgagcagacaggcacctggaaactcaagacccaatttaacaacaatgaatacagccaggacttggatgcttacaacactaaagataaaattggcgtggagcttactggacgaactctggctgacctaactctactagactccccaattaaagtgccacttttactcagtgagcccatcaatatcattgatgctttagagatgagagatgccgttgagaagccccaagaatttacaattgttgcttttgtaaagtatgataaaaaccaagatgttcactccattaacctcccattttttgagaccttgcaagaatattttgagaggaatcgacaaaccattatagttgtactggaaaacgtacagagaaacctgaagcacatcaatattgatcaatttgtaagaaaatacagagcagccctgggaaaactcccacagcaagctaatgattatctgaattcattcaattgggagagacaagtttcacatgccaaggagaaactgactgctctcacaaaaaagtatagaattacagaaaatgatatacaaattgcattagatgatgccaaaatcaactttaatgaaaaactatctcaactgcagacatatatgatacaatttgatcagtatattaaagatagttatgatttacatgatttgaaaatagctattgctaatattattgatgaaatcattgaaaaattaaaaagtcttgatgagcactatcatatccgtgtaaatttagtaaaaacaatccatgatctacatttgtttattgaaaatattgattttaacaaaagtggaagtagtactgcatcctggattcaaaatgtggatactaagtaccaaatcagaatccagatacaagaaaaactgcagcagcttaagagacacatacagaatatagacatccagcacctagctggaaagttaaaacaacacattgaggctattgatgttagagtgcttttagatcaattgggaactacaatttcatttgaaagaataaatgatgttcttgagcatgtcaaacactttgttataaatcttattggggattttgaagtagctgagaaaatcaatgccttcagagccaaagtccatgagttaatcgagaggtatgaagtagaccaacaaatccaggttttaatggataaattagtagagttggcccaccaatacaagttgaaggagactattcagaagctaagcaatgtcctacaacaagttaagataaaagattactttgagaaattggttggatttattgatgatgctgtcaagaagcttaatgaattatcttttaaaacattcattgaagatgttaacaaattccttgacatgttgataaagaaattaaagtcatttgattaccaccagtttgtagatgaaaccaatgacaaaatccgtgaggtgactcagagactcaatggtgaaattcaggctctggaactaccacaaaaagctgaagcattaaaactgtttttagaggaaaccaaggccacagttgcagtgtatctggaaagcctacaggacaccaaaataaccttaatcatcaattggttacaggaggctttaagttcagcatctttggctcacatgaaggccaaattccgagagactctagaagatacacgagaccgaatgtatcaaatggacattcagcaggaacttcaacgatacctgtctctggtaggccaggtttatagcacacttgtcacctacatttctgattggtggactcttgctgctaagaaccttactgactttgcagagcaatattctatccaagattgggctaaacgtatgaaagcattggtagagcaagggttcactgttcctgaaatcaagaccatccttgggaccatgcctgcctttgaagtcagtcttcaggctcttcagaaagctaccttccagacacctgattttatagtccccctaacagatttgaggattccatcagttcagataaacttcaaagacttaaaaaatataaaaatcccatccaggttttccacaccagaatttaccatccttaacaccttccacattccttcctttacaattgactttgtagaaatgaaagtaaagatcatcagaaccattgaccagatgctgaacagtgagctgcagtggcccgttccagatatatatctcagggatctgaaggtggaggacattcctctagcgagaatcaccctgccagacttccgtttaccagaaatcgcaattccagaattcataatcccaactctcaaccttaatgattttcaagttcctgaccttcacataccagaattccagcttccccacatctcacacacaattgaagtacctacttttggcaagctatacagtattctgaaaatccaatctcctcttttcacattagatgcaaatgctgacatagggaatggaaccacctcagcaaacgaagcaggtatcgcagcttccatcactgccaaaggagagtccaaattagaagttctcaattttgattttcaagcaaatgcacaactctcaaaccctaagattaatccgctggctctgaaggagtcagtgaagttctccagcaagtacctgagaacggagcatgggagtgaaatgctgttttttggaaatgctattgagggaaaatcaaacacagtggcaagtttacacacagaaaaaaatacactggagcttagtaatggagtgattgtcaagataaacaatcagcttaccctggatagcaacactaaatacttccacaaattgaacatccccaaactggacttctctagtcaggctgacctgcgcaacgagatcaagacactgttgaaagctggccacatagcatggacttcttctggaaaagggtcatggaaatgggcctgccccagattctcagatgagggaacacatgaatcacaaattagtttcaccatagaaggacccctcacttcctttggactgtccaataagatcaatagcaaacacctaagagtaaaccaaaacttggtttatgaatctggctccctcaacttttctaaacttgaaattcaatcacaagtcgattcccagcatgtgggccacagtgttctaactgctaaaggcatggcactgtttggagaagggaaggcagagtttactgggaggcatgatgctcatttaaatggaaaggttattggaactttgaaaaattctcttttcttttcagcccagccatttgagatcacggcatccacaaacaatgaagggaatttgaaagttcgttttccattaaggttaacagggaagatagacttcctgaataactatgcactgtttctgagtcccagtgcccagcaagcaagttggcaagtaagtgctaggttcaatcagtataagtacaaccaaaatttctctgctggaaacaacgagaacattatggaggcccatgtaggaataaatggagaagcaaatctggatttcttaaacattcctttaacaattcctgaaatgcgtctaccttacacaataatcacaactcctccactgaaagatttctctctatgggaaaaaacaggcttgaaggaattcttgaaaacgacaaagcaatcatttgatttaagtgtaaaagctcagtataagaaaaacaaacacaggcattccatcacaaatcctttggctgtgctttgtgagtttatcagtcagagcatcaaatcctttgacaggcattttgaaaaaaacagaaacaatgcattagattttgtcaccaaatcctataatgaaacaaaaattaagtttgataagtacaaagctgaaaaatctcacgacgagctccccaggacctttcaaattcctggatacactgttccagttgtcaatgttgaagtgtctccattcaccatagagatgtcggcattcggctatgtgttcccaaaagcagtcagcatgcctagtttctccatcctaggttctgacgtccgtgtgccttcatacacattaatcctgccatcattagagctgccagtccttcatgtccctagaaatctcaagctttctcttccagatttcaaggaattgtgtaccataagccatatttttattcctgccatgggcaatattacctatgatttctcctttaaatcaagtgtcatcacactgaataccaatgctgaactttttaaccagtcagatattgttgctcatctcctttcttcatcttcatctgtcattgatgcactgcagtacaaattagagggcaccacaagattgacaagaaaaaggggattgaagttagccacagctctgtctctgagcaacaaatttgtggagggtagtcataacagtactgtgagcttaaccacgaaaaatatggaagtgtcagtggcaacaaccacaaaagcccaaattccaattttgagaatgaatttcaagcaagaacttaatggaaataccaagtcaaaacctactgtctcttcctccatggaatttaagtatgatttcaattcttcaatgctgtactctaccgctaaaggagcagttgaccacaagcttagcttggaaagcctcacctcttacttttccattgagtcatctaccaaaggagatgtcaagggttcggttctttctcgggaatattcaggaactattgctagtgaggccaacacttacttgaattccaagagcacacggtcttcagtgaagctgcagggcacttccaaaattgatgatatctggaaccttgaagtaaaagaaaattttgctggagaagccacactccaacgcatatattccctctgggagcacagtacgaaaaaccacttacagctagagggcctctttttcaccaacggagaacatacaagcaaagccaccctggaactctctccatggcaaatgtcagctcttgttcaggtccatgcaagtcagcccagttccttccatgatttccctgaccttggccaggaagtggccctgaatgctaacactaagaaccagaagatcagatggaaaaatgaagtccggattcattctgggtctttccagagccaggtcgagctttccaatgaccaagaaaaggcacaccttgacattgcaggatccttagaaggacacctaaggttcctcaaaaatatcatcctaccagtctatgacaagagcttatgggatttcctaaagctggatgtaaccaccagcattggtaggagacagcatcttcgtgtttcaactgcctttgtgtacaccaaaaaccccaatggctattcattctccatccctgtaaaagttttggctgataaattcattattcctgggctgaaactaaatgatctaaattcagttcttgtcatgcctacgttccatgtcccatttacagatcttcaggttccatcgtgcaaacttgacttcagagaaatacaaatctataagaagctgagaacttcatcatttgccctcaacctaccaacactccccgaggtaaaattccctgaagttgatgtgttaacaaaatattctcaaccagaagactccttgattcccttttttgagataaccgtgcctgaatctcagttaactgtgtcccagttcacgcttccaaaaagtgtttcagatggcattgctgctttggatctaaatgcagtagccaacaagatcgcagactttgagttgcccaccatcatcgtgcctgagcagaccattgagattccctccattaagttctctgtacctgctggaattgccattccttcctttcaagcactgactgcacgctttgaggtagactctcccgtgtataatgccacttggagtgccagtttgaaaaacaaagcagattatgttgaaacagtcctggattccacatgcagctcaaccgtacagttcctagaatatgaacttaatgttttgggaacacacaaaatcgaagatggtacgttagcctctaagactaaaggaacatttgcacaccgtgacttcagtgcagaatatgaagaagatggcaaatatgaaggacttcaggaatgggaaggaaaagcgcacctcaatatcaaaagcccagcgttcaccgatctccatctgcgctaccagaaagacaagaaaggcatctccacctcagcagcctccccagccgtaggcaccgtgggcatggatatggatgaagatgacgacttttctaaatggaacttctactacagccctcagtcctctccagataaaaaactcaccatattcaaaactgagttgagggtccgggaatctgatgaggaaactcagatcaaagttaattgggaagaagaggcagcttctggcttgctaacctctctgaaagacaacgtgcccaaggccacaggggtcctttatgattatgtcaacaagtaccactgggaacacacagggctcaccctgagagaagtgtcttcaaagctgagaagaaatctgcaggaccatgctgagtgggtttatcaaggggccattagggaaattgatgatatcgacgagaggttccagaaaggagccagtgggaccactgggacctaccaagagtggaaggacaaggcccagaatctgtaccaggaactgttgactcaggaaggccaagccagtttccagggactcaaggataacgtgtttgatggcttggtacgagttactcaagaattccatatgaaagtcaagcatctgattgactcactcattgattttctgaacttccccagattccagtttccggggaaacctgggatatacactagggaggaactttgcactatgttcataagggaggtagggacggtactgtcccaggtatattcgaaagtccataatggttcagaaatactgttttcctatttccaagacctagtgattacacttcctttcgagttaaggaaacataaactaatagatgtaatctcgatgtatagggaactgttgaaagatttatcaaaagaagcccaagaggtatttaaagccattcagtctctcaagaccacagaggtgctacgtaatcttcaggaccttttacaattcattttccaactaatagaagataacattaaacagctgaaagagatgaaatttacttatcttattaattatatccaagatgagatcaacacaatcttcaatgattatatcccatatgtttttaaattgttgaaagaaaacctatgccttaatcttcataagttcaatgaatttattcaaaacgagcttcaggaagcttctcaagagttacagcagatccatcaatacattatggcccttcgtgaagaatattttggtgccaagtggagttggctggacagtgaaatattatgaaggtgaagaaaagatagtcagtctgatcaagaacctgttagttgctcttaaggacttccattctgaatatattgtcagtgcctctaacttttacttcccaactctcaagtcaagttgagcaatttctgcacagaaatattcaggaatatcttagcatccttaccgatccagatggaaaagggaaagagaagattgcagagctttctgccactgctcaggaaataattaaaagccaggccattggcgacgaagaaaataatttctgattaccaccagcagtttagatataaactgcaagatttttcagaccaactctctgattactatgaaaaaatttattgctgaatccaaaagattgatttgacctgtccattcaaaacttaccacacatttctggattatacatcacgggagtttaactggaaaaagctggcaattcaaccacagtcattgaacccctacatgaagcttgctccaggagaactttactatcatcctctaatttttttaaaagaaatcttcaatttattcttcttttccaatttgaacttttcacataggcacagaaaaaattgcaaactgcctatattgataaaaccatacagtgagccagccttgcagtaggcagtagactataagcagaagcacatatgaactggacctgcaccaaagctggcaccagggctcggaaggtctctgaactcagaaggatggcattttttgcaagttaaagaaaatcaggatctgagttattttgctaaacttgggggaggaggaacaaataaatgggagtctttattgtgtatcataaaaaaaaa

SEQ ID NO: 150087 - DNA, 316 bp, Homo sapiens
ctcagatacatcccggcctcagctcccctgtccagccgctagggagaggtttcctgatgggccgctctccctcaggcctcttcctttcttcctttctcaggtgtataatgaacagatccatgacctcctggagcccaaggggccccttgccatccgcgaggaccccgacaagggggtggtggtgcaaggactttctttccaccagccagcctcagccgagcagctgctggagatactgaccagggggaaccgtaaccgcacgcagcaccccactgatgccaacgcgacttcctcccgctcccatgccatcttccag

SEQ ID NO: 150088 - DNA, 577 bp, Homo sapiens
cacagcttgcccatcggggacatacaaacctgaaggctcaccaggaggaatcagcagttgcattccatgtcctgatgaaaatcacacctctccacctggaagcacatcccctgaagactgtgtctgcagagagggatacagggcatctggccagacctgtgaacttgtccactgccctgccctggaagcctcccgaaaatggttactttatccaaaacactttgcaacaaccatttcaatggcagcctgtgggggtccgatgttcaccctgggttttgatcttgtgggggaagcagcatcatcttattgttttacccaatggttttgtgggtccggtttcagagagctactgcagagggatgcaaactgccaatttacattgcttatttactgtcttgcctgatttccttgatttagactctagtaaaccagtcagttcttcatttctttttggatgtcatagaccccatactacggaacgagaaaaattataggaaagttgaaatcacaattaccaagttcaattgaccacataattgtaaactacgccttttatagcccttttatgaacaagcaa

SEQ ID NO: 150089 - DNA, 446 bp, Homo sapiens
cggcacgaggtgtttttagtcatttaagaaaattaccttaattcttctgaaaagttgaaaactttaattacagatgttgtacaaagctgataactgtcattcagctttttaatcaagaagcttaaattggaatggtatgttattttctgtacaagatattcatgaagtataacctgtgccctgtaggtgttggcttgattgcttctggccagtgtgatgtgatcgtggcaggtggcgctgagttgatgtccgatgtccctattcgtcactcatggaaaatgagaaaactgatgcttgatctcaataaggccacatctatgggccagcgactgtctttaatctctaaattccgatttaatttcctagcacctgaggtaaggcttgtgattgcagggcatcccactgcacagatgtagaattatgtatggcagtgtggactctgctat

SEQ ID NO: 150090 - DNA, 499 bp, Homo sapiens
ctagatcgcgatctagaactagtggtgttcgcactccatttttgctgtctggcacttcatataaagacctgatgccacatgatttggctagagcagcgcttacgggtttgttgcatcggaccagtgtccctaaggaagtagttgattatatcatctttggtacagttattcaggaagtgaaaacaagcaatgtggctagagaggctgcccttggagctggcttctctgacaagactcctgctcacactgtcaccatggcttgtatctctgccaaccaagccatgaccacaggtgttggcttgattgcttctggccagtgtgatgtgatcgtggcaggtggtgttgagttgatgtccgatgtccctattcgtcactcaaggaaaatgagaaaactgatgcttgatctcaataaggccaaatctatgggccagcgactgtctttaatctctaaattccgatttaatttcctagcacctgagctccctgcggattatgagcc

SEQ ID NO: 150091 - DNA, 241 bp, Homo sapiens
  misc_feature (1)...(241): n = a,t,c or g
tgggtctcctgggacaaggcgccctcatgggtcaggggccttgggtcaggatcacgtgggggtgtctggggagggggctccccaccacacagagtcacagacgtttcctgctcctttcttccagatggccgccatgtctgggagatggaagcgaaaactgaccgggacctgtgcaagccggtgagtgcctttggcgcagctggagctactgtgggtccccagggcttgggaggccggtgtn

SEQ ID NO: 150092 - DNA, 603 bp, Homo sapiens; identical to SEQ ID NO: 6654

SEQ ID NO: 150093 - DNA, 643 bp, Homo sapiens
  misc_feature (1)...(643): n = a,t,c or g
nnnnnnnnnnnnnnnnnnnnnnnnnnnaaagatggttttatataaggtatttcataattacaattttaaaatgcagtctgtattcacattaatgaacaatttcaactaatttttgacaagggaaaaatacacatactttgctttactctcatataaaacactgattatttggctgtagtaatccagatttaagctgttgacgagtcttcgtaaaggacttcatctaccttcatgtcgttttcattcactgggacctggaggcaaatctgttctttgaaagccaacgccagggtgtagggcttcacttcctgatgctgcaaacagcgcttcagataggcatcatagtagcccttgcccctccccagtcggttgccatgtttgtcaaacccaaggcctggcatgaagatgagatcaagtccccctccatgtgattgctctggaaccggtaccgagggatgaagcagatnntgcctcgttgggaaatgtccttgatgatctcttctgtctcaatttcatcttgcatgctcagaaaggatgaaaatcttttggacttttgatactcactgtgggcaatcaccttctggctcagtacgccggaactgcgtagccgctcctcggcactcatcgcccngagacgctgctt

SEQ ID NO: 150094 - DNA, 1032 bp, Homo sapiens
  misc_feature (1)...(1032): n = a,t,c or g
aagctgaaaatcacaggctgatagcctccattttaattaatattctactattcacacttctattggtttttaaagatggttttatataaggtatttcataattacaattttaaaatgcagtctgtattcacattaatgaacaatttcaactaatttttgacaagggaaaaatacacatactttgctttactctcatataaaacactgattatttggctgtagtaatccagatttaagctgttgacgagtcttcgtaaaggacttcatctaccttcatgtcgttttcattcactgggacctggaggcaaatctgttctttgaaagccaacgccagggtgcaattttaaaatgcagtctgtattcacattaatgaacaatttcaactaatttttgacaagggaaaaatacacatactttgctttactctcatataaaacactcgattatttggctgtagtaatccagatttaagctgttgacgagtcttcagtaaaggacttcatctaccttaatgtcgttttcattcactgggacctggaggcaaatctgttctttgaaagccaacgccagggtgtagggcttcacttcctgatgctgcaaacagcgcttcagataggcatcatagtagcccttgcccctccccagtcggttgccatgtttgtcaaacccaaggcctggcatgaagatgagatcaagtccccctggtgggacaaggcctcctcccgaacatcaccctcaccaggctgagggatattccaggaagttttgggaagtaaagaaatttcctctggtgattctattctcaccatatccatgtgattgctctggaacccggaccgaagggaggaagcagattttgcctcgttggaaaatgtccttgatgatctcttctgtctcaatttcatcttgcatgctcagaaagatggaaattcttttggacttttgatactcactgtgggcaatcaccttctggctcagtacgccggaactgcgtagccgctcctcggcactcatcgcccngagacgctgctt

SEQ ID NO: 150095 - DNA, 339 bp, Homo sapiens
  misc_feature (1)...(339): n = a,t,c or g
aatgctgaatggctaatatagccttctctcaaatgtttggagtgtttgaaactctcaaacactgaaactctcaaatgttcagtgtttgaaaaccagggcccnnnnnnnnnnncccaaagggatttacccccaaatcaaaaccctacccccatgtcccacaagtggacctgacccttacgtccgggttaatttgttgccaaaagggaaggggccttgtcttaaaaaaatttcagggaaccgaaaaactttgaaacccctgtttgataaaacattgaaatttttggtacccatggaaaaagtaccaaaaagtcctttaaatgttccagtgaaaaatatcaa

SEQ ID NO: 150096 - DNA, 1419 bp, Homo sapiens
atggaatcacagtttctcagagatactatttgtgaagagagcttgagggagaaactccaagatgggagaataacaataagggagttctttatacttctccaggtccacatcttgatacagaaaccccgacagagcaatctcccaggcaattttactgtaaacacaccacctactccagaagacctgatgttaagtcaatatgtttaccgacccaagatacagatttatagagaagattgtgaggctcgtcgccaaaagattgaagaattaaagctttctgcatcgaaccaagataagctgttggttgatataaataagaacctgtgggaaaaaatgagacactgctctgacaaagagctgaaggcctttggaatttatcttaacaaaataaagtcatgttttaccaagatgactaaagtcttcactcaccaaggaaaagtggctctgtatggcaagctggtgcagtcagctcagaatgagagggagaaacttcaaataaagatagatgagatggataaaatacttaagaagatcgataactgcctcactgagatggaaacagaaactaagaatttggaggatgaagagaaaaacaatcctgtggaagaatgggattctgaaatgagagctgcagaaaaagaattggaacagctgaaaactgaagaggaggagcttcaaagaaatctcttagaactggaggtaccaaaagagcagacccttgctcaaatagactttatgcaaaaacaaagaaatagaactgaagagctactggatcagttgagcttgtctgagtgggatgtcgttgagtggagtgatgatcaagctgtattcacctttgtttatgacacgatacaactcaccatcacctttgaagagtcagttgttggtttccctttcctggacaagcgttataggaagattgttgatgtcaattttcaatctctgttagatgaggatcaagctcctccttcctcccttttagttcataagcttattttccagtacgttgaagaaaaggaatcctggaagaagacatgtacaacccagcatcagttacccaagatgcttgaagaattctcactggtagtgcaccattgcagactccttggagaggagattgagtatttaaagagatggggaccaaattataacctaatgaacatagatattaataataatgaattgagacttttattctctagctccgcagcatttgcaaagtttgaaataactttgtttctctcagcctattatccatctgtaccattaccttccaccattcagaatcacgttgggaacactagccaagatgatattgctaccattctatctaaagtgccactggagaacaactacctgaagaatgtagtcaagcaaatttaccaagatctgtttcaggactgccatttctaccactag

SEQ ID NO: 150097 - DNA, 449 bp, Homo sapiens; identical to SEQ ID NO: 150007

SEQ ID NO: 150098 - DNA, 863 bp, Homo sapiens; identical to SEQ ID NO: 150008
  misc_feature (1)...(863): n = a,t,c or g

SEQ ID NO: 150099 - DNA, 1387 bp, Homo sapiens
aagacggatctcgctctgttgcccaggctgtctcgagaaaaacctgcaacacgaggcccttggttgccttccggggccctcttcgtttcctaatattcataaggagaccacattggcaaacacgtaatggcttaattaagggttcccctggattgcagaattgtcagcagtgggcttgagaacccccagaagggcatagaggcagctgggcagcccccaggccctttgagggtatggagcagggagaagcagcagaaggaggtgatgcccctgccgctccctcccaaaagccaagccccgtcccccacgctccaaatgcccagggaggggtcaagggcccagaaaaggccctacatcccttgagtggggcccgagtgtgcggggcaacctgtctgtcatccccaaggcctggactctggcagaggcgcttttccccaccctggtggctccccagggccgatttgctggtcaaaggagcccagatatactcttaaagacattgatgtggggttttatggggctcccctggctctgggaagtgggcagtgaggcacgcttgaggaagggcttccatctttggtttttgtgggaacctgccgtaatgaccgttggcaaagtgccttctcctgttttggggcatctgtcttctgctctgtaacgatcaaggggctgggctggatgatctctcagcgtcttccaacctctatggtctaagacggccttccccactccagcactgcctcaaactgggatgatgaggacagtaaaagggcgttctttttttttttttttttaagacggagtctcgactctgttgcccaggctggagtgctagtggtgtactcttggctcactgcaacctccacttcccggggttcaagtgattctcctgcctcagcctcccgagtagctgggattagaggcgtgcaccaccatgcccggctaatttttgtatttttagtagagacagggtttcactatgttggccaggctggtcttgaactccctacttcaggtgattcccccgcctcggcctcacaaagtgctggggttacaggcgtgagccaccagtgcccagcctaaaaggacattgcttaagggcagaaagaaggggggcaggcaagggtgggtcttcagcccccagatgggaagtcagagtggggctgcaaaagatgcagatggggcagggcaggggagacaggtaaacagacagaaaagaccaaggtgccaagggaatcaggaaggagaggtgtcctggccagggaagagggcaccagagcccagcccacacaaccttttcggctacattccttgccctgctggagtcagggaaaacacatccactgtgtccttgggtgggaaatggctttttttaaaaaatagtttc

SEQ ID NO: 150100 - DNA, 4601 bp, Homo sapiens
atataaaccacagtacttcaggatcccattatgaaaattcccagcggggacctgtgtcttctacaagtgattctagcacaaactgtaagaatgctgttgtaagtgacttgtcggaaaaagaagcatggccctcagcccctggcagtgatccggagttggcttcagaatgtatggatgctgattctgcctccagttctgaatcagagagaaacatcactatcatggcttcagggaacacaggtggtgaaaaagatggccttcggaatagcactggacttggttcccaaaacaagtttgtagttggtagcagcagcaataatgtgggccatggaagtagtactgggccatggggtttttcccatggagccataataagcacatgtcaggtctctgtggatgctcctgaaagcaaatctgaaagtagcaacaatagaatgaatgcttggggcactgtaagttcttcatcaaatggagggttaaatccaagcactttgaattcagctagcaaccatggtgcctggccagtattagagaacaatggacttgccctaaaagggcctgtagggagtggtagttctggcattaatattcagtgcagtactataggccagatgcctaacaatcagagtattaactctaaagtgagtggtggttctacccatggtacctggggaagccttcaggaaacttgtgaatctgaagtaagtggtacacagaaggtttcattcagtggtcaacctcaaaatattaccactgaaatgactggaccaaataacactactaactttatgacctctagtttaccaaactccggttcagtgcagaataatgagctgcctagtagtaacacaggggcctggcgtgtgagcacaatgaatcatcctcagatgcaggctccatcaggtatgaatggcacttccctttctcaccttagcaatggagagtcaaaaagtggaggctcttatggtactacatggggtgcctatggttctaattactctggagacaaatgttcaggccctaatggccaagctaatggtgacactgtgaatgcaactctaatgcagcctggcgtaaatggtcctatgggcactaactttcaagttaacacaaacaaaggaggtggtgtgtgggaatctggtgcagcaaactcccagagtacatcatggggaagtggaaatggcgcaaattctggaggaagtcgaagaggatggggaacccctgcacaaaacactggcactaatttacccagcgttgagtggaacaaactgcctagcaatcagcattccaatgatagtgcaaatggcaatggtaagacgtttacaaatggatggaaatctactgaggaagaggatcagggttctgccacatctcagacaaatgagcaaagcagtgtgtgggccaaaacaggaggtacagtggagagcgatggtagtacagaaagcactggacgccttgaggaaaaaggaactggggaaagtcagagtagagacagaagaaaaattgatcagcacacattactccaaagcattgtaaacagaactgacttagatccacgtgtcctgtccaactctggttggggacagactcctattaagcagaatactgcctgggatacagaaacatcacctagaggggaacgaaagactgacaatgggacagaggcctggggaagctctgcaacacagacttttaactcaggggcatgtatagataagactagccctaatggtaatgatacctcatctgtatcagggtggggcgatcccaaacctgctctgaggtggggagattccaaaggctcaaactgccagggggggtgggaagatgattctgctgctacaggaatggtcaagagcaatcagtgggggaattgcaaagaggagaaggctgcatggaatgactcgcaaaagaataaacagggatggggtgatggacaaaaatcaagccaagggtggtctgtttctgccagtgataactggggagaaacttcaaggaataaccattggggtgaggccaataagaaatccagctcaggaggtagtgacagtgacaggtccgtttccggttggaacgaacttggtaaaactagttctttcacttggggaaacaacataaatccaaataattcatcaggatgggatgaatcttctaaacctactccttcccagggatggggagaccctccaaagtctaatcagtctctaggttggggagattcgtcaaagccagtcagctctccagactggaacaagcaacaagacattgttggatcttggggaatcccaccagctacaggcaaacctcctggtacaggctggctggggggacctataccagccccagcaaaagaagaagaacccacaggctgggaggaaccatccccagaatctatacgtcgcaaaatggagattgatgatggaacttcagcttggggagatccaagcaaatacaactacaaaaatgtgaacatgtggaacaaaaacgtcccaaatggcaacagccgttcagaccagcaagcacaggtacatcagctgctaacgcctgcaagtgccatctcaaacaaagaggcaagcagtggctctggctggggtgagccctggggggagccttctactccagccacaactgtggataatggtacttcagcatggggtaagcccatagacagtggtcccagctggggggaacccattgctgcggcatccagcacatccacgtggggctccagctctgttggtccacaagcattaagcaaatctgggccaaaatctatgcaagatggctggtgtggtgatgatatgccattgcctggaaatcgccccactggctgggaagaggaagaggatgtggagattggaatgtggaatagtaattcatctcaagagcttaactcatctttaaattggccaccatatacaaagaaaatgtcatcgaagggaatgatgaaaggtggaaacaaacaagaagaagcgtggataaatccatttgttaaacagttttcaaacatcagtttttcgagagactcaccagaggaaaatgtacaaagcaataagatggacctttctggagagtatcccagcattgaagaagcacccgaggtgagctcagcatgggtagaggaagagaaaccagaatggacagatggaatgttacaagacaaacgaatggagatagataaacatagcctaaatattggtgattacaatcgaacggtcgggaaaggccctggttctcggcctcagatttccaaagagtcttccatggagcgcaatccttattttgataagaatggcaatcccagtatgtttggtgttggaaacacagcagcacaaccccggggcatgcagcagcctccagcacaacctcttagttcatctcagcctaatctccgtgctcaagtgcctcctccattactctcccctcaggttccagtttcattgctgaagtatgcaccaaacaacggtggcctgaatccactctttggccctcaacaggtagccatgctgaaccagctatcccagctaaaccagctttctcagatctcccagttacagcgattgttagcgcagcagcaaagggcgcagagtcagagaagcgtgccttctgggaaccggccgcagcaagaccagcagggtcgacctcttagtgtgcagcagcaaatgatgcaacaatctcgtcaacttgatccaaacctgttggtgaagcagcagactccaccatctcagcagcagccactccatcagccagccatgaagtctttccttgacaatgtcatgccccacactacacctgagctgcaaaaagggccatcaccaataaatgctttcagcaacttccctataggtgctatttcaagtggtttcaggctggaagagtctccatttgttccctatgactttatgaacagcagtacttcaccagccagtcctccaggttcaataggagatggctggccacgtgccaaatcgcctaacggctctagcagtgttaattggccaccagaatttcgtcctggtgagccatggaaaggttatccaaacattgaccctgaaactgacccttacgtcactcctggcagtgtcataaacaatctttcaattaatactgtgcgggaagttgaccacctcagggacaggaacagtgggcttcaaaaagaaccacagacagaaaaacccaagcaaaacatcaatctgttgatcaagatcaatattatgggaatcctgaaaataacagatacaagaacaggaaaggagagaaagccaactggaaaaacaacaacaacacctgtgcccaaacacgtcagcttccaggagttaaatgttcatagagactcacttaagacatctgactatatcatttaccacaactatcaagaggagcaaggactgatggatttgaaaggcctaagatggctaaaatcagaaacaagaaccctaacaaatgctggcaatggaaaggatgtggagaacctagtgcctccatacattgctgatgagaatgtagaactgtgcagctgctttgcaaacagtcgggcagttcctcaaaaagttaaacagagcctgagcaacacagtgaaaccccatctctacaaaatatag

SEQ ID NO: 150101 - DNA, 638 bp, Homo sapiens
ggcacgagccctgtctcaaacatacatacatatatatgattttttaacacacacacaagtacgtatgtgtatatgttacgtgtgtgtgtgggtatgtatattcacattcagtgagatgatttcagcttgtaaaaacttgctagtaatatataaagaatagcttgtataatactacttgtattaactgaaccatcctcttaaagtattactgtaaatcggaaagtatttgagattcgcataggattcatgaataaaggttttgcatatttattagtggattttagaaatgatgattttgctttgaactaattttatattttcgttttcagaatttcgtcctggtgagccatggaaaggttatccaaacattgaccctgaaactgacccttacgtcactcctggcagtgtcataaacaatctttcaattaatactgtgcgggaagttgaccacctcagggacaggaacagtggtacgtagggggtgcaaatcaatttctgagtgacacttaacacagtttaagaatggctcatgtagtaaccagctactctgggcgactgagcccagggtactctgggatcacttgagcccaggagcttgagcaagcctgggcaacatagttgtgggaccctgtctcttt

SEQ ID NO: 150102 - DNA, 906 bp, Homo sapiens
atgggctgggcacggtggctcacgcctgtaatcccagcactttgggaggccgaggtgggtggatcacctaagagcccttatattttggattcttacgagctaacccgggcttccaccctgactctcatcactaccacacccatgtgtctttcctctctccgtctccctgagacgccagtgaaccacctgggcttggaatccagagccccggaacaccttgcagtacttgcccgaagcaacgcgccaacagcgggagggagacgcagacgcgaagaccggcgagaggatgtgcgctctcgcgcccgacgaggtggatttggctgtccaccgagctccggcgcctgtcgttctaattgggtttggatttgcaccgttaaggaggggggaagagaaggaagaggcgggcgaggaaggcgagtccagctagcggctgttgcggggaccgtagccccagctgcagctccgaagaatcccccgccacggtttcggtggagcgtctgggcacgggatggagtgaaagagcgagtgcctctccaagcgggggtgggagggggtcaggctgtgcagaggagagagacagcgagaagaagccgcggctggctactgcgaatttgggattcgattgggagggaccgctcactcgggggaaatggattctttaccacggctgaccagcgttttgactttgctgttctctggcttgtggcatttaggattaacagcgacaaacttggctcatctctgaatgcagtgcctcggatttgcagtataccaagcaccccacgatacgtggctctgcgttctgccctaggcagaaggctccagttggggtatcttgcaaccaatgggcaccggtttaacaggattgggagttttggcctaagagtcatggaccaatgttgttaa

SEQ ID NO: 150103 - DNA, 339 bp, Homo sapiens; identical to SEQ ID NO: 144666

SEQ ID NO: 150104 - DNA, 964 bp, Homo sapiens
aaaattggcatacaaggatcatacctcaacgtaataaaagccagctgtgacaaacccaaagccaacataatactgaatggggaaaagttgaaagcatcccctctgagaactggaataaaacaagaatgcccactcttaccattcctcttcaacttactactggaagtcctagccagagcagtcagacaagagaaagaaataaagggtctactagtcagtaaagtggaagtaaaacgatcattgtttgctgataatgtgatcgtcaaacttgaaaaccctaaagattcctccagaaaactcctagaattgttaaaaaaattcagcagagtttccggatacaagattaatgtacacaaatcagtagctcttctatataccaacagcaaccaagctgagaatcaaatcaagaactcaggctgggcatggtggctcacgcctgtaatcccagcactttgggagtctgaggtgggtggatcacctgaggtcaggagatcgagaccagcctgactaacatggagaaaccttttctctactaaaaatgcaaaattagtgggatatggtggtgcatgcctgtaatcccagctacttgggaggctgaggcaggagaattgcttgaacccgggaggtggaggttgtggtgagccgagattgcaccattgcactccagcctgggcaacaagagcgaaaactccatctcaaaaaaaaaaaaaaagggggggccgttttaaagaacccttgggggggccaaatttaacccgggctggcaaggtaaaatttttttccttatggggggccgtataaaaacctacttgggaattttgggaaaggacctttcttttgggggggggacatattgggccaacctccctacaaaaattaaaggctttagggaaaaaaaaaatttttaaggggtaaagggggtaaaactacctccatatgctggctgttggaaagttttgtttac

SEQ ID NO: 150105 - DNA, 345 bp, Homo sapiens
cggacgcgtgggcaaccacagcctattccaagcctaaacggggccaccgtaaaactgcgtcatttggcagcattctggatgtccctgagagcgtcatatcaggcaacggacagccaagacgtatatccatccaagacttgactgtaactggaacagaacctggtcaggtgagcagtaggtcatccagtcccagtgtcagaatgattactacctcaggaccaacctcagaaaagccaactcgaagtcatccatggacccctgatgattccacagataccaatggatcagataactccatcccaatggcttatcttacactggatcaccaactacagcctctagcac

SEQ ID NO: 150106 - DNA, 1419 bp, Homo sapiens
gttgttggaagaggagcctttggagttgtttgcaaagctaagtggagagcaaaagatgttgctattaaacaaatagaaagtgaatctgagaggaaagcgtttattgtagagcttcggcagttatcccgtgtgaaccatcctaatattgtaaagctttatggagcctgcttgaatccagtgtgtcttgtgatggaatatgctgaagggggctctttatataatgtgctgcatggtgctgaaccattgccatattatactgctgcccacgcaatgagttggtgtttacagtgttcccaaggagtggcttatcttcacagcatgcaacccaaagcgctaattcacagggacctgaaaccaccaaacttactgctggttgcaggggggacagttctaaaaatttgtgattttggtacagcctgtgacattcagacacacatgaccaataacaaggggagtgctgcttggatggcacctgaagtttttgaaggtagtaattacagtgaaaaatgtgacgtcttcagctggggtattattctttgggaagtgataacgcgtcggaaaccctttgatgagattggtggcccagctttccgaatcatgtgggctgttcataatggtactcgaccaccactgataaaaaatttacctaagcccattgagagcctgatgactcgttgttggtctaaagatccttcccagcgcccttcaatggaggaaattgtgaaaataatgactcacttgatgcggtactttccaggagcagatgagccattacagtatccttgtcagtattcagatgaaggacagagcaactctgccaccagtacaggctcattcatggacattgcttctacaaatacgagtaacaaaagtgacactaatatggagcaagttcctgccacaaatgatactattaagcgcttagaatcaaaattgttgaaaaatcaggcaaagcaacagagtgaatctggacgtttaagcttgggagcctcccgtgggagcagtgtggagagcttgcccccaacctctgagggcaagaggatgagtgctgacatgtctgaaatagaagctaggatcgccgcaaccacagcctattccaagcctaaacggggccaccgtaaaactgcttcatttggcaacattctggatgtccctgagatcgtcatatcaggtatcatagaccacctgagttggtctaatagctgtggaaccggaataatgatccctggcaacggacagccaagacgtagatccatccaagacttgactgtaactggaacagaacctggtcagctattaagagtgactgctgcttctttaccaattacagcttggtcctcactctggactgccctccctgtggaattgcccttgctttctgacagcggccaatctggaacgaacccctccttcctttga

SEQ ID NO: 150107 - DNA, 707 bp, Homo sapiens
ttcagaattaacacaatagcccatttcaacaagctgtatatttgagaacagagtgacagttattaacatccagtaggaaattaagagttgttgttcacaaataataaattactagattctgacaaagactaatggggattaagtaagcgtgactcaatataacaaatttaagcctaagcatcttctaggccctggaaatgaacaaggtattgctgccagttaaagtcagttgtgtcttacaacctgctagctgtcttgctgtaaaaactgtaacgtaaggcccttgaaataggatgccgtcatcagccccagcccccaaggcattcatctatttaaacacatgacagaagatggtggaagagagttcagcagctattcatgtggtagaagtggttattgtattaggacatactctgttgtaggccagcaacttttgagttaaaacaccgcagctgtttctcttcctttctttacatctttctcttcttttttttttttcttagcaataaactcacttttttttccccacaaacattttgtgtagatccaaggagcaacaaattccaactttctgctgtagcaattacacgctttttgtctgtttgactagattttagtattttactttttctcttcttgttaaaggcaacggacagccaagacgtagatccatccaagacttgactgtaactgggacagaacctggt

SEQ ID NO: 150108 - DNA, 3378 bp, Homo sapiens
gcataatggtactcgaccaccactgataaaaaatttacctaagcccattgagagcctgatgactcgttgttggtctaaagatccttcccagcgcccttcaatggaggaaattgtgaaaataatgactcacttgatgcgggtataatccttcttttgaggggctttggatttaggggaatttaatatgtgctgagttttaatggaattttaaaagggatgttattactatattctgctttatatattgctatgttttctaagtgagaatgggcatttattactcatagtcagaagaggaaacatttcgagagggaaaatctagttctttatcactggaaagatggctagactaggtttctagacttgcttttttctttttgcttacattagtggacaagtatgtttgtctctgggcctgttgcctcatttgtaatgtgggagaaactgaaatagatagtctctaaagccatcacaggacttggatatattaatattatgacttcaatacatgataaactaaattttacatttttctgataccaattttcatcaagcatttagtcatttatgcaaggcaataggttgcattctcagacacatttatttgagtgacttttactatttggcctattttcaggtttttatatcccagtaaaaagttaaactttcttctatttagaagaacccttttaaatgattatcaaattttcctagtctgtgaatcaagcgcctttagaattatttggaatattttacgcctctggtttttggtacattaacaaaaactgtgaagtggtatcttggctttaaaaagttcaaatatctatgaaagtgcctgaattttgaaacagtttgttcagtagaagaatcttacaatctccttaaatatagactaagtaatttcctaaatggtaaaacgttgtttattcaatctattgaaaatttcttacgcaaagcagcttgaactaatctactaaaagtttaccatcgtatttggataccagtcatatatagaagcctaggccttaaaggtgtgtgcataagaaaacaacttagtctctgtagtcagattacttaaaactttaggatatataagttattgcagttgtaattttgcttctctgttccttgtctaatttgaggagaatacgtttcctttttttctctaaattctaacatttttgtccagcagatactttgagtattatgcctccagtttgtagaaagacattcataatctatcctcttaatatttaaaatgttctaacaattattctatggtatactagtctcagtcttcagactaacagtcactggaagtttacatcactactgtaagaacatgagtatgttttacataattatgagaaatgatactattttatttcatatgtttctctagagaaatatttgctgttttcttcaagactatctagactccaatgtaagctagattcttaggtaggtgcatggcattgatcaaagttgaaatccaagagtacattattgtaatctttgtaaaataaaaaacttaggcacctacaaatttagtatataacttagggaaaataaaacattaatcaggatttaatttgtattaaggaaattttaagctgtggtttacttttttatatatagtactttccaggagcagatgagccattacagtatccttgtcagtattcagatgaaggacagagcaactctgccaccagtacaggctcattcatggacattgcttctacaaatacgagtaacaaaagtgacactaatatggagcaagttcctgccacaaatgatactattaagcgcttagaatcaaaattgttgaaaaatcaggcaaagcaacagagtgaatctggacgtttaagcttgggagcctcccgtgggagcagtgtggagagcttgcccccaacctctgagggcaagaggatgagtgctgacatgtctgaaatagaagctaggatcgccgcaaccacaggcaacggacagccaagacgtagatccatccaagacttgactgtaactggaacagaacctggtcaggtgagcagtaggtcatccagtcccagtgtcagaatgattactacctcaggaccaacctcagaaaagccaactcgaagtcatccatggacccctgatgattccacagataccaatggatcagataactccatcccaatggcttatcttacactggatcaccaactacagcctctagcaccgtgcccaaactccaaagaatctatggcagtgtttgaacagcattgtaaaatggcacaagaatatatgaaagttcaaacagaaattgcattgttattacagagaaagcaagaactagttgcagaactggaccaggatgaaaaggaccagcaaaatacatctcgcctggtacaggaacataaaaagcttttagatgaaaacaaaagcctttctacttactaccagcaatgcaaaaaacaactagaggtcatcagaagtcagcagcagaaacgacaaggcacttcatgattctctgggaccgttacattttgaaatatgcaaagaaagactttttttttaaggaaaggaaaaccttataatgacgattcatgagtgttagctttttggcgtgttctgaatgccaactgcctatatttgctgcatttttttcattgtttattttccttttctcatggtggacatacaattttactgtttcattgcataacatggtagcatctgtgacttgaatgagcagcactttgcaacttcaaaacagatgcagtgaactgtggctgtatatgcatgctcattgtgtgaaggctagcctaacagaacaggaggtatcaaactagctgctatgtgcaaacagcgtccattttttcatattagaggtggaacctcaagaatgactttattcttgtatctcatctcaaaatattaataatttttttcccaaaagatggtatataccaagttaaagacagggtattataaatttagagtgattggtggtatattacggaaatacggaacctttagggatagttccgtgtaagggctttgatgccagcatccttggatcagtactgaactcagttccatccgtaaaatatgtaaaggtaagtggcagctgctctatttaatgaaagcagttttaccggattttgttagactaaaatttgattgtgatacattgaacaaaatggaactcatttttttttaaggagtaaagatttttaattctgtgattgtgtgtatgtgtgttgaaactgtaaagcttttatgactctaatattaatctcttaaatgaaattaaaaggcaaaagaacatgattgagcttaaatgatcatttcttcctgcagtgattcttggattgttttctcatgtatttg

SEQ ID NO: 150109 - DNA, 3492 bp, Homo sapiens
atgaccaggaccagggcagcactcctcctgttcacagccttagcaacttctctaggtttcaacttggacacagaggagctgacagccttccgtgtggacagcgctgggtttggagacagcgtggtccagtatgccaactcctgggtggtggttggagccccccaaaagataacagctgccaaccaaacgggtggcctctaccagtgtggctacagcactggtgcctgtgagcccatcggcctgcaggtgcccccggaggccgtgaacatgtccctgggcctgtccctggcgtctaccaccagcccttcccagctgctggcctgcggccccaccgtgcaccacgagtgcgggaggaacatgtacctcaccggactctgcttcctcctgggccccacccagctcacccagaggctcccggtgtccaggcaggagtgcccaagacaggagcaggacattgtgttcctgatcgatggctcaggcagcatctcctcccgcaactttgccacgatgatgaacttcgtgagagctgtgataagccagttccagagacccagcacccagttttccctgatgcagttctccaacaaattccaaacacacttcactttcgaggaattcaggcgcacgtcaaaccccctcagcctgttggcttctgttcaccagctgcaagggtttacatacacggccaccgccatccaaaatgtcgtgcaccgattgttccatgcctcatatggggcccgtagggatgccaccaaaattctcattgtcatcactgatgggaagaaagaaggcgacagcctggattataaggatgtcatccccatggctgatgcagcaggcatcatccgctatgcaattggggttggattagcttttcaaaacagaaattcttggaaagaattaaatgacattgcatcgaagccctcccaggaacacatatttaaagtggaggactttgatgctctgaaagatattcaaaaccaactgaaggagaagatctttgccattgagggtacggagaccacaagcagtagctccttcgaattggagatggcacaggagggcttcagcgctgtgttcacacctgatggccccgttctgggggctgtggggagcttcacctggtctggaggtgccttcctgtaccccccaaatatgagccctaccttcatcaacatgtctcaggagaatgtggacatgagggactcttacctgggttactccaccgagctggccctctggaaaggggtgcagagcctggtcctgggggccccccgctaccagcacaccgggaaggctgtcatcttcacccaggtgtccaggcaatggaggatgaaggccgaagtcacggggactcagatcggctcctacttcggggcctccctctgctccgtggacgtagacaccgacggcagcaccgacctggtcctcatcggggccccccattactacgagcagacccgagggggccaggtgtctgtgtgtcccttgcccagggggtggagaaggtggtggtgtgatgctgttctctacggggagcagggccacccctggggtcgctttggggcggctctgacagtgctgggggatgtgaatggggacaagctgacagacgtggtcatcggggccccaggagaggaggagaaccggggtgctgtctacctgtttcacggagtcttgggacccagcatcagcccctcccacagccagcggatcgcgggctcccagctctcctccaggctgcagtattttgggcaggcactgagcgggggtcaagacctcacccaggatggactggtggacctggctgtgggggcccggggccaggtgctcctgctcaggaccagacctgtgctctgggtgggggtgagcatgcagttcatacctgccgagatccccaggtctgcgtttgagtgtcgggagcaggtggtctctgagcagaccctggtacagtccaacatctgcctttacattgacaaacgttctaagaacctgcttgggagccgtgacctccaaagctctgtgaccttggacctggccctcgaccctggccgcctgagtccccgtgccaccttccaggaaacaaagaaccggagtctgagccgagtccgagtcctcgggctgaaggcacactgtgaaaacttcaacctgctgctcccgagctgcgtggaggactctgtgacccccattaccttgcgtctgaacttcacgctggtgggcaagcccctccttgccttcagaaacctgcggcctatgctggccgcactggctcagagatacttcacggcctccctaccctttgagaagaactgtggagccgaccatatctgccaggacaatctcggcatctccttcagcttcccaggcttgaagtccctgctggtggggagtaacctggagctgaacgcagaagtgatggtgtggaatgacggggaagactcctacggaaccaccatcaccttctcccaccccgcaggactgtcctaccgctacgtggcagagggccagaaacaagggcagctgcgttccctgcacctgacatgtgacagcgccccagttgggagccagggcacctggagcaccagctgcagaatcaaccacctcatcttccgtggcggcgcccagatcaccttcttggctacctttgacgtctcccccaaggctgtcctgggagaccggctgcttctgacagccaatgtgagcagtgagaacaacactcccaggaccagcaagaccaccttccagctggagctcccggtgaagtatgctgtctacactgtggttagcagccacgaacaattcaccaaatacctcaacttctcagagtctgaggagaaggaaagccatgtggccatgcacagataccaggtcaataacctgggacagagggacctgcctgtcagcatcaacttctgggtgcctgtggagctgaaccaggaggctgtgtggatggatgtggaggtctcccacccccagaacccatcccttcggtgctcctcagagaaaatcgcacccccagcatctgacttcctggcgcacattcagaagaatcccgtgctggactgctccattgctggctgcctgcggttccgctgtgacgtcccctccttcagcgtccaggaggagctggatttcaccctgaagggcaacctcagctttggctgggtccgccagatattgcagaagaaggtgtcggtcgtgagtgtggctgaaattacgttcgacacatccgtgtactcccagcttccaggacaggaggcatttatgagagctcagacgacaacggtgctggagaagtacaaggtccacaaccccacccccctcatcgtaggcagctccattgggggtctgttgctgctggcactcatcacagcggtactgtacaaagttggcttcttcaagcgtcagtacaaggaaatgatggaggaggcaaatggacaaattgccccagaaaacgggacacagacccccagcccgcccagtgagaaatga

SEQ ID NO: 150110 - DNA, 708 bp, Homo sapiens
cccacgcgtccggtctcccccaaggctgtcctgggagaccggctgcttctgacagccaatgtgagcagtgagaacaacactcccaggaccagcaagaccaccttccagctggagctcccggtgaagtatgctgtctacactgtggttagcagccacgaacaattcaccaaatacctcaacttctcagagtctgaggagaagtccccttccattcccagagggtgggctttcaagggcgcacaagcatgagaggctctgtgcccccatcacccttcggtttccagtgaattagtgtcatgtcagcattcagctcagggcttcatcgtggggcttctcagttccgatttcccagggctgaaatggggagtgagatgcctgcatgctgggttctgcacagctggcctcccgcgttgggcaacattgctggctggaagggaggagcgccctctagggagggacatggccccggtgcggctgcagcttcacccagccccaggggcagaagagacccaaccacttctatttttttgaggctatgaatatagtacctgaaaaaatgccaagacatgattatttttttaaaaagcgtactttaaatgtttgtgttaataaattaaaacatgcacaaaaagatgcatctaccgctcttgggaaatatgtcaaaggtctaaaaataaaaaagccttctgtgaaaaaaaaaaaaaaaaa

SEQ ID NO: 150111 - DNA, 286 bp, Homo sapiens
gagtcaggttacagttatagaaaagaaaagctgagttaaaatgttccacaatttacagccaaagcaccatgtaagcatgaaaaatgccttaacacaaactcacctgatttatttgaagcatgttaagacaatattgaccaaactgctgtatccctcacggctccaaaaactggaaaacgaaaatgaagaaataaagttcaacttagctgataacctcaatgactggtattttaaacacatgcccttgatcaaaatcaaatataaaatgtaatttatccagatctcc

SEQ ID NO: 150112 - DNA, 1001 bp, Homo sapiens
aaagtgtccccggcaagaagaggctgcctaccacaaggactttagcttactttttaaagattgaagaaaaataaagaagaagaagacagaaaaagaagaactcaaagatacacaaagtaatttgaaccaaggctcagaagtttttggagccgtgagggatacagcagtttggtcaatattgtcttaacatgcttcaaataaatcagcttctctccaagataaaattggcaaacccaaaagagaaaactgcaatgtatctggtaaatgagttagcccgtttcaatagagtccaaccccagtataaacttctggattaaagagggcctgctcattcaaagatgttctcagtgcaactgagtcttggtgagcagacatgggaatccgaaggcagcagtataaagaaggctcaacaggctgtcggtaataaagctttgactgaatctacgcttcccaaacctatttagaagccacccaaaagtaatgttaacaataacccaggctgtataacaccaactgtggaactgaatgggcttgctatgaaaaggggcagagcctgccatccacaggccattagatccaaagccattcccaaataatagagctaattacaactttcaagtcatgtataatcagaggtatcattgcccaatacctaagatcttttatgttcagctcactgtaggaaataatgaattttttggggaaggaaagactcgacaagctgctagacacaatgctgcaatgaaagccctccaagcactgcagaatgaacctattccagaaagatctcctcaggaatggtgaatcaggaaaggatatggatgatgacaaagatgcaaataagtctgagatcagcttagtgtttgaaattgctctgaagcgaaatatgcctgtcagttttgaggttattaaagaaagtggaccaccacatatgaaaagctttgttactcgagtgtcagtaggagagttctctgcagaaggagaaggaaatagcaaaaaac

SEQ ID NO: 150113 - DNA, 909 bp, Homo sapiens
ggtttgccaatgttggagccgtctgcaaagtgtccccggcaagaaaaggctgcctaccacaaggactttagcttactttttaaggattgaagaaaaaaaagaagactgaaaatgatcaactcatagatactcaaagtaatttgaaccaaggctcaaaagtttttggagccgtgagggatacagcagtttggacaatattgtcttaacatgcttcaaataaatcagatgttctcagtgcagctgagtcttggtgagcagacatgggaatccgaaggcagcagtataaagaaggctcaacaggctgttgccaataaagctttgactgaatttacgcttcccaaaccagttcagaagccacccaaaagtaatgttaacaataaacccaggcagattacctccaactgtggaaactgaatgggcttgctatgaaaaggggagagcctgccatctacaggccattagatccaaagccattcccaaattatagagctaattacaaactttcggggcatgtacaatcaagagatggcaacacttgaatggattacagggactctggagccaaagatccaaggagatgctcttttccttgtcagaacccagattaatcattagcttcttaaggcagggaatgaaaggtgaagtccaagaaacagatgaagagttacctaagtcagtgttataagatgttccatggtaaaagggatttgaagacaaattttggaaatgctgcatactgtatctctcttgaagactcctaaaggtgtcatgaagaaaactgtttacctaagtggttcctaacactgactgaacatcaggctttcctgggcagctttaaaaattctgatgcccagacttatatggtggactatattaaatcagaatttctggttgcagaaaaaaaaaaaa

SEQ ID NO: 150114 - DNA, 442 bp, Homo sapiens
ctacttctagtattagccaaatgggtcctaagtggcagcattttgccagacattgactaaatccttacatgccacatttactgaattccaataaacatatagttcttctgtggaagtaggttaaaccagtaagtggcagctcactgaaatttctcccaggttctgtctcttccaaaatcctccatcctctcttatgaagggaagctgataaaaaaaaatcctcttggtgcaagctgaagctgttaaggattccttttttcactctcaggaccaacagacgttcttttgtatttcaagataatttcacctgttgttgttgttgttgttgttgttgttgttgttgttgttgtcacaaagaaacaaattttgagcagcaatgacaattcaaccatatctagattctccctaacttatttctccagccagtcacaccaggcagacg

SEQ ID NO: 150115 - DNA, 346 bp, Homo sapiens
ggggatttggcagcgtctgctgctttttggtggggtgtcgctccgggctggtggcggggccactgccccgcttgggggaagccgagcgatggtttgtgggcgccagttgtctggcgccgggagtgagaccctatgacacagaagaacacaaattatgtcccgaggacttccaaagcagaaaccgatagaaggtgttaaacaggttatagttgcggcttctggaaagggtggagtccgaaaatctactacagcagtgaatcttgcacttgcactagcagcgaacgattcgtccaaggccattggtttgctagatgtggatgcgtatggaccttcagttccaaagatg

SEQ ID NO: 150116 - DNA, 719 bp, Homo sapiens
aaattggagcttgccttgccgatgttgatccaatgcaactagattcttcagtacgatttgatagtgttggtggcctgtctaatcatatagcagctctaaaagagatggtggtgtttccattactttatccagaagtctttgaaaaatttaaaattcaacccccaagaggttgtttgttttatgggccacctggaactggaaagactctggttgccagagcacttgccaatgagtgcagtcaaggggataaaagagtagcatttttcatgaggaaaggtgctgattgtctaagtaactcggtaggggaatctcaaagacagccacgattgctgtttgatcaggcctatcagaggcgccaacaatttatttcttttgacgaaattgatggtctggctccagtacggtcacgcaggcaagatcagattcacaggtaaaacttgcttgatggcacttcaacgtttcttcctattccctgagtggtattgatgtgtgagagatagaatgttaaatggtgaaagaaactttataagctagtagttcctttttttggtagtagaaccccagtatatagtacaaaaataaaaaatgtggatggttgcagtggctcatacctgtattcctggcactttgggaggccaaggcaggcagatcacttgaggtcaagagtttgagaccagcctggccaacatggtgaaatcctgtctctactaaaaaaaaaa

SEQ ID NO: 150117 - DNA, 377 bp, Homo sapiens
cgttaccacatgagtctgctacattgagcaaagcctgtgaaggaatgataaacattaattctactgtgcacgatccattacaactgctttgctggcatttaattgaatcaggtaatttcttccttattatagtgtgagtcctataggtgtgtgattatgtgagtgatgttattaatcaaaaaatgttttagtgtctaccatgtttaaggtgttgtttctgagtttctggacataaaaagaagtataatgtgtagtctttgtgtatatgaaaagactaataaatataggaaagtacagtaatacataataattatgagttgccagatttattgttagtcagtgaaatctttttaatggtggaaattggagggggtctt

SEQ ID NO: 150118 - DNA, 795 bp, Homo sapiens
accagctccgggaacagggaatgtgggttatgcagtgcttccagctcagtatgttactcagctacagcagtcttcatatgtatcaatagcaagcaactctacctttactggaacatctggtatccagacccaggcacggcttccattcaatggcataatcccatcagagtcggccagtcggccccgaaagccctgtaattgtacaaaatcactgtgtttgaaattgtattgtgattgctttgcaaatggtgaattttgcaacaactgcaattgtactaattgttacaacaatttggaacatgaaaatgaaaggcaaaaagcaataaaggcatgccttgacagaaatccagaagcctttaagcctaagatagggaaaggaaaggagggagaatctgatcgacgtcatagcaaagggtgtaattgcaaacgatcaggatgtcttaaaaactactgtgaatgctatgaggcaaaaataatgtgttcctcaatatgcaaatgtattggctgtaagaattttgaagaaagcccggaaaggaagacattgatgcatttggcagatgcagctgaagtaagggtacagcagcaaacagcagccaatacgaagttatcctctcaaatttcagacttgcttactaggccaacaccagctttaaatagtggaggcggaaagtaagtcagtattttaatctttttatagtatttcccaaatacttttggtaaagtttcttttcagggggcaaagttgagtttatatatttggttgtcccaaaccagatttaagtgttctctacgaaa

SEQ ID NO: 150119 - DNA, 284 bp, Homo sapiens
gtggcacagcagtgtgtcacctcccgggagcacaatgctaggcaaggtccaactgtcctgcctggcatacaggcttatagagcagccccctttgaagatctccaagtagacttcactgagatgcccaaatgtggagatctcatccctaggtttggactgcccttacgaattggctcagacaatgggccggcatttgtggctgacttggtacagaagacagcaaaggtgatcaggtgcagatcaaggattagaacatagccccctcgtggccacggtgaaaaggg

SEQ ID NO: 150120 - DNA, 754 bp, Homo sapiens
  misc_feature (1)...(754): n = a,t,c or g
cctaggaagacacgcctgccccccacggatggggacagaaaggagctgcccaggancaagcttctgcccnctgcccccatttgcaacagactgatcacagcatgcagaccgaggcacagagcctggcccattcggccatccatcgaacctggtccgccagtccagtttggcactagtgacaaggactcagacttacgcctagtggtaggagacagcttgatagcagagaaggagctancagcatcagtcactgaggccattcctgtatcacgagactggcagctgcttggcagtggtgctgcctctgctgagccacaatccaagaacctggattctgggcactgtgtcccggagcacagctcctcaggccagcgcctgtatcctgaggttttctatggcagtgctgggccttccagttctcagatctctgggggagccatggacttttcacctagcctttgggagcggacagggccgccacctcgagaagggccctcccgacgggcagaggagcctgggtcccgaggggacaaggagcctgggttgcccccaccccgctgagggagttcctcttgccccctacccccggggcttgtatatagattataaatatataagggggaaaggggtgggcggggaggggttctggggctggggcctcacttcccctcctcccccttcccctggtcccctgtccctggggctgtttgttaaaaaagagtaataaaaggatttaaaaaaaaaaaaaaagggc

SEQ ID NO: 150121 - DNA, 456 bp, Homo sapiens
aggcaaagaattcggaacgaggccaccacctgaagtccctaaagaactcactgcacgtccagctccaactccagcatcagcccgaacaaaggagaaagaacgtgaagagccagcacaggcccctcatgccaataataatcaaactccaggtgtggctgcggctcccaatatggtgagtggtggtggcagtaccagtagcaccagcagtggcagcttagaagccagcccagtggaaccacaactgacctcaaaagagggtcctgaaccaacagaaaaggttcctcctccaaccacgcaccctacccccggggcttgtatatagattataaatatataagggggaaaggggtgggcggggaggggttctggggctggggcctcacttcccctcctcccccttcccctggtcccctgtccatggggctgtttgttaaaaaagagtaataaaaggatttt

SEQ ID NO: 150122 - DNA, 6694 bp, Homo sapiens
atgtccgatcgctcggggccgactgccaagggaaaggatggaaagaagtattcctcgctcaacctgtttgatacgtataagggcaagtccttagagatccagaaacccgcctgttgcccctcgccatggcctgcagagtctcgggaaagttgccattgcccggcgtatcgacctccagccaaccttccaagcctgaaagccgagaacaaaggcaatgaccccaatgtctcactagtgccaaaagacggaacaggatgggcaagcaaacaggagcagtccgaccccaagagttccgatgcctcaaccgctcagccgccggaatcgcagccactgccggcttcacagacgcctgcctccaaccagccgaaacgacccccagcagcccccgagaacactcctttggttccaagcggggtaaagtcctgggcacaagccagcgtcacccatggagcacatggagatggtggaagggcatcaagcctactgtcacgattctctcgagaggaatttccgaccctgcaggcggctggcgaccaggacaaggctgccaaggaaagggagtctgccgaacagtcgtctgggcccggaccaagcctccgcccccaaaattctacaacttggagggacggaggtgggcgtggccctgatgagctggagggcccggactccaaacttcatcatggtcatgatccccggggtgggctacagccttcaggcccaccccagttccctccctaccgcggaatgatgccgcctttcatgtatcccccatatctcccgttccctccgccctatggaccccaggggccttaccgataccccactcctgatgggcccagccgttttccccgtgtggcgggcccccgaggctcagggccaccaatgcgcttagtagagcctgtgggtcgtccctctattctcaaagaggataatctcaaagagtttgatcagttggatcaggagaatgatgatggttgggcaggggcccatgaagaggttgactacactgaaaagctcaagttcagcgatgaggaagatgggcgagactctgatgaggagggagctgagggccacagggattcccaatcagcttctggtgaggaacggccccctgaagcagatggcaaaaagggcaactcccccaacagcgaaccgcccactcctaagacggcctgggcagaaacctctcggcctccagagacagagccgggacctcctgccccaaagcctcccctaccccctggggactacccagatcgtgggggtcctccctgcaagcccccagcacctgaagatgaggatgaggcatggcggcagcgacgaaagcagtcgtcatctgagatttccctggcagtggagcgggcccggcgacggcgagaagaagaggagcggcgcatgcaagaagagcgccgggcagcctgtgctgagaagctcaagcgactcgatgaaaagtttggggcacctgacaagcggctcaaagcagagcctgctgccccacctgctgccccttctaccccagccccaccacctgcagtccctaaagaactccctgcacctccagctccacctccagcatcagccccaacaccagagacagaacctgaagagccagcacaggcccctcctgcccaatctactcctactccaggtgtggctgcggctcccactctggtgagtggtggtggcagtaccagtagcaccagcagtggcagcttcgaagccagcccagtggaaccacaactgccctcaaaagagggtcctgaaccaccagaagaggttcctcctcctaccacacccccagttccaaaggtggaacccaagggtgatgggattggtcccacccgccagccccctagtcagggcttgggctaccccaaatatcagaagtcgttgcctcctcgtttccagcggcagcagcaggagcagctcctgaagcagcagcagcagcaccagtggcagcagcatcaacagggctctgcccctcctaccccagtgcccccatcaccaccacagcctgtgaccctgggggctgtgccagctccacaggctccacccccgccccccaaggccctgtacccaggtgctctgggccggcccccacccatgcccccaatgaactttgatccccgatggatgatgattcctccttatgtggacccccggctcctccagggtcgtccccctctagagttctaccctcctggtgtgcatccctctggcctagttccccgagagcgttcagacagtctggggctcagctcagagccatttgaccgtcatgcacctgctatgttacgggaacggggcactccaccggtggatccaaagttggcctgggtaggagatgtcttcaccgccacacccgctgaaccccgcccacttacctcacctctgcgccaggctgcggatgaggatgacaaggggatgaggagcgagactcctccagtacctcccccaccaccctatctggccagttatccaggctttcctgagaatggagcccctgggcccccaatctctcgctttcctctggaggaaccagggccccgtccactcccctggcccccaggcagtgatgaagtggccaagatacaaactccaccacccaagaaggagccccctaaggaggagactgcacagctgacggggccagaagcaggccgaaagctgcccgcgagtcggagtggagcaggccccccaccaccacgcagagagagtcgcacagagacccgctggggccctcgtccagggagcagtcgtcgtggaatccctccagaggagccaggggccccaccccgccgggctgggcctataaagaaacctccaccacctacaaaagtagaagagctgcctcccaagcccctcgaacagggggatgaaacccccaaacccccaaagccagacccactcaagataaccaaggggaagctagggggccccaaggagaccccacccaatggaaatctttcccctgccccaaggcttcggagggactattcgtatgaaagagtgggtcctacctcttgccggggtcggggccgaggcgagtattttgccagagggaggggttttcgggggacctatgggggacgagggcggggaggccaagcgaattccgcagttaccgagagtttcgaggagatgatgggcgtggaggtgggacagggggaccaaaccaccctcctgctccccgaggccgccatgccagcgagacacggagcgagggttcagagtatgaggaaatccccaagcggtgccggcagcggggctcagaaacaggcagcgagacccatgagagtgatctggctccttcagacaaggaggctcccacacccaaggagggaacactcacccaggtcctctcgctcccccaccaccaggagccccacccttcaccgagcgccagcccgcttcacgtgcccgggggtcggcgagtcttcactcccagagggtgccatctcgccggggccgaggaggagggaggcccctcctcaagtttgcccaggctggagccctccagccaagtctctggctcccaagaaacctcccacaggccctttgccaccaagtaaggagcctttgaaagagaagttgatcccagggcctctgtcccctgtggcgcgcggaggcagcaatggaggtagcaatgtgggcatggaagatggggagcgaccccgaaggaggcgacatgggagggctcagcagcaggataaaccgcctcgtttccggaggctgaagcaggaacgggagaatgccgcaagggggtctgagggcaagccctccctaacccttccagcctccgctcctggacctgaggaggccctcacaacagtcacagtggccccagcacctccgcgggcagctgccaagtctcctgatctgtcaaaccagaactcagaccaagccaatgaggaatgggagactgcatcagagagcagtgacttcaccagtgagcgccgaggggacaaagaggcacccccaccagtactgctgacacccaaggctgtgggaactcctgggggaggtggaggtggagccgtaccaggtatttcagccatgtcccgcggagatctgagccagagagccaaggatttgagtaaacggagcttctcaagtcagcggccaggcatggaacggcagaatcggcgccctggcccagggggcaaggctggcagcagtggcagcagcagtggaggaggcggtgggggtcctggaggaaggaccgggccaggacgaggcgacaagaggagctggccctctcccaagaaccgaagtcgtcctccagaggagcgtcccccggggcttcccctgcctcccccacctcccagcagttctgctgtcttccgcctggaccaagttatccacagcaaccctgctggcatccaacaggctctggcccagcttagtagccgtcaagggagtgtaactgcaccagggggtcatccaaggcacaagcctgggcctccccaagcccctcagggcccctctcctaggcccccaacccgatacgagccccagagggtcaacagcggcctcagttctgacccccactttgaggagccggggccaatggtgagaggggtgggtgggactcctcgggactctgccggggttagtccctttccccctaaacgtcgggagcggcctcccagaaaaccagagctgctacaggaggaatctttgccacctcctcatagctctggattcttgggctctaagcctgagggcccaggccctcaggcagagtccagagatacaggcacagaggccctgacccctcacatctggaaccgtttacatactgccactagccgaaagagttaccggcccacgtccatggagccttggatggagcccctgagtccttttgaggatgtggctggcacagaaatgagtcagtctgacagtggggtggacctgagtggggattctcaggtgtcatcaggtccctgcagccagcgaagttcccctgatggaggactcaagggggcagcagagggaccccccaagaggcctggaggctcctcacccctgaatgctgttccttgtgagggtccacctggctctgaacctcctaggagaccaccacctgccccccacgatggggacagaaaggagctgccccgggagcagcctctgccccctggccccattggcacagaacgatcacagcgtacagaccgaggcacagagcctggccccattcggccatcccatcgacctggtcccccagtccagtttggcactagtgacaaggactcagacttacgcctagtggtaggagacagcttgaaagcagagaaggagctaacagcatcagtcactgaggccattcctgtatcacgagactgggagctgcttcccagtgctgctgcctctgctgagccacaatccaagaacctggattctgggcactgtgtcccggagcccagctcctcaggccagcgcctgtatcctgaggttttctatggcagtgctgggccttccagttctcagatctctggggggagccatggactctcaattacatccaaacagtggaggcttcgccctgggacaccctcactgcacccttacagatcacagcccctatacctacccccgggcccagcccctccctcagcactgctctctggggtagctctcaagggccagtttctggatttctccacaatgcaagctacagagctggggaagttgccggctggaggagttctctaccctccaccttccttcctctactctccggctttctgccccagtcctttgcctgacacatcgttgcttcaggtacgccaggatctgccatccccttcggatttttattctactcctctgcagcctggtggccaaagtggctttctcccttcaggggctcctgcccagcagatgcttctacccatgggtagactcacagctgcctgtggtgaaactttggctccctgccgccagcaccacctcctgccccacctcccctttctctgttacctgtgggccctgctctgcagccccccagctttgttgtgcggccccaatcttctccttctaccggggtgttgctcttaacttgcaaggcctttccccgtatactttgtgccgaacagaacttcattccagtgaatataaagcccttccgggatttttcaaaaattgagcagcaaccttgggggacctggatcatcacggactcccccaaactggaagacgcccttcttcccttaggtccttctctggcctcaattcccgtcttcaaagccaacgcctttccaaccttacaagtggagtctttccgcaaccaagcggcgtcgaccttttaccaagcaggcctcccccacccagatgccctgcgctggatacctaagccttgggaacggacagggccgcccacctcgagtatgggccctcccgacggggcagaggagccctgggtcccgaggggacaaggagccctgggttgcccccaccccgctgagggagttcctcttgccccctacccccggggctgtgtatatagattataaatatataagggggaaaggggtgggcggggaggggttgtggggctgggggcctcaacttcccctcctcccccttcccctggtcccctgtcccatggggctgtttgttaaaaaaagagtaataaaaggatttaaaaaaaaaaacttctaaaaaaaaaaaaaaaagggcggccgct

SEQ ID NO: 150123 - DNA, 448 bp, Homo sapiens
catagcatctcgtagtagagaggtttctgggttcagaggaggtggtggagggcctgcttatggtcccccaccgtcacttcatgcacgagaaggacgttatgagcggagacttgatgggtaagttccaaggtttctgtaggcaggtattttgtatttgatatggtgagaaacagaaactcatatttaggggccccagatggatttaaagttttgggcattctcaatgtttcctattttgggttggaaacggaagtaatttatatcccaatggctggtatcttatggaatcgtagaggatatttcctgcagctgattggatatctgttcctgagatataatgtgatggaagatttcctatggaagcttcatttttggagttacctgtcttctagaattacttattccttctcttggataatgttaagtccttccttggatatatcccttg

SEQ ID NO: 150124 - DNA, 375 bp, Homo sapiens
tttttttttttttttttgagacagagtttcgctcttgttgcccaagctggagtgcaatggcacgatctcggctcactgcaacctccgcctcccgggttcaagcgattctcctgcctcagcctcttcaagcttttttactatacatgttgcccctctcccccaacttaggcactactgaattttttatgatggcaccaggtcactttatgctgggtgatatagtcaaaatttgcttatttactctgcccctcgtcaaccacagtatcatttcaaggacatgaataaaatacttgacagtatccaaaggagctataccaaaatctaacaagtaaattttggattttgcctctttgtgctttaaagtaccaggatttc

SEQ ID NO: 150125 - DNA, 481 bp, Homo sapiens
ccaaattttttatttttcattggtataatattggggatcagaatactttttaaaaaatcaaaaattgtaaaagtatacaaataaaatggaaagattttgatgtattttatctcagaataatgtcctctgtattatgtttttattcatcaggacatattgagatcataccatatagtttcatctttttccaatcaatattatatctcaagaatttccaatgttcttaacaattcttcagaaatacaatttttttttgagacagagtttcgctcttgttgcccaagctggagtgcaatagtgcaatctcagctcaccacaacctctgcctcccgggttcaagcgattctcctgcctcagcctcccgagtagctgggattacaggcacgtgccaccacacccggttacttatttgtatttttagtagaaacagggttttaccatgttagccagtctggtctcgaactcctgacctcaggtgatc

SEQ ID NO: 150126 - DNA, 655 bp, Homo sapiens
aggaagccatggccgagatagctttcctgaaataaaccagtagcttttcagattgacgttcttgctacaattgtaccatctggtaattcctgaaaatgtcaatttttttgtgttaatatttttggtttcaaacaataacaaatgtctctagaaagaaattttaagaaagcttaattaatagtaaaaatgcctttcctgaaataatcttggaaaattttttaaatgtcaaaatgatgagtcatgctaatacattgagggtttgtttttttgtttgtttgtttgtttttgagacagagtttcgctcttgttgcccaggctggagtgcaatggcccgatctcagctcaccgcaacctccacctcccggattccagcgattctcctgcctcagcctacattaagggttttgtcagacaattgtcacacgaagaatagtgtcacttatctgctcttgacacacagaactggcctggcatatagctttccagattttactcaaacttggtactccagtttgaaaatttaaattttgactgctgattagctggaaagcctaagttttaatggaaagaaagtttgcttttaaaactgaaaagtagtttctttttgctaacaaatctaacttccatacataattgggccatattaagtaaaaca

SEQ ID NO: 150127 - DNA, 977 bp, Homo sapiens
ttttttttttttttattagtacacccattttatttttaattttaaaacattttttaatagagatagggtctcactatgttgcccaggctggtcttgacctcctgggctcaagtgatcctcctgctgcagcctcccaaagcaccaaggttacagatgtgagccaccgcagccggcccacccatatttattgcagcactattcccaacagccaagagctggaagcaacccaagtgtccatcaacagatgagtggatgaacaaaaggtggtggatacacacaaaggacggctattcagtttattttatttatttatttatttatttattgagacggagtttcgctcttgttgcccaggctggagtgaaatggtgcaatctcggctcactgcaatctccacctcccaggttcaagcgattctcaaaaaaaaacaaaaaagaatttttgtacccagtgaataactgctatgaagaaacctgaaaaagaaaacaaggataagggaaacaatgaggcagcaggggtgagactgcacacagcattgtcaggaaaggcctttctcctaaggtgactgtagggaagagactttaaggaactgaaaaaggaggccatgtgtttttcttggccaagagtgttcaagggaaagcgaacggcatattcaaaggccttgaggaaggagggtgctagaacagctggccagagcacagtgagctgaggacacggggaatagaagagtttagtaaggaaatgtggggcagtttatgttgggactagtaaagcatggccagaattttgaattttatcccgactgacatgtaagagctacaagagaggtttgacttatgaagatccccacacttgctgctatggagaaaagtgaaaggaaaagtggggtgaccagatatagacaccgcaataactagggagagatgatggtggctttgctaggattatagtggtcaagttggtgagcttcaggttct

SEQ ID NO: 150128 - DNA, 1766 bp, Homo sapiens
ttttttttgatttttctcccctttattaaaaaaagattatacaatttgggctcatattaaaaaattcaaacagtagaacagtgtgtacgtagaaggcattccccactcccactccaggagtttgggtatcattctagaagtgttctgtcaatacataagcatttttcattcaaacacacacacacacacacacacacacacacacacacacacacacacacacgggatcccatattctataatttttgtgttttaaaaaaccaccatatttcatagatatctttccacttaagcacattcggagctccatcatttttttttttttttgagatggagttttcgctcttgttgcccaggctggagtgcaatggcgcaatctcagctcaccgcaacctccgcctcccgggttcaagcgattctcctgcctcagcctccccagtaggctgggattacaggcatgtgcacccacgctcggctaattttgtatttttttttagtagagatggagtttctccatgttggtcaggcttggtctcaaactcccgacctcagatgatccctccgtctcggcctcccaaagtgctagatacaggactggccaccatgcccggcctctgcctggctaatttttgtggtagaaacagggtttcactgatgtgcccaagctggtctcctgagctcaagcagtccacctgcctcagcctcccaaagtgctgggattacaggcgtgcagccgtgcctggcctttttattttattttttttaagacacaggtgtcccactcttacccaggatgaagtgcagtggtgtgatcacagctcactgcagccttcaactcctgagatcaagcatcctcctgcctcagcctcccaaagtagctgggaccaaagacatgcaccactacacctggctaatttttatttttatttttaattttttgagacagagtctcaactctgtcacccaggctggagtgcagtggcgcaatcttggctcactgcaacctctgcctcccgggttcaagttattctcctgccccagcctcctgagtagctgggactacaggcgcccaccacgcctagctaatttttttgtatttttagtagagatggggtttcaccatgttcgccaggttgatgctagatctcttgaccttgtgatctgcctgcctcggcctcccaaagtgctgggattacaggacgtgagccaccaccgcccggcctatttttaatttttgtttgtttgaaatggaatctcactctgttacccaggctggagtgcaatggccaaatctcggctcactgcaacctctgcctcccgggctcaagcgattctcctgtctcagcctcccaagcagctgggattacgggcacctgccaccacaccccgctaatttttgtattttcattagaggcggggtttcaccatatttgtcaggctggtctcaaactcctgacctcaggtgacccacctgcctcagccttccaaagtgctgggattacaggcgtgagccacctcacccagccggctaatttagataaaaaaatatgtagcaatggggggtcttgctatgttgcccaggctggtctcaaacttctggcttcatgcaatccttccaaatgagccacaacacccagccagtcacattttttaaacagttacatctttattttagtatactagaaagtaatacaataaacatgtcaaacctgcaaattcagtagtaacagagttcttttataacttttaaacaaagctttagagca

SEQ ID NO: 150129 - DNA, 730 bp, Homo sapiens
tttttttttcttttttgagagggagtttcgcttttgttgcccaggctggaatgcagtggcgcaatctcggctactgtaacctccacctcccaggttctagcgattctcctgcctcagcctcccaagaagatgggattacaggcgtgcgctaccatgcctggctaattctatatttttagtagagatagggtttcaccatgttggtcaggctgatctcaaaccctgacctcaagtaatccacccacctcttttttttttttttttgagacagagtttcgctcttgttgcccaggctggagtgcaatggtgcgatctcagctcactgcaaactccacctccccgggttcaagggattctcctggctcagcctcccgagtacctggtagctgggtttacaggcatgcgtcaccacacccggctgtttttttttttcgcatttttggtagaaacggggtttcacccgtgttagccaggatggtctctatctcctgaccttaggtgagctgcccgcctcggcctcccaaagtgctgggattacaggtgtgagccaccgcacccggccaatgtcttttaaaaatatataccttttttttttttttttttgagacagagtctcgctcttgttggcccaggctggagtgcaatggcacgcgatctcagcttcactgcaacttccacctccactgcaacccccatctcccaggttcaagcgattctcctgcctcagcct

SEQ ID NO: 150130 - DNA, 681 bp, Homo sapiens
cgtctcaactcagaaaacatggattgtctttcccctcactatggaaattttctcagggcaataggctgggcaatcctagtgttcaccttatttgtttttatatctcagagattactgtccattgttgcatcatgacaaaagtcttgaaaagtgttatttcatatattatgtccagttttcttgttcttatttatgatgggaggataaatccagtgccagttctataccttgactagaagcagaatcccatcttattttcctttggtgctcatatttttccatctttgactagcaaggaactattttaattggtttgtgtccttttgacattaccccagcaatagttgatattttacttgctttctggcatgtcaggatgtcccagacctacagttagctgtttctgcaagaaggtagttcttttggtgtgaaatttctttttcttttttttttttttttgagacggagtcttgctctgtcacgaggctggagtgcagtggtgtgatcttggctcactgcaacctccgtctcccaggctcaagtgattctcatgcctcagcctcccgagtagctgagaccacaggtgtgcgccaccatgcctggccaatatttgtgttcttagtagagacacggtttcaccatgttggccaggctggtctcgaactcctaacctcaggtgat

SEQ ID NO: 150131 - DNA, 351 bp, Homo sapiens
  misc_feature (1)...(351): n = a,t,c or g
gactctggaacctggtcggacatagtcaccaggggaacacttggtgaagggagatgctgctgaacttcagcagttaacaggatctccatcaagtcacaggctgaccaagaggcaacagaacagaaacttcgtgactattcccatcaaggaattcaaattttagcctggcaaaaattcgaatataagcctggaaaagtcactatggacccagaagactgcatccttcaattagcnnnnnnnnnngnnnnnnnnnnnnnnnnnnnnnnnnnnnnngaggaggaagaggaggaagaagaggaagaggaagaagaagaccaagaggnnnnnnnnnnnnnnnnnnnnnnnnnnnnn

SEQ ID NO: 150132 - DNA, 733 bp, Homo sapiens
cacaactgcctcaaaaccatctgagagacctaaaaccacacacagaccagatgcacctcaaattcagcctggttcaaaaccaccaaaacaattacttcctaaaccccaaaccacagcagaaccatgcatgccaccaactaaatccgtctctgagcctgttccatttgaaactgaagctccctcaatgaccatagttcccaccacagacattgagcctgtaactgtgagaactgaggctacagtgacaacattagctccaaaaacatcgcaacgaacaagaacacgtcgtccacgtcccaaacataaaaccacgccacgcccagagacactgcagaccaaactagactttggacctattactcctgggacatcttcagctccaacaacaacaacaaaaagaacccgtcgtccacatcccaaacctaaaaccacgccccatccagaagtacctcaaactaaactggttcctgctacaatctttgaaccagtttctcctataaaagaggctccagggacaacagcagctcccaaagtgcctcaacgaactcatcgtccacatcccaaacctaaaaccacactgagtcccgaagagcttcagactgaactggttcctgctacaatctttgaaccagtttctcctataaaagaggctccagggacaacattcgttcctgttacagacctcgagcctgttacttttagaactgagatccctgcaacaaccttagctacc

SEQ ID NO: 150133 - DNA, 828 bp, Homo sapiens
gggtggttggttaccgccttttgcactagcagtagcaaggaaggggggtgggcgctctttctttttctcttagaagagggtttagcacaggttttttcgttctcacttccacaccaccttaccgcctcccgaccccccctctccccctccccacctatcgtcatgacgccctctccggattacttggtggtgctttttgggatcactgctgggcccaccggggccaagctaggctcggatgagaaggagttgatcctgctgttctggaaagtcgtggatctggccaacaagaaggtgggacagttgcacgaagtgctagttagaccggatcagttggaactgacggaggactgcaaagaagaaactaaaatagacgtcgaaagcctgtcctcggcgtcgcagctggaccaagccctccgacagtttaaccagtcagtgagcaatgaactgaatattggagtagggacttccttctgtctctgtactgatgggcagcttcatgtcaggcaaatcctgcatcctgaggcttccaagaagaatgtactattacctgaatgcttctattccttttttgatcttcgaaaagaattcaagaaatgttgccctggttcccctgatattgacaaactggacgttgccccaatgacagagtgtatcctttaaatccctactcaagaatcctttgaaaaaatagttccagaaaaaaatggtaattcaagaaactttcaaacattttaaattttgtcagcatatggataaaattggcctatccaaaatttgtttactctgctgagaaactaaaatacaactatacccatctttaaaaaa

SEQ ID NO: 150134 - DNA, 3558 bp, Homo sapiens; identical to SEQ ID NO: 123953

SEQ ID NO: 150135 - DNA, 4614 bp, Homo sapiens
atgtttgttttgaaggtaggctgtccatctttgctgttgagagacccacgtcggtcattattacactatacctgtttcacatcagttcctgttcttgttcaggttggctgcaaccctaatgaagatgtggctatctttgctgttgactcattaaggcaactctccatgaagtttcttgagaagggtgaattagccaacttccgtttccagaaagattttctgaggccctttgagcatattatgaagaaaaacaggtctcccaccatccgggacatggcgatccgctgcattgcccagatggtgaactcccaggcggccaacatccgctcagcaactattttccagcaccattttcctgcagccatcgattcctttcaggatgctgtgaagtgcttatcagagttcgcctgcaacgccgctttccctgacacgagcatggaagcgattcggctcatccgcttctgtggcaaatacgtctctgagaggcctcgggtgctacaagaatacacaagtgatgacatgaatgtagctcctggtgacagagtctgggtccgaggctggttccccatcttattcgaactctcctgcatcattaatagatgcaagttagatgtacgaacaaggggactcacagtcatgtttgagatcatgaagagctatggccacacctttgaaaagcactggtggcaggacctgttcagaatcgtgtttcggatttttgacaatatgaaactccctgagcaactgtcagagaaatctgagtggatgacaacaacctgcaatcacgcactttatgctatttgtgatgtttttacccagttttatgaagctttgaatgaagttcttctttctgatgtatttgcacaattgcagtggtgtgtcaaacaagataatgaacagttggcgcgatcaggtacaaattgcttagaaaacttagtaatatccaatggagagaaattcagtcctgaagtctgggatgaaacctgcaactgtatgttggatattttcaaaacaaccatcccacatgttttgctgacatggagacctgtaggaatggaggaagattcatcagaaaagcatttggatgtggatctggaccgccagtctttaagcagcatagataaaaatccctctgagaggggacagagccagctctctaacccaacagatgacagctggaagggtagaccatacgcaaatcagaaactgtttgccagcctcctcatcaagtgtgtggtccagttggaattgatacagaccattgacaacattgtgttctaccctgcgacgagcaaaaaggaggatgcagagcacatggttgccgcccagcaagacacgctggatgcagatatccacatagagacggaggatcagggcatgtataagtacatgtcttcccagcacctcttcaagctgttggactgtttgcaggaatcccattcattctcaaaggccttcaactccaattacgagcagcggactgtcctgtggcgagcaggttttaagggcaagtctaaacccaatcttctaaaacaagaaaccagcagcctggcctgttgtttgaggatcctgtttcgaatgtatgttgatgagaaccgcagggattcctgggaagaaatacagcagagacttttaactgtttgcagtgaagctcttgcctatttcatcactgtgaattctgagagccatcgggaggcctggacaagtctcttgttgttacttctaactaaaaccctcaaaataaatgatgaaaagttcaaagcacatgcttcaatgtactacccctacttgtgtgaaattatgcagtttgacctgatccctgagctccgagcagttctgcggaagttcttcctacggataggtgttgtgtataagatatggataccagaagagccatcacaggctcgctgtcgcgccattttgccggggtttgaatgtgaggcggagcggcggcaggagcgggtagtgccagctacggtccgcggctggggttccctcctccgtttctgtatccccacgagttcatacaacaaatgcttactaaatatgtactgtgtgccagatcctatagcaatggaactcagcgatgcaaatctgcaaacactaacagaatatttaaagaaaacacttgatcctgatcctgccatccgacgtccagctgagaaatttcttgaatctgttgaaggaaatcagaattatccactgttgcttttgacattactggagaagtcccaggataatgttatcaaagtatgtgcttcagtaacattcaaaaactatattaaaaggaactggagaattgttgaagatgaaccaaacaaaatttgtgaagccgatcgagtggccattaaagccaacatagtgcacttgatgcttagcagcccagagcaaattcagaagcagttaagtgatgcaattagcattattggcagagaagattttccacagaaatggcctgacttgctgacagaaatggtgaatcgctttcagagtggagatttccatgttattaatggagtcctccgtacagcacattcattatttaaaagataccgtcatgaatttaagtcaaacgagttatggactgaaattaagcttgttctggatgcctttgctttgcctttgactaatctttttaagatttgtgataatgccgcactctatgcacaaaagtacgatgaagaattccagcgatacctgcctcgttttgttacagccatctggaatttactagttacaacgggtcaagaggttaaatatgatttgttggtaagtaatgcaattcaatttctggcttcagtttgtgagagacctcattataagaatctatttgaggaccagaacacgctgacaagtatctgtgaaaaggttattgtgcctaacatggaatttagagctgctgatgaagaagcatttgaagataattctgaggagtacataaggagagatttggaaggatctgatattgatactagacgcagggctgcttgtgatctggtacgaggattatgcaagttttttgagggacctgtgacaggaatcttctctggttatgttaattccatgctgcaggaatacgcaaaaaatccatctgtcaactggaaacacaaagatgcagccatctacctagtgacatctttggcatcaaaagcccaaacacagaaggacacaggggagacagagcgggggaaagagaaacggggaaccgcgagaacggagaagcgaaccaacaaaacccaaaacccaccagcccaaaaaggcggacgagacgcaaaacacgcaaacgggggaacgaaaggaagaaaaacagaggcggcaaacaaacgcaaaagaaagccaaacacgaaacaaggcgaggaaaaggtggggggggggaacgacgcgagaggggaacacgaagacgaaaaaagagggagagggacgcgcgcgaagcgaaaacgacggcaggaagaaggggaggcgaggcaaacaaacaacgcaaaacaggagagagaaaggagggggaacaaaacgcaagggggcgaaccgaaccgaaagaaaaagaggaaaacggacgaagcgggaaagcagagggaaagaaggagaggaggacaggcgccggaaatcccaggcgctcaggaggcagagacagaagaacagcttgagcctgacaggctcacggatcaggaaataggggatggcaaaggccttgacatggcaagacggtgtagtgtgacgtccatggagtccacagtgtcctcggggacccagacaactgttcaggatgaccctgagcaatttgaggtcatcaagcaacaaaaagaaatcattgaacacggcatcgagctgcttggcactgctgcaccaccaaaggcaaacttcattgaagctgacaagtattttcttccattcgagctagcttgccagtccaagtccccaagggtagtcagcacatcccttgactgcttgcagaaactcatcgcatacgggcacatcactggcaacgcccctgacagtggagcccctgggaagcggctgatcgacagaattgttgaaaccatttgcagttgttttcagggccctcagactgatgaaggggttcagttacaaataattaaggctcttctgactgcagtgacttccccacacattgaaattcatgagggtactatcctgcagacagtgagaacatgttacaatatctatttggccagcaaaaatctcatcaatcaaaccactgccaaggctacccttactcagatgctgaacgtcattttcacccgcatggaaaaccaagtgttgcaggaggccagagaactggaaaaaccaatccagtcaaaaccccagtcccctgtgatccaagctgcagcagtatccccaaagttcgttcgtttgaagcacagtcaggcacaaagcaaaccaacaactcccgaaaaaacagatttaaccaacggtgaacatgccaggagtgattctggaaaagtaagcacagaaaatggagacgcacccagagaaagaggctcatcactgtcagacatgttactttcctgcttactgtgtagtaacaacagtggtccaagtgtgatggcacctcgcatttggccccaagggaagggagtcgattgggagtggtga

SEQ ID NO: 150136 - DNA, 3162 bp, Homo sapiens
gtcgcgccattttgccggggtttgaatgtgaggcggagcggcggcaggagcggatagtgccagctacggtccgcggctggggttccctcctccgtttctgtatccccacgagatcctatagcaatggaactcagcgatgcaaatctgcaaacactaacagaatatttaaagaaaacacttgatcctgatcctgccatccgacgtccagctgagaaatttcttgaatctgttgaaggaaatcagaattatccactgttgcttttgacattactggagaagtcccaggataatgttatcaaagtatgtgcttcagtaacattcaaaaactatattaaaaggaacctggagaattgttgaagatgaaccaaacaaaatttgtgaagccgatcgagtggccattaaagccaacatagtgcacttgatgcttagcagcccagagcaaattcaagaagcagtttaagtgatgcaattagcatttattggcagagaagattttccacaagaaatggcctgacttgcctgacagaaatgggtgaatcgctttcagagtggagatttccatgttattaatggagtcctccgtacagcacattcattatttaaaagatacccgtcatgaatttaaagtcaaacgagtttatggactgaaaattaagcttgttctggatgcctttgctttgccttttgacttatcttttttaaggccactattgaactctgcagtaccccatgcaaatgatgcctctgccctgaggattctgttttcttccctgatcctgatctcaaaattgttctatagtttaaactttcaggatctccctgaatttttttgaagataatatggaaacttggatgaataattttcatactctcttaacattggataataagcttttacaaactgatgatgaagaggaagccggcttattggagctcttaaaatcccagatttgtgataatgccgcactctatgcacaaaagtacgatgaagaattccagcgatacctgcctcgttttgttacagccatctggaatttactagttacaacgggtcaagaggttaaatatgatttgttggtaagtaatgcaattcaatttctggcttcagtttgtgagagacctcattataagaatctatttgaggaccagaacacgctgacaagtatctgtgaaaaggttattgtgcctaacatggaatttagagctgctgatgaagaagcatttgaagataattctgaggagtacataaggagagatttggaaggatctgatattgatactagacgcagggctgcttgtgatctggtacgaggattatgcaagttttttgagggacctgtgacaggaatcttctctggttatgttaattccatgctgcaggaatacgcaaaaaatccatctgtcaactggaaacacaaagatgcagccatctacctagtgacatctttggcatcaaaagcccaaacacagaagcatggaattacacaagcaaatgaacttgtaaacctaactgagttctttgtgaatcacatcctccctgatttaaaatcagctaatgtgaatgaatttcctgtccttaaagctgacggtatcaaatatattatgatttttagaaatcaagtgccaaaagaacatcttttagtctcgattcctctcttgattaatcatcttcaagctggaagtattgttgttcatacttacgcagctcatgctcttgaacggctctttactatgcgagggcctaacaatgccactctctttacagctgcagaaatcgcaccgtttgttgagattctgctaacaaaccttttcaaagctctcacacttcctggctcttcagaaaatgaatatattatgaaagctatcatgagaagtttttctctcctacaagaagccataatcccctacatccctactctcatcactcagcttacacagaagctattagctgttagtaagaacccaagcaaacctcactttaatcactacatgtttgaagcaatatgtttatccataagaataacttgcaaagctaaccctgctgctgttgtaaattttgaggaggctttgtttttggtgtttactgaaatcttacaaaatgatgtgcaagaatttattccatacgtctttcaagtgatgtctttgcttctggaaacacacaaaaatgacatcccgtcttcctatatggccttatttcctcatctccttcagccagtgctttgggaaagaacaggaaatattcctgctctagtgaggcttcttcaagcattcttagaacgcggttcaaacacaatagcaagtgctgcagctgacaaaattcctgggttactaggtgtctttcagaagctgattgcatccaaagcaaatgaccaccaaggtttttatcttctaaacagtataatagagcacatgcctcctgaatcagttgaccaatataggaaacaaatcttcattctgctattccagagacttcagaattccaaaacaaccaagtttatcaagagttttttagtctttattaatttgtattgcataaaatatggggcactagcactacaagaaatatttgatggtatacaaccaaaaatgtttggaatggttttggaaaaaattattattcctgaaattcagaaggtatctggaaatgtagagaaaaagatctgtgcggttggcataaccaacttactaacagaatgtcccccaatgatggacactgagtataccaaactgtggactccattattacagtctttgattggtctttttgagttacccgaagatgataccattcctgatgaggaacattttattgacatagaagatacaccaggatatcagactgccttctcacagttggcatttgctgggaaaaaagagcatgatcctgtaggtcaaatggtgaataaccccaaaattcacctggcacagtcacttcacatgttgtctaccgcctgtccaggaagggttccatcaatggtgagcaccagcctgaatgcagaagcgctccagtatctccaagggtaccttcaggcagccagtgtgacactgctttaaactgcatttttctaatgggctaaacccagatggtttcctaggaaatcacaggcttctgagcacagctgcattaaaacaaaggaagttctccttttgaacttgtcacga

SEQ ID NO: 150137 - DNA, 396 bp, Homo sapiens
catgaacatggacattctgaagtgctcttggaggatgtggaacatctgaaggtcaagcaggaaccaacagacatacagcttcagcctatggtgacacagctcagatatgaatctttttgcctccaccaatttcaagaacaagatggtgaaagtatacctgagaaccaggagttggcatcaaagcaagaaatcttaaaagaaatggaacatttgggggatagcaaactccaaagagatgtatctttggattctaagtacagagaaacttgtaaacgagacagcaaggcagaaaagcagcaggcacattccactggagagagacgccacaggtgcaatgaatgtgggaaaagcttcactaagagttcagtactcattgagcaccagagaatccacacc

SEQ ID NO: 150138 - DNA, 1098 bp, Homo sapiens; identical to SEQ ID NO: 120841

SEQ ID NO: 150139 - DNA, 1080 bp, Homo sapiens
atggagaatgattgcagcagggaaggaaatgctgctgtggcagtggcagaggggctgttggatgcctctgaaaacctctccctagggaaactccaggccactaccagtgggttattgtggaaactcaataagattatgtatacaattggtattaatgaaaaaattgtcattactagtagaacttgtgcctgggggagatgccgggcagaacgcagttcctcaccagcaacggaacaaagctggacagagaatgactttgacgagctgagagaagaaggctttggacgatcaaattactccgagctatgggaggacattcaaaccaaaggcaaagaagctgaaaactttgaaaaaaatttagaagaatgtataactagaataaccaatacagagaagtgcttaaaggagctgatggagctgaaagccaaggctcgagaactacgtgaagaatgcagaagcctcaggagccaatgcaatcaactggaagaaagggtatcagcgatggaagatgaaatgaatgaaatgaaaccaaatctacgtctgattggtgtacctgaaagtgatggggagaatggaaccaagttggaaaacactctgcaggatattaaccaggagaacttccccaatctagcaaggcaggccaacgttcagattcaggaattacagagaacgccacaaagatactcctcgagaagagcaactccaagacacataattgtcagattcaccaaagttgaaatgaaggaaaaaatgttaagggcagccagagagaaaggttgggttaccctcaaagggaagcccatcagactaacagcggatctcttggcagaaactctacaagccagaagagagtgggggccaatattcaacattcttaaagaaaagaattttcaacccagaatttcatatccagccaaactaagcttcataagtgaaggagaaataaaatactttacagacaagcaaatgctgagagattttgtcaccaccaggcctgccctaaaagagctcctgaaggaagcgctaaacatggaaaggaacaactggtaccagccgcggcaaaatcatgccaaaatgtaa

SEQ ID NO: 150140 - DNA, 986 bp, Homo sapiens; identical to SEQ ID NO: 125302

SEQ ID NO: 150141 - DNA, 975 bp, Homo sapiens
cttctgctgctgatacccagacaaacagggtctggagtggacctccagcaaactccaacagacctgcagctgagggtcctgactgttagaaggaaaactaacaaacagaaagaacatccacaccaaaaccccatctgtacgtcaccatcatcaaaggccaaagacgaatggctaactagaataaccagtgcagagaagtccttaaaggacctaatggaggtgaaaaccaaggcacgagaactacgtgacgaatgcacaagcctcagtagccgattcgatcaactggaagaaagggtattagtgatggaaaatcaaatgaatcaaatgaagcaagaagagaagtttagagaaaaaagaataaaaagaaacgaacaaagcctccaagaaatatgggactatgtgaaaagaccaaatctacgtgtgattggtgtacctgaaagtgatggggagaatggaaccaagttggaaaacactctgcaggatattatccaggagaacttccccaatctagcaaggaaggccaacattcaaattcaggaaacacagagaatgccacaaagatactcctcgagaagagcaactccaagacacataattgtcagattcaccaaagttgaaatgaaggaaacaatgttaagggcagccagagagaaaggtcgggttacccacaaagggaagcccatcagactaacagcggatctctcggcagaaactctacaagccaaaagagagtgggggccaatattcaacattcttaaagaaaagaattttcaacccagaatttcatatccagccaaactaagcttcataagtgaaggagaaataaaatcctttacagacaagcaaatgctgagagattttgtcaccaccaggcctgccctaaaagagctcctgaaggaagcgctaaacatggaaaggaacaaccagtaccagcactgcaaaaacatgccaaattgtaaagaccatccaggctag

SEQ ID NO: 150142 - DNA, 1136 bp, Homo sapiens
ccaccactgctgacacccaggcaaacagggtctggagtggacctccagtaaactccaatgacctgcagctgagggtcctggctgttagaaggaaaactaacaaagagaaaggacatccacaccaaaaacccatctgtacgtcaccatcatcaaagaccacaaagatggggaaaaaacagagcagaaaaactggaaactctaaaaatcagagcacctctcctcctccaaaggaatgcagctccacaccagcaacagaacaaagctggacggagaatgactttgatgagttgagagaggaaggcttcagaagatcaaactactctgagctaaaggaggaagttcaaaccaaaggcaaagaagttaaaaactttgaaaacaaattagacgaatggataactagaataatcaatgcagagaagtgcttaaaggacctgatggagctgaaaaccacagcacgagaactacaaagggtatcagtgatggaaaatgaaatgaatgaaatgaagcatgaaaagaagtttagagaaaaaagagtaaaaagaaacgaacaaatcctccaagaaatatgggactatgtgaaaagaccaaatctatgtctaactggtgtacctgaaagtgatgaggagaatggaaccaagttggaaaacactctgcgggatattatccaggagaacttccccaatctagcaaggcaggccaacattcagattcaggaaatacagagaacgccacaaagatactcctccagaagagcaactccaagacacataattgtcagattcaccaaagtcgaaatgatggaaaaaatattaaaggcagccagagagaaaggtcgggttacccacaaagggaagcccatcagactaacagcagatctctcggcagaaactctacaagccagaagagagtgggggccaatattcaacattcttaaagaaaagaattttcaacccagaatttcatatccagccaaactaagcttcataagtgaaggagaaataaaatactttacagacaagcaaatgctgagagattttgtcaccaccaggcctgccctacaagagctcctgaaggaagcactaaacatggaaagggacaacttgtaccagccactgcaaaaacatgccaaattgtaa

SEQ ID NO: 150143 - DNA, 1026 bp, Homo sapiens
atggggaaaaaacagagcaggaaagctgaaaattctaaaaatcagagtgcctctccccctccaaaggaacgcagctcctcgccagcaatggaacaaagctggacagagaatgactttgacgatttgagagaagaaggcttcagaaggtcggtaataacaaacttctcagagctaaaggagcatgttgtaacccatcgcaaggaagctaaaaatcttgaaaaaaggttagatgaatggctaactagaataaacagtgtagagaagaacttaaatgacctgatggagctgaaaaccatggcacaagaacttcatgatgcatgcacaagcttcaatagccaattcaatcaagtggaagaaaggatatcagtgactgaagatcaaattaacgaaataaagcgagaagacaaagttagagaaaaaagagtaaaaagaaacgaacaaaggctccaagaaatatgggactatgtgaaaataccaaatgtacgtttgattggtgtacctgaaagtgacggggagaatggaaccaagttggaaaacactctgcaggatattatccaggagaacttccccaacctagcaaggcaggccaacattcaaattcaggaaatacacagaacaccacaaagatactcctcaagaagagcaaccccaagacacgtaattgtcagattcaccaaggttgaaatgaaggaaaaaatgttaagggcagccagagagaaaggtcgggttacccacaaagggaagcccatcaggctaacagcggatctctcggcagaaactctacaagccagaagacagtgggggccaatattcaacattcttaaagaaaagaattttcaacccagaatttcatatccagccaaactaagcttcataagtgaaggagaaataaaatcctttacagacaagcaaatgctaagagattttgtcaccacgaggcctgccttacaagagctcctgaaggaagcactaaacatggaaaggaacaatcagtaccagccactgcaaaaacacgcgaaattgtaa

SEQ ID NO: 150144 - DNA, 2749 bp, Homo sapiens
gctccacctctgggggcagggcacagacaaacaaaaagacagcagtaacctctgcagacttaagtgtccctgtctgacagctttgaagagagcagtggttctcccagcacgcagctggagatctgagaacgggcagactgcctcctcaaaaggaaaactaacaaccagaaaggacatctacaccgaaaacccatctgtacatcaccatcatcaaagaccaaaagtagataaaaccacaaagatggggaaaaaacagaacagaaaaactggaaactctaaaaagcagagcgcctctcctcctccaaaggaacgcagcgcctctcctcctccaaaggaacgcagctcctcaccagcaacggaacaaagctggagggagaatgcctttttgactttgacgagctgagagcagaaggcttcaaacgatcaaattactctgagctatgggaggacattcaaaccaaaggcaaagaagttgaaaactttgaaaaaaatttagaagaatgtataactagaataaccaatacagagaagtgcttaaaggagctgatggagctgaaaaccaaggctcgagaactatgtgaagaatgcagaagcctcaggagccgatgcgatcaactggaagaaagggtatcagcgatggaagatgaagtgaaaatgaatgaaatgaatgaaatgaagcgagaaggaaagtttagagaaaaaagaataaaaagaaacgagcaaagcctccaagaaatatgggactatgtgaaaagaccaaatctacgtctgactggtgtacctgaaagtgatggggagaatggaaccaagttggaaaacactctgcaggatattatccaggagaacttccccaatctagcaaggcaggccaatgttcagattcaggaaatacagagaacaccacaaagatactcctcgagaagagcaactccaagacacataattgtcagattcaccaaagttgaaatgaaggaaaaaatattaagggcagccagagagaaaggtcgggttaccctcaaagggaagcccatcagactaacagcggatctctcggcagaaaccctacaagccagaagagagtgggggccaatattcaacattcttaaagaaaagaattttcaacccagaatttcatgtccagccaaactaagcttcataagtgaaggagaaataaaatactttacagacaagcaaatgctgagagattttcgtcaccaccaagcctgccctacaagagctcctgaaggaagcactaaacatggaaaggaacaaccgatcccccagttcctcaccagcaacggaacaaagctggatggagaatgattttgacgagctgagagaagaaggcttcagacgatcaaattactctgagctacgggaggacattcaaaccaaaggcaaagaagttgaaaactttgaaaaaaatttagaagaatgtataactagaataaccaatacagagaagtgcttaaaggagctgatggagctgaaaaccaaggctcgagaactacgtgaggaatgcagaagcctcaggagccgatgcgatcaactggaagaaagggtatcagcaatggaagatgaaatgaatgaaatgaagcgagaagggaagtttagagaaaaaagaataaaaagaaatgagcaaagcctccaagaaatatgggactatgtgaaaagaccaaatctacgtctgattggtgtacctgaaagtgatgtggagaatggaaccaagttggaaaacactctgcaggatattatccaggagaacttccccaatctagcaaggcaggccaacgttcagattcaggaaatacagagaacgccacatagattctcctcgagaagagcaactacaagaaacctaattgtcagattcaccaaagttgaaatgaaggaaaaaatgttaagggcagccagagagaaaggtcgggttacccacaaagggaagcccatcagactaacagcagatctcttggcagaaactctgcaagccagaagagagtgggggccaatattcaacattcttaaagaaaagaattttcaacccagaatttcatatccagcaaaactaagcttcataagtgaaggagaaataaaatactttacagagaagcaaatgctgagagattttgtcaccactagccctgccctagaagagctcctgaaggaagcactaaacatggaaaggaacaaccgaacaacaagacagaaagttaacaaggatatccaggaattgaattcagctctgcaccaagcagacctaatagacatctccagaactctccaccccaaatcaacagaatatacattcttctcagcaccacatcacacttattccaaaattgaccacatagttggaagtaaagcactcctcagcaaatgtaaaagaacagaaattataacaaagtgtctctcagaccacagtgcaatcaaactagaactcaggattaagaaactcactcaaaactgcacaactacatggaaactgaacaacctgctcctgaatgactactgggtacaaaatgaaatgaaggcagaaataaagatgttctttgaaaacaatgagaacaaagatacaacataccagaatctctgggacacatttaaagcagtgtgtagagggaaatttatagcactaaatgcccacaagagaaagcagaaaagatctaaaactgacaccctaacatcacaattaaaagaactagagaaggaagagaaacacattcaaaagctagcagaaggcaagaaataa

SEQ ID NO: 150145 - DNA, 439 bp, Homo sapiens
  misc_feature (1)...(439): n = a,t,c or g
ntaggagcccgctggtgctcccggcaggcagccagcctccgcaggaccccgaccagcgacacgatggcttctgggcaatacagcacgtcagcaaatagctccggtggccctgggtggactccttggccatcagggtctccgccagcacctcgtacagctcatccaaaggctctgtgtggacagcctcgtgctttttgatgagttctgagagaaagcaccgggcatacttgactgacggcgggtgcttcacacacacaggatgcttcacagtctacttctgcaaaatatcccgcagcagctcagaatctgatgagtctcttaactttgcttctaagctctgccaggggaaggagcgcagggcgcgcgccgccaggaagcggcgcttgaaactctgcagcaagagttcgctccccgacgaaatcgtcggtnnnngaaaaag

SEQ ID NO: 150146 - DNA, 849 bp, Homo sapiens
ttcggcacacaccaccacacccaacgaagggagtattttatatgccagctggctgggattacaccattccatcccaaatctcccctccaaacttggtgaaaatcatctgaccatttttacagattagaacgaaagcaaacaagctctcactctgtctgcccccagcacgaggctgtccacacggagcttttggacgagctgtacgaggcgctggcagagaccctgatggccaaggagtccacccagggccaccggagctatttgttgccctcgggaggctcggtcacactctccgaaagcatggccatcatctcccacagcaccacgggtctggtcacatgggatgccgccctctacattgcagaatgggccatcgagaacccggcagccttcactcacaggtctgtcttagagcttggcagtggcgccagcctcacagtcctggccatctgcaagatatgccgcccccgggcatacatcttcagcgactgtcacagccgagtcctcgagcagctccaaggaaatgtccttctcaatggcctctcattagaggcagacatcactgccaacttagacggccccagggtgacagtggcccagctggactgggacgtcgcgacggtctgtcagctctctgccgtccagccagatgttgtcattgcagcaggtaatgcccagccccgggcatcctgtgcaggcggtgtccttgcagctctacccagctcttggctctagaagcgggggtagtcctcggccctccagccagggggtgcagacctggatgtgctggaaatgcttctggtggatgaggcggctgtaatactccctcagaggccctttgccacgaaa

SEQ ID NO: 150147 - DNA, 1301 bp, Homo sapiens
  misc_feature (1)...(1301): n = a,t,c or g
ctccagtgtggtggaattcgccgggcttccgcccggtctgccggcaacgctgcggccccgcccacgtcatggcgcccgaggagaacgcggggaccgaactcttgctgcagagtttcgagcgccgcttcctggcggcacgcacactgcgctccttcccctggcaggngggcggcggggcgagcggagaggcccgcgggggtcgcgggagtccaggggcagacgggatgggtctccgtgctgaaacccccggcgctccggccacagcttagaggcaaagttaagagactcatcatattctgagctgctgcgggatattttgcagaagcacgaggctgtccacatggaggctttggacgagctgtatgaggcactggcagagaccctgatggccaaggagtccacccagggccaccggagttatttgctgccctcgggaggctcagtcacactctccgagagcacagccatcatctcccatggtaccacaggcctggtcacatgggatgccaccctctaccttgcagaatgggccatcgagaacccagcagccttcactaacaggactgtcctagagcttggcagtggtgccggcctcacaggcctggccatctgcaaagatgtgccgcccccgggcatacatcttcagcggacttgtcacagccgggtccttgagcagctccgagggaatgttccttctcaatggcctctcattagaggcagacatcactgccaagttagacagccccagggtgacagtggcccagctggactgggacgtcgcgacggtccatcagctctctgccttccagccagatgttgtcattgcagcagatgtgctgtattgcccagaagccatcatgtcgctggtcggcgtcctgcggaggctggctgcctgccgggaggaccagcgggctcctgaggtctacgtggcctttaccgtccgcaacccagagacgtgccagctgttcaccaccgagctagcccccagcacctgtgagggtgtgctgtcattgtcccatctcaccgacaaagacattaggacacacagaggccaagcgaccctcgagctcctgcagactgcagcccggccaccaggctctcgtgcctccacaatacacccaagcctcccaatgccacgagcctctgccccagctccccctgagcacagcccctcctggcagccatgtgcacagatgcacccgcagcagcctctgcctgcacacagagacacagacaacccagtgcctgtccacgtggggcagcccgttaactacagagccaacaaacaagccagcacatga

SEQ ID NO: 150148 - DNA, 387 bp, Homo sapiens
  misc_feature (1)...(387): n = a,t,c or g
gaatgattaaagaatttcgggctactttggaatgtcatccacttactatgactgatcctgtaagtacatccaaagaacttctctttcttaagtgtacaattgagagacagaaaacttctctttacaggaatgagggcatgcaggaatctttactcacctttgaggnnnnnnnnnnnnnnnnnnnnnnnnnnnnnnnnnnnnnnnnnnnnnnnnnnnnnnnnnnnnnnnnnnnnnnnnnnnnnnnnnnnnnnnnnnnnnnnnnnnnnnnnnnnnnnnnnnnnnnnnnnnnnnnnnnnnnnnnnnnnnnnnnnnnnnnnnnnnnnnnnnnnnnnnnnnnnnnnnnnnnnnnnnnnnnnnnnnnnnnnnnnnnnnnnnnnnnnnnnnnna

SEQ ID NO: 150149 - DNA, 378 bp, Homo sapiens
gaggctaacctttatttcccttctttttctctttagcgcggcttattccaggggtgtgtttcgtcgagatgcacactcgagtgaggttgctcatcggtttaaagatttgggagaagaaactttcaaagccttggtgttgattgcctttgctcagtatcttcagcagtgtccatttgaagatcatgtaaaattagtgaatgaagtaactgattttgcacaaacatgtgttgctgatgagtcagctgacaattgtgacaaatcacttcataccctttttggagacaaattatgcacagttgcaactcttcgtgaagcctatggtgaaatggctgactgctgtgcaaatcaagaacctgagagaaatgaatgcttcttgca

SEQ ID NO: 150150 - DNA, 359 bp, Homo sapiens
  misc_feature (1)...(359): n = a,t,c or g
nacaccaggtaggacctcaagctgagaggggtggaaaggcaagggagtgtcacagcaagctgaaggggtcccaagccttcaggattttcctcaggaccttgctctcttgtccccaggtgcgccaagttgctgctggaagcaggagcgacggtgaacctggcagcaggcgagagccaggagacgcccctgcacgtggcggcggcgcgcggcctggagcaacatgtggctctgtacctggagcaacatgtggctctgtacctggagcaacatgtggctctgtacctggagcatggcgccgacgtgggcctgcgcaccagccagggcgagactgcgctgaacacggcgtgcgctggggccga

SEQ ID NO: 150151 - DNA, 347 bp, Homo sapiens
tgttcacttcatagaagggaaacagaagcacgacagtggtaagggtttcagggagcttctgtagccgcaagggggtccccacgggttccgcagcagcaccccctctccccccacgcgggtccccaagcttgccccgagccacccgaggaggacgcctccccgcagccgctgcctccaccccggcaacccctccagcacgacccccgacccagccgctccggtgccggccacttgggcaaatacctctagccatggctccactctgtcaccgcctgggatctcccgggaaacccagctttcgaaaaaagttgcaacaactcacccaactgctccgccgggctccagtt

SEQ ID NO: 150152 - DNA, 621 bp, Homo sapiens
  misc_feature (1)...(621): n = a,t,c or g
gacgggcctnagatcatcttcaacccttcggccacgataggagcactcagcgagtccatgtggcccatcgaggccagaaacgcagccattgccaatcactgcttcacctgcgccatcaatcgagtgggcaccctcaccaggactttggctacttttatggctcgagctatgtggcagcccctgacagcagccggactcctgggctgtcccgtagccgggatggactgctagttgctaagctcgacctaaacctctgccagcaggtgaatgatgtctggaacttcaagatgacgggcaggtatgagatgtacgcacgggagctcgccgaagctgtcaagtccaactacagccccaccatcgtgaaagagtagccggcttcagtgcctgccttggggtgaggaagacacctctgccccagtggattagcaagtgtggcaggcttaacatgtccaggttctccccaataacattgtccaggttggttttaaaattcccaggcagggggagagtggcatggggagtgacttcttaatgggtaaggggctgcttacttctggggtattggaaatgtttggggactaggtacaggtgaatgtactaaatgccactgaatttgtataa

SEQ ID NO: 150153 - DNA, 1156 bp, Homo sapiens
atggcgggcgctgagtggaagtcgctggaggaatgcttggagaagcacctgccgctccccgacttgcaggaagtgaagcgcgttctctatggcaaggaactcaggaagcttgatctgcccagggaagctttcgaagctgcctccagagaagactttgaactgcagggatatgcctttgaagcagcggaggagcagctgagacgaccccgcattgtgcacgtggggctggttcagaacagaatccccctccccgcaaatgcccctgtggcagaacaggtctctgcccttcatagacgcataaaggctatcgtagaggtggctgcaatgtgtggagtcaacatcatctgtttccaggaagcatggactatgccctttgccttctgtacgagagagaagcttccttggacagaatttgctgagtcagcagaggatgggcccaccaccagattctgtcagaagctggcgaagaaccatgacatggtggtggtgtctcccatcctggaacgagacagcgagcatggggatgttttgtggaatacagccgtggtgatctccaattccggagcagtcctgggaaagaccaggaaaaaccacatccccagagtgggtgatttcaacgagtcaacttactacatggagggaaacctgggccaccccgtgttccagacgcagttcggaaggatcgcggtgaacatttgctacgggcggcaccaccccctcaactggcttatgtacagcatcaacggggctgagatcatcttcaacccctcggccacgataggagcactcagcgagtccctgtggcccatcgaggccagaaaccgcagccattgccaatcactgcttcacctgcgccatcaatcgagtgggcaccgagcacttcccgaacgagtttacctcgggagatggaaagaaagctcaccaggactttggctacttttatggctcgagctatgtggcagcccctgacagcagccggactcctgggctgtcccgtagccgggatggactgctagttgctaagctcgacctaaacctctgccagcaggtgaatgatgtctggaaattcaagattacgggcaggtatgagatgtacgcacgggagctcgccgaagctgtcaagtccaactacagccccaccatcgtgaaagagtag

SEQ ID NO: 150154 - DNA, 604 bp, Homo sapiens
aagaaacctgatgttttagttagcctatgtaaccccatcacaggttgatgtacagtttccattaggttctggaggaaatactgaaagcagtgtgtgtacctgcccactgccttcacacaccccggcctgggtttttaattacttcaagcaggccagcctcaggtgcccacagccctgagaaccagtctgtgcccagtttctttctcttctctcagattatgaactccccaaaggcaccatccagggtttttaccccgcttgtcaaattcccctctgggcccagggctgggctggctcagcagggagtgtttaataaggcactttaattggcccggtgagtacaggaccattccaggttcaccttaactgtttcctggctgactcgcctctcggcctgattgccctgctcatctggctgagtgagctggaatgagtgtagtggtagtgccacctataggttcctcttaccttggtcttatttcacaggagcacttaccgaacgagtttacctacagagatggaaagaaagctcaccaggactttggctacttttatggctcgagctatgtggcagcctctgacagcagccggactcctgggctgt

SEQ ID NO: 150155 - DNA, 357 bp, Homo sapiens
cctctgtgttatcttggattttgctgagcttcctcaaaatagctacattgaattttccatctgaaaggttatatatctgtctctccaggattaatcactgttgccttatttagttcattttgtgaggtcatgttttcctggatggtcttgatgcttgtggatgttcatcagtgtctgggcattgaagagtcagcatttattgtagtctttgcagtctgggcttgtttgtatccatccttcttcggaagactttccaggtattcagagggacttgggtgttgtgatctaagtctttggtcactacggccatatctgctttaggaggcactgcaagcctagtaatgccatggctcttgc

SEQ ID NO: 150156 - DNA, 353 bp, Homo sapiens
tgcattttttaaaagaattggcagagtatcatcaagctggagagagttgtaatatggaaactcagacaagttcgacatttaacagagattctctgggtaattatagccttctttcttactttcagatctgctgttttcattttgaatgaaggaaattatctgatttaccatattgagagattgctccttgaactgaagggatgcagccggcaggcaacaagggaattcatttctggaatcatctagggggaccaggaagagctctccagtgtcattccctagcctcatgaatgccagggctacactggccaaatcatgcagggattcaaaggcccatattcttccttgattgt

SEQ ID NO: 150157 - DNA, 458 bp, Homo sapiens
ggggcaattttaatttgtcttcagtgtagtagagtaactgtgaactgttagagttatgaaactgacatggaaagttgtataccaaaggagtcttaggactgtccatggatactgttatgtatcatttcacttatattggcttcagcttgcgatttctctactgtaagtggtgagaattgatcagatagttaaggaaggtccttagataatgcagtatacttattaacatacagacatcaagaagcagaaatatatagacatcttcctttttggttctaatagggcttcgtgggacacatatgcaacatgcctatgatttttacaagcctgatatgctatctgaatatcctatagtagatggaaaactctccatacagtgctacctcagtgcattagaccgctgctattctgtctactgcaaaaagatccatgcccagtggcagaaagagggaaatgat

SEQ ID NO: 150158 - DNA, 364 bp, Homo sapiens
  misc_feature (1)...(364): n = a,t,c or g
ctcctttatatatatggtgccctagactcaagagtgagagccttggtgttcagtgtacggtgctgggctcgagcacattcactaacaagtagtattcctggtgcatggattacaaatttctcccttacaatgatggtcatcttttttctccagagaagatcaccccctattctttcaacactaaaattctttaaaaccctatcagatgccgacgaataatgggtaataaaaaggaccactgccaattggttcggacttggataaaattaacccttacggaaccccgaaccttttaaatactacggaaggaatttttgggaattttgcaattttcgtttcaaaaaaattcctaaaaatttcgcgn

SEQ ID NO: 150159 - DNA, 361 bp, Homo sapiens
cgctgtagaattttatttctatcttctttatccccgagatcattaaatctgaattacagaagctattatcccagtgtcctacaataggtctgacagctgtaattctgtagccctataggaaaattacagtcttggtaggactattagaagcatggcttggaggattgcaggtttgccatctcatccatggatgtagagtgggatggatgacttggctctttactcaaggcaatctgtgttattaggtgaggtcaagaattggatactgtcctcaatatgatgccgagctgggatatatggctgctcaggaaataatgattatgtatgccagaatatccggagtctttgagccccagattgg

SEQ ID NO: 150160 - DNA, 353 bp, Homo sapiens
  misc_feature (1)...(353): n = a,t,c or g
attcatttaacaaatatttaataaaattatactgtgtgccgggtattattttagaaccggagggcgcaatggatcatttgtacaacctnnnnnnnnnnnnnnnnnnnnnnnnnnnnnnnnnnnnnnnnnnnnnnnnnnnnnnnnnnnnnnnnnnnnnnnncgaaattcagtttgnnnnnnnnnnngagagagagagaaacaaaaatcccttccctgctggagatgacattataagcaggggagtcggtcaataaataagcaaataaatgagcagtaagaagaaaactaaagcagggcaaagaggatagggaggaacaggattttatttgatacaaaatatttcatatagaatg

SEQ ID NO: 150161 - DNA, 360 bp, Homo sapiens
  misc_feature (1)...(360): n = a,t,c or g
cattctatatgaaatattttgtataaaataaaatcctgttcctccgtatcctctttgccctgctttagttttcttcttactgctcatttatttgcttatttattgaccgtctcccctgcttagaatgtcagctccagcagggaagggatttttgtttctctctctctcnnnnnnnnnnncaaacggannnnnnnnnnnnnnnnnnnnnnnnnnnnnnnnnnnnnnnnnnnnnnnnnnnnnnnnnnnnnnnnnnnnnnnnnnnnnnnnnnnnnnnnnnnnnnnnnnnnnnnnntccggggctaaaatagtacccggcacacagtaaaagcttattaaatattggctaaatgaatgaattaa

SEQ ID NO: 150162 - DNA, 491 bp, Homo sapiens
ttaattcattcattcatttagcaaatatttaataagcttctactgtgtgccgggtactattctagcaccggagggcgcagtggctcatatctacaaccacagcactttgggaagacaaggcaggccggactacttgagtccaggagttcgaggcctagccgaggcaacatagccgaaatccccgtcctgaaaaaaaaaaagagagagaaaaaaaaatccccttcccctgctggagctgacattcctaagcaggggagacggtcaataaataagcaaataaatgagcagtaagaagaaaactaaagcagggcaaagaggatagggaggaacaggattttattttatacaaaatatttcatatagaatggtcttttgttttatataaaatatttcatatagaaaagtctttctggtaaggtgatttttttttttttttaagagacagggtcttactctgtcacccaggctggaatgcagtggtgcaatcctag

SEQ ID NO: 150163 - DNA, 399 bp, Homo sapiens
  misc_feature (1)...(399): n = a,t,c or g
cataaaaattctagaagataacatcagaaaaactctggtagactttggcttaggcaaaaaggtcatgaccaagaacccaaaaacaaatgcaacaaaaacaaagataaatagatggggcnnnnnnnnnnnnnnnnnnnnnnnnnnnnnnnnnnnnnnnnnnnnnnnnnnnnnnnnnnnnnnnnnnnnnnnnnnnnnnnnnnnnnnnnnnnnnnnnnnnnnnnnnnnnnnnnnnnnnnnnnnnnnnnnnnnnnnnnnnnnnnnnnnnnnnnnnnnnnnnnnnnnnnnnnnnnnnnnnnnnnnnnnnnnnnnnnnnnnnnnnnnnnnnnnnnnnnnnnnnnnnnnnnnnnnnnnnnnnnnnnnnnnnnnnnnnnnnnnnnnnnnnnnnnnnnnnnnnnngag

SEQ ID NO: 150164 - DNA, 417 bp, Homo sapiens
tgcacgcacgcttgggaagcttcatgcgcccctacatcctgataccccccacctcccaccatccctgaactcagagacccgcatccctgcacccagctgggcccactgtcctctccctccggtttggaattccagcccttcctcatctgggtctgataccctcctccctgggcaccggggccacacttaccctcgttcctgtccccacagctcccaagcctgtgagcaagatgcgcatggccaccccgctgctgatgcaggcgctgcccatgggagccctgccccagggggtaaggacagccccagggtggtgggaggggcaaggttatcccgcctggatggaggacagtgccaaggggaggggcagggaagagagcccacctggggaggggtcctgactgctgcgggagggacagt

SEQ ID NO: 150165 - DNA, 1057 bp, Homo sapiens
gggtcgagtccctagtcagtgtggttggattcgcatgagaagcaggagctgtcgggaagatcagaagccaggcatggatgaccagcgcgaccttatctccaacaatgagcaactgtccatgctgggccggcgccctggggccccggagagcaagtgcagccgcggatgccctctacatagtgctttttccatccttgtgactctgctcctcgttgtccaggccatcaacgcttatcttcctgtaccactagcatggccgtcttgacaaactgacagtcactccccagaacctgcagctggagaacctgtcgcatgaagcttccccaagcctcccaagcctgtgagcaagatgcgcatggccaccccgctgcttgatgcaggcgctgcccatgggagccctgccccaggggcccatgcagaatgccaccaagtatggcaacatgacagaggaccatgtgatgcacctgctccagaatgctgaccccctgaaggtgtacccgccactgaaggggagcttcccggagaacctgagacaccttaagaacaccatggagaccatagactggaaggtctttgagagctggatgcaccattggctcctgtttgaaatgagcaggcactccttggagcaaaagcccactgacgctccaccgaaagagtcactggaactggaggacccgtcttctgggctgggtgtgaccaagcaggatctgggcccagtccccatgtgagagcagcagaggcggtcttcaacatcctgccagccccacacagctacagctttcttgctcccttcagcccccagcccctcccccatctcccaccctgtacctcatcccatgagaccctggtgcctggctctttcgtcacccttggacaagacaaaccaagtcggaacagcagatagcaatgcagcaaggccctgctgcccaatctctatctgtcaacaggggcgtgaggtcccaggaagtggccaaaagctagacagatccccgttcctgacatcacagcagcctcaacacaaggctccaagacctaggctcactgacgagaatgg

SEQ ID NO: 150166 - DNA, 359 bp, Homo sapiens
ccgggacgatgcctgcctctactccccagcctcagctcccgaggtcatcacagtaggggccaccaatgcccaggaccagccggtgaccctggggactttggggaccaactttggccgctgtgtggacctctttgccccaggggaggacatcattggagcctccagcgactgcagcacctgctttgtgtcacagagtgggacatcacaggctgctgcccacgtggctggcattgcagccatgatgctgactgccgagccggagctcaccctggccgagttgaggcagagactgatccacttctctgccaaagatgtcatcaatgaggcctggatccctgaggaccagcgggtactgaccc

SEQ ID NO: 150167 - DNA, 5811 bp, Homo sapiens
tcagagtaaacagcatgtttattttgaacattcaagtttacaaaaacaaaaaggtaacaaaaccatgacacagatcacacacacatacacacacacacacacgcacacacacgcacacatgttgcagctcatgtcaatttatgtacaaaacagggagaggagaaaggggcaaggctggggaggggttgtcagtagggtgcactaatgtcacagtgtcagacaacttgacatgctcactcacactcagcctgggcccatgtgagccccttccccacccaggggtcgggggtcagggtgggaggtgggggtctggggtggcaggcagctggaataaaggggtgaagagagtagtcccttctctgggagggagcccctttccaagtttactcaggccaagggtgctgggacacacaaaggaggggggactcagtgctggggagaggctgctgcgtcctagagagggctgaatgcagtcagaaggctgggctcaagtctcccgtgtccagctgggtggccttgagggtcgctcccctccccgggcttcagcttcctcatctgtaaaatgagggctttggcctcttctcagagcccttcctgtccaaatctgtggtcccaggtgatgcaaagtggtggcaaggggattggtccccttgggatgttggtgggggcaccacatgccacaagatgggaagatctggcagataacagctgggaagcaactggtgcagggcttggccccaagcaagagttggagaagcagcaatttccctccccttccctgcccaggactcgggagatgctcagcttccttttcttttttggctctcctgtgaactctagctgagctaaagaagggctgaagctctggcccatggtgggagggacacattccctgaagcagctgagccccctggcacggcttcaccaaggggaccctggccctggggctggcccaccccctgcctctgttccttcacttcaagccctgtgggctgggaaaggggtcggaacacgtctggagcaatggtgcccagatggcactctacacaggtgagtgggaactcagcccctggacgtaaccccctttggtttgaaatctgggctccatcacttgctagctgattgacaccaggcagatgacatcacctctctgtgccccagtttcctcacctgtctaacggagccaagaacgtcctaacttagaactgtgttgtgagatcaacaggacggtgcctgtgccacactcagtgcagtgccagatggcaggacaaacacgggctccatcgtggttatcagccaggagcagctcaggatgtgactgggccatgtctgactcctctttccctgtctgcttggatgtgctcaggggcagcagaagataggaaaagcgggacccaaacagtggtgctggggaaatttgttcctgttccctttggaaggctgagtgggtgatgcagcacaggaacaaggcttggacgtcagaggtctcatcttcactgtgacaaagcataaaggacttggggttgagcgtgtgtgtgggctcaagtgaccatgcaagtgctgtcacctccttcctaagaccccatccttctcccaagtcctccacaagagctaccttcttcaaaacaataacagaaacacatcaagcttggcgtcactgaaattgaagttctgaattctgccgtcaccccagcaacagtgccagtatgatgagacacttgacccagcacttgggttgatgtctttggctgttaccgtggcaacctaggtctcagcaggtctggctgaagcccgccattgccttttcttccagtgggattgtactggaggggctgggcaatctatttatgttctcgaaatggaaagcaggatctgggcgcgggaggcaatgcaacttggagtagcttccatggcactgagccccccggcctgcagctcttgcatcatgtctcaggctaagtggcctcagggagtggagatagggaacaaaaaggcaggcaaaaggtacagtgcccacttgagccagggagcatgcagctgctcagacacctggtaggtgactagcaggggagggacacctcagctctccattctgccgaagcgcccagggatcataacctcctccccgcacttcctggggtggggatgccaagatgtttgggtgttgcataaaggaagatgttcaggtgtcatgttggaaagcatctgacctcgcggatgtctacctgcttaggtgtagactgaactcaaaggtcttcaggggcaggcaacatggagggggaagaacactgaagagggagtcagatgccctgagctctagtcctggctctgccccatgctctgtgatcctgtgcaggtcacgtgtcctccctgaactcttccccatttctcacaagcaagatgcagctgtggtgccagatggggtggcttttctcatctttaagattattattatttttttgagatggagtcttgctctgttgcccaggctggagtgcaatggcgtgatctcggctcactgcaacctccacctcctcagttcaagagattcttctgcctcggcctcccgagtagctgggactacaggcatgcaccacctaaccagctaagttttgtatttttagtgaagatggggtttcaccacgttggccaggctgacttcgaactcctgacctcaagtgatctgcctgtctcagcctcccaaagtgctgggattacaggcgtgagccaccgtgcccggcctctcagctcttaagattctgacactctcttggggaagctggtgatgactcaaggggaccaggaagccatcagccctttgagacactctcagacaggcaagggtgccaggctgggttgatccaaagggagctggttttttacaatccatgcatgaggttagtctgccttgaaccttgccctggactctgagtctctgctgaccctaacccatgactggctgcatcccatccactgccgagtcctgggatctacccctgcgaagcccagggtcaccagagctttccccacatatccacctggaatcacagagaagctcacacccaatctggagagcaaatgaccaaagcgagggcctcagctcacgaatgaggaaggccaggcccagagagggcagggacttacagaaggccacacagcacattagcagggctggctaggaaccaaggtcttctccctctcacccagtgctctgctcactgcttcatgcttctccccaccctctgagcttcttccttgctgccccaggaccatgcacagggtaggtaatgtggctctgccagaggtggggtctcctgggccatgaggcctctaccttagggctgctcccagcccaggctgaagcggtccaagtcctgtccttggcatggagggagagcgatgactataccagtggccatcactatgggtgagcacaaggggtgactgcagccctttggcctcctggggtctttgtccccttccctccaggctggagctgggaaaggaatgtcctggagactgaggtggggctgggccaggcatggaaccaacattcaaaccgctacacacaaagagaggaggaaagaggaggaagagggaggcatgggtggggggggggggaggctccatcgagatcccactgcccttgactggcagctggtggaaagagggaggagggtaagtctaacctctgatgtcctcgtcatccccttctacagcctgttgtggccctgaaggggaagccactgggcctgttgcatgggggacaagggggcgggcggccacccccaccactgagatagtggggtccccctcatacacaatcctaccctactgggggtgctgtcaaaattagtgaaatcagatacagttgatgggcagggagggtggggtaagagacaactccagtgcagtgccaggtgggcaggctcccactgttcacttgagacgctcctccccactcaggtggggacaggggacacactcgcagggcagggcattctggaggtgtgggtacaggtgaggggaaatgggaggcacagccaggagtggggcaggagggaaggccagtgcgtgggcaggctgaggagggaatatgacccccctcaagtccccaaagtggcaggcaagggaggggccctggatgaggtggcccctcatgccttggccctccccttgcagacatcgaaggcagcctttgttgcacccccaaaggcctccaccaacttgtcttcccagggaaggacgttgcccagcagtggcgcagtgcagttggcaatgcccaggacctgggctggtgtcagggcgtggtcccacaggttaaactgggcaatgtcaccgacaaaggcctgggtggcatcaaaccggccacccagggtatcctgctcctggcccaagataaggatcccatgaggcttgatggggtgccaggcagccaggttctcaccggagccctgcagctccccgtcctggtaggcagaccataggccatcccttgtggtccaggcgatgcagatgtggtgccagccattgtccttcaggctcaggggcagctgggccaccttgtcgttgatcagcagctccatgggctcatggcccgcctctagcagtacaatctcgttggcctgcccgggcactgagtaggagaagggggtgccctggccggtgccgctggacctggaccgcagccacatgcaggcggtgaatgcgtagagctcgggcagagccttccgcacgcgggcgtacatgtagttgttacggatggggatgctgatcttgaaggcatctggaggactgtaggctgaggacccgtgctccagctcagccacacgaccctgcaggacgtccaactccttttccacttcctgcctctgccggcggctgctgtggctgagggccacacgctccttctccagtgccagcacctgggccagcagctgcccctccagctggtccatcttggagtgtaggccggtgggcacagcagagactggggctggggcagctgagaggttcacacgggctggaagctcctccaggcggtcgatgcggtcccgcagggcgcgcacggcgtcctccagctccagaatgagcgcaggcgagtcccagggcccgtcggccatggtgtcgcggcggggcccggcgccctggaggccgcgcggcaggccgctctcgcagcggcccagcttgccggtgagctcacggatggtgtcctggtcggcgcggatgcgcgcctcctgctgcagcgccgtctggcgcagctgctcggccgtgctctgcagcagcagcagctcttcgcgctcgcccggcgcagcgcccgccgcgtccccctgctgggcccccgacgggcaggcagcagccagcggcgtgcacaggaagcggctgaacaggggcccgggcggcagcgggtgcgcgctggccgcgggtgccccgggcagcgcggggggcccggctgaaccgcccgcgccgtgcagcgcgctcaggctccgctgcgggcccggggacgcggcggcgcccgaggcgaccgaagcattgtcggcgccgccgggcagcgcccgcgccgggctggccgccaggggcacgctggcgatgatgcagatgacggcaccgaggaacgccagcatgcccgcggccagcagcacggccaggaacttcagcgtgaggcgggcggcgggggcgcccgaggcccccggcaggcgcggcggcggggtcggggcgcggagcccgggcgcgctgggccgagcggggcaggcgcgggagccggagccggagccggagccggagccggagctggagctgtcgccgcggccg

SEQ ID NO: 150168 - DNA, 2446 bp, Homo sapiens
ttttttttttttttttttgagacagggtcttgttctatcaccccaggctggagtgcagtggtgtgatctcagctcgctgcaggcttgacctcctgggcccaagtgatcctcctgcctggacctcccaaaagtgttgggattacaggcatgagccactgcatccagcttgcttctaattttcctacccaggctgttttaaacctagttctccagctaagtaaaatgtgcccaaatggaaaacatctaaatcttctgcagcccattcttcctgtatctttgtgttgacaaacctctaatcttccatgtctttgtgttgacaaacctaaccttccatgtctttttgttgacaaacctctaaccttccatgtctttgtgttgacaaacctctccatgggtggtgcatctgaccctatcccaacatgccttaggacgctcatctccttgactgtctgccatcccctcccaaaactaagtggaggctctgtcttttcctcctagtttgaggttctcttctcccagtgtcctaaaatggttccaatatgcccctagagtagatggcctgcctgaaagaccgcaaagtaagtaatccctgccaacccggaaaccaaaggcctgtgggttggagggggaaaccgggtgtgaagggcctgaatgaataaagccctaggaggcctccctgaagtccatatcccctatgttgcctcccctgggagagatgggcctaaactgtttatctttttaaaaaccagatgattaaaaaagttacattttagtaataatactgaataggaatataggataatctcttcctaaagccctatttgggtttcccagaagagttagatcattggaccaaaagtgcacagagtaagataccttagctacagcaatagaaatcacaaaactgttctggtggttttaaatcttcctatttctgatttagaagtatgaagtgatccatatttaatctttctgctcctgctcaaaaataattcttataacatcatttaggttatagaaagtttcctacttatagcccttacattcttcatgaccgaaatctgtgtctttccctcatgactgataattatctcccaatttggtcacttctgctaattgctattttattaaacttgaaattttagggttgggaagcaaagggaaaccacttgggcatcccctttgtttctagggagaaaagactaacttgtcccatctgctcacttgcttatggagctaaaagacccccagtcctagaagtgttctgttcctgaggagtggttaaagaggtgaaaagaagaggtgaattaaaagatgaaagagctttttaaatagccagcaactctctctaccatctgttttggtaagagctagcacctcttgttcctctttaaaaccctggagggaataaacccaaaatcaagtggttcccaggatccttcagagccaaaagaccccaataccacagtcttgacctttgccctgcctgcttctgaaactggagaatggcatctcccagcagcctaaggcagacataggtcatacctatccctgggcagcgagctgagctcccacagactgagttgtgctggatctcagaattctaagcattaatgtttccttgctgttataattcttgctcatcaggttcaactgccttatccctctgaggtttgcaaatgaggatggagaagccactgagaaatggaacccagtgagctgagctcaccttttatatgagtggatttttttttttttttttttttttgaaatggagtctcactctgtcgcccaggctggagtgctgtggcgtgatctcagctcactgcaagctccacctcccgggttcacaaagcgattctcctgcctcagcctcctgggtagctgggattacaggcgcgtgccaccacgcccggcatgagtggaattttaagtgttaaatctcttcctgactctgggttcagtaggtccctcctctttctgttaccctccctggttctcttctgttcaccaactacctggccatgtgcccaaactagaaaaaggaaataattttacacccctgccccaacagctccttccctcctaggggactttctgtgttccaccccccactttggggtctttaggaactgtgggctaggaagataaaagggaggagtttgagtcagaggctttatgtccccaaacccaaccccctctgagtattaaactatagtggcattgtccctcaagctcccctctgccttggctccagagtcttcctcctcttcttccagactgggcagggtggctgttgttattggtgaagataggcatctagccagagctgccctgactcctttagtgagtggatgatgtcggcgaaggctgacagcaggggcttggactggtactctatgccatgcttggcacacaaggactgcaccaggggagcactttgtgg

SEQ ID NO: 150169 - DNA, 362 bp, Homo sapiens
ttttttaagcaattttccaaattttcagcatgatattaagatttcttcatcaaatgaaatcatttcttcccggggcttcattcagacatcagatgtttcttcctcagccaaaaagaaaatattgctattccaattacgacgcatagctgaagactgtcaaattcccctaatggtgtataaccaggcatttatatattttgatcagtatgctgcaatattagaagacactgttagaaatgtattggttgcatcagcagctatgttcattgtttccttattgttaatcccttatccattgtgttccttgagggtgacttttgctatcggttctgtgattgtaggggtaacgggtttcatggcag

SEQ ID NO: 150170 - DNA, 236 bp, Homo sapiens
cacgttgtgcacatgtacccctaaaacctttaaagtataataataaaaagaaactgaagaaaagacatagctttttaaaacccaaattattagtctcatttgccaaagatttacatcaattacgtgaacttagatgattattgttattattattattggagacagggtctggctctgttccgcaggccggactgcagtggtgcagtcacagctcactacagcctcaacctcccggg

SEQ ID NO: 150171 - DNA, 383 bp, Homo sapiens; identical to SEQ ID NO: 145432

SEQ ID NO: 150172 - DNA, 1068 bp, Homo sapiens; identical to SEQ ID NO: 145433

SEQ ID NO: 150173 - DNA, 340 bp, Homo sapiens
  misc_feature (1)...(340): n = a,t,c or g
nnnnnnnnnnnnnnnnnnnnnnnnnnnnnnnnnnnnnnnnnnnnnnnnnnnnnnnnnnnnnnnnnnnnnnnnnnnnnnnnnnnnnnnnnnnnnnnnnnnnnnnnnnnnnnnnnnnnnnnnnnnnnnnnnnnnnnnnnnnnctattttcacagtggagacaatttacggcacttgagtacggttggctggacaacccaaccgtcatagttccaggtgacaatctggcctatgatccgcctcttaataactacaacatccacatggagccgaccctgcaccttgtcctgcgactgataggtgatattcagatcttcaggaagaccctgaccggcaagaccag

SEQ ID NO: 150174 - DNA, 386 bp, Homo sapiens
  misc_feature (1)...(386): n = a,t,c or g
aatgaagttacaatccaccaaggaaatggcacatgtgnnnnnnnnnnnnnnnnnnnnnnnnnnnnnnnnnnnnnnnnnnnnnnnnnnnnnnnnnnnnnnnnnnnnnnnnnnnnnnnnnnnnnnnnnnnnnnnnnnnnnnnnnnnnnnnnnnnnnnnnnnnnntaaaaggtgcgagtgagcaggtgaggggaaagactgaaaactatgagaaacagcaactaagacacaaaggaggtgggagactgcgttggtgccgcagcagccacaccgtcctcttgcccccgtcacttgggttaaaaccaccggaaattccactattgcaaattttttattaatccttgtatgtctgtcctttctatttttagtctacaggtgtatccagcagg

SEQ ID NO: 150175 - DNA, 346 bp, Homo sapiens; identical to SEQ ID NO: 14181

SEQ ID NO: 150176 - DNA, 391 bp, Homo sapiens
ctgaagtgaagatggtctttgagctcgtcgtggggtctttccaggtatgggctgttgacttaaggctgcattcttccctggcttttaagggaattcaacctggagtcttggcccttgccactggattccaacctttttactgtaataagtattagataagcacctactgtgtgcttagctctttccttaaccaggggaacacaggggctggagccaggggtggggcagggctgggggcttctggtctgtctacctcacctctcctgtcatcttccttctcagggttttgtggtggctatcctctactgcttcctcaatggtgaggtaagcccctcccagtccttggggcttaggcaatggaactcccaggcccagggtccggaaacattgg

SEQ ID NO: 150177 - DNA, 332 bp, Homo sapiens
ttaaggctgcattcttccctggcttttaagggaattcaacctggagtcttggcccttgccactggattccaacctttttactgtaataagtattagataagcacctactttgtgcttagctctttccttaaccaggggaacacaggggctggagccaggggtggggcagggctgggggcttctggtctgtctacctcacctctcctgtcatcttccttctcagggttttgtggtggctatcctctactgcttcctcaatggtgaggtaagcccctcccagtccttggggcttaggcaatggaactcccaggaccagggtccggaaacattgg

SEQ ID NO: 150178 - DNA, 752 bp, Homo sapiens
ctctctatagggaaaagtgaagctttcgggtaagtatccatgtggctattcctggttctactttccccttgtggaaatgtaatacctggtttacactgctcttttgtgagtacgtatatggtgataggaataaaggagaaagtctggaaagcccccaagcacaaaagcaaggcctgaaggccccagcaaacagtcattcaggaaacaactgccccactttaatacgtaaaagtatgaaaaggaatgccaatgtgagcccatgtcattaggagaggtaaggataatctacaccttgcttaaccatcacttaacctttttattgcacataaatggaaatttaagcccctaaccctaggtctgtacttgtgtaataattatgcactctaaattagcatctgcatttagatagattgcaagcttagaaatcagtcctgcatttgacctcttttgtcagtgcctactatatcaaattttaacagatttttttttttttttttgaaatggagttctcgctcccgctgtccaggctggagtgcaatggcgcgatcccggttcaccaccacctccgcctcctgggttcaagcgattcttctgcctcagcctcctgagtagctgggattatagtcatgcgccaccacgcccagctaattttgtatttctagtagagatgaggtttctccatgttggtcaggctggtcttgaactcccgacttcaggtggtctgcctgccttggcctcccagagtgctggga

SEQ ID NO: 150179 - DNA, 384 bp, Homo sapiens
  misc_feature (1)...(384): n = a,t,c or g
ggcaattgagctctggtaccatgatccagcctgtactacacctgtactcaagttgatggctgaattggttcataataggtaagcaggaggcagagcttgcaagggcacatctgccctgttatctgagagaatttgctgtatctagtgctttgggcttattgtgggaaataataagattcactactgcattttaaaattcgaaaagtttttgtgtttttgtttgtgtgaaagaatagtattcctaactacacaaaaccatagtcaactgcaggaaataagtcacnnnnnnnnnnnnnnnnnnnnnnnnnnnnnnnnnnnnnnnnnnnnnnnnnnnnnnnnnnnnnnnnacttatatactggcttggctcgttgtatgcttagctg

SEQ ID NO: 150180 - DNA, 298 bp, Homo sapiens
cggccgcgtcgactttagatctctccaacaaccggattggctgtctcacctccgagaccttccagggcctccccaggcttctccgactaaacatatctggaaacatcttctccagtctgcaacctggggtctttgatgagctgccagcccttaaggttgtgtgagtatctcttcctagctcaaggacccagacccctgtccctttctctgcccaggagagatgtataagtatcatgaccaccaggactggtctcacgagtggccacagcagacagtgcctcaaatgcccccatgatca

SEQ ID NO: 150181 - DNA, 639 bp, Homo sapiens
ggctggaagaggctcgggtccggctctgggcgtggttcccttcccgtgtctgagcctggaagaggctcgggtccggctctgggcgtggttcccgtgtctgagcctggaagaggctcgggtccgggtccagctccgagcgtggttcccgtgtttgaacctggaagaggctccaaccaggcgtattgtgttttgactgcagctggatctcggcttgactgttgagatctgccaagcatccgctaagctatcatttctgagaaaggtcaaggcttagaggaaggcatgtcgggagttggcgcatcaagggttggaaaggggccccaggggtacagcatgtgggtgcctgttcctttgtgggacttgtgtgtgtgtggctggtggggcggggggtggatactggttcttttttttcccattatcctgagagccttaaggtactcagtgtgttggtgagactcagccctgtcatctagcagaagtgtgttccttttcattgctgtatagtattccattgcatgactgtcctgtgctctgattttaatgcactttattgtgggtggatatttgagttgcttcctttctggggtaataacactcacttggaaatagctgcggtcgacgcggccgcgaattccagag

SEQ ID NO: 150182 - DNA, 327 bp, Homo sapiens; identical to SEQ ID NO: 35507

SEQ ID NO: 150183 - DNA, 375 bp, Homo sapiens
caaaattcagctttctgaaactctttgtggcttcgggaagacgataaaaacattggacaatcgaattcttgttattacatccaaagcaggtaatgtttcaaagggcgtttccattgatgatctgaatgtttggcataataattctggcaagttagcctgatttttttattgctacataatattttacatattgaaggggtgcatgtgatactttgtcccttgcataaaacgggtaatgatcaagccacgtggttagggcatttgtcaccttgagtatttatttctttgtgatgggaatagttcccctgatttcacatttaagggcaaattctgttacacagataatgacattatgagcgtcaaacatgagaaaag

SEQ ID NO: 150184 - DNA, 336 bp, Homo sapiens
cagcaacttcggcacccagacctacatctgcaacgtagatcacaagcccagcaacaccaaggtggacaagacagttgagcgcaaatgttgtgtcgagtgcccaccgtgcccagcaccacctgtggcaggaccgtcagtcttcctcttccccccaaaacccaaggacaccctcatgatctcccggacccctgaggtcacgtgcgtggtggtggacgtgagccacgaagaccccgaggtccagttcaactggtacgtggacggcatggaggtgcataatgccatgctggactccgacggctccttcttcctctacagcaagctcaccgtggacaagag

SEQ ID NO: 150185 - DNA, 361 bp, Homo sapiens
  misc_feature (1)...(361): n = a,t,c or g
ttttttcagggcagtggtgggtgctttatttccatgctgggtgcctgggaagtatgtagacggggtacgtgccaagcatcctcgcgcgaccccgagagcccggggagcgggggcttgccggccctggcactcatttacccagagacagggagaggctcttctgtgtgtagtggttgtgcagagcctcatgcattatgcacctccacgccatccacgtaccagttgaactggacctcggggtcttcctggctcacgtccaccaccacgcacgtgacctaggggtccggnagatnatgaaagngtncttgggttntgggggangngggngggaattccccatttatgaattgaagataatgag

SEQ ID NO: 150186 - DNA, 1395 bp, Homo sapiens
atgatttcccctcacaagtgtccattcttcctgttccttgctggacgcttcctcttccattctggacacttcctgtgcgacacctcctcgggctttcccgaggccctctggcctcattccgttccctgctacctcccacttccaccttccaccaagggcccatcggtcttccccctggcgccctgctccaggagcacctctgggggcacagcggccctgggctgcctggtcaaggactacttcccagaaccggtgacggtgtcgtggaactcaggcgccctgaccagcggcgtgcacaccttcccggctgtcctacagtcctcaggactctactccctcagcagcgtggtgaccgtgccctccagcagcttgggcacccagacctacacctgcaacgtgaatcacaagcccagcaacaccaaggtggacaagagagttgagctcaaaaccccacttggtgacacaactcacacatgcccacggtgcccagagcccaaatcttgtgacacacctcccccgtgcccacggtgcccagcacctgaactcctgggaggaccgtcagtcttcctcttccccccaaaacccaaggatacccttatgatttcccggacccctgaggtcacgtgcgtggtggtggacgtgagccacgaagaccccgaggtccagttcaagtggtacgtggacggcgtggaggtgcataatgccaagacaaagccgcgggaggagcagtacaacagcacgttccgtgtggtcagcgtcctcaccgtcctgcaccaggactggctgaacggcaaggagtacaagtgcaaggtctccaacaaagccctcccagcccccatcgagaaaaccatctccaaaaccaaaggacagccccgagaaccacaggtgtacaccctgcccccatcccgggaggagatgaccaagaaccaggtcagcctgacctgcctggtcaaaggcttctaccccagcgacatcgccgtggagtgggagagcagcgggcagccggagaacaactacaacaccacgcctcccatgctggactccgacggctccttcttcctctacagcaagctcaccgtggacaagagcaggtggcagcaggggaacatcttctcatgctccgtgatgcatgaggctctgcacaaccgcttcacgcagaagagcctctccctgtctccggagctgcaactggaggagagctgtgcggaggcgcaggacggggagctggacgggctgtggacgaccatcaccatcttcatcacactcttcctgttaagcgtgtgctacagtgccaccgtcaccttcttcaaggtgaagtggatcttctcctcggtggtggacctgaagcagaccatcatccccgactataggaacatgattgggcagggggcctag

SEQ ID NO: 150187 - DNA, 1314 bp, Homo sapiens
ccggggtgtggccgcccccgggccttctcactcaacattgctgacatcgaggagaagagaggcttcaccagccactttgtaagacagactcctagtccttcacccaacaacctctgatacctcatctaccgccgctaccgccagttccatgctttgcagagcaagctggaggagcgcttcgggccagacagcaagagcagtgccctggcctgtaccctgcccacactcccaggtaggcggccactcccgtcctgctgctgcagagctgctgtgcggatacctgccctcaacgcctacatgaaggtaccagtgggccttgccaccttggcacgtggaagggcactgcccccatgggatcctctgcagggctctgggtgcctctggagcctcagcacccaaagccaaccctcagtgtccccagacctgtgcgcttggagtttggtgagatgaccccgccaggctctgggtgctcgcgtcctcgacgtccggatcttcttttaccagtcgccctatgactcagagcaggtgccccaggcactccgccggctccgcccgcgcacccggaaagtgtaagtgaccagcccctgggcttccacatggccagagccggcagctccgagagcagaggtaacccccgcccccacgctggccaggctctcacactgtaatttcaaagctggagatgtgatcttcctcctcagtcggatcaacaaagactggctggaggtgagttcagaagtgaggatggaggtgagattgaaggtgttcgtgaagatcctcaaagacttccctgaggaggacgaccccaccaactggctgcgttgctactactacgaagacaccatcagcaccatcaagtctgtggcctgggagggaggggcctgtccagccttcctgccatccctacgaccactgcccctcacatcaccttctcatgggtccctctcccactccaaagcccccagtggctcccagatgagccacaatgctgtaacaagccatcaacgtccagggtggcctggccagcctcattcccctttcccccaccccacattgaaagacctgctggagctcacaaggtgaggggctgggaatggggctggggagttagatactctggacgctgagggggatctggttcggctgctgtcggatgaggacgtagcgctcatggtgcggcaggctcgtggcctcccctcccagaagcgcctcttcccctggaagctgcacatcacgcagaaggacaactacagggtctacaacacgatgccatgagctgacggtgtccctggagcagtgaggggacaccagcaa

SEQ ID NO: 150188 - DNA, 1342 bp, Homo sapiens
ctaggccccctgcccaatcatgttcctatagtcggggatgatggtctgcttcaggtccaccaccgaggagaagatccacttcaccttgaagaaggtgacggtggcactgtagcacacgcttaacaggaagagtgtgatgaagatggtgatggtcgtccacagcccgtccagctccccgtcctgcgcctccgcacagctctcctccagttgcagctccggagacagggagaggctcttctgcgtgaagcggttgtgcagagcctcatgcatcacggagcatgagaagatgttcccctgctgccacctgctcttgtccacggtgagcttgctgtagaggaagaaggagccgtcggagtccagcatgggaggcgtggtgttgtagttgttctccggctgcccgctgctctcccactccacggcgatgtcgctggggtagaagcctttgaccaggcaggtcaggctgacctggttcttggtcatctcctcccgggatgggggcagggtgtacacctgtggttctcggggctgtcctttggttttggagatggttttctcgatgggggctgggagggctttgttggagaccttgcacttgtactccttcccgttcaagcaagtcctgctgcagaacgctgagaacgtgaaccacacggaacgtgctgttgaactgctcctacaccggctttgtctggccattatgcaccttccacgccgtccacgtaccacttgaactggacctcggggtcttcgtggctcacgtccaccaccacgcacgtgacctcaggggtccgggaaatcataagggtatccttgggttttggggggaagaggaagactgacggtcctcccaggagttcaggtgctgggcaccttgggcacgggggaggtgtgtcacaagatttgggctctgggcaccgtgggcatgggggaggtgtgtcacaagatttgggctctgggcaccgtgggcacgggggaggtgtgtcacaagatttgggctctgggcaccgtgggcatgtgtgagttgtgtcaccaagtggggttttgagctcaactctcttgtccaccttggtgttgctgggcttgtgattcacgttgcaggtgtaggtctgggtgcccaagctgctggagggcacggtcaccacgctgctgagggagtagagtcctgaggactgtaggacagccgggaaggtgtgcacgccgctggtcagggcgcctgagttccacgacaccgtcaccggttcggggaagtagtccttgaccaggcagcccagggccgctgtgcccccagaggtgctcctggagcagggcgccagggggaagaccgatgggcccttggtggaag

SEQ ID NO: 150189 - DNA, 1747 bp, Homo sapiens
aaggatgaggaaaggatatcccagagtgccagggcgcgcaaaccaaacttcacactctaggaagacagaggccagaggaaccaggagggcttcctggaggaggtggcatttactctgggcctaagagatcacaggaaaatggaggccagcattctaggcctggggaagagtttgggcaaaggcttggcagtaagagaataaaggtggggcttgatgggccagaggataagtgactcctcaaggtcacaagacaccctgatggctgggaccccatctctgatggagcaaggcttctgatacccaactgaggcttggcgccaaggactgacatcaaggaagtggattcctgcaaacctggcacccgagggtccacttcctcaatttctgtgcagctgggaggtgaggtaagaggaagtgtgggccacaggctaggcccagagagcctggaggaggagcctctgccagactggagagaagcaggcctgagcctccccaaaggcagctcctggggactcccaggaccacaggctgagacgagacgcagggtggctggaggaagtgagaggtgaactcagcctgggactggctgggcgagactctccacctgctccctgggaccatcgcccaccatggctgtggcccagcagctgcgggccgagagtgactttgaacagcttccggatgatgttgccatctcggccaacattgctgacatcgaggagaagagaggcttcaccagccactttgttttcgtcatcgaggtgaagacaaaaggaggatccaagtacctcatctaccgccgctaccgccagttccatgctttgcagagcaagctggaggagcgcttcgggccagacagcaagagcagtgccctggcctgtaccctgcccacactcccagccaaagtctacgtgggtgtgaaacaggagatcgccgagatgcggatacctgccctcaacgcctacatgaagagcctgctcagcctgccggtctgggtgctgatggatgaggacgtccggatcttcttttaccagtcgccctatgactcagagcaggtgccccaggcactccgccggctccgcccgcgcacccggaaagtcaagagcgtgtccccacagggcaacagcgttgaccgcatggcagctccgagagcagaggctctatttgacttcactggaaacagcaaactggagctgaatttcaaagctggagatgtgatcttcctcctcagtcggatcaacaaagactggctggagggcactgtccggggagccacgggcatcttccctctctccttcgtgaagatcctcaaagacttccctgaggaggacgaccccaccaactggctgcgttgctactactacgaagacaccatcagcaccatcaaggacatcgcggtggaggaagatctcagcagcactcccctattgaaagacctgctggagctcacaaggcgggagttccagagagaggacatagctctgaattaccgggacgctgagggggatctggttcggctgctgtcggatgaggacgtagcgctcatggtgcggcaggctcgtggcctcccctcccagaagcgcctcttcccctggaagctgcacatcacgcagaaggacaactacaggggtctacaacacgatgccatgagctgacggtgtccctggagcagtgaggggacaccagcaaaaaccttcagctctcagaggagattgggaccaggaaaacctgggaggatgggcagact

SEQ ID NO: 150190 - DNA, 2290 bp, Homo sapiens
atggactggacctggagggtcttctgcttgctggctgtagcaccaggtgcccactcccaggtccaactgcaggagtctggagctgaagtgaaaaagcctggggcttcagtgaaggtgtcctgcaaggcttctggatacacattcactagctatgttatacactgggtgaggcaggcgcctgggcagggccttgagtggattggatatattaatccttacaatgatggtactgactacgatgagaagttcaaaggcaaggccacagtgactttagacccatccaccaacacagcctacatggagctcagcagcctgaggtctgaggacactgcggtctattactgtgcaagagagaaggataactacgcgacgggggcctggtttgcttactggggccaagggaccctggtcaccgtctcctcaggtgagtcctaagcttggtacccgggaattcagatctgcagcatgctcgagctctagatatcagctttctggggcaggccgggcctgactttggctgggggcagggagggggctaaggtgacgcaggtggcgccagccaggtgcacacccaatgcccatgagcccagacactggaccctgcatggaccatcgcggatagacaagaaccgaggggcctctgcgccctgggcccagctctgtcccacaccgcggtcacatggcaccacctctcttgcagcttccaccaagggcccatccgtcttccccctggcgccctgctccaggagcacctccgagagcacagccgccctgggctgcctggtcaaggactacttccccgaaccggtgacggtgtcgtggaactcaggcgccctgaccagcggcgtgcacaccttcccggctgtcctacagtcctcaggactctactccctcagcagcgtggtgaccgtgccctccagcagcttgggcacgaagacctacacctgcaacgtagatcacaagcccagcaacaccaaggtggacaagagagttggtgagaggccagcacagggagggagggtgtctgctggaagccaggctcagccctcctgcctggacgcaccccggctgtgcagccccagcccagggcagcaaggcatgccccatctgtctcctcacccggaggcctctgaccaccccactcatgctcagggagagggtcttctggatttttccaccaggctcccggcaccacaggctggatgcccctaccccaggccctgcgcatacagggcaggtgctgcgctcagacctgccaagagccatatccgggaggaccctgcccctgacctaagcccaccccaaaggccaaactctccactccctcagctcagacaccttctctcctcccagatctgagtaactcccaatcttctctctgcagagtccaaatatggtcccccatgcccatcatgcccaggtaagccaacccaggcctcgccctccagctcaaggcgggacaggtgccctagagtagcctgcatccagggacaggccccagccgggtgctgacgcatccacctccatctcttcctcagcacctgagttcctggggggaccatcagtcttcctgttccccccaaaacccaaggacactctcatgatctcccggacccctgaggtcacgtgcgtggtggtggacgtgagccaggaagaccccgaggtccagttcaactggtacgtggatggcgtggaggtgcataatggccaagacagaagccgcgggaggagcagttcaacagcacgtaccgtgtggtcagcgtcctcaccgtcctgcaccaggactggctgaacggcaaggagtacaagtgcaaggtctccaacaaaggcctcccgtcctccatcgagaaaaccatctccaaagccaaaggtgggacccacggggtgcgagggccacacggacagaggccagctcggcccaccctctgccctgggagtgaccgctgtgccaacctctgtccctacagggcagccccgagagccacaggtgtacaccctgcccccatcccaggaggagatgaccaagaaccaggtcagcctgacctgcctggtcaaaggcttctaccccagcgacatcgccgtggagtgggagagcaatgggcagccggagaacaactacaagaccacgcctcccgtgctggactccgacggctccttcttcctctacagcaggctaaccgtggacaagagcaggtggcaggaggggaatgtcttctcatgctccgtgatgcatgaggctctgcacaaccactacacacagaagagcctctccctgtctctgggtaaatga

SEQ ID NO: 150191 - DNA, 354 bp, Homo sapiens
ggcacgagggaaagtgtagcatcagttacagagttaatggcgcaatgtaagaaacctttaaaagcttctgatgaattagtgcagcaatatcaaattaaaaaccagtgtctttcagcaatagcatctgatgcagaacaagaacctaaaattgatccatatgcatttgttgaaggagatgaggaattcctttttcctgataaaaaagatagaccaaatagtgagagagaagctggaaaaaaacacaaggtaagagaaatcacagtacaccaaagggtcactgttgattttgtagcactgcatatagtaacactcttactaccacagttatctcacttcttttgtcttagaatagaa

SEQ ID NO: 150192 - DNA, 390 bp, Homo sapiens
agtgccaagctcaataaaagaaaccctatactaggctaattattatgaaatttgttttaggacaccagaaataaagataatatctaaaaactttttagaatcgcctaggagggattaggaatatgaatagcatataacttgttggcagtagaattgaaggtagaaggtggtaaaacatcaccttgaaagttttgcattcagcctagaattctgtatccagttaagccatcaatcaagtgtgaaagtagggggaaaaactcaaggactaaaaaaatgtgctcatgaagaacattttttttggacattacccagaagtagaagaagctgatggcaacaagcagtggtggtttggtggtggatgcgccctccctccaacatacttgaatcaag

SEQ ID NO: 150193 - DNA, 132 bp, Homo sapiens
aagtgaaaaagtgccccgggggcttcagccagcacccagccctcatcagcgatggatgccaagagtcctattgcgtcaaatccgggctcttcacaggaaggtccctgcccccttgcaggcttccaccttttc

SEQ ID NO: 150194 - DNA, 362 bp, Homo sapiens
  misc_feature (1)...(362): n = a,t,c or g
gtggcagggagcgtggctgttgcagttgcttggtcctacactaggaagtcattactgaatttgtatttaagataaattcctgaaggtggaattgcgtcattaaagggcttgccactagggtttttgaaacatattactaaatttccatgttacaagatatcttccttcttgggcgtgttgaaaattaagtgatactagnnnnnnnnnnnnnnnnnnnnnnnnnnnnnnnnnnngatggtgatgtgcttagtaaatttgtaaattttttttcttttaaggttgtagaaggaacgcctcttattgatggaagaagactcaagtatagattaaatggtgattttctttttttaagactcaaattg

SEQ ID NO: 150195 - DNA, 456 bp, Homo sapiens
cacccccgactgtcactgcaccgaccggccctcgaggacctgctcttaggttcagaagcgaacctcacgtgcacactgaccggcctgagagatgcctcaggtgtcaccttcacctggacgccctcaagtgggaagagcgctgttcaaggaccacctgagcgtgacctctgtggctgctacagcgtgtccagtgtcctgccgggctgtgccgagccatggaaccatgggaagaccttcacttgcactgctgcctaccccgagtccaagaccccgcgagaagtacctgactgtgccacggggccctccgctggccttcacacagaagaccatcgcacgcttggcggtaaacccacccatgtcaatgtgtctgttgtcatggcggaggtggacggcacctgctactgagccgcccgcctgtccccacccctgaataaactccatgctcccccaagcaaa

SEQ ID NO: 150196 - DNA, 509 bp, Homo sapiens
ccacgcgtccggcgaaagcggacagaacgtgaccgccataaacttcccacctagccaggatgcctccggggacctgtacaccacgagcagccagctgaccctgccggccacacagtgcccagacggcaagtccgtgacatgccacgtgaagcactacacgaatcccagccaggatgtgactgtgccctgcccagttcccccacctcccccatgctgccacccccgactgtcgctgcaccgaccggccctcgaggacctgctcttaggttcagaagcgaacctcacgtgcacactgaccggcctgagagatgcctctggtgccaccttcacctggacgccctcaagtgggaagagcgctgttcaaggaccacctgagcgtgacctctgtggctgctacagcgtgtccagtgtcctgcctggctgtgcccagccatggaaccatggggagaccttcacctgcactgctgcccaccccgagttgaagaccccactaaccgccaacatcacaa

SEQ ID NO: 150197 - DNA, 1654 bp, Homo sapiens
ggagcccccgccctgggattcccaggtgttttcatttggtgatcagcactgaacacagaagagtcatgacggagtttgggctgagctgggttttccttgttgctatttttaaaggtgtccagtgtgaggtgcagctggtggagtctgggggagacttggtccagcctggggggtccctgagactctcctgtgcagcctctggattcaccttcagtagttatgctatgcactgggtccgccaggctccagggaagggactgaaatatgtttcaggtattagtagtaatgggcgtagaacatattatgcaaattctgtgaagggcagattcaccatctccagagacaattccaagaacacgttgtatcttcaaatgggcagcctgagagctgaggacatggctgtgtattactgtgcaagagggggggatcatatagtaccggctgctgtcgctcccttccacatggacgtctggggccaagggaccacggtcaccgtctcgtcagcatccccgaccagccccaaggtcttcccgctgagcctctgcagcacccagccagatgggaacgtggtcatcgcctgcctgcctggtccagggcttcttcccccaggagccactcagtgtgacctggagcgaaagcggacagggcgtgaccgccagaaacttcccacccagccaggatgcctccggggacctgtacaccacgagcagccagctgaccctgccggccacacagtgcctagccggcaagtccgtgacatgccacgtgaagcactacacgaatcccagccaggatgtgactgtgccctgcccagttccctcaactccacctaccccatctccctcaactccacctaccccatctccctcatgctgccacccccgactgtcactgcaccgaccgggccctcgaaggacttgtttttaggttcaaaagcgaccttcacgtgcacactgcccggcttgaagagatgcctcaggtgtcaccttcacctgggacgccctcaaagtggggaagagcgctgttcaaggaccactgaaggcgtgacctctgtgggctgctacagcgtgttccagtgtcctgccgggctgtgccgaggcccatggaacccatggggaaggaccttcactttggcactgctggccttaccccgagtccaaggaccccgcttaaccgcccaccctttttaaaattcggggaaacacatttccgggcccgaggttccacctgctggccgccgccgtcggagggagctgggccctggaacgagctggtgacgctggacgtgcctgggcattgggctttcagccccaaggatgttgttggtttgttgggttgcagggggtcacaggagcttgctccgcgagaagtaccctgacttgggcattcccggcagaagcccagccagggcaccaccaccttcgctgtgaccagcatactgcgcgtggcagccgaggactggaagaagggggacaccttctcctgcatggtgggccacgaggccctgccgctggccttcacacagaagaccatcgaccgcttggcgggtaaacccacccatgtcaatgtgtctgttgtcatggcggaggtggacggcacctgctactgagccgcccgcctgtccccacccctgaataaactccatgctccccca

SEQ ID NO: 150198 - DNA, 1417 bp, Homo sapiens
ctgaactcaaaacttttagctgttcattgcttcatgatggagatccaacttaccagcgtttatttttggactgccttgtacattcattgcgggagcttcatacaggagatgttatgattttgcctgtactttcttgcttcacaagatttatggctggtttgatctttgtactccacagttgttttagattcatcacttttgtttgtcccacatcctctgatcccctgaggacctgcgcagtcctgctatgtgttggttatcaggaccttccaaatccagttttccgatatttgcagagtgtgaatgaattgttgagcactttgctcaactctgactcaccccagcaggttttacagtttgtgcccaatgggaggtactccttaaggcggccctgcttgattttttgtgggatttgaatgctgccattgctaaaaggcatttgcatttcattattcaaagagagagagaagaaattatcaacagccttcagttacaaaactgaacatatgctttctgagattcaactttatgatttcttataatttgcccagtatttgcatcctgttgctctattaatttaaaaaccttttattttggggaaaggccaacaatttgcatcattcaaagtctcattaattctggaaaaccatccattctgatctctagggtatatacacccacagggcatagagctcttccacgtgggtggaatctatgcaatgatagatattcacactctaaatatgagggtgtgtgtatgtgtatggggtggccacagccatgcttacctatgccatttagttggtcttacttaatctgcttaagatttgcatctgtgtacctttgttcagattagtttttttttttccagccgatttcctcttagtggctaatgctgttagtgaattttccaactaatttcctctcattggttaatgttgttaatgaattgagagaggtaattgaggaaaggaaatgagtaaatcactgttcagcaacactgatttccgttaacacatcagttatgaatttcagggaattcatctcgccagattcttgataacatgccattcattgcccttaggtgattgaccctattttcttacatggctcaaataaaactagtatgctgttgtatgaatcttttactgaccacaccatccaactataaagatataacgggacagctttaaaccaaagatcatgtttagaacaatgaaaaattatttgttgtatctaatacacgcctgtattgtgaaaagcttcatttagcaatgatgtaataatttttaacttccaggaaataatctgtgaatggaaagattttttaacactctgagaatggggctagcctctggctgggcacacctgaaggtgtctgaacatagtgaatactaaagaaaaacgcttaaaactt

SEQ ID NO: 150199 - DNA, 315 bp, Homo sapiens
gaggaccttatgcccaggccactgccttatcacctgcctagcatactgcaggctggcgatggacccccacagatgcggccctaccatactatcatcgagattgcagagcacaagtaaggcctccttcctgggccttcctcccctgcaccgaccttcatgttccaacctccaattatgcccctccattctttgtaggaggaaggggtctttgaaggtcaggaagtggaggtctatcttcaatttaggtcgctctggccatgagactaagcgtaaacttccacggggggctgaggacaggggtaagtctggggagat

SEQ ID NO: 150200 - DNA, 532 bp, Homo sapiens
ctggaaatgtcattacaggcaatagttttgcatgtttatctgttaaatatatatatatttaaaaagcaattggactgtcagttggactgtcgatagctttggaggcagggaaaagttagaggaagtaagggagaacgggttaggcggggtttttctctctgggacttacagtgcatctaaagggttctcacagagccgccgctatcagtgtttccagtagaccctaacggaggtgtcgccatgactctctttctcgctctttccttctcaggagtacttcttgcaagcagagctgacaagcaacgtcttaaaaacaggcgtggtgcgctgctgcgtgggacagtgcaacaatgccatccctgttgacaccgtccttaccatgaataagctgcccatcacctatgtacgtctgctgtctgtggaacttaattcagccatttgcattttttgcttgtgagctctgtgcttatctgggttgtaggtgaggagataagagagagctgtgtgatcctttattaggggcttttcatat

SEQ ID NO: 150201 - DNA, 3104 bp, Homo sapiens
atgatctttcctgcagagagcagctgtgcactgcctcaggaaggcagtgcagggccgggctcaccagggtctgccccgccctccaggaagcggtcttggtcctctgaggaagagagtaaccaggctaccgggaccagccggtgggatggagtttctaagaaagctccacggcaccatttgtctgtgccatgcacaaggcctagggaggccaggcaagaagcagaggacagtacgtctcggctctctgcggagtctggtgaaaccgaccaagatgctggggacgtgggtcctgatcccattcctgactcatactatgggcttcttgggaccttgccctgccaggaagcactgagccacatttgcagcctgcctagtgaggtcctgaggcacgtgtttgccttcctcccggtggaagacctctattggaacctgagcttggtgtgccacttgtggagggagatcatcagtgacccgctgttcattccttggaagaagctgtaccatcgatacctgatgaatgaagagcaagctgtcagcaaagtggacggcatcctgtctaactgtggcatagaaaaggagtcagacctgtgtgtgctgaacctcatacgatacacagccaccactaagtgctctccgagtgtggatcccgagagggtgctgtggagtctgagggaccaccccctcctccccgaggctgaggcgtgtgtgcggcaacacctccccgacctctacgctgctgccgggggtgtcaacatctgggccctggtggcggctgtggtgctcctctccagcagtgtgaatgacatccagcgactgctcttctgcctccggagacccagctccacggtgaccatgccagatgtcaccgagaccctgtactgcatagccgtgcttctctacgccatgagggagaaggggattaacatcagcaatagcaagaaaaccatccaacttacacatgaacaacagctgattctgaatcacaagatggaacctctccaggtggtgaaaattatggcctttgccggcactgggaagacctcaacgctggtcaagtatgcagagaagtggtctcagagcaggtttctgtatgtgacattcaacaagagcatcgcaaagcaggccgaacgcgtcttccccagcaacgtcatctgcaaaaccttccactccatggcctacgggcacatagggcggaagtaccagtcaaagaagaagttgaatctcttcaagttaacacccttcatggtcaactccgtccttgctgaagggaagggtggattcataagagccaagcttgtgtgtaagactctagaaaacttctttgcctcggctgacgaagagctgaccattgatcacgtgcctatttggtgtaagaacagccaaggacagagagtcatggttgagcagagtgaaaaactgaatggtgtccttgaagcgagccgcctctgggataacatgcggaagctgggggagtgcacagaagaggcgcaccagatgactcatgacggctacttgaaactctggcagctgagcaagccttcgctggcctcttttgacgccatctttgtggatgaggcccaggactgcacaccagctatcatgaacatagttctgtctcagccatgtgggaaaatctttgtaggggacccgcaccagcagatctataccttccggggtgcggtcaacgccctgttcacagtgccccacacccacgtcttctatctcacgcagagttttcggtttggtgtggaaatagcttatgtgggagctactatcttggatgtttgcaagagagtcaggaaaaagactttggttggaggaaaccatcagagtggcattagaggtgacgcaaaggggcaagtggccttgttgtcccggaccaacgccaacgtgtttgatgaggccgtacgggtgacggaaggggaattcccttcaaggatacatttgattgggccagaggaagaacggaggaaacgtgagtacccacctggccttggtgcattggaaggacgcacccaagtgacagggacgagaaagaagcaggcccagtctgagtcagggacccgtttccctccagagaagggcgagctagtgttgctgtcttcccatgacgagggggaaaacctcgtcattaaagacaaatttatcagaagatgggtgcacaaagaaggctttagtggcttcaagaggtatgtgaccgctgccgaggacaaggagcttgaagccaagatcgcagttgttgaaaagtataacatcaggattccagagctggtgcaaaggatagaaaaatgccatatagaagatttggactttgcagagtacattctgggcactgtgcacaaagccaaaggcctggagtttgacactgtgcatgttttggatgattttgtgaaagtgccttgtgcccggcataacctgccccagcttccggccttgagaagtggagccattttctggaggatgaatgggaatttactgtatgttgcagtaactcgagccaagaagcgtctcatcatggaccaaatcattggaaaacattttgactttggctggggagtacttcttgcaagcagagctgacaagcaacgtcttaaaaacaggcgtggtgcgctggctgcgttgggacagtgcaacaatgccatccctgttgacaccgtccttaccatgaagaagcttgcccatcacctattaggcaacagggaagggaaaacaaggggggctacctctgccactcctgtgcggagcagcgcatcgggcccctggcgttcctgacagcctccccggagcaggtgcgcgccatggagcgcactgtggagaacatcgtactgccccggcatgaggccctgctcttcctcgtcttctgaggacaaggcgcacgttctccgcagtgcagagcagcttgccgaggaccccgcgtgaagaaagccagcgaggggggcttctgctccctgagactctgggttcacccacagcactttctgaggaagaggacaccagcccaagctggacctgccatttctccactccctacagacagccagtctccacttgcctcccctctggatgtatctggtcagggaagtgggggatgttcttttgataaa

SEQ ID NO: 150202 - DNA, 614 bp, Homo sapiens
gcacataccatggggacagtgacctgcaactggagaggatcaacgtgtactacaacgaggccacaggaggaaattatgtccccagagcggtgctggtggacctggaacccggcaccatggactctgtccgttctggccccttcggtcagatctttcggccggacaacttcgtgtttgggagggaggctatgtgtatcttttcaacatggtccgctctccccctgctggtgcaggctctatttgggcctcccaccacaacttcgcggtttaccatttttaaccaaagctccgcaaaacggggaccaccggtgtaccccaccggtccaataggtgtccgcactcaaaaaaaaagtttcgcctgttggtcaagggattttgccgatttcggaaccaccatcaaacaggattttcgcctgctggggcaaaccagcgtggaccgcttgctgcaactctctcagggccaggcggtgaagggcaatcagctgttgcccgtctcactggtgaaaagaaaaaccaccctggcgcccaatacgcaaaccgcctctccccgcgcgttggccgattcattaatgcagctggcacgacaggtttcccgactggaaagcgggcagtga

SEQ ID NO: 150203 - DNA, 1422 bp, Homo sapiens
tccgccgcatcttctttcctcgcctttcgtcgcagctccccgcgctcgtgccaccgccggcgcgttcaccctcagcgccagcgccatgcaggagatcgcgcacctgcaggccggccagtgcggcaaccagatcggggccaagttttgggaggttatcagtgacgaacatggcatcgaccccacaggcacataccatggggacagtgacctgcaactggagaggatcaacgtgtactacaacgaggccacaggagagaaattatgtccccagagcggtgctggtggacctggaacccggcaccatggactctgtccgttctggccccttcggtcagatctttcggccggacaacttcgtgtttggccaatccggagccggcaacaactgggcaaaggggcactacacggagggcgcagagctggtggacgctgtcctggacgtagtccggaaggaggccgagagctgcgactgccttcagggcttccagctgacccactcgctggggggtggcacggggtccggaatgggcacgctgctcatcagtaagatccgcgaggagttcccagaccgcatcatgaacaccttcagcgtggtgccctcggcccaaatgtcaggacacggtggtggagccctacaacgccacgctgtctgtgcaccagctggtggagaatacggatgagacctactgcatcgacaacgaggcactctacgacatctgtttccgcaccctcaagctgaccacccccacctacggggacctcaaccacctggtgtcggccaccatgagcggggtcaccacctgcctgcgcttcccgggccagctgaacgccgacctgcgcaagctggccgtcaacatggtcccctttcctcgcctgcacttcttcatgcccgcgttcgcacccctgaccagccggggcagccagcagtaccggggcctgacggtgcccgagctcacccagcagatgttcgatgccaagaacatgatggcggcgtgcgacccgcgccacggccgctacctgaccgtggccgccgtgttccggggccgcatgtccatgaaggaggtggacgagcagatgctgagcgtgcagagcaagaacagcagctacttcgtggagtggatccccaacaacgtgaagacggccgtgtgcgacatcccgccccgcggcctgaagatggccgtgaccttcatcggcaacagcacggccatccaggagctgttcaagcgcatctccgagcagttcacggccatgttccggcgcaaggccttcttgcactggtacacgggcgagggcatggacgagatggagttcaccgaggccgagagcaacatgaatgacctggtatctgagtaccagcagtaccaggacgccacggccgagcagggcgagttcgaggaggaggcggaggaggaggtggcctag

SEQ ID NO: 150204 - DNA, 400 bp, Homo sapiens
agctcatctactgaattttgacctgctccgccgcgacgtgttgtactacaagggccggctggacatggacggcctggaggtggtggacctgaaggacgggaaggacagagacctccatgtgagcatcaggaacgccttccggctgcaccgtggcgccacaggggacagccacctgctgtgcaccaggaagcccgagcagaagcagcgctggatcaaggcctttgccagggagagggagcaggtgcagctggaccaggagacaggcttctcatcactgaactgcagaggaagcaggccatgctgaatgccagcaagcactgatggccggccctgctacctgacgcgccagaagcacccagccctgcccagcaaccggacccagcatcaggactggtgctgg

SEQ ID NO: 150205 - DNA, 377 bp, Homo sapiens
ccacagggtccagcctcctgtggtgcaccagaaggcgcgagcaaaaccatcggtggctcaaggcctttccagggagaggaagcaggtgcagctggtccaggagacaggcttctccatcactgatctgcagaggaagcaggccatgttgaatgccagcaagcagcaggtcacagggaagcccaaaggccacccccctcttcaggctgctgcaggaggccaggcccaggccagagaccccaggcagcctgagctcttgaatgtggtcagctctccaggagcaagtcctgtgtggcaaaactgcctcctcacggcggctctgaagcagagccctgggacggaccccatgctgtccccgacagctggggtggcactctgcc

SEQ ID NO: 150206 - DNA, 383 bp, Homo sapiens
agctccatagaggcctggtagggagaagatctcgcggtcaggagctcagaactcatgtactcggggtagctgactcgagttacacagcctcaagccaaaagccagcagcgaatgttctttctctttgacctccagctcatctgctgtaagaaggacctgctccgccgcgacgtgttgtactacaagggccggctggacatggacggcctggaggtggtggacctggccttcctctgcctgcaagtgagcagggatgggctggggagttgcttgtgccaccaagacgtgccaggtctgtactcctgttgtctttttccctgctcctggtgccctgaagagaccagcaagggggcagaccccgcactcgccacacctgtattgcg

SEQ ID NO: 150207 - DNA, 2868 bp, Homo sapiens
atggcgagggccccgcagccccggcgcggccccgcggcgcccgggaacgccctgcgcgccctgctgcgctgcaacctgccccccggcgcccagcgcgtggtggtctccgccgtgctggcgctcctggttctcatcaacgtcgccttaaaatacgtggtgtcagtcttcccacgggcagagcctctgccccccttgcacgtgggccctctgaagcccccacccctgctgcacaaactgcgggtgttcacagctgcccccaccctgcacgtctggtgcagctgtgcctacgagcaccaaaaagggcctctgcccagaaacgcacccagcgcaatagcatcggagccttgcagcccccaggaattctggattgggaatgctaacagggagcagttggcagtcccagtgacaggatcagattctgtgctcatcagcgatggcagtgtggtctgcgctgaagcactctgggaccatgtcaccatggacgaccaggagctgggcttcaaagctggggacgtcatcgaagtgatggatgccaccaacagagagtggtggtggggccgggtcgccgatggcgagggctggtttccagccagcttcgttcggctgagggtgaatcaggacgagcccgcggatgacgacgcccctctggccgggaacagcggagcggaggacggcggggcggaggcgcagagcagcaaggaccagatgcggaccaacgtcatcaacgagatcctcagcactgagcgggactacatcaagcacctgcgcgacatctgcgagggctacgtccggcagtgccgcaagcgcgcagacatgttcagcgaggagcagctgcgtaccatcttcgggaacatcgaggacatctaccgctgccagaaggccttcgtgaaggccctggagcagaggttcaaccgcgagcgcccacacctgagcgagctgggtgcctgcttcctggagcatcaagccgacttccagatctactcggagtactgcaataaccaccccaacgcctgcgtggagctctcccggctcaccaagctcagcaagtacgtgtacttcttcgaggcctgccggctgctgcagaagatgattgacatctccctggatggcttcctgctgactccggtgcagaagatctgcaagtaccctctgcagctggccgagctgctcaaatacacgcacccccagcacagggacttcaaggatgttgaagccgccttgcatgccatgaagaacgtggcccagctcatcaacgagcggaagcggagacttgagaacatcgacaagattgctcagtggcagagctccatagaggactgggagggagaagatctcttggtcaggagctcagaactcatctactcgggggagctgactcgagttacacagcctcaagccaaaagccagcagcgaatgttctttctctttgaccaccagctcatctactgtaagaagccacctcccagcttcctctacgctgccggcttctgctcctctttcaaaacatggcccagtggcctcatgtccatgaagccctccttgtccacgggtgatctttcctacgtgtggatctcactgtctgctggggaggtggaggcatcaccagcagcccctcctatggctggggagaggaggtgggagcagccaggaaatggtcaggggagcggttcagcagccagggctgaggccagcatctggcaggacctgctccgccgcgacgtgttgtactacaagggccggctggacatggacggcctggaggtggtggacctggaggacgggaaggacagagacctccatgtgagcatcaagaacgccttccggctgcaccgtggcgccacaggggacagccacctgctgtgcaccaggaagcccgagcagaagcagcgctggctcaaggcctttgccagggagagggagcaggtgcagctggaccaggagacaggcttctccatcactgaactgcagaggaagcaggccatgctgaatgccagcaagcagcaggtcacagggaagcccaaagctgttggccggccctgctacctgacgcgccagaagcacccagccctgcccagcaaccggccccagcagcaggtcctggtgctggcggacgcaggcgcaacgatctaccttctggcacagcatcagccggctggcacccttccgcaagtgaactggtccctgcctgacagcacctgctgggccttcctgccagtggccccagtttttcttccccgaggcccactcggcctggccttcctctgcctgcaagtgagcagggatgggctggggagttgcttgtgccaccaagacgtgccagcggaaaaggacaagacggtgcagtcggctgcatactcccagtcgggagtgtggtcagtctgcctgctgctgtgcggtagctccagaaccacctcgttcctggttttgtttggattttggcatcttgtttttctaacaacaaacaatggagaaaaagaattgattcttagtgacacagaagattgccttacgctctatactcaagagtctgctgcccttcagaaagccagagggaacactcacaaatgcagaggtactagaggggagaaatacgtgctctgccttcccccaggccaaccacactctgctttagagaccctctcagaaagcaccagagaggaggaccagacgctgccacccacctcaagccacacccctgccacctgctgctgcgcccaatggaggtcctgtcctgtccgggcaacagccaaactggcgacaatggacacatccaacagtcagctgtcggataagagcggcaagttcatgggtcactggctcacactaaatgctcagccgccagcacagatccaaacaagacctccatga

SEQ ID NO: 150208 - DNA, 568 bp, Homo sapiens
ccacctcccagcttcctctacgctgccggcttctgctcctctttcaaaacatggcccagtggcctcatgtccatgaagccctccttgtccacgggtgatctttcctacgtgtggatctcactgtctgctggggaggtggaggcatcaccagcagcccctcctatggctggggagaggaggtgggagcagccaggaaatggtcaggggagcggttcagcagccagggctgaggccagcatctggcaggacctgctccgccgcgacgtgttgtactacaagggccggctggacatggacggcctggaggtggtggacctggaggacgggaaggacagagacctccatgtgagcatcaagaacgccttccggctgcaccgtggcgccacaggggacagccacctgctgtgcaccaggaagcccgagcagaagcagcgctggctcaaggcctttgccagggagagggagcaggtgcagctggaccaggagacaggcttctccatcactgaactgcagaggaagcaggccatgctgaatgccagcaagcagcaggtcacagggaagcccaaag

SEQ ID NO: 150209 - DNA, 3813 bp, Homo sapiens
gggaaggaggccagggtccgcgcggcttgggcacagtgccctggctcagggaccttcctgggagtgagaaccacatgccctgggaagaaccagcaggtgagaagcccagttgctctcacagtcagaaggcgttccacatggagcctgcccagaagccctgcttcaccactgacatggtgacatgggccctcctctgcatctctgcagagactgtgcgtggggaggctccttcacagcctaggggcatccctcaccgctcgcccgtcagtgtggatgacctgtggctggagaagacacagagaaagaagttgcagaagcaggcccacgtcgaaaggaggctgcacataggggcagtgcacaaagatggagtcaagtgctggagaaagacgatcattacctctccagagtctttgaatctccctagaagaagccatccactctcccagagtgctccaacgggactgaaccacatgggctggccagagcacacaccaggcactgccatgcctgatggagctctggacacagctgtctgcgctgacgaagtggggagcgaggaggacctgtatgatgacctgcacagctccagccaccactacagccaccctggagggggtggggagcagctggctatcaatgagctcatcagcgatggcagtgtggtctgcgctgaagcactctgggaccatgtcaccatggacgaccaggagctgggcttcaaagctggggacgtcatcgaagtgatggatgccaccaacagagagtggtggtggggccgggtcgccgatggcgagggctggtttccagccagcttcgttcggctgagggtgaatcaggacgagcccgcggatgacgacgcccctctggccgggaacagcggagcggaggacggcggggcggaggcgcagagcagcaaggaccagatgcggaccaacgtcatcaacgagatcctcagcactgagcgggactacatcaagcacctgcgcgacatctgcgagggctacgtccggcagtgccgcaagcgcgcagacatgttcagcgaggagcagctgcgtaccatcttcgggaacatcgaggacatctaccgctgccagaaggccttcgtgaaggccctggagcagaggttcaaccgcgagcgcccacacctgagcgagctgggtgcctgcttcctggagcatcaagccgacttccagatctactcggagtactgcaataaccaccccaacgcctgcgtggagctctcccggctcaccaagctcagcaagtacgtgtacttcttcgaggcctgccggctgctgcagaagatgattgacatctccctggatggcttcctgctgactccggtgcagaagatctgcaagtaccctctgcagctggccgagctgctcaaatacacgcacccccagcacagggacttcaaggatgttgaagccgccttgcatgccatgaagaacgtggcccagctcatcaacgagcggaagcggagacttgagaacatcgacaagattgctgcagtggcaggcgctccatagagagctgtcagggagaagatatcttgttcaggagctccgaactcgtgtagtggggggagctgtctcgagctacgcagcctcaagcctaaaggcagcatcgaatgctctttatctatggccgccagctcatgtgctgtatgaaggacctgctccgccgcgacgtgttgtactacaagggctggctggacatggacggcctgggaggtggtggacctgggaggacgggaaggacagagacctccatgttgagcatcaagaacgcctttccggcttgcaccgtgggcgccacagggggacagccacctgttgttgcaccagggaagcctgagcagaagcagcgctggctcaaggcctttgtcagggagagggagcaggtgcagctggaccagggagacaggcttctccatcactgaacttgcagaggaagcaggccatgctgaatgccagcaagcagcaggtcacagggaagcccaaaggtaggcggacagcagccccacctcctcggctgcccggtccttaccctgctgacatcattcccttctctgaaccacaaagccaagccagctagccaccaggcctgaggggggcccactgccctttgcagctgtttgttcccaaaggttggtaataaggggccactggggaagcctgggtcagtatatggttgacattcttactctcaacaccttggctcccccagatcagggccattggtgacaatgcttgtttccccagggttccttcctgacaggcatctggggttggtgtagggatggagctgctttccccatttctacagagagccatgcccctgaaacatcacatgcctttgcacaggccacccccctcttcaggctgctgcaggaggccaggcccaggccagagaccccaggcagcctgagctcttggatgtggtcagctctccaggagcaagtcctgtgtggcaaaactgcctcctacggcggctctgaagcagagccctgggacggaccccatgctgtccccaacagctggggtggcactctgccctgggcacccatgaccctctgctgtctctccctgttcagctgttggccggccctgctacctgacgcgccagaagcacccagccctgcccagcaaccggccccagcagcaggtcctggtgctggcggagcccaggcgcaagccatctaccttctggcacagcatcagccggctggcacccttccgcaagtgaactggtccctgcctgacagcacctgctgggccttcctgccagtggcccccagtttttcttccccgaggcccactcggcctggccttcctctgcctgcaagtgagcagggatgggctggggagttgcttgtgccaccaagacgtgccaggtctgtactcctgttgtctttttccctgctcctggtgccctgaagagaccagcaagggggcagaccccgcactcgccacaccgccgctgcagcttgggccccatccgccctctggacctgtgtagggcctcactgctggagcggggaaaccgcagctcagcccaggcccagctggggagaaggcgctacctgcgtgggaccctcttctctggaaacctaatcctcctttcatttcctctgggcaggactctctggccttctgtggcctgcaatgccaggccatgtgcccctctgccctctagttctccaagtccccagcccggccagtggtgccaggcagcttgccacttgggagggcagaagccaggaattccacacccttgtgttgcgcccggagcccgcccttcgcctcccagcccctcaagacaccgctggctgctggacaccctcttcacttgtgtgtgcgtgtgtagcggaaaaggacaagacggtgcagtcggctgcatactcccagtcgggagtgtggtcagtctgcctgctgctgtgcggtagctccagaaccacctcgttcctggttttgtttggattttggcatcttgtttttctaacaacaaacaatggagaaaaagaattgattcttagtgacacagaagattgccttacgctcgtgagcgtgagaagccataagagagagaccgaattctgtggctcagcacacaggactgacccacagcccaggcagcgggtgtgtggagatggcgccctgtcctgccaaggggcgccaggagcagagccagggcctggcgagctggcgtggagcccacaggattcagcagcatggacagtcactcttgcactattccttctccaagccagaaaccacatttaatttcataaataaatttatgaaaagt

SEQ ID NO: 150210 - DNA, 384 bp, Homo sapiens
cccacgcgttcggaagattttagtgaaactagaattgattcatgctcgcaggtttgccagcgaggagagaaacagccaggacagacggctctggcagggaagaaagaaattgaggtcactgcaacccagagcactccatcgttcctgtttgaaaagcccccacgtgatggaatagccaggccagaagaaggaaggcctgtggtgagtgggacaggaaatgacatcaccaccccaccgaacaaggagctcccaccaagcccagagaagaaaacaaagcccattgcagatgcaaaggctcctgagaagcgggcctcaccatccaagccagcttctgccccagcctccagatctgggtccaagagcactcagactgttgcaaaaacc

SEQ ID NO: 150211 - DNA, 700 bp, Homo sapiens
aaggggggggggtctcaagtaggaggcctccccatcacccccaccccagccccccaccacccccggcctaagcagctaccatggcccaggtggccggcgcggcgttgtcccaggcgggttggtatctttcagatgaaggcattgaagcttgcacaagctctccagacaaagtcaatgtaaatgacatcatcctgattgctctcaatatctgagaacaattggcaagaaattcctccccagtgacatcaatagtggaaaggtagaaaaagctcgaaggtccatgtgttttgcaaattcaaaaaattcgcaatgttgctggcaccaaaggataatgaagaatctcaggctggcaccaaggatgctgcgattacagatgactgatggtcatataagttgcacagcagtagaatttagttatatgtcaaaaataagcctgaacacaccacctggaactaaagttaagctctcaggcattgttgacataaaaaatggattcctgctcttgaatgactctaacaccacagttcttggtggtgaagtggaacaccttattgagaaatgggagttacagagaagcttatcaaaacacaatagaagcaatattggaactgaaggtggaccaccgccttttgtgccttttggacagaagtgtgtatctcatgtccaagtggatagcatagaacttgatcgaagaataaca

SEQ ID NO: 150212 - DNA, 414 bp, Homo sapiens
caagtcctggaggccgtggcctatttgcactcactcaagatcgtgcacaggaatctcaagctggagaacctgggttactacaaccggctgaagaactcgaagattgtcatcagtgacttccatctggctaagctagaaaatggcctcatcaaggagccctgtgggacccccgagtatctggccccagaggtggtaggccggcagcggtatggacgccctgtggactgctgggccattggagtcatcatgtacatcctgctttcaggcaatccacctttctatgaggaggtggaagaagatgattatgagaaccatgataagaatctcttccgcaagatcctggctggtgactatgagtttgactctccatattgggatgatatttcgcaggcagccaaagacctggtcacaagg

SEQ ID NO: 150213 - DNA, 385 bp, Homo sapiens
  misc_feature (1)...(385): n = a,t,c or g
ttggcctgtggaatggctcatgtttgtgcgtgtgtgtgtgtatatttatgggcatgggtgcatgcttggtgtgtatttgtacatgtctgtattgctgtgtccctgtaaatacatgcttgtgtatggatggaaganacnnnnnnnnnnnnnnnnnnnnnnnnnnnnnnnnnnnnnnnnnnnnnnnnnnnnnnnnnnnnnnnnnnnnnnnnnnnnnnnnnnnnnnnnnnnnnnnnnnnnnnnnnnnnnnnnnnnnnnnnnnnnnnnnnnnnnnnnnnnnnnnnnnnnnnnnnnnnnnnnnnnnnnnnnnnnnnnnnnnnnnnnnnnnnnnnntaaaaaaactaaattagcgcatccgttttaaaaataccctagtgggcccctaccg

SEQ ID NO: 150214 - DNA, 450 bp, Homo sapiens
aataatcctgattttaaggctggtgtgatgctttgcctaccctgctcagattcagcgtcatgatgattacctggtaatgcttaaggcaattcggattttggttcaggagcgcctgacacaggatgcagttgctaaggcaaatcaaacaaaagagggcttacctgttgctttagacaaacatattcttggttttgacacaggagatgcagttcttaatgaagctgctcaaattctgcgattgctgcacatagaggagctcagagagctacagacaaaaatcaacgaagccatagtagctgttcaggcaattatacacttctggcatgtttggaaatcaaaatgtcacattctcgggggaggaagcccagaaaattgggtatgttctagagatttaccaccattgcttattgcttttttctttaataaagtttaggaaagtagaatttttaa

SEQ ID NO: 150215 - DNA, 462 bp, Homo sapiens
tatctcagagatgttgactgtcctttcaagattcaagatcgacaagaagctattcactggcttcttggtttagctgttagacttgaatatggagataatgtaaataatcctgattttaaggctggtgtgatggctttggctaacctgcttcagattcagcgtcatgatgattacctggtaatgcttaaggcaattcggattttggttcaggagcgcctgacacaggatgcagttgctaaggcaaatcaaacaaaagagggcttacctgttgctttagacaaacatattcttggttttgacacaggagatgcagttcttaatgaagctgctcaaattctgcgattgctgcacatagaggagctcagagagctacagacaaaaatcaacgaagccatagtagctgttcaggcaattattgctgatccaaagacagaccacagactgggaaaagttggaagatga

SEQ ID NO: 150216 - DNA, 375 bp, Homo sapiens; identical to SEQ ID NO: 145308

SEQ ID NO: 150217 - DNA, 545 bp, Homo sapiens
cccattgtaaagctgaaaaattgtagttggaaccactgtaagttcagattttcctcatcttgcactagggttacatccctctgaactcattgtaaggtcaaaaaattacaagtctatccatcctaagttggggaccgtctcatacagtaataggaaaaccattttatcttcccaatttatttaattgttgatagtctacagggctttcttttttctcttgtgagtagcagttttaaaaactaagagatttgttgctaccgaaaagttaaaaatgtttttgtatgttcacaaatatgtttgtaattatacgtttgcagggttgtaagtttttgtttgtttttaatcttttatagtaaataatcctgattttaaggctggtgtgatggctttggctaacctgcttcagattcagcgtcatgatgattacctggtaatgcttaaggtcagcttcatgttcttgattcttgacagaaactgtgcacatagaaaaatgtctttattttctaaatattaactattgatattaaaattatggttgaatgact

SEQ ID NO: 150218 - DNA, 399 bp, Homo sapiens
cgcatatagaagagctcagagagctcaagcaaaaaattaatgaagccatagtagctgttcagacaattattactgatccaaggacagaccacagactgggaaaagttggaagatgaacactttaggacttcagcttctcacctatttagtacaactgggaaccatgtccacttctggcatgtttgaaaatcaaacgtcacattttgcggggaggaatcccagaaaagtgactatgttctagtgcttttttctttaataaagtttaggaaagtaggggaaaaaaaagagcagagctgctgcaggccagggccaccttcactcgggatacctctgtggttaccagatgtcaatcatggacaatgtgagagagaagagaagagcaatactgaaaaagtttcc

SEQ ID NO: 150219 - DNA, 1164 bp, Homo sapiens
ggcacgaggttttttcccggccgaggcccggggaaccaaaccgagaagcggggaccatgttccgacgcaggttgacggttctcgactaccacaaccccgccggcttcaactgcaaagatgaaacagaatttagaaacttcatcgtttggcttgaagaccagaaaatcaggcactacaagattgaagacagaggtgaatttaagaaacatccacagcagcgactggcccaaggttctttgaaaagtatttcaagagatgttaactgtcctttcaagattcaagatcgacaagaaagctattgactggcttcttggttttgccgttagacctgaatatgggagataatgctgaaaaataccaaggatttagtaccctgataattcaaaaaactgctgacaatgcacctaaaaatgcagaaccatggatcaattttggatgtaaataatcctgattttaagggctggtgtgatggctttgggctaacctgctttcagatttcagcgtcatgatgattctcctggtaaatgcttaaaggcaattccggatttgggtccaggagccgcctgaccccaggatgccagttgctaaggccaaatcaaacaaaaagagggctttacctgttgctttagcacaaacccatattcttggttttgacgacaggagatgcaagttctttaatgaagctgctcgaaattctgcggattgcttgcacatatgaggagctcagagagcttacagaccaaaaatcaacgaaagccatagtagctgttcaggcaatttattgctgatcccaaagacaggaccacagactgggaaaaagtttggaagatgaacactttgaggaccttcagctttctcccctactttaggtacatgttggggaaccatacacttctggcatgttttgggaaatcaaaatgtcacaattctcggggggaaggaagcccagaaaaattggggtatggttctagaggattttaccaccattggcttattgcttcctgcttttttctttaataaagtttaggaaagtaaaataaaataaaaaagggggggccgttttaaaggagcaagctttaggtccgggtgctggggaggattaatgttttttataggggccccaaaattaatttcctggcccggtgtttaaaagtgggggatggg

SEQ ID NO: 150220 - DNA, 403 bp, Homo sapiens
  misc_feature (1)...(403): n = a,t,c or g
ctccacagtgccatgggaaaggcactattatcacccccgtttgaaagatgggggagtcgaaacacaaggagctgnnnnnnnnnnnnnnnnnnnnnnnnnnnnnnnnnnnnnnnnnnnnnnnnnnnnnnnnnnnnnnnnnnttccccttgccatcacctgggaggcctgggggtcccagggtagctaggagggttacggggtggctgggagggttacgcccacctgatcagcgaggtagacttctcctgggtggcgctgtgggctgcctggggccaggtggagcctcttcgcctttgaaccaccccctgcctgcagttctggatgtctgcactggccaccaccatcccagttccctgtggggccttcatgcctgtctttgtcattgtgccccctgccctccccg

SEQ ID NO: 150221 - DNA, 611 bp, Homo sapiens
cccacgcgtccgatcacctgtttgagtctaaatccaaggaactgtctgtctcaaagaaaactgctgcagatggaaaaaggcaagagatcattgttctggattccaagaggagtaatgccatcaatattggtctgacggtgctgccccctccaaggacgattaagatcgccattttgaattttgatgagtatgccttaaacaaagaaggaatcgagaaaattctaacgatgattcccaccgatgaggagaagcagaaaatccaggaagctcagctggccaaccctgaaatccccctgggcagtgcagagcagttcctcctcaccctgtcctccatcagcgagctctctgcacgacttcacctctgggcattcaaaatggattatgaaactacagaaaaggaagtagcagaaccactcctggacctgaaggaaggaatagaccagttggagaacaataaaaccttgggctttatcctgtctactctcttagccattgggaactttctaaatggaactaatgttgactttgatcaacttcaggataatttatgtcagatggagagaagatgcacagcttcatgggatcacctcaaggcaattgcaaaacatgaa

SEQ ID NO: 150222 - DNA, 340 bp, Homo sapiens
cgcaaatttatttgcccagggagaacaagggaaaggcggcgtaatacagggtggaacgccaatgtagggcggtaaaaatgactagtacccgcctaggatcgcatccgataatgttgtagctgtggatttgtaatgatacggtgcttgtgcaattttaacgttgtagaagacatgttcttagtctccaataagcaatacgggcacaaatgagaccaaaggaactgaaaaaggaagctaagaacaacaaagccttactggactcccttaatgaagtgcgcagtgctttgctggaactggtaccatggagggcaagggcggccccgctcgccccacgcgtccg

SEQ ID NO: 150223 - DNA, 433 bp, Homo sapiens
  misc_feature (1)...(433): n = a,t,c or g
nnnnnnnnnnnnnnnnnnnnnnnnnnnnnnnnnnnnnnnnnnnnnnnnnnnnnnnnnnnnnnnnnnnnnnnnnnnnnnnnnnnnnnnnnnnnnnnnnnnnnnnnnnnnnnnnnnnnnnnnnnnnnnnnnnnnnnnnnnnnnnnnnnnnnnnnnnnnnnnnnnnnnnnnnnnnnttcttaaatttaaatggaaaaaacataccaaaacctatgggatacagcaaaagcagtgctaagagggaagtttagagcaataaacacctacatcaaaaaaagtagaaagatttcaaataacctaatgatggaccttaaggaactagaaaggcaaggacaaaccaaacccaaaattagtagaaggaagnnnnnnnnnnnnnnnnnnnnnnnnnnnnnnnnnnnnnnnnntaagaaataaaataaaagaaatgaaaagttgg

SEQ ID NO: 150224 - DNA, 385 bp, Homo sapiens
  misc_feature (1)...(385): n = a,t,c or g
nnnnnnnnnnnnnnnnnnnnnnnnnnnnnnnnnnnnnnnnnnnnnnnnnnnnnnnnnnnnnnnnnnnnnnnnnnnnnnnnnnnnnnnnnnnnnnnnnnnnnnnnnnnnnnnnnnnnnnnnnnnnnnnnnnnnnnnnnnnnnnnnnnnnnnnnnnnnnnnnnnnnnnnnnnnnnttcttaaatttaaatggaaaaaacataccaaaacctatgggatacagcaaaagcagtgctaagagggaagtttagagcaataaacacctacatcaaaaaaagtagaaagatttcaaataacctaatgatggaccttaaggaactagaaaggcaaggacaaaccaaacccaaaattagtagaaggaaggaaataatgaagatcagagcacaag

SEQ ID NO: 150225 - DNA, 340 bp, Homo sapiens
accgtgcttctgtgtgcgccatgatgtagatgccctactctggcagccacactccagcaaacaggatgatatgtgggagcacatcggaactatcaatgctttaggctatgtccaagcatttaagagagacataaaattgttagcctgtgctccaaattactcggatgcagccctttgtgagggccttcgtcgagtattcatctatcgtcagcctgctcccatgtccactgtactttacaacagaaaggaaggcaggcaagtaggacaggttgctaagcagcaagtagcaagcctagaaaccaatgatcctattttaggatttcaggctacaaatgagagg

SEQ ID NO: 150226 - DNA, 1054 bp, Homo sapiens
gaaaagtatatccagttagtgaggcagagggccctggagggagccctaggaaacaccattatctacaagtcccagacagcaaaaggtactccacaagaaacagaaggaacttccagtggtagcaaaagcaatgtgaggagtgggaagagagttccaagtggcaggatggtcaacattcgcattttccagcagaagtcacgtaagaatagacaagagtccattggatttggcaatcctgatgtcagggtgaatcttggaagcaaccagtaccttttctctgtcatagtggatcctaaagaaatgccctgcttctgtttgcgccatgatgttgatgccctactctggcaaccacactccagcaaacaagatgatatgtgggagcacatcgcaactttcaatgctttaggctatgtccaagcatcaaagagagacaaaaaattttttgcctgtgctccaaattactcgtatgcagccctttgtgagtgccttcgtcgagtattcatctatcgtcagcctgctcccatgtccactgtactttacaacaagaaaggaaggcaggcaagtaggacaggttgctaagcagcaagtagcaagcctagaaaccaatgatcctaatttaggaattcaggccaccaaatgagagattatttgttcttactaccaaaaacctctttttaataaaagtaaatacagagaattaattattctaacatattggcctctttgtactggaaaagtattcagtggtacctggaggtctggacagttatactgtaacctcttaagttttaatgtgctaaatatatcttggatgatttttttattttttaataacattggaaataaatttcagaagataatgatcttgtaaagctgtggaatgaagctgcagatttagagaacattggcttctgaaaaaaaaaaagagtgaagatagtactagcaagtatacttattttttaaaacaggctagaatctcatgttttatgtgaaagatgtacaattcagtgtttaaaaataaaaatataatattgtgtaaaaaaaaaaaaaaaaa

SEQ ID NO: 150227 - DNA, 357 bp, Homo sapiens
  misc_feature (1)...(357): n = a,t,c or g
accaggcgggccagcccagccagaagccaggagcctcggaaaacatcctgggatggcacgggtccaagtcacattccacagagcagctgaaaaatgggacacttggctctttgccatcagccagtgccaacataacctgggcaattttaccaaactctgctgaagacgaacaaacctcacagccagagccagagccaaactcaggctctgaattggttttgtctgaagatgaaaaaagtgacaatgaagataaggaagagacggaattgggcgtcatggaggatcagcgtagtataattcttcatctcatttcacaactcaaacttggaatggatttgaccaaggtggtgcttcccn

SEQ ID NO: 150228 - DNA, 1929 bp, Homo sapiens
atgcctgaaggcctgactccagatttagtacaggaagcatgtgaaagtgaattgaatgaagttactggtacaaagattgcttatgaaacaaaaatggacttggttcaaacatcagaagttatgcaagagtcactctatcctgcagcacagctttgcccatcatttgaagagtcagaagctactccttcaccagttttgcctgacattgttatggaagcaccattgaattctgcagttcctagtgctggtgcttccgtgatacagcccagctcatcaccattagaagcttcttcagttaattatgaaagcataaaacatgagcctgaaaaccccccaccatatgaagaggccatgagtgtatcactaaaaaaagtatcaggaataaaggaagaaattaaagagcctgaaaatattaatgcagctcttcaagaaacagaagctccttatatatctattgcatgtgatttaattaaagaaacaaagctttctgctgaaccagctccggatttctctgattattcagaaatggcaaaagttgaacagccagtgcctgatcattctgagctagttgaagattcctcacctgattctgaaccagttgacttatttagtgatgattcaatacctgacgttccacaaaaacaagatgaaactgtgatgcttgtgaaagaaagtctcactgagacttcatttgagtcaatgatagaatatgaaaataaggaaaaactcagtgctttgccacctgagggaggaaagccatatttggaatcttttaagctcagtttagataacacaaaagataccctgttacctgatgaagtttcaacattgagcaaaaaggagaaaattcctttgcagatggaggagctcagtactgcagtttattcaaatgatgacttatttatttctaaggaagcacagataagagaaactgaaacgttttcagattcatctccaattgaaattatagatgagttccctacattgatcagttctaaaactgattcattttctaaattagccagggaatatactgacctagaagtatcccacaaaagtgaaattgctaatgccccggatggagctgggtcattgccttgcacagaattgccccatgacctttctttgaagaacatacaacccaaagttgaagagaaaatcagtttctcagatgacttttctaaaaatgggtctgctacatcaaaggtgctcttattgcctccagatgtttctgctttggccactcaagcagagatagagagcatagttaaacccaaagttcttgtgaaagaagctgagaaaaaacttccttccgatacagaaaaagaggacagatcaccatctgctatattttcagcagagctgagtaaaacttcagttgttgacctcctgtactggagagacattaagaagactggagtggtgtttggtgccagcctattcctgctgctttcattgacagtattcagcattgtgagcgtaacagcctacattgccttggccctgctctctgtgaccatcagctttaggatatacaagggtgtgatccaagctatccagaaatcagatgaaggccacccattcagggaagttgctatatctgaggagttggttcagaagtacagtaattctgctcttggtcatgtgaactgcacgataaaggaactcaggcgcctcttcttagttgatgatttagttgattctctgaagtttgcagtgttgatgtgggtatttacctatgttggtgccttgtttaatggtctgacactactgattttggctctcatttcactcttcagtgttcctgttatttatgaacggcatcaggcacagatagatcattatctaggacttgcaaataagaatgttaaagatgctatggctaaaatccaagcaaaaatccctggattgaagcgcaaagctgaatga

SEQ ID NO: 150229 - DNA, 362 bp, Homo sapiens
ctgcagacttcggatgaggaaacgggtttttcatgtctttttgagtacgtttgtgcagctacatcttttgtgttggtatgcataattaataattggagctgcaaagcagattgagacacgagatggacgttcagaataaaaattggaaggacaaggtcgttgacctcctgtactggagagacattaacatcactggagtggtgtttggtgccaccctattcctgctgctttcattgacagtattcagcattgtgagcgtaacagcctacattgccttggccctgctctctgtgaccataagctttacgatatacaagggtgtgagccatgctatccctaaatcagatgaaggccaccctttc

SEQ ID NO: 150230 - DNA, 533 bp, Homo sapiens
ttgggactggctccatttcggacaggccagccagagacagctggctggagctcagggactgcccattttctagggagtcctcttcattggatatagagagttccccatctttatcatagatttccttcaggactcctcgctttatcagctcttctctgctttgcctcatagatattttcctttccagggctgctgacgtgtgtgtgaacttttcgcttttcttcttcctccatttccaaggcttgaaaatccttcccaggttggcaaacttacttctcctgcggatgggtggggtgtgggtgcctgggacgagggagtcagaacgcatcgccgccagcctctccacttcctcagctgcccccaggttaaaggagatcctggcctctgcgaggtacggcgtgtcgctcttggagcgcactctccggatgggccgccggtctatatcatcctccgaggatgccgccattaatgtgggaggcaggagcagggtcgcccggcgagctgagagggacaaggatacggagggagaggga

SEQ ID NO: 150231 - DNA, 667 bp, Homo sapiens
tttcgtggaaaattagaagctgttcatttgtgcttgcgggctcaaaagcgtcgcactgctttgttttgtactctaccgtgtcctgttgaaaggggtcaacaagtgccggggagggtgcagaggctgaggctggcgtcaccttccgttgctaaggtgttccagtgttttctctcaaaactctgtgtttggaacatcaaggatggattatcccaaaatggattattttctggatgtagagtctgctcacagactcttggatgttgagtcagctcaaagattcttctacagtcaaggagctcaagctcgccgggcgaccctgctcctgcctcccacattaatggcggcatcctcggaggatgatatagaccggcggcccatccggagagtgcgctccaagagcgacacgccgtaccttgcagaggccaggttctcctttaacctgggggcagttgttgacctcctgtactggagagacattaagaagactggagtggtgtttggtgccagcctattcctgctgctttcattgacagtattcagcattgtgagcgtaacagcctacattgccttggccctgctctctgtgaccatcagctttaggatatacaagggtgtgatccaagctatccagaaatcagatgaaggccacccattcagggcatatctg

SEQ ID NO: 150232 - DNA, 4101 bp, Homo sapiens
caccacagtaggtccctcggctcagtcggcccagcccctctcagtcctccccaacccccacaaccgcccgcggctctgagacgcggccccggcggcggcggcagcagctgcagcatcatctccaccctccagccatggaagacctggaccagtctcctctggtctcgtcctcggacagcccaccccggccgcagcccgcgttcaagtaccagttcgtgagggagcccgaggacgaggaggaagaagaggaggaggaagaggaggacgaggacgaagacctggaggagctggaggtgctggagaggaagcccgccgccgggctgtccgcggccccagtgcccaccgcccctgccgccggcgcgcccctgatggacttcggaaatgacttcgtgccgccggcgccccggggacccctgccggccgctccccccgtcgccccggagcggcagccgtcttgggacccgagcccggtgtcgtcgaccgtgcccgcgccatccccgctgtctgctgccgcagtctcgccctccaagctccctgaggacgacgagcctccggcccggcctccccctcctcccccggccagcgtgagcccccaggcagagcccgtgtggaccccgccagccccggctcccgccgcgcccccctccaccccggccgcgcccaagcgcaggggctcctcgggctcagtggatgagaccctttttgctcttcctgctgcatctgagcctgtgatacgctcctctgcagaaaatatggacttgaaggagcagccaggtaacactatttcggctggtcaagaggatttcccatctgtcctgcttgaaactgctgcttctcttccttctctgtctcctctctcagccgcttctttcaaagaacatgaataccttggtaatttgtcaacagtattacccactgaaggaacacttcaagaaaatgtcagtgaagcttctaaagaggtctcagagaaggcaaaaactctactcatagatagagatttaacagagttttcagaattagaatactcagaaatgggatcatcgttcagtgtctctccaaaagcagaatctgccgtaatagtagcaaatcctagggaagaaataatcgtgaaaaataaagatgaagaagagaagttagttagtaataacatccttcataatcaacaagagttacctacagctcttactaaattggttaaagaggatgaagttgtgtcttcagaaaaagcaaaagacagttttaatgaaaagagagttgcagtggaagctcctatgagggaggaatatgcagacttcaaaccatttgagcgagtatgggaagtgaaagatagtaaggaagatagtgatatgttggctgctggaggtaaaatcgagagcaacttggaaagtaaagtggataaaaaatgttttgcagatagccttgagcaaactaatcacgaaaaagatagtgagagtagtaatgatgatacttctttccccagtacgccagaaggtataaaggatcgttcaggagcatatatcacatgtgctccctttaacccagcagcaactgagagcattgcaacaaacatttttcctttgttaggagatcctacttcagaaaataagaccgatgaaaaaaaaatagaagaaaagaaggcccaaatagtaacagagaagaatactagcaccaaaacatcaaacccttttcttgtagcagcacaggattctgagacagattatgtcacaacagataatttaacaaaggtgactgaggaagtcgtggcaaacatgcctgaaggcctgactccagatttagtacaggaagcatgtgaaagtgaattgaatgaagttactggtacaaagattgcttatgaaacaaaaatggacttggttcaaacatcagaagttatgcaagagtcactctatcctgcagcacagctttgcccatcatttgaagagtcagaagctactccttcaccagttttgcctgacattgttatggaagcaccattgaattctgcagttcctagtgctggtgcttccgtgatacagcccagctcatcaccattagaagcttcttcagttaattatgaaagcataaaacatgagcctgaaaaccccccaccatatgaagaggccatgagtgtatcactaaaaaaagtatcaggaataaaggaagaaattaaagagcctgaaaatattaatgcagctcttcaagaaacagaagctccttatatatctattgcatgtgatttaattaaagaaacaaagctttctgctgaaccagctccggatttctctgattattcagaaatggcaaaagttgaacagccagtgcctgatcattctgagctagttgaagattcctcacctgattctgaaccagttgacttatttagtgatgattcaatacctgacgttccacaaaaacaagatgaaactgtgatgcttgtgaaagaaagtctcactgagacttcatttgagtcaatgatagaatatgaaaataaggaaaaactcagtgctttgccacctgagggaggaaagccatatttggaatcttttaagctcagtttagataacacaaaagataccctgttacctgatgaagtttcaacattgagcaaaaaggagaaaattcctttgcagatggaggagctcagtactgcagtttattcaaatgatgacttatttatttctaaggaagcacagataagagaaactgaaacgttttcagattcatctccaattgaaattatagatgagttccctacattgatcagttctaaaactgattcattttctaaattagccagggaatatactgacctagaagtatcccacaaaagtgaaattgctaatgccccggatggagctgggtcattgccttgcacagaattgccccatgacctttctttgaagaacatacaacccaaagttgaagagaaaatcagtttctcagatgacttttctaaaaatgggtctgctacatcaaaggtgctcttattgcctccagatgtttctgctttggccactcaagcagagatagagagcatagttaaacccaaagttcttgtgaaagaagctgagaaaaaacttccttccgatacagaaaaagaggacagatcaccatctgctatattttcagcagagctgagtaaaacttcagttgttgacctcctgtacctggagagacattaagaagacttggagtggtgtttggtgcccagccgtattcctgctgctttcattcgacagtattccagcattgtgagcgtaacagcctacattgccttggccctgctctctgtgacccatcagctttacggatatacaagggtgtgatccaagctatccagaaatcaagatgaaggccacccattcagggcaatatctgggaatctggaagttgcttatatctgagggagttgggttcaggaaggtacagtaattctggctcttgggtccatgtggaactgcacggttaaagggaacttcagggcgccttctttctttagttggatggatttagttgattctctggaagttttgcagtgttgatgtgggtatttacctatgttgggtgccttggtttaatggttctggacactactggattttgggctctcaatttcactcctcaagtggttcctggttaatttatgaacggcatcaggcacaagatagatcattaatctaggacttgcaaataagaatgttaaagatgctatggctaaaatccaagcaaaaatccctgggattgaagcgcaaagctgaatgaaaacgccccaaaataattagtaaggagttcatccttaaaggggatattcatttgattatacgggggagggtcagggaagaacgaaccttgacgttgcagtgcagtttcacagatcgttgttagatctttatttttagccatgcactgttgtgaggaaaaattacctgtcttgactgccatgtgttcatcatcttaagtattgtaagctgctatgtatggatttaaaccgtaatcatatctttttcctatctgaggcactggtggaataaaaaacctgtatattttactttgttgcagatagtcttgccgcatcttggcaagttgcagagatggtggagctag

SEQ ID NO: 150233 - DNA, 698 bp, Homo sapiens
ccgacggcagtttgaggagcgacagcaggagatggagcatgtttatgagctcttggagaataagatgcagcttctgcaggaggaatccaggctagcaaagaatgaagctgcgcggatggcagctctggtggaagcagagaaggagtgtaacctggagctctcagagaaactgaagggagtcaccaaaaactgggaagatgtaccaggagaccaggtcaagcccgaccaaatacactgaggccctggcccagagggacaagtaggtgccttcggtgctctttttgtcgcttgtcttttgcccattctcaaggcatacagcagctgtcctgttccctttcaaggactgacagtaggagcttcactatttctaagactttatgggcccacaaccgaagacattcttttcagggttgaattttcagtggtatccattatgaaaactcacttcatggattcagtgggcaaatagcggcaagcaagagacatggattcacttattcggcaaacatttactgggcatgccacatgccagataccgggctaagtatctggcatgtgttacagaaacaaaagacctaaatcttgtcaccaagaaacatgttacatgattttaataagttccctgatagaagagcatggggtgctctggggaaatattggagggtcatccattccacattaaaagagcaagttgtcaa

SEQ ID NO: 150234 - DNA, 895 bp, Homo sapiens
aagctgagctccgacgccagtttgaggagcgacagcaggagacggagcatgtttatgagctcttggagaataagatgcggcttctgcaggaggaatccaggctagcaaagaatgaagctgcgcggatggcagctctggtggaagcagagaaggagtgtaacctggagctctcagagaaactgaagggagtcaccacaaactgggaagatgtaccaggagaccaggtcaagcccgaccaatacactgaggccctggcccacagggacaatccttcaactgacagcttaaagaacttcacgctgttctgactcttgagcctcctctacaacttcggagaggactttccattttattttggatccaaatgctccacaactagttgaaactgggaatttaaattttatatgaagttccctagatgatttaaagctgtaagaagaagaataatgaatcataagaaaacttgctgctacagatatcaaaaaggaatgttaccatccctcatgctaatccttttcattttaaatcaacaggatctaaaaaaaataatgctgggaagtcctaaccacatcaagaatgcctcagatcagtgacccaaggaaccttccagaatggatgaaatagacccaaagctgaattcacctaattttagggccaaaaacccaaaaaacaaaacaagaccaaaaaaatcttcagatactgggagaacaaatctcaattgctcaattgtatcttatgaaaacaatttttcaaaataaaacaagagatatttaagattcattaagttcttgtcatttcaaattttaagaaaaatattttctaatggaattacatatatttatatgattcttctagttatatccatggtaataaatactcttttcagttggaaata

SEQ ID NO: 150235 - DNA, 1237 bp, Homo sapiens
  misc_feature (1)...(1237): n = a,t,c or g
cgggtcgcacggctagccgcaggttcggccacgtcaaatccattttctaaaaaagcagggagcagagctctctcttcgccgccgacgcagaaaggagctggggaggaaaaagctgctgccttttgcgctggagattcgtgggcaaggcttctcattttcccaggctgcttcccctcccgggtgaggagcgtcctgagactaaggaaagagcctggaaaatggagcagacctggacgagagattattttgcagaggatgaggggagatggtacccagaacgagtcacacagcagcttttcttagtgacactaaagatcgaggccctccagtgcagtcacagatctcggagaagtggtgaaaaggtcccgtttgtgcagacatattccttgagagcatttgagaaaccccctcaggtacagacccaggctcttcgagactttgagaagcacctcaatgacctgcaagaaggagaacttcagcctcaagctgctcatctacttcctggaggagcgcatgcaacagaagtatgaggccagccgggaggacatctacaagcggaacactgagctgaaggttgaagtggagagcttgaaacgagaactccaggacaagaaacagccatctggattaaaaccatgggcctgatgtggagaatcttcaaccagttcagaatgaagctgagctccgacgccagtttgaggagccgacagcaggaagacggagcatgtttatgagctctttggagaataagatgcagcttcttgccaggaggaattccaggctagcaaagaatgaacgatgcgcggatgggcagctcttggtggaangccagaggaagggagtgtacccctgggagctctcaggggaaacttgaaggggagtcacccaaaaactggggaagatgtccccaggagccccaggtcaagcccgacccaatacacttgaggcccctggcccagtattgacaagatctaaaaaaaataatgctgggaagtcctaaccacatcaagaatgcctcagatcagtgacccaaggaacctttccagaattggttgaaatagacccaaagctgaattcaccctaattttagggccaaaaacccaaaaaaaacaaaacaagaccaaaaaaatcttcagatactgggagaacaaatctcaattgctcgaattgtatcttatgaaaacaatttttcaaaataaaacaagagatatttaagattcaaaaaaaaaaaaaaaaa

SEQ ID NO: 150236 - DNA, 462 bp, Homo sapiens
aagaacaataagcacctggcgggggtaccgctcattggctgggtcctgcgagcggccctggattcaggggccttccataagtgtgcatgtgcgagagtggttggcctggcctgggcgtgggtcggcaaaggtagtcgggctgctggaggggttggggcctccggggccaccgctattggaaaggggccatttttcatgccagggatgtgcaagatccggggtgactggggccgggctgagagcccaggaggaagggctccagctccttccttgttccgtagctgccaatggtcataacctgggacagttcctgtctccgcccttgagaatcatccgtaaaaggggagattacacctccccaaccgtcccctcctcccgggttgaccttacggggaaaagtaaaggaggccaccccggtgcaacatctgtgataatatgtgaacttctttggaaaaaaaaaaa

SEQ ID NO: 150237 - DNA, 326 bp, Homo sapiens
  misc_feature (1)...(326): n = a,t,c or g
nnnnnnnnnnnacctccccacacgcccctcccctcacgcacagcgccctcccccagccccacacgccccgctaccgccctcctcccgtccccgcgtcacgccgctcgcaaaccctcccaactcactctcaccctacaccccagcctcccaaaaatgtcacccggtaatgcccaatgcactgcaccatgaagagaagcaagaccaggttgaaaggaattcgattttctaaatctaggaaggtattaagataggggatttggacttcgatttgaaggatatggctggtgggaaggagtatgattcaaaacaagtagagaggagaggag

SEQ ID NO: 150238 - DNA, 350 bp, Homo sapiens
attggacttttaagactttaaaatcatctattactttggggtgaacattatgcatatagctacctctgtactgaggtttctgggaacaggtggaatggaccagttttttccagtcggctgggcagcagggattgggaagcttgttgctatttactgctcacaaaatttggttatttcgctaatgaatggttgttagctaacaaccaaggccacactcacccacagcactggaggagcagttccagcagggcaagcttcttgcgtgcatcgcttcaaggccgggacagtgtggccgagcagatggctatgtgctagagggcaaagagttggagttctatcttaggaattca

SEQ ID NO: 150239 - DNA, 630 bp, Homo sapiens
tacagtgtggtgagcctgtctcaggacagtaggaggcagaggttaaggcaaggggttgcagcccccccccccagatcagttttgcagggcaaggaaatatagcagagaaaacagtcatatattcaggcaacataaatgtgggaacaaaacaataaacacctctattaccatgggtgaagacaaaacaaggatttatttgccttttgcgggccttgatttttcctaagatagaactccaactctttgccctctagcacatagccatctgctcggccacattgtttcggccttgaagcgatgcacgcaagaagcttgccctgctggaactgctcctccaggagactgctgattttggcattctctttcctttcatcatatttcttctgaatttttttagatcgttttttgtttaaaatctcttcttcctcaggagtcagcttggctcccttcttgcggcccaggggtagcgcataagtgggactcgtaccactgtccggtacggtgtgctgtcgatgagcacgatgcaattcttcaccagggtcttggtacgaaccagctcgttattagatgcattgtagacaacatcgatgatccttggtttacgagtacaaactctgagcccaggagaaa

SEQ ID NO: 150240 - DNA, 654 bp, Homo sapiens; identical to SEQ ID NO: 144884
  misc_feature (1)...(654): n = a,t,c or g

SEQ ID NO: 150241 - DNA, 656 bp, Homo sapiens
  misc_feature (1)...(656): n = a,t,c or g
atcgagaccatattccatgtggnggaattccacagactcagagagaacccaccatggtgctcgtctcctgcccgacaagaccaacgtcaaggccgcctgggggtaaggtcggcgcgcacgctggcgcagtatggtgcggaggccctggagaggatgttcctgtccttccccaccaaccaagacctacttcccgcacttcgaccttgagccacggtttctgcccaggttaaagggccacgggaaagaaggtggccgacgcgctgaccaacgccgtggccaacgtgggacgacatgcccaacgtcgctgtccgccctgagcgacctgcacgcgcacaagcttcgggtggacccggtcaacttcaagctcctaagccactgcctggctggtggaccctgggccgcccaccttccccggccgagttcaacccctggcggtgccacgccttccctggaacaaagttcctgggcttcttgttgaagcaccgttgcttgaaccttccaaataaccgtttaagcttggaagccttcggttgggcaatgctttctttggccctttggggcttccccccagcccctcctcccctttcctgcacccgtacccccgtgggtctttgaataaaagtcttgagtgggcggcaaaaaaaaaaaaaaaaaaa

SEQ ID NO: 150242 - DNA, 336 bp, Homo sapiens
cccaccaggcttgcccaaaaacccatctttttctacatagttgctgttgctgatgtaaagaagtctcgtgaactcaatccaaataattccactgctgtgctgagaaaagggtatgcaatagctactctttttgttgagcttggactgtaaataatagatgtttaatttgttgaatgagttcattgtaagctttataagtagtaaaattatttatacatattatagcagagatatgattcaattttaaatataaagttatagttctattattttgttaaccataatatgtgataggagatctatacttaatatattttaaaatagtgatgattgaaa

SEQ ID NO: 150243 - DNA, 503 bp, Homo sapiens
gcggccgcggccagggcggcccgtgggaccgcgggcccctggcgcagcgctgcccggctcccggccctgccggcctcctcccttggcgccgcggccatggcggccagcgcgaagcggaagcaggaggagaagcacctgaagatgctgcgggacatgaccggcctcccgcacaaccgaaagtgcttcgactgcgaccagcgcggccccacctacgttaacatgacggtcggctccttcgtgtgtacctcctgctccggcagcctgcgaggataaaatccaccacacagggtgaaatctatctccatgacaacattcacacaacaggaaattgaattcttacaaaaacatggaaatgaagtatgtcccgccagaacaagccaaagtcgtggcatcagttcatgcatctatttcagggtcctctgccagtagcacaagcagcacacctgaggtcagaccactgaaatctcttttaggggattctgcaccaacactgcacttaaata

SEQ ID NO: 150244 - DNA, 360 bp, Homo sapiens
tatttcttatattgtacttaatatcttagaaaaaccataaataagtaattgaaacaagttttgtggttagtcttctcttttctctgagtatttcaaatatttaatgggtgtagtcttaagctgtcgttccttttttaaaaaatatgcaaagttattctgtgtgagagggttttcagataagattaatggtgaaacaatctttgtacaaaagttagatattaagcgttatcattgttttgatatagaattacctacatttttttttagttaactgttttttacatgttttaggtatgtcccgccagaacaagccaaagtcgtggcatcagttcatgcatctatttcagggtcctctgccag

SEQ ID NO: 150245 - DNA, 2538 bp, Homo sapiens
tggcggcggcggcggcggttgtcccggctgtgccggttggtgtggcccgtcagcccgcgtaccacagcgcccgggccgcgtcgagcccagtacagccaagccgctgcggccgggtccggcgcgggcggcgcgcgcagacggagggcggcggccgcggccagggcggcccgtgggaccgcgggcccccggcgcagcgctgcccggctcccggccctgccggcctcctcccttggcgccgcggccatggcggccagcgcgaagcggaagcaggaggagaagcacctgaagatgctgcgggacatgaccggcctcccgcacaaccgaaagtgcttcgactgcgaccagcgcggccccacctacgttaacatgacggtcggctccttcgtgtgtacctcctgctccggcagcctgcgaggattaaatccaccacacaagggggaaaatctatctccatgacaacattcacacaacaggaaattgaattcttacaaaaacatggaaatgaagtctgtaaacagatttggctaggattatttgatgatagatcttcagcaattccagacttcagggatccacagaaagtgaaagagtttctacaagaaaagtatgaaaagaaaagatggtatgtcccgccagaacaagccaaagtcgtggcatcagttcatgcatctatttcagggtcctctgccagtagcacaagcagcacacctgaggtcaaaccactgaaatctcttttaggggattctgcaccaacactgcacttaaataagggcacacctagtcagtccccagttgtaggtcgttctcaagggcagcagcaggagaagaagcaatttgaccttttaagtgatctcggctcagacatctttgctgctccagctcctcagtcaacagctacagccaattttgctaactttgcacatttcaacagtcatgcagctcagaattctgcaaatgcagattttgcaaactttgatgcatttggacagtctagtggttcgagtaattttggaggtttccccacagcaagtcactctccttttcagccccaaactacaggtggaagtgctgcatcagtaaatgctaattttgctcattttgataacttccccaaatcctccagtgctgattttggaaccttcaatacttcccagagtcatcaaacagcatcagctgttagtaaagtttcaacgaacaaagctggtttacagactgcagacaaatatgcagcacttgctaatttagacaatatcttcagtgccgggcaaggtggtgatcagggaagtggctttgggaccacaggtaaagctcctgttggttctgtggtttcagttcccagtcagtcaagtgcatcttcagacaagtatgcagctctggcagaactagacagcgttttcagttctgcagccacctccagtaatgcgtatacttccacaagtaatgctagcagcaatgtttttggaacagtgccagtggttgcttctgcacagacacagcctgcttcatcaagtgtgcctgctccatttggacgtacgccttccacaaatccatttgttgctgctgctggtccttctgtggcatcttctacaaacccatttcagaccaatgccagaggagcaacagcggcaacctttggcactgcatccatgagcatgcccacgggattcggcactcctgctccctacagtcttcccaccagctttagtggcagctttcagcagcctgcctttccagcccaagcagctttccctcaacagacagctttttctcaacagcccaatggtgcaggttttgcagcatttggacaaacaaagccagtagtaaccccttttggtcaagttgcagctgctggagtatctagtaatccttttatgactggtgcaccaacaggacaatttccaacaggaagctcatcaaccaatcctttcttatagccttatatagacaatttactggaacgaacttttatgtggtcacattacatctctccacctcttgcactgttgtcttgtttcactgatcttagctttaaacacaagagaagtctttaaaaagcctgcattgtgtattaaacaccaggtaatatgtgcaaaacagagggctccagtaacaccttctaacctgtgaattggcagaaaagggtagcggtatcatgtatattaaaattggctaatattaagttattgcagataccacattcattatgctgcagtactgtacatatttttcttagaaattagctatttgtgcatatcagtatttgtaactttaacacattgttatgtgagaaatgttactggggaaatagatcagccacttttaaggtgctgtcatatatctttggaatgaatgacctaaaatcattttaaccattgctactggaaagtaacagagtcaaaattggaaggttttattcattcttgaatttttcctttctaaagagctcttctatttatacatgcctaaattcttttaaaatgtagagggatacctgtctgcataataaagctgatcatgttttgctacagtttgcaggtg

SEQ ID NO: 150246 - DNA, 307 bp, Homo sapiens
aaacatcaagtatggcacagacagatgctgtctataaaagaaaccaataacaaaaaatcaacttgggctgtactcatcaaattacagtttttaaaccttcttaacatgccttgtgctgctcactttctatctgaagtattatatgctattctgataatcttactattgttcgtcgatctgtatgtctgtataggtcatatttattatatatcctttctgtattgtgttttttctgtttgctcttgtggttggatgttatattcttttaattcatcttcttttatttttttctgcttactttgtcttc

SEQ ID NO: 150247 - DNA, 3135 bp, Homo sapiens
atggacttaaatgctgataagcagctgtttgggttccacacagggtgcgagctcaggatgcacgttggaggggacacagggccagagcaaggtgggaatgcgggtattatgggccaggccatcctccagctggtggagcaccgcagtactgcagtgtgtggccctggcttaacagcagtgcggaaaagcttttttcttggggctgtggtgctttccaggtccatggctaatgaaacacagaaggttggtgccatccattttccttttcccttcacaccctattccatccaggaagacttcatggcagagctgtaccgggttttggaggctggcaagattgggatatttgagagtccaactggcactgggaagtccttaagtcttatttgtggggccctctcttggctccgtgactttgaacagaagaagcgtgaagaagaggcacgactccttgaaactggaactggccccttacatgatgagaaagatgaatccctgtgtctgtcttcttcctgcgaaggggctgcaggcaccccgaggcctgctggagaaccggcctgggttactcagtttgtgcagaagaaagaagagagggacctggtggaccgactaaaggcggagcaggccaggaggaagcagcgagaagaacgcctgcagcagctgcagcacagggtgcagctcaagtatgcagccaagcgcctgaggcaggaagaagaagaaagagagaatctcctccgcctcagcagggagatgctagagacaggcccggaggctgagcggctggagcagctggagtctggggaggaggagctggtcctcgccgaatacgagagtgatgaggagaaaaaggtggcgagcagagtggatgaggatgaggatgacctggaggaagaacacataactaagatttattactgtagtcggacacactcccagctggcccagtttgtgcatgaggtgaagaagagcccctttggcaaggatgttcggctggtctcccttggctcccggcagaacctttgtgtaaatgaagacgtgaaaagcctaggttctgtgcagcttatcaacgaccgctgtgtggacatgcagagaagcaggcacggtagccactgggaccatggtgtagccgcagagaagaagaaaggagctgaggaggagaagccaaagaggaggaggcaggagaagcaggcagcctgccccttctacaaccacgagcagatgggccttctccgggatgaggccctggcagaggtgaaggacatggagcagctgctggcccttgggaaggaggcccgggcctgtccctattacgggagccgccttgccatccctgcagcccagctggtggtgctgccctatcagatgctgctgcatgcggccactcggcaggccgcgggcatccggctgcaggaccaggtggtgatcatcgacgaggcgcacaacctgatcgacaccatcacgggcatgcacagcgtggaggtcagcggctcccagctctgccaggcccattcccagctgctgcagtacgtggagcgatacgggaagcgtttgaaggccaagaacctgatgtacctgaagcagatcctgtatttgctggagaaattcgtggctgtgctaggggggaacattaagcaaaatcccaatacacagagtctgtcacagacagggacggagctgaagaccatcaacgactttctcttccagagccagatcgacaacatcaacctgttcaaggtctgtgtacccagcgctccccagatgaaacacggccactgccgcctgaaccccaagctcgtaactcaaatcagcaacagtgactgcccccgggtgcagcgatactgtgagaagagcatgatcagcagaaagctctttggattcactgaacggtacggagcagtgttctcatcccgggagcagcccaaactggctgggtttcagcaattcctgcagagcctgcagcccaggacgactgaagctcttgcagcccctgcagacgagagtcaggccagcaccctgcgaccagcttctccactgatgcacatccaaggcttcctggcagctctcactacggccaaccaggacggcagggtcatcctgagccgccaaggcagcctcagtcagagcaccctgaagtttttgctcctgaatccagctgtgcactttgcccaagtggtgaaggaatgccgggcagtggtcattgcggggggtaccatgcagccggtgtctgacttccggcagcagctgctggcctgtgccggggtggaagctgagcgcgtggtggagttttcctgtggtcacgtgatccctccagacaacatcctgcccctcgtcatctgcagcgggatctccaaccagccgctggaattcacgttccagaaaagagagctgcctcagatgatggacgaggtgggtcgcattctctgtaacctgtgcggtgtggttcctggaggggtggtctgtttcttcccctcctacgagtacctgcgccaggtccatgcccactgggagaagggtggcctgctgggccgtctggctgccaggaagaagatattccaggaacctaagagcgcacaccaggtggagcaggtgctgctggcatattccaggtgcatccaggcctgtggccaggagagaggccaggtgacaggggccctgctcctctctgtggttggaggaaagatgagtgaagggatcaacttctctgacaacctaggccggtgtgtggtgatggtgggcatgcccttccccaacatcaggtctgcagagctgcaggagaagatggcctacttggatcaaaccctccccagagcccccggccaggcacccccagggaaggctctggtggagaacctgtgcatgaaggccgtcaaccagtccataggcagggccatcaggcaccagaaggattttgccagcgtagtgctcctggaccagcgatatgcccggccccctgtcctggccaagctgccggcctggatccgagcccgtgtggaggtcaaagctacctttggccccgccattgctgctgtgcagaagttcctccaagtctatggcacctccctccctctcaaccacttgagcaaactccaagacaccttctaccccaacaccagcaattatgccaagggccgttag

SEQ ID NO: 150248 - DNA, 2772 bp, Homo sapiens
gaagaagagcccctttggcaaggatgttcggctggtctcccttggctcccggcagagaagaagaaaggagctgaggaggagaagccaaagaggaggaggcaggagaagcaggcagcctgccccttctacaaccacgagcagatgggccttctccgggatgaggccctggcagaggtgaaggacatggagcagctgctggcccttgggaaggaggcccgggcctgtccctattacgggagccgccttgccatccctgcagcccagctggtggtgctgccctatcagatgctgctgcatgcggccactcggcaggccgcgggcatccggctgcaggaccaggtggtgatcatcgacgaggcgcacaacctgatcgacaccatcacgggcatgcacagcgtggaggtcagcggctcccagctctgccaggcccattcccagctgctgcagtacgtggagcgatacgggaagcgtttgaaggccaagaacctgatgtacctgaagcagatcctgtatttgctggagaaattcgtggctgtgctaggggggaacattaagcaaaatcccaatacacagagtctgtcacagacagggacggagctgaagaccatcaacgactttctcttccagagccagatcgacaacatcaacctgttcaaggtgcagcgatactgtgagaagagcatgatcagcagaaagctctttggattcactgaacggtacggagcagtgttctcatcccgggagcagcccaaactggctgggtttcagcaattcctgcagagcctgcagcccaggacgactgaagctcttgcagcccctgcagacgagagtcaggccagcaccctgcgaccagcttctccactgatgcacattgaaggcttcctggcagctctcactacggccaaccaggacggcagggtcatcctgagccgccaaggcagcctcagtcagagcaccctgaagtttttgctcctgaatccagctgtgcactttgcccaagtggtgaaggaatgccgggcagtggtcattgcggggggtaccatgcagccggtgtctgacttccggcagcagctgctggcctgtgccggggtggaagctgagcgcgtggtggagttttcctgtggtcacgtgatccctccagacaacatcctgccccttgtcatctgcagcgggatctccaaccagccgctggaattcacgttccagaaaagagagctgcctcagatgatggacgaggtgggtcgcattctctgtaacctgtgcggtgtggttcctggaggggtggtctgtttcttcccctcctacgagtacctgcgccaggtccatgcccactgggagaagggtggcctgctgggccgtctggctgccaggaagaagatattccaggaacctaagagcgcacaccaggtggagcaggtgctgctggcatattccaggtgcatccaggcctgtggccaggagagaggccaggtgacaggggccctgctcctctctgtggttggaggaaagatgagtgaagggatcaacttctctgacaacctaggccggtgtgtggtgatggtgggcatgcccttccccaacatcaggtctgcagagctgcaggagaagatggcctacttggatcaaaccctcgcagggccatcaggcaccagaaggattttgccagcatagtgctcctggaccagcgatatgcccggccccctgtcctggccaagctgccggcctggatccgagcccgtgtggaggtcaaagctacctttggccccgccattgctgctgtgcagaagtttcaccgggagaagtcggcctcttcctgatgggcaaccacaccactgcctggcgccgtgcccttcctttgtcctgcccgctggagacagtgtttgtcgtgggcgtggtctgcggggatcctgttacaaaggtgaaacccaggaggagagtgtggagtccagagcgctgccaggacccaggcacaggcgttagctcccgtaggagaaaatgggggaatcctgaatgaacagtgggtcctggctgtccttggggcgttccagggcagctcccctcctggaatagaatctttctttccatcctgcatggctgagagccaggcttccttcctggtctccgcaggaggctgtggcagctgtggcatccactgtggcatctccgtcctgcccaccttcttaagaggcgagatggagcaggcccatctgyctctgccctttctagccaaggttatagctgccctggactgctcactctctggtctcaatttaaaatgatccatggccacagggctcctgcccaggggcttgtcaccttcccctcctccttcctgagtcactccttcagtagaaggccctgctccctatcctgccccacagccctgcctggatttgtatccttggcttcgtgccagttcctccaagtctatggcacctccctccctctcaaccacttgagcaaactccaagacaccttctaccccaacaccagcaattatgccaagggccattaggctctcaacatgactatagagaccccgtgtcatcacggagacctttgttcctgtgggaaaatatccctcccacctgcaacagctgcccctgctgactgcgcctgtcttctccctctgaccccagagaaaggggctgtggtcagctgggatcttctgccaccatcagggacaaacgggggcaggaggaaagtcactgatgcccagatgtttgcatcctgcacagctacaggtccttaaataaaagtgtgctgttggtt

SEQ ID NO: 150249 - DNA, 3755 bp, Homo sapiens
gaattcggcacgagttctaactcagtggcgtttgccctgattcccggggcctggctttcagcgtagcaatgctgccggcgaagaaggtgagcgcagtgctgtgtggcagcagagctccttaggacgaggagcagcgggacgaggaagggcagactggtgaaatcgcaaactgggcgtctgttccggcgccggacccctatttgcaaaggtccatggctaatgaaacacagaaggttggtgccatccattttccttttcccttcacaccctattccatccaggaagacttcatggcagagctgtaccgggttttggaggctggcaagagtgggatatttgagagtccaactggcactgggaagtccttaagtcttatttgtggggccctctcttggctccgtgactttgaacagaagaagcgtgaagaagaggcacgactccttgaaactggaactggccccttacatgatgagaaagatgaatccctgtgtctgtcttcttcctgcgaaggggctgcaggcaccccgaggcctgctggagaaccggcctgggttactcagtttgtgcagaagaaagaagagagggacctggtggaccgactaaaggcggagcaggccaggaggaagcagcgagaagaacgcctgcagcagctgcagcacagggtgcagctcaagtatgcagccaagcgcctgaggcaggaagaagaagaaagagagaatctcctccgcctcagcagggagatgctagagacaggcccggaggctgagcggctggagcagctggagtctggggaggaggagctggtcctcgccgaatacgagagtgatgaggagaaaaaggtggcgagcagagtggatgaggatgaggatgacctggaggaagaacacataactaagatttattactgtagtcggacacactcccagctggcccagtttgtgcatgaggtgaagaagagcccctttggcaaggatgttcggctggtctcccttggctcccggcagaacctttgtgtaaatgaagacgtgaaaagcctaggttctgtgcagcttatcaacgaccgctgtgtggacatgcagagaagcaggcacgagaagaagaaaggagctgaggaggagaagccaaagaggaggaggcaggagaagcaggcagcctgccccttctacaaccacgagcagatgggccttctccgggatgaggccctggcagaggtgaaggacatggagcagctgctggcccttgggaaggaggcccgggcctgtccctattacgggagccgccttgccatccctgcagcccagctggtggtgctgccctatcagatgctgctgcatgcggccactcggcaggccgcgggcatccggctgcaggaccaggtggtgatcatcgacgaggcgcacaacctgatcgacaccatcacgggcatgcacagcgtggaggtcagcggctcccagctctgccaggcccattcccagctgctgcagtacgtggagcgatacgggaagcgtttgaaggccaagaacctgatgtacctgaagcagatcctgtatttgctggagaaattcgtggctgtgctaggggggaacattaagcaaaatcccaatacacagagtctgtcacagacagggacggagctgaagaccatcaacgactttctcttccagagccagatcgacaacatcaacctgttcaaggtgcagcgatactgtgagaagagcatgatcagcagaaagctctttggattcactgaacggtacggagcagtgttctcatcccgggagcagcccaaactggctgggtttcagcaattcctgcagagcctgcagcccaggacgactgaagctcttgcagcccctgcagacgagagtcaggccagcaccctgcgaccagcttctccactgatgcacatccaaggcttcctggcagctctcactacggccaaccaggacggcagggtcatcctgagccgccaaggcagcctcagtcagagcaccctgaagtttttgctcctgaatccagctgtgcactttgcccaagtggtgaaggaatgccgggcagtggtcattgcggggggtaccatgcagccggtgtctgacttccggcagcagctgctggcctgtgccggggtggaagctgagcgcggtggtggagttttctgtggtcacgtgatccctccagacaacatcctgcccctcgtcatctgcagcgggatctccaaccagccgctggaattcacgttccagaaaagagagctgcctcagatgatattccaggaacctaagagcgcacaccaggtggagcaggtgctgctggcatattccaggtgcatccaggcctgtggccaggagagaggccaggtgacaggggccctgctcctctctgtggttggaggaaagatgagtgaagggatcaacttctctgacaacctaggccggtgtgtggtgatggtgggcatgcccttccccaacatcaggtctgcagagctgcaggagaagatggcctacttggatcaaaccctccccagagcccccggccaggcacccccagggaaggctctggtggagaacctgtgcatgaaggccgtcaaccagtccataggcagggccatcaggcaccagaaggattttgccagcgtagtgctcctggaccagcgatatgcccggccccctgtcctggccaagctgccggcctggatccgagcccgtgtggaggtcaaagctacctttggccccgccattgctgctgtgcagaagtttcaccgggagaagtcggcctcttcctgatgggcaaccacaccactgcctggcgccgtgcccttcctttgtcctgcccgctggagacagtgtttgtcgtgggcgtggtctgcggggatcctgttacaaaggtgaaacccaggaggagagtgtggagtccagagtgctgccaggacccaggcacaggcgttagctcccgtaggagaaaatgggggaatcctgaatgaacagtgggtcctggctgtccttggggcgttccagggcagctcccctcctggaatagaatctttctttccatcctgcatggctgagagccaggcttccttcctggtctccgcaggaggctgtggcagctgtggcatccactgtggcatctccgtcctgcccaccttcttaagaggcgagatggagcaggcccatctgcctctgccctttctagccaaggttatagctgccctggactgctcactctctggtctcaatttaaaatgatccatggccacaggctcctgcccaggggcttgtcaccttcccctcctccttcctgagtcactccttcagtagaaggccctgctccctatcctgtcccacagccctgcctggatttgtatccttggcttcgtgccagttcctccaagtctatggcacctccctccctctcaaccacttgagcaaactccaagacaccttctaccccaacaccagcaattatgccaagggccgttaggctctcaacatgactatagagaccccgtgtcatcacggagacctttgttcctgtgggaaaatatccctcccacctgcaacagctgcccctgctgactgcgcctgtcttctccctctgaccccagagaaaggggctgtggtcagctgggatcttctgccaccatcagggacaaacgggggcaggaggaaagtcactgatgcccagatgtttgcatcctgcacagctataggtccttaaataaaagtgtgctgttggttaaaaaaaaaaaaaaaaaa

SEQ ID NO: 150250 - DNA, 4188 bp, Homo sapiens
ttcactgaggggacccgccagtttcaaactcagtggcgtttgccctgattcccggggcctggctttcagcgtagcaattctgccggcgaagaaggtgagcgcagtgctgtgtggcagcagagctccttaggacgaggagcagcgggacgaggaagggcagactggtgaaatcgcaaactgggcgtctgttccggcgccggacccctatttgcaaaggtccatggctaatgaaacacagaaggttggtgccatccattttccttttcccttcacaccctattccatccaggaagacttcatggcagagctgtaccgggttttggaggctggcaagattgggatatttgagagtccaactggcactgggaagtccttaagtcttatttgtggggccctctcttggctccgtgactttgaacagaagaagcgtgaagaagaggcacgactccttgaaactggaactggccccttacatgatgagaaagatgaatccctgtgtctgtcttcttcctgcgaaggggctgcaggcaccccgaggcctgctggagaaccggcctgggttactcagtttgtgcagaagaaagaagagagggacctggtggaccgactaaaggcggagcaggccaggaggaagcagcgagaagaacgcctgcagcagctgcagcacagggtgcagctcaagtatgcagccaagcgcctgaggcaggaagaagaagaaagagagaatctcctccgcctcagcagggagatgctagagacaggcccggaggctgagcggctggagcagctggagtctggggaggaggagctggtcctcgccgaatacgagagtgatgaggagaaaaaggtggcgagcagggcgccttctgatgccacctccagccgccatccaccagacgccagcttccccgctgccctgaacttcctccagcgcaccaggccttcctctgtcctgtctgaggatttgctcatgcaacgtgctgtggccaaacaccctgccctcctcccttggcagatgtcttcctctcctttaaggcctggctcagagtggatgaggatgaggatgacctggaggaagaacacataactaagatttattactgtagtcggacacactcccagctggcccagtttgtgcatgaggtgaagaagagcccctttggcaaggatgttcggctggtctcccttggctcccggcagaacctttgtgtaaatgaagacgtgaaaagcctaggttctgtgcagcttatcaacgaccgctgcgtggacatgcagagaagcaggcacgagaagaagaaaggagctgaggaggagaagccaaagaggaggaggcaggagaagcaggcagcctgccccttctacaaccacgagcagatgggccttctccgggatgaggccctggcagaggtgaaggacatggagcagctgctggcccttgggaaggaggcccgggcctgtccctattacaggagccgccttgccatccctgcagcccagctggtggtgctgtcctatcagatgctgctgcatgcggccactcggcaggccgcgggcatccggctgcaggaccaggtggtgatcatcgacgaggcgcacaacctgatcgacaccatcacgggcatgcacagcgtggaggtcagcggctccccagctctgccaggcccattcccagctgctgcagtacatggagcgatacgggaagcgtttgaaggccaagaacctgatgtacctgaagcagatcctgtatttgctggagaaattcgtggctgtgctaggggggaacattaagcaaaatcccaatacacagagtctgtcacagacagggacggagctgaagaccatcaacgactttctcttccagagccagatcgacaacatcaacctgttcaaggtgcagcgatactgtgagaagagcatgatcagcagaaagctctttggcttcactgaacggtacggagcagtgttctcatcccgggagcagcccaaactggctgggtttcagcaattcctgcagagcctgcagcccaggacgactgaagcacttgcagcccctgcagacgagagtcaggccagcgtcccgcaaccagcttccccactgatgcacatcgaaggcttcctggcagctctcactacggccaaccaggacggcagggtcatcctgagccgccaaggcagcctcagtcagagcaccctgaagtttttgctcctgaatccagctgtgcactttgcccaagtggtgaaggaatgccgggcagtggtcattgccggggggaccatgcagccggtgtctgacttccggcagcagctgctggcctgtgccggggtggaagctgagcgcgtggtggagttttcctgtgttttcggcccctccctggctcttaccaggtcacgtgatccctccagacaacatcctgccccttgtcatctgcagcgggatctccaaccagccgctggaattcacgttccagaaaagagagctgcctcagatgatggacgaggtgggtcgcattctctgtaacctgtgcggtgtggttcctggaggggtggtctgtttcttcccctcctacgagtacctgcgccaggtccatgcccactgggagaagggtggcctgctgggccgtctggctgccaggaagaagatattccaggaacctaagagcgcacaccaggtggagcaggtgctgctggcatattccaggtgcatccaggcctgtggccaggagagaggccaggtgacaggggccctgctcctctctgtggttggaggaaagatgagtgaagggatcaacttctctgacaacctaggccggtgtgtggtgatggtgggcatgcccttccccaacatcaggtctgcagagctgcaggagaagatggcctacttggatcaaaccctccccagagcccccggccaggcacccccagggaaggctctggtggagaacctgtgcatgaaggccgtcaaccagtccataggcagggccatcaggcaccagaaggattttgccagcatagtgctcctggaccagcgatatgcccggccccctgtcctggccaagctgccggcctggatccgagcccgtgtggaggtcaaagctacctttggccccgccattgctgctgtgcagaaggtcagtcctacctttttctttctgagagcctccccaccccgagatcacatttctcactgccttctgtctgcccagtttcaccgggagaagtcggcctcttcctgatgggcaaccacaccactgcctggcgccgtgcccttcctttgtcctgcccgctggagacagtgtttgtcgtgggcgtggtctgcggggatcctgttacaaaggtgaaacccaggaggagagtgtggagtccagagcgctgccaggacccaggcacaggcgttagctcccgtaggagaaaatgggggaatcctgaatgaacagtgggtcctggctgtccttggggcgttccagggcagctcccctcctggaatagaatctttctttccatcctgcatggctgagagccaggcttccttcctggtctccgcaggaggctgtggcagctgtggcatccactgtggcatctccgtcctgcccaccttcttaagaggcgagatggagcaggcccatctgyctctgccctttctagccaaggttatagctgccctggactgctcactctctggtctcaatttaaaatgatccatggccacagggctcctgcccaggggcttgtcaccttcccctcctccttcctgagtcactccttcagtagaaggccctgctccctatcctgccccacagccctgcctggatttgtatccttggcttcgtgccagttcctccaagtctatggcacctccctccctctcaaccacttgagcaaactccaagacaccttctaccccaacaccagcaattatgccaagggccattaggctctcaacatgactatagagaccccgtgtcatcacggagacctttgttcctgtgggaaaatatccctcccacctgcaacagctgcccctgctgactgcgcctgtcttctccctctgaccccagagaaaggggctgtggtcagctgggatcttctgccaccatcagggacaaacgggggcaggaggaaagtcactgatgcccagatgtttgcatcctgcacagctacaggtccttaaataaaagtgtgctgttggtt

SEQ ID NO: 150251 - DNA, 744 bp, Homo sapiens
tccctgctcctgcccccaggcgagagaaaacgaatgaagagttgcaagaggaattaaggaatttgcaagagcaaatgaaggccttacaagagcagctaaaagtaacaacaattaaacagacagcaagcccagcccgtctgcaaaaatcccctgagaagtctccccggccacctcttaaggagaggagagttcagagaattcaggagtcaacatgcttttctgcggagcttgatgtccctgcgctaccaagaaccaagagggtggctcgaacaccaaaggcttcacctccagatcccaaaagctcatcttcaaggatgacaagtgcaccctcccaacccctacagacgatttctcggaacaaacctagtgggataactagaggtcaaattgtggggaccccaggaagttctggggaaacgactcaacccatctgtgtggaagccttctctggtctgcggctcaggcggcctcgagtatcctccacagaaatgaacaagaaaatgaccggccgaaaactgatcagactgtctcagatcaaggaaaagatggccagagagaagctggaagaaatagattgggtgacatttggggttataccgaagtgcggctctcaacgtcgtgttcatatattgtgtggttttaggcagcggtctcacactctgcctctgtacattgtattttcgtgttctctcgactgcgctattctcttttgggtgcttgcctctcgcttccctctcgcgcccg

SEQ ID NO: 150252 - DNA, 126 bp, Homo sapiens
cggccgcgtcgacgcccagcagtttcttatcccatgtagcaaccactggtgcaggtggcagcctggtgcattggggagtatggggacctcctgctggcagggacatgtgggactgcagcacctttt

SEQ ID NO: 150253 - DNA, 536 bp, Homo sapiens
  misc_feature (1)...(536): n = a,t,c or g
nagtggttactgcttctctgagtctgtaagaatacggcacgaggggtgttgacgcgatgtgatttctgcccagtgctctgaatgtcaaagtgaagaaattcaatgaagcgcgggtaaacggcgggannnnnnnnnnnnnnnnnnnnnnnnnnnnnnnnnnnnnnntctaattagtgacgcgcatgaatggatgaacgagattcccactgtccctacctactatccagcgaaaccacagccaagggaacgggcttggcggaatcagcggggaaagaagaccctgttgagcttgactctagtctggaggccagagtgaggaggaggcgtccatcaacctcaatgccattaacaagtgccccctgctgaagccctgggccctgaccttctcctactgccgagccctgcaggcctctgccctgaaggcctggggcgggaagaaggagaacctgaaggctgcgcangaggagatgtcaagcgagccctggccaacagccctgcctgtcaaggaaagtacacttccgagcgtcaggctgggg

SEQ ID NO: 150254 - DNA, 407 bp, Homo sapiens; identical to SEQ ID NO: 117552
  misc_feature (1)...(407): n = a,t,c or g

SEQ ID NO: 150255 - DNA, 684 bp, Homo sapiens
  misc_feature (1)...(684): n = a,t,c or g
cgcaggggcccagggcagcgctgggtgctttatttccatgctgggcgcccgggaagtatgtacacggggtacgtgccaagcatcctcgtgcgaccgcgagagcccctcggggctcgcccccccgcctcaccgggtcagtgaaaaaacgatcagagtagtggtatttcaccggcggcccgcagggccggcggaccccgccccgggcccctcgcggggacaccgggggggcgccgggggcctcccacttattctacacctctcatgtctcttcaccgtgccagactagagtcaagctcaacagggtcttctttccccgctgattccgccaagcccgttcccttggctgtggtttcgctggatagtaggtagggacagtgggaatctcgttcatccattcatgcgcgtcactaattagannnnnnnnnnnnnnnnnnnnnnnnnnnnnnnnnnnnnnntcccgccgtttacccgcgcttcattgaatttcttcactttgacattcagagcactgggcagaaatcacatcgcgtcaacacccgccgcgggccttcgcgatgctttgttttaattaaacagtcggattcccctggtccgcaccagttctaagtcggctgctaggcgccggccgaggcgaggcgccgcgcggaaccgcggcccccggagcggacccggcggggggaccgg

SEQ ID NO: 150256 - DNA, 331 bp, Homo sapiens
ggggaagacaccagaggggattgatgccattgaggaaatagagatagatttggaagaaactgaaggagaaatatccccacaggaaaatggcctagaggaggttaagcctctaggtgaaatgcatacagatttgaatgcaaccggaagggagatttccccaagggagaagacaccagaggtgattgatgccactgaggaaatagacaaagatctggaagaaactggaagaagagaaatatccccagaggaaaatggcccagaggaggtcaagcctgtagatgaaatggagacagacttgaaaacaactggaagagagggttcctcaagggag

SEQ ID NO: 150257 - DNA, 340 bp, Homo sapiens
ctcccaattctagtcctattcacctgaataggactcctctttctccaccttcagtaatgctacatggttctcctgtacagtcatcctgtgcaatggctggaaggactaatatacctctttccccaaccttgactacaaagagtccagtaatgaaaaaaccaatgtgtaatttttcaactaatatggaaataccacgagcaatgttccaccacaaaccaccccaaggcccacctccccctcctccaccttcttgtgctcttcagaaaaagccattaacatctgagaaagatccacttggcattcttgaccctattcctagtaaaccagtgaatcagaaccc

SEQ ID NO: 150258 - DNA, 94 bp, Homo sapiens; identical to SEQ ID NO: 70712

SEQ ID NO: 150259 - DNA, 597 bp, Homo sapiens
tgccagcatgggttgttcatcaccgctgctgtccctgctgtcgctcctggttggtgcgtggctcaagctaggtcactgaaccgccggccacgccggaggcgctgggaaaggggatggggccctccgccctggcgggagagagcctgaggcccctctgcccgcttccgggatgcgcctgcagccgccggctggggaggttgctctcggtgcgcagggtgcctcaccgccttgtgctttcaacttcttgctctggaatctttcaatccaggctcagctgaggcgagtgcgcggccagggctgcagctggcgctggctggtacttgctcaggccattgaggagcttctgggcgaccctgcgctcgtgcctaccaggcgccagccagtaggtcgcgcagcgcctgctccagcagcgtcaagcctttgctgcgcggaccccgcaggccgggaagtcacgcaggtggtagtagtccaggtggtcgtaaactcctcctcatagcttatgggtggcggcggctgggctgaagactgcggacaggacatcccgcccggccgcctgtggtcaccctcccgcgcaggcgcgctcctggaagacccagc

SEQ ID NO: 150260 - DNA, 998 bp, Homo sapiens
tttcgtcgcggcgcagcgcggcagtcctgatggcccggcatgggttaccgctgctgcccctgctgtcgctcctggtcggcgcgtggctcaagctaggaaatggacaggctactagcatggtccaactgcagggtgggagattcctgatgggaacaaattctccagacagcagagatggtgaagggcctgtgcgggaggcgacagtgaaaccctttgccatcgacatatttcctgtcaccaacaaagatttcagggattttgtcagggagaaaaagtatcggacagaagctgagatgtttggatggagctttgtctttgaggactttgtctctgatgagctgagaaacaaagccacccagccaatgaaggtcaagtttacccatgggggaactggttccagccaaaccgcaccaacctgtggcagggaaagttccccaagggagacaaagctgaggatggcttccatggagtctcccccagtgaatgctttccccgcccagaacaactacgggctctatgacctcctggggaacgtgtgggagtggacagcatcaccgtaccaggctgctgagcaggacatgcgcgtcctccgggggcatcctggatcgacacagctgatggctctgccaatcaccgggcccgggtcaccaccaggatgggcaacactccagattcagcctcagacaacctcggtttccgctgtgctgcagacgcaggccggccgccaggggagctgtaagcagccgggtggtgacaaggagaaaagccttctagggtcactgtcattccctggccatgttgcaaacagcgcaattccaagctcgagagcttcagcctcaggaaagaacttccccttccctgtctcccatccctctgtggcaggcgcctctcaccagggcaggagaggactcagcctcctgtgttttggagaaggggcccaatgtgtgttgacgatggctgggggccaggtgtttctgttagaggccaagtattattga

SEQ ID NO: 150261 - DNA, 131 bp, Homo sapiens; identical to SEQ ID NO: 98141

SEQ ID NO: 150262 - DNA, 541 bp, Homo sapiens
  misc_feature (1)...(541): n = a,t,c or g
tatcaaccagttttctaaaaagaaaggtacacacataaatatataatatcctttacaacagccgtgatggtatgaaataacattattgtttgttagtgctcaagcaagtgaacgtgtggaagcagcacctcatgctgtcttatatacgcaggttacaaggagctattttcgtatcctaagcatatcacaagcaataccacggcaacagagttcatcatggtgagtgcaagaggcttccggtatctcctgggtcttttcctaccatgctttaaggggacctccagggcttaggccactcaagccaccatcagagcatccctactcctgtggtttttgtataatggtgggctctataattcattaattaaaatgatacctccttaaggaaaaattggaatttaaaaagaatagnnnnnnnnnntcacccatgtcccaacaccttaatgcaactagcattaacagctttgagaagttttcttctgtcctttgttttttttctcttaaaatgcagccagctttatctaaaagggttgaggtttaa

SEQ ID NO: 150263 - DNA, 5415 bp, Homo sapiens
aaggagcgcggaatcggggagcgtccggagctagctggatcctctaggcaggatggtgatgggaatctttgcaaattgtatcttctgtttgaaagtgaagtacttacctcagcagcagaagaaaaagctacaaactgacattaaggaaaatggcggaaagttttccttttcgttaaatcctcagtgcacacatataatcttagataatgctgatgttctgagtcagtaccaactgaattctatccaaaagaaccacgttcatattgcaaacccagattttatatggaaatctatcagagaaaagagactcttggatgtaaagaattatgatccttataagcccctggacatcacaccacctcctgatcagaaggcgagcagttctgaagtgaaaacagaaggtctatgcccggacagtgccacagaggaggaagacactgtggaactcactgagtttggtatgcagaatgttgaaattcctcatcttcctcaagattttgaagttgcaaaatataacaccttggagaaagtgggaatggagggaggccaggaagctgtggtggtggagcttcagtgttcgcgggactccagggactgtcctttcctgatatcctcacacttcctcctggatgatggcatggagactagaagacagtttgctataaagaaaacctctgaagatgcaagtgaatactttgaaaattacattgaagaactgaagaaacaaggatttctactaagagaacatttcacacctgaagcaacccaattagcatctgaacaattgcaagcattgcttttggaggaagtcatgaattcaagcactctgagccaagaggtgagcgatttagtagagatgatttgggcagaggccctgggccacctggaacacatgcttctcaagccagtgaacaggattagcctcaacgatgtgagcaaggcagaggggattctccttctagtaaaggcagcactgaaaaatggagaaacagcagagcaattgcaaaagatgatgacagagttttacagactgatacctcacaaaggcacaatgcccaaagaagtgaacctgggactattggctaagaaagcagacctctgccagctaataagagacatggttaatgtctgtgaaactaatttgtccaaacccaacccaccatccctggccaaataccgagctttgaggtgcaaaattgagcatgttgaacagaatactgaagaatttctcagggttagaaaagaggttttgcagaatcatcacagtaagagcccagtggatgtcttgcagatatttagagttggcagagtgaatgaaaccacagagtttttgagcaaacttggtaatgtgaggcccttgttgcatggttctcctgtacaaaacatcgtgggaatcttgtgtcgagggttgcttttacccaaagtagtggaagatcgtggtgtgcaaagaacagacgtcggaaaccttggaagtgggatttatttcagtgattcgctcagtacaagtatcaagtactcacacccgggagagacagatggcaccagactcctgctcatttgtgacgtagccctcggaaagtgtatggacttacatgagaaggacttttccttaactgaagcaccaccaggctacgacagtgtgcatggagtttcacaaacagcctctgtcaccacagactttgaggatgatgaatttgttgtctataaaaccaatcaggttaaaatgaaatatattattaaattttccatgcctggagatcagataaaggactttcatcctagtgatcatactgaattagaggaatacagacctgagttttcaaatttttcaaaggttgaagattaccagttaccagatgccaaaacttccagcagcaccaaggccggcctccaggatgcttctgggaacttggttcctctggaggatgtccacatcaaagggagaatcatagacactgtagcccaggtcattgtttttcagacatacacaaataaaagtcacgtgcccattgaggcaaaatatatctttcctttggatgacaaggccgctgtgtgtggcttcgaagccttcatcaatgggaagcacatagttggagagattaaagagaaggaagaagcccagcaagagtacctagaagccgtgacccagggccatggcgcttacctgatgagtcaggatgctccggacgtttttactgtaagtgttggaaacttaccccctaaggctaaggttcttataaaaattacctacatcacagaactcagcatcctgggcactgttggtgtctttttcatgcccgccaccgtagcaccctggcaacaggacaaggctttgaatgaaaaccttcaggatacagtagagaagatttgtataaaagaaataggaacaaagcaaagcttctctttgactatgtctattgagatgccgtacgtgattgaattcattttcagtgatactcatgaactgaaacaaaagcgcacagactgcaaagctgtcattagcaccatggaaggcagctccttagacagcagtggattttctctccacatcggtttgtctgctgcctatctcccaagaatgtgggttgaaaaacatccagaaaaagaaagcgaggcttgcatgcttgtctttcaacccgatctcgatgtcgacctccctgacctagccaatgagagcgaagtgattatttgtcttgactgctccagttccatggagggtgtgacattcttgcaagccaaggaaatcgccttgcatgcgctgtccttggtgggtgagaagcagaaagtaaatattatccagttcggcacaggttacaaggagctattttcgtatcctaagcatatcacaagcaataccgcggcagcagagttcatcatgtctgccacacctaccatggggaacacagacttctggaaaacactccgatatcttagcttattgtaccctgctcgagggtcacggaacatcctcctggtgtctgatgggcacctccaggatgagagcctgacattacagctcgtgaagaggagccgcccgcacaccaggttaattcgcctgcggtatcggttctacagcaaatcgtcacgtcttaaggattttgtcccagtgtggtgccggagtatttgaatattttaatgcaaaatccaagcatagttggagaaaacagatagaagaccaaatgaccaggctatgttctccgagttgccactctgtctccgtcaaatggcagcaactcaatccagatgcgcccgaggccctgcaggccccagcccaggtgccatccttgtttcgcaatgatcgactccttgtctatggattcattcctcactgcacacaggcaactctgtgtgcactaattcaagagaaagaattttgtacaatggtgtcgactactgagcttcagaagacaactggaactatgatccacaagctggcagcccgagctctaatcagagattatgaagatggcattcttcacgaaaatgaaaccagtcatgagatgaaaaaacaaaccttgaaatctctgattattaaactcagtaaagaaaactctctcataacacaatttacaagctttgtggcagttgagaaaagggatgagaatgagtcaccttttcctgatattccaaaagtttctgaacttattgccaaagaagatgtagacttcctgccctacatgagctggcagggggaaccccaagaagccgtcaggaaccagtctcttttagcatcctctgagtggccagaattacgtttatccaaacgaaaacataggaaaattccattttccaaaagaaaaatggaattatctcagccagaagtttctgaagattttgaagaggatgccttaggtgtactaccagctttcacatcaaatttggaacgtggacgtgtggaaaagctattggatttaagttggacagagtcatgtaaaccaacagcaactgaaccactatttaagaaagtcagtccatgggaaacatctacttctagcttttttcctattttggctccggccgttggttcctatcttaccccgactacccgcgctcacagtcctgcttccttgtcttttgcctcatatcgtcaggtagctagtttcggttcagctgctcctcccagacagtttgatgcatctcaattcagccaaggccctgtgcctggcacttgtgctgactggatcccacagtcggcgtcttgtcccacaggacctccccagaacccaccttctgcaccctattgtggcattgttttttcagggagctcattaagctctgcacagtctgctccactgcaacatcctggaggctttactaccaggccttctgctggcaccttccctgagctggattctccccagcttcatttctctcttcctacagaccctgatcccatcagaggttttgggtcttatcatccctctgcttactctccttttcattttcaaccttccgcagcctctttgactgccaaccttaggctgccaatggcctctgctttacctgaggctctttgcagtcagtcccggactaccccagtagatctctgtcttctagaagaatcagtaggcagtctcgaaggaagtcgatgtcctgtctttgcttttcaaagttctgacacagaaagtgatgagctatcagaagtacttcaagacagctgctttttacaaataaaatgtgatacaaaagatgacagtatcccgtgctttctggaagtaaaagaagaggatgaaatagtgtgcacacaacactggcaggatgctgtgccttggacagaactcctcagtctacagacagaggatggcttctggaaacttacaccagaactgggacttatattaaatcttaatacaaatggtttgcacagctttcttaaacaaaaaggcattcaatctctaggtgtaaaaggaagagaatgtctcctggacctaattgccacaatgctggtactacagtttattcgcaccaggttggaaaaagagggaatagtgttcaaatcactgatgaaaatggatgacccttctatttccaggaatattccctgggcttttgaggcaataaagcaagcaagtgaatgggtaagaagaactgaaggacagtacccatctatctgcccacggcttgaactggggaacgactgggactctgccaccaagcagttgctgggactccagcccataagcactgtgtcccctcttcatagagtcctccattacagtcaaggctaagtcaaatgaaactgaattttaaactttttgcatgcttctatgtagaaaataatcaaatgataatagatacttataatgaaacttcattaaggtttcattcagtgtagcaattactgtctttaaaaattaagtggaagaagaattactttaatcaactaacaagcaataataaaatgaaacttaaaat

SEQ ID NO: 150264 - DNA, 82 bp, Homo sapiens
aaattctaagcacctctttcagtattcaagtcaaacaacgttgaaatggattgggtgttgaagcataatggtcctaatagtc

SEQ ID NO: 150265 - DNA, 396 bp, Homo sapiens
  misc_feature (1)...(396): n = a,t,c or g
tttcgtcctcctgctactctggctcccagacaccaccggagaaattgtgttgacgcagtctccaggcaccctgtctttgtctgcaggggaaagagccaccctctcctgcagggccagtcagagtgttagcagcagctacttagcctggtaccagcagaaacctggccaggctcccaggctcctcatctatggtgcatccagcagggccactggcatcccagacnnnnnnnnnnnnnnnnnnnnnnnnnnnnnnnnnnnnnnnnnnnnnnnnnnnnnnnnnnnnnnnnnnnnnnnnnnnnnnnnnnnnnnnnnnnnnnnnnnnnnnnnnnnnnnnnnnnnnnnnnnnnnnnnnnnnnnnnnacgaactgtggctgcaccatctgtcttcatcttccn

SEQ ID NO: 150266 - DNA, 485 bp, Homo sapiens
  misc_feature (1)...(485): n = a,t,c or g
agggcgcnnnnnnnnnttactgattgcctacttcgtgtggtggaattcacagcatggnnnnnnnnnnnnnnnnnnnnnnnnnnnnnnnnnnnnnnnnnnnnnnnnnnnnnnnnnnnnnnnnnnnnnnnnnnnnnnnnnnnnnnnnnnnnnnnnnnnnnnnnnnnnnnnnnnnnnnnnnnnnnnnnnnnnnnnnnnnnnnnnnnnnnnnnnnnnnnnnnnnnnnnnnnnnnnnnnnnnnnnnnnnnnnnnnnnnnnnnnnnnnnnnnnnnnnnnnnnnnnnnnnnnnnnnnnnnnnnnnnnnnnnnnnnnnnnnnnnnnnnnnnnnnnnnnnnnnnnnnnnnnnnnnnnnnnnncgacctgaagactttgcaacttactactgtcaacagaattacattagtccactcactttcggcggtgggaccaaggtggagatcanacgaactgtggctgcaccatctgtcttcatcttcccgccatctgan

SEQ ID NO: 150267 - DNA, 417 bp, Homo sapiens; identical to SEQ ID NO: 145362
  misc_feature (1)...(417): n = a,t,c or g

SEQ ID NO: 150268 - DNA, 398 bp, Homo sapiens
  misc_feature (1)...(398): n = a,t,c or g
tttcgtcagataccaccggagaaattgtgttgacacagtctccagccaccctgtctttgtctccaggggaaagagccaccctctcctgcagggccagtcagagtgttagctactacttagcctggtaccaacagaaacctggccaggctcccaggctcctcatctatgatgcatccagcagggccactggcattccagccnnnnnnnnnnnnnnnnnnnnnnnnnnnnnnnnnnnnnnnnnnnnnnnnnnnnnnnnnnnnnnnnnnnnnnnnnnnnnnnnnnnnnaacagcgtancaactggcctctcactttcggcggagggaccaaggtggagattaaacgaactgtggctgcaccatctgtcttcatcttcccgccatctgatgagcagttgaag

SEQ ID NO: 150269 - DNA, 451 bp, Homo sapiens
  misc_feature (1)...(451): n = a,t,c or g
gaatttacagcatggnnnnnnnnnnnnnnnnnnnnnnnnnnnnnnnnnnnnnnnnnnnnnnnnnnnnnnnnnnnnnnnnnnnnnnnnnnnnnnnnnnnnnnnnnnnnnnnnnnnnnnnnnnnnnnnnnnnnnnnnnnnnnnnnnnnnnnnnnnnnnnnnnnnnnnnnnnnnnnnnnnnnnnnnnnnnnnnnnnnnnnnnnnnnnnnnnnnnnnnnnnnnnnnnnnnnnnnnnnnnnnnnnnnnnnnnnnnnnnnnnnnnnnnnnnnnnnnnnnnnnnnnnnnnnnnnnnnnnnnnnnnnnnnnnnnnnnnnnnnnnnnnnnnnttttcaagttactactgccaacagagttacagtgtccctttcactttcggccctgggaccaaagtggatatcaaacgaactgtggctgcaccatctgtcttcatcttcccgccatctgatgagcagtt

SEQ ID NO: 150270 - DNA, 679 bp, Homo sapiens
  misc_feature (1)...(679): n = a,t,c or g
gagcgtggtggaattcggaaaccccagcgcagcttctcttcctcctgctactctggctcccatataccagcggagaaattgtgttgacgcaggctccaggcaccctgtctttgtctccaggggaaagagccaccctctcctgcagggccagtcagactattggcagcacctacttagcctggtaccagcagagacctggccaggctcccaggttcctcatctatggtgcatccagcagggccactggcatcccagacnnnnnnnnnnnnnnnnnnnnnnnnnnnnnnnnnnnnnnnnnnnnnnnnnnnnnnnnnnnnnnnnnnnnnnnnnnnnnnnnnnnnnagcagtattatacttcaccgctcactttcggcggagggaccaaggtagagatcagacgaactgtggctgcaccatctgtcttcatcttcccgccatctgatgagcagttgaaatctggaactgcctctgttgtgtgcctgctgaataacttctatcccagagaggccaaagtacagtggaaggtggataacgccctccaatcgggtaactcccaggagagtgtcacagagcaggacagcaaggacagcacctacagcctcagcagcaccctgacgctgagcaaagcagactacgagaaacacaaagtctacgccttgcgaagtcacccatcagggga

SEQ ID NO: 150271 - DNA, 454 bp, Homo sapiens
ctcagctcctggggctcctgctgctctggctctcaggtgccacatgtgacatccagatgacccagtctccatcctccctgtctgcatctgtaggagacagagtcaccatcacttgccaggcgactcaggacattggcaactatttaaattggtatcagcacaaaccagggaaagcccctaacctcctgatctacgatgcatccaatttggaaacaggggtcccatcaaggttcagtggacgtggatctgggacacattttactttcaccatcagcagcctgcagcctgaagatattgcaacatattactgtcaacagtatggtaatctcccattcactttcggccctgggaccaaagtgcatatcaaacgaactgtggctgcaccatctgtcttcatcttccgccatctgatgagcagttgaaatctggactgcctctgttgtgtgcctgctga

SEQ ID NO: 150272 - DNA, 959 bp, Homo sapiens
gagcgtggttggagtccatctctcccaccatgagggtccctgcgcagctcctggggctgctattgctctggatccctggatccgttgcggacatcatgatgacccagactccactctctctgtccgtctcccctggacagtcggcctccatctcctgcaagtctagtcagagcctcctgcacagtgatgggaagacccatgtatattggtacctccagaagccaggccagtctccccagctcctaatatatgaagtgtccagccgcttctctggggtgccagataggttcagtggcagcgggtcagggacagacttcacactgaaaatcacccgggtggaggctgaggatgttggggtttattactgccaacaatataatagttacctgctattcactttcggccctgggaccaaagtggatatcaaacgaactgtggctgcacgcatctgtcttcatcttcccgccattctgatgagcagttgaaatctgggaactgcctctgttgtgtgcctgcttgaataacttcttattcccagaggagggccaaagtacagtgggaaggtgggattaacgccctccaatcgggtaactcccaggagtgtgtcacagaggcaggacagcaagggcagcacctacagccttcagcagcaccctgacggtgagcaaagcagactacgagaaacacaaagtctacgcctgcgaagtcacccatcagggcctgagctcgcccgtcacaaagagcttcaacaggggagagtgttagagggagaagtgcccccacctgctcctcagttccagcctgaccccctcccatcctttggcctctgaccctttttccacaggggacctacccctattgcggtcctccagctcatctttcacctcacccccctcctcctccttggctttaattatgctaatgttggaggagaatgaataaataaagtgaatctttgc

SEQ ID NO: 150273 - DNA, 534 bp, Homo sapiens
cgtcgacccagaagggaaccatggaaaccccagcgcagcttctcttcctcctgctactctggctcccagataccaccggagaaattgtgttgacgcagtctccaggcaccctgtctttgtctccaggggaaagagccaccctctcctgcagggccagtcagagtgttagcaacaactacttagcctggtaccagcagaaacctggccaggctcccaggctcctcatttatgatacatccagcagggccactggcatcccagacaggttcagtggcagtgcgtctgggacagacttcactctcaccatcagtagactggagcctgaagattttgcagtgtactactgtcagcagtatggtagctcacctcccatgtacacttttggccaggggaccaagctggagatcaaacgaactgtggctgcaccatctgtcttcatcttcccgccatctgatgagcagttgaaatctggaactgcctctgttgtgtgcctgctgaataacttctatcccagagaggccaaagtacagtgga

SEQ ID NO: 150274 - DNA, 621 bp, Homo sapiens
atggaagccccagcgcagcttctcttcctcctgctactctggctcacaggtgagggggaaccatgaggtggttttgcacattagtgaaaactcttgccacctctgctcagcaagaaatataattaaaattcaaagtatatcaacaattttggctctactcaaagacagttggtttgatcttgattacatgagtgcatttctgttttatttccaatttcagataccaccggagaaattgtgttgacacagtctccagccaccctgtctttgtctccaggggaaagagccaccctctcctgcagggccagtcagagtgttaacaacaactacttagcctggtaccaacagaaacctggccagcctcccaggctcctcatttatgatgcatccaacaggatcactggcatcccagccaggtttcagtggcagtgggtctgggacagagttcacttttcaccattcagcagcctgcagtctgaaggatttttgcagtttatttactgttcagcagttattgattaactgggcctccgattcacctttgggccaagggacacgacttggagatttaaacgaactgtggctgcaccatctgtcttcatcttcccgccatctgatgag

SEQ ID NO: 150275 - DNA, 365 bp, Homo sapiens
  misc_feature (1)...(365): n = a,t,c or g
ggnnnnnnnnnnnnnnnnnnnnnnnnnnnnnnnnnnnnnnnnnnncccgaaatatatttattccatgaataacaaacaactcctagatccttgcnnnnnnnnnnnnnnnnnnnnnnnnnnnnnnnnnnnnnnnnnnnnnnnnnnnnnnnnnnncagaatctcagccttctgcggccggcaccgcctcggctgcggttccttccctcgaagcccagaccccagctgccttcaggccgaccccgcctggactcgcgccctcctctccgccagctccaggccctccggcgcccacgggaaaagtttgcgggaggcattttttgcgttcggagtcgagcgcttctgggccactccgggccctactcagn

SEQ ID NO: 150276 - DNA, 3529 bp, Homo sapiens; identical to SEQ ID NO: 120366

SEQ ID NO: 150277 - DNA, 2784 bp, Homo sapiens; identical to SEQ ID NO: 120657

SEQ ID NO: 150278 - DNA, 2991 bp, Homo sapiens; identical to SEQ ID NO: 116249

SEQ ID NO: 150279 - DNA, 3519 bp, Homo sapiens; identical to SEQ ID NO: 120708

SEQ ID NO: 150280 - DNA, 2853 bp, Homo sapiens
atgcatgtttataacatcaataaaattacaaggatttacaatgtagttggaactatcagaggatctgtggaacctgacaggtatgttattctgggaggtcaccgggactcctgggtatttggagctattgacccaaccagtggggttgctgttttgcaagaaattgcccggagttttggaaaactgatgagtaaaggctggagacctagaagaactatcatttttgccagctgggatgcagaagaatttggacttctgggttccacagaatgggctgagttggttgaatacatggatgcagaactcaccaatatagagagttcttttacaaagcttcctcatctggcaggaacagaacaaaatttcttgcttgccaagaaaatccaaacccagtggaagaaatttggactagattcagccaagttggttcattatgatgtcctcttatcttaccccaatgagacaaatgccaactatatatcgattgtggatgaacatgaaactgagattttcaaaacatcataccttgaaccaccaccagatggctatgagaatgttacaaatattgtgccaccatataatgctttctcagcccaaggcatgccagagggagatcttgtatatgtgaactatgctcgcactgaagactttttcaaactagaaagagagatgggcatcaactgtactgggaagattgttattgcaagatatggaaaaatcttcagaggaaataaagttaaaaatgccatgttagcaggagccataggaatcatcttgtactcagatccagctgactactttgctcctgaggtacagccatatcccaaaggatggaatcttcctggaactgcagcccagagaggaaatgtgttaaatttgaatggtgctggtgacccactcactccaggctatccagcaaaagaaggaaaactaacaaacagaaaggacatccacaccaaaaccccatctgtacgtcaccagcatcaaagcccaaaggtagataaaaccacaaagatggggaaaaaacagagcagaaaaactgaaaattctaaaaatcagagcacctctccccctccaaaggaatgcagatcctcaccagcaatggaacaaagctggatggagaatgattttgacaagttgagagaagaagtcttcagacaatcaaacttctccaagctaaaggaggaagttcgaatccattgcaaagaagctaaaaaccttgaaaaaagattagatgaatggctaactagaataaccaaggtagaaaagtccttaaatgacctgatggagagaaagcaggaaagatccaaaattggcaccctaacatcacaattaaaagaactagaaaagcaagagcaaacacattcaaaagctagcagaaggcaagaaataactaaaatcagagcagaattgaaggaaatagagacacaaaaaacccttcaaaaaattaatgaatccaggagctggttttttgaaagggtcaacaaaattgatagaccactagcaagactaataaagaaaaaaagagagaagaatctaatagacgcaataaaaaatgataaagggcatatcaccaccgatcccacagaaatacaaactaccatcagagaatactacaaacacctctacgcaaataaactagaaaatctagaagaagtggataaattcctcgacacatacactctcccaagactaaaccaggaagaagttgaatctctgaatagaccaataacaggatctgaaattgtggcaataatcaatagcttaccaaccaaaaagagtccaggaccagatggattcacagctgaattctaccagaggtacaaggaggaactggtaccattccttctgaaagtattccaatcaatagaaaaagagggactcctccctaactcattttatgaggccagcatcattctgataccaaagccaggcagagacacaaccaaaaaagagaattttagaccaatatccttgatgaacattgatgcaaaaaccctcaataaaatactggcaaaacgaatccagcagcacatcaaaaagcttatccaccacgatcaagtgggcttcatccctgggatacaaggctggttcaatatacgcaaatcaataaatgtaatccagcctataaacagagccaaagacaaaaaccacatgattatctcaatagatgcagaaaaagcctttgacaaaattcaacaacccttcatgctaaaaactctcaataaattaggtattgatgggacgtatttcaaaataataagagctatctatgacaaactcacagccaatatcatactgaatgggcaaaaactggaagcattccctttgaaaactggcacaagacagggatgtcctctctcaccactcctattcaacatagtgttggaagttctggccagggcaattaggcaggagaaggaaataaagggtattcaattaggaaaagagggagtcaaattgtccctgtttgcagacgacatgattgtatatctagaaaaccccatcgtctcagcccaaaatctccttaagctgataagcaacttcagcaaagtctcaggttacaaaatcaatgtacaaaagtcacaagcattcttatacaccaacaacagacaaacagagagccaaatcatgagtgaactcccattcacaattgcttcaaagagaataaaatacctaggaatccaacttacaagggatgtgaaggacctcttcaaggagaactacaaaccactgctcaaggaaataaaagaggatacaaacaaatggaagaacattccatgctcatgggtaggaagaatcaatatcatgaaaatggccatactgcccaagaattggaaaaaactactttaa

SEQ ID NO: 150281 - DNA, 2853 bp, Homo sapiens; identical to SEQ ID NO: 118426

SEQ ID NO: 150282 - DNA, 3090 bp, Homo sapiens; identical to SEQ ID NO: 129777

SEQ ID NO: 150283 - DNA, 3114 bp, Homo sapiens; identical to SEQ ID NO: 148868

SEQ ID NO: 150284 - DNA, 2745 bp, Homo sapiens; identical to SEQ ID NO: 128662

SEQ ID NO: 150285 - DNA, 3477 bp, Homo sapiens
atgggagactttaacaccccactgtcaacattagacagatcaacgagacagaaagtcaacaaggatacccaggaattgaactcagctctgcaccaagcagacttaatagacatctacagaactctccaccccaaatcaacagaatatacatttttttcagcaccacaccacacctattccaaaattgaccacatagttggaagtaaagctctcctcagcaaatgtaaaagaacagaaattataacaaactatctctcagaccacagtgcaatcaaactagaactcaggattaagaatctcactcaaagccgctcaactacatggaaactgaacaacctgctcctgaatgactactgggtacataacgaaatgaagacagaaataaagatgttctttgaaaccaacgagaacaaagacaccacataccaaaatctctgggacgcattcaaagcagtgtgtagagggaaatttatagcactaaatgcctacaagagaaagcaggaaagatccaaaattgacaccctaacatcacaattaaaagaactagaaaagcaagagcaaacacattcaaaagctagcagaaggcaagaaataactaaaatcagagcagaactgaaggaaatagagacacaaaaagcccttcaaaaaatcaatgaatccaggagctggttttttgaaaggatcaacaaaattgatagaccgctagcaagactaataaagaaaaaaagagagaagaatcaaatagacacaataaaaaatgataaaggggatatcaccaccgatcccacagaaatacaaactaccatcagagaatactacaaacacctctacgcaaataaactagaaaatctagaagaaatggatacattcctcgacacatacactctcccaagactaaaccaggaagaagttgaatctctgaatagaccaataacaggctctgaaattgtggcaataatcaatagtttaccaaccaaaaagagtccaggaccagatggattcacagccgaattctaccagaggtacaaggaggaactggtaccattccttctgaaactattccaatcaatagaaaaagagggaatcctccctaactcattttatgaggccagcatcattctgataccaaagccgggcagagacacaaccaaaaaagagaattttagaccaatatccttgatgaacattgatgcaaaaatcctcaataaaatactggcaaaccgaatccagcagcacatcaaaaagcttatccaccatgatcaagtgggcttcatccctgggatgcaaggctggttcaatatacgcaaatcaataaatgtaatccagcatataaacagagccaaagacaaaaaccacatgattatctcaatagatgcagaaaaagcctttgacaaaattcaacaacccttcatgctaaaaactctcaataaattaggtattgatgggacgtatttcaaaataataagagctatctatgacaaacccacagccaatatcatactgaatgggcaaaaactggaagcattccctttgaaaactggcacaagacagggatgccctctctcaccgctcctattcaacatagtgttggaagttctggccagggcaatcaggcaggagaaggaaataaagggtattcaattaggaaaagaggaagtcaaattgtccctgtttgcagacgacatgattgtttatctagaaaaccccattgtctcagcccaaaatctccttaagctgataagcaacttcagcaaagtctcaggatacaaaatcaatgtacaaaaatcacaagcattcttatacaccaacaacagacaaacagagagccaaatcatgagtgaactcccattcacaattgcttcaaagagaataaaatacctaggaatccaacttacaagggatgtgaaggacctcttcaaggagaactacaaaccactgctcaaggaaataaaagaggacacaaacaaatggaagaacattccatgctcatgggtaggaagaatcaatattgtgaaaatggccatactgcccaaggtaatttacagattcaatgccatccccatcaagctaccaatgactttcttcacagaattggaaaaaactactttaaagttcatatggaaccaaaaaagagcccgcatcgccaagtcaatcctaagccaaaagaacaaagctggaggcatcacactacctgacttcaaactatactacaaggctacagtaaccaaaacagcatggtactggtaccaaaacagagatatagatcaatggaacagaacagagccctcagaaataatgctgcgtatctacaactatctgatctttgacaaacctgagaaaaacaagcaatggggaaaggattccctatttaataaatggtgctgggaaaactggctagccatatgtagaaagctgaaactggatcccttccctacaccttatacaaaaatcaattcaagatggattaaagatttaaacgttagacctaaaaccataaaaaccctagaagaaaacctaggcattaccattcaggacataggcgtgggcaaggacttcatgtccaaaacaccaaaagcaatggcaacaaaagccaaaattgacaaatgggatctaattaaactaaagagcttctgcacagcaaaagaaactaccatcagagtgaacaggcaacctacaaaatgggagaaacttttcgcaacctactcatctgacaaagggctaatatccagaatctacaatgaactcaaacaaatttacaagaaaaaaacaaacaaccccatcaaaaagtgggcgaaggacatgaacagacacttctcaaaagaagacatttatgcagccaaaaaacacatgaagaaatgctcatcatcactggccatcagagaaatgcaaatcaaaaccactatgagatatcatctcacaccagttagaatggcaatcattaaaaagtcaggaaacaacaggaaggaggaaaaaggtgctagagatataaacaaacaattcacagaagaagcaacactgatggctaatcaacctatgaaaaggtgtttaaccttcccagcaatcacagagaggcaaacacctgctctttcaccccagccacatggaatctttttggtcaacctgataaaagcatttattgcctcacctgtgtctgtgcagccatctagagttctaatggccctcagacccacaaccccagtgcaggtgtgcaataaagaagcaggcaacatggcgctggccaggacttcaggctccctggagctgaagggtttccaaggacaaacaaacccatgtggacaaacccatggggacatgaccatgtgcggaagcctggaccgacttgctgggctctacctgctgcaggccctggcacggtacctgaaaaatgaaaggatccacttccaagatgcttcgctcatgtcaatgtcagcaggaagactcagttcctcaccagcagctccttcaaaggctgcttga

SEQ ID NO: 150286 - DNA, 3264 bp, Homo sapiens; identical to SEQ ID NO: 131637

SEQ ID NO: 150287 - DNA, 3783 bp, Homo sapiens; identical to SEQ ID NO: 120170

SEQ ID NO: 150288 - DNA, 3471 bp, Homo sapiens; identical to SEQ ID NO: 118079

SEQ ID NO: 150289 - DNA, 3783 bp, Homo sapiens; identical to SEQ ID NO: 120174

SEQ ID NO: 150290 - DNA, 2880 bp, Homo sapiens; identical to SEQ ID NO: 116376

SEQ ID NO: 150291 - DNA, 3129 bp, Homo sapiens; identical to SEQ ID NO: 142408

SEQ ID NO: 150292 - DNA, 3245 bp, Homo sapiens
gtgcctctattcataatctacggttcctcatcctcatgaggacagcagaacccaaatatcacaggctctcagcagaacaccaggcgatcctgcaacatggattctcttcttctgaaccaggagcaattggactcggggaaacagaaccatgctgtggacagcagcctctgcatctccaaagaatgcagaaaacattccatctctcctcttccctacaagaccacagtgcaatcaaactagaactcaggattaagaatctcactcaaagccgctcaactacatggaaactgaacaacctgctcctgaatgactactgggtacataacgaaatgaaggcagaaataaagatgttctttgaaaccaacgagaacaaagacaccacataccagaatctctgggacgcattcaaagcagtgtgtagagggaaatttatagcactaaatgcctacaagagaaagcaggaaagatccaaaattgacaccctaacatcacaattaaaagaactagaaaagcaagagcaaacacattcaaaagctagcagaaggcaagaaataactaaaatcagagcagaactgaaggaaatagagacacaaaaaacccttcaaaaaatcaatgaatccaggagctggttttttgaaaggatcaacaaaattgatagaccgctagcaagactaataaagaaaaaaagagagaagaatcaaatagacacaataaaaaatgataaaggggatatcaccaccgatcccacagaaatacaaactaccatcagagaatactacaaacacctctacgcaaataaactagaaaatctagaagaaatggatacattcctcgacacatacactctcccaagactaaaccaggaagaagttgaatctctgaatagaccaataacaggctctgaaattgtggcaataatcaatagtttaccaaccaaaaagagtccaggaccagatggattcacagccgaattctaccagaggtacaaggaggaactggtaccattccttctgaaactattccaatcaatagaaaaagagggaatcctccctaactcattttatgaggccagcatcattctgataccaaagccgggcagagacacaaccaaaaaagagaattttagaccaatatccttgatgaacattgatgcaaaaatcctcaataaaatactggcaaaccgaatccagcagcacatcaaaaagcttatccaccatgatcaagtgggcttcatccctgggatgcaaggctggttcaatatacgcaaatcaataaatgtaatccagcatataaacagagccaaagacaaaaaccacatgattatctcaatagatgcagaaaaagcctttgacaaaattcaacaacccttcatgctaaaaactctcattaaattaggtattgatgggacgtatttcaaaataataagagctatctatgacaaacccacagccaatatcatactgaatgggcaaaaactggaagcattccctttgaaaactggtacaagacagggatgccctctctcaccgctcctattcaacatagtgttggaagttctggccagggcaatcaggcaggagaaggaaataaagggtattcaattaggaaaagaggaagtcaaattgtccctgtttgcagacgacatgattgtttatctagaaaaccccatcgtctcagcccaaaatctccttaagctgataagcaacttcagcaaagtctcaggatacaaaatcaatgtacaaaaatcacaagcattcttatacaccaacaacagacaaacagagagccaaatcatgagtgaactcccattcacaattgcttcaaagagaataaaatacctaggaatccaacttacaagggatgtgaaggacctcttcaaggagaactacaaaccactgctcaaggaaataaaagaggacacaaacaaatggaagaacattccatgctcatgggtaggaagaatcaatatcgtgaaaatggccatactgcccaaggtaatttacagattcaatgccatccccatcaagctaccaatgactttcttcacagaattggaaaaaactactttaaagttcatatggaaccaaaaaagagcccgcatcgccaagtcaatcctaagccaaaagaacaaagctggaggcatcacactacctgacttcaaactatactacaaggctacagtaaccaaaacagcatggtactggtaccaaaacagagatatagatcaatggaacagaacagagccctcagaaataatgccgcatatccacaactatctgatctttgacaaacctgagaaaaacaagcaatggggaaaggattccctatttaataaatggtgctgggaaaactggctagccatatgtagaaagctgaaactggatcccttccttacaccttatacaaaaatcaattcaagatggattaaagatttaaacgttagacctaaaaccataaaaaccctagaagaaaacctaggcattaccattcaggacataggcgtgggcaaggacttcatgtccaaaacaccaaaagcaatggcaacaaaagccaaaattgacaaatgggatctaattaaactaaagagcttctgcaccgcaaaagaaactaccatcagagtgaacaggcaacctacaacatgggagaaaattttcgcaacctactcatctgacaaagggctaatatccagaatctacaatgaactcaaacaaatttacaagaaaaaaacaaacaaccccatcaaaaagtgggcgaaggacatgaacagacacttctcaaaagaagacatttatgcagccaaaaaacacatgaaaaaatgctcatcatcactggccatcagagaaatgcaaatcaaaaccactatgagatatcatctcacaccagttagaatggcaatcattaaaaagtcaggaaacaacagaactcaccttgttgggacacccctgggctctgtcctcaaatctcttctctatccatattctctccctcagcaagtgtaccctgtcccacgactgcaaatgccaactgtaagtggaggctctcaaattcatgtatctatccttgacccctcaactgaacaaggtccagatccaaacatccatgtgccactcatgagctccacttcagtgtttagtatgtatccccagcttagcaggcccgaaagagagccgctgctttctgacagacgcacaaagcagctcagcaaacagcatctcccactccggctgctccagcaagacccttaa

SEQ ID NO: 150293 - DNA, 3288 bp, Homo sapiens
agacacacataggctcaaaataaaaggatggaggaagatctaccaagcaaatggaaaacaaaaaaaggcaggggttgcaatcctagtctctgataaaacagactttaaaccaacaaagatcaaaagagacaaagaaggccattacatgatggtaaagggatcaattcaacaagaggagctaactatcctaaatatgtatgcacccaatacaggagcacccagattcataaagcaagtcctgagtgacctacaaagagacttagactcccacacattaataatgggagactttaacaccccactgtcaacattagacagatcaacgagacagaaagtcaacaaggatacccaggaattgaactcagctctgcaccaagcagacctaatagacatctacagaactctccaccccaaatcaacagaatatacatttttttcagcaccacaccacagctattccaaaattgaccacatacttggaagtgaagctctcctcagcaaatgtaaaagaacagaaattataacaaactatctctcagaccacagtgcaatcaaactagaactcaggattaagaatctcactcaaagccgctcaactacatggaaactgaacaacctgctcctgaatgactactgggtacataacgaaatgaaggcagaaataaagatgttctttgaaaccaacgagaacaaagacacaacataccagaatctctgggacgcattcaaagcagtgtgtagagggaaatttatagcactaaatgcccacaagagaaagcaggaaagatccaaaattgacaccctaacatcacaattaaaagaactagaaaagcaagagcaaacacattcaaaagctagcagaaggcaagaaataactaaaatcagagcagaactgaaggaaatagagacacaaaaaacccttcaaaaaatcaatgaatccaggagctggttttttgaaaggatcaacaaaattgatagaccgctagcaagactaataaagaaaaaaagagagaagaatcaaatagacacaataaaaaatgataaaggggatatcaccaccgatcccacagaaatacaaactaccatcagagaatactacaaacacctctacgcaaataaactagaaaatctagaagaaatggatacattccttgacacatacactctcccaagactaaaccaggaagaagttgaatctctgaatagaccaataacaggagctgaaattgtggcaataatcaatagtttatcaaccaaaaagagtccaggaccagatggattcacagccgaattctaccagaggtacaaggaggaactggtaccattctttctgaaactattccaatcaatagaaaaagagggaatcctccctaactcattttatgaggccagcatcattctgataccaaagccgggcagagacacaaccaaaaaagagaattttagaccaatatccttgatgaacattgatgcaaaaatcctcaataaaatactggcaaaccgaatccagcagcacatcaaaaagcttatccaccatgatcaagtgggcttcatccctgggatgcaaggctggttcaatatacgcaaatcaataaatgtaatccagcatataaacagagccaaagacaaaaaccacattattatcaactggaagcattccctttgaaaactggcacaagacagcaacccttcatgctaaaaactcctattccatagtgttggaagttctggccagggcaatcaggcagaagaaggaaataaagggtattcaattaggaaaagaggaagtcaaattgtccctgtttgcagacgacatgattgtttatctagaaaaccccattgtctcagcccaaaatctccttaagctgataagcaacttcagcaaagtctcaggatacaaaatcaatgtacaaaaatcacaagcattcttatacaccaagaacagacaaacagagagccaaatcatgagtgaactcccattcacaattgcttcaaagagaataaaatacctaggaatccaacttacaagggatgtgaaggacctcttcaaggagaactacaaaccactgctcaaggaaataaaagaggacacaaacaaatggaagaacattccatgctcatgggtaggaagaatcaatatcgtgaaaatggccatactgcccaaggtaatttacagattcaatgccatccccatcaagctaccaatgactttcttcacagaattggaaaaaactactttaaagttcatatggaaccaaaaaagagcccgcatcgccaagtcaatcctaagccaaaagaacaaagttggaggcatcacactacctgacttcaaactatactacaaggctacagtaaccaaaacagcatggtactggtaccaaaacagagttatagatcaatggaacagaaaagagccctcagaaataacaccgcatacctacaactatctgatctttgacaaacctgagaaaaacaagcaatggggaaaggattccctatttaataaatggtgctgggaaaactggctagccatatgtagaaagctgaaactggatcccttccttacaccttatacaaaaatcaattcaagatggattaaagatttaaatgttagacctaaaaccataaaaaccctagaagaaaacctaggcattaccattcaggacataggcatgggcaaggacttcatgtccaaaacaccaaaagcaatggcaacaaaagccaaaattgacaaatgggatctaattaaactaaagagcttctgcacagcaaaagaaactaccatcagagtgaacaggcaacctacaacatgggagaaaattttcacaacctactcatctgacaaagggctaatatccagaatctacaatgaactcaaacaaatttacaagaaaaaaacaaacaaccccatcaaaaagtgggtgaaggacatgaacagacacttctcaaaagaagatatttatgcagccaaaaaacacatgaaaaaatgctcatcatcactggccatcagagaaatgcaaatcaaaaccactatgagatatcatctcacaccagttagaatggcaatcattaaaaagtcaggaaacaacaggtgctggagaggatgtggagaaataggaacacttttacactgttggtgggactgtaaactagttcaaccattgtggaagtcagtgtggcgattcctcagggatctagaactagaaataccatttgacccagccatcccattactgggtatatacccaaatgactataaatcatgctgctataaagacacatgcacac

SEQ ID NO: 150294 - DNA, 3407 bp, Homo sapiens
atggtaaagggatcaattcaacaagaggagctaactatcctaaatatttatgcacccaatacaggagcacccagattcataaagcaagtcctgagtgacctacaaagagacttagactcccacacattaataatgggagactttaacaccccactgtcaacattagacagatcaatgagacagaaagtcaacaaggatacccaggaattgaactcagctctgcaccaagcagacctaatagacatctccagaactctccaccccaaatcaacagaatatacatttttttcagcaccacaccacacctattccaaaattgaccacatagttggaagtaaagctctcctcagcaaatgtaaaagaacagaaattataacaaactatctctcagaccacagtgcaatcaaactagaactcaggattaagaatctcactcaaagccgctcaactacatggaaactgaacaacctgctcctgaatgactactgggtacataacgaaatgaaggcagaaataaagatgttctttgaaaccaacgagaacaaagacaccacataccagaatctctgggacgcattcaaagcagtgtgtagagagaagtttatagcactaaatgcctacaagagaaagcaggaaagatccaaaattgacaccctaacatcacaattaaaagaactagaaaagcaagagcaaacacattcaaaagctagcagaaggcaagaaataactaaaatcagagcagaactgaaggaaatagagacacaaaaaacccttcaaaaaatcaatgaatccaggagctggttttttgaaaggatcaacaaaattgatagaccgctagcaagactaataaagaaaaaaagagagaagaatcaaatagacacaataaaaaatgataaaggggatatcaccaccgatcccacagaaatacaaactaccatcagacaatactacaaacacctctatgcaaataaactagaaaatctagaagaaatggatacattcctcgacacatacactctcccaagactaaaccaggaagaagttgaatctctgaatagaccaataacaggctctgaaattgtggcaataatcaatagtttaccaaccaaaaagagtccaggaccagatggattcacagccgaattctaccagaggtacaaggaggaactgcatcattctgataccaaagcctggcagagacacaaccaaaaaaagagaattttagaccaatatccttgatgaacattgatgcaaaaatcctcaataaaatactggcaaaacgaatccagcagcacatcaaaaagcttatccaccatgatcaagtgggcttcatccctgggatgcaaggctggttcaatatacgcaaatcaataaatgtaacacagcatataaacagagccaaagacaaaaaccacatgattatctcaatagatgcagaaaaagcctttgacaaaattcaacaacccttcatgctaaaaactctcaataaattaggtattgatgggacgtatttcaaaataataagagctatctatgacaaccccacagccaatatcatactgaatgggcaaaaactggaagcattccctttgaaaactggcacaagacagggatgccctctctcaccactcctattcaacatagtgttggaagttctggccagggcaattaggcaggagaaggaaataaagggtattcaattaggaaaagaggaagtcaaattgtccctgtttgcagacaacatgattgtatatctagaaaaccccattgtctcagcccaaaatctccttaagctgataagcaacttcagcaaagtctcaggatacaaaatcaatgtacaaaaatcacaagcattcttatacaccaacaacagacaaacagagagccaaatcatgagtcaactcccattcacaattgcttcaaagagaataaaatacctaggaatccaacttacaagggatgtgaaggacctcttcaaggagaactacaaaccactgctcaaggaaataaaagaggatacaaacaaatggaaaaacattccatgctcagggggaaggaagaatcaatatcgtgaaaatggccatactgcccaagaattggaaaaaactactttaaagttcatatggaaccaaaaaagagctcacattgccaagtcaattctaaaccaaaagaacaaagctggaggcatcacactacctgacttcaaactatactacaaggctacagtaaccaaaacagcatggtactggtaccaaaacagagatatagatcaatggaacagaacagagccctcagaaataacgcagcatatctacagctatctgatctttgacaaacctgagaaaaacaagcaatggggaaaggattccctatttaataaatggtgctgggaaaactggctagccatatgtagaaagctgaaactggatcccttccttacaccttatacaaaaattaattcaagatggattaaagatttaaacgttagacctaaaaccataaaaaccctagaagaaaacctaggcattaccattcaggacataggcatgggcaaggacttcatgtccaaaacaccaaaagcaatggcaacaaaagacaaaattgacaaatgggacctagttaaactaaagagcttctgcacagcaaaagaaactaccatcagagtgaacaggcaacctacaaaatgggagaaaattttcgcaacctactcatctgacaaagggctaatatccagaatctacaatgaactcaaacaaatttacaagaaaaaaacaaacaaccccatcaaaaagtgggcaaaggacatgaacagacacttctcaaaagaagacatttatgcagccaaaaaacacatgaaaaaatgctcatcatcactggccatcagagaaatgcaaatcaaaaccactatgagataccatctcacaccagttagaatggcaatcattaaaaagtcaggaaacaacaggtgctggagaggatgtggagaaacaggaacgcttttacactgttggtgggactgtaaactagctcaaccattgtggaagtcagtgtggcgattcctcagggatctagaactagaaataccatttgacccagccatcccattactgggtatatacccaaatgactataaatcatgctgctataaagacacatgcacacgtatgtttattgcggcattattcacaatagcaaagacttggaaccaacccaaatgtccaacaattatagactggattaagaaaatgtggcacatatacaccatggaatactatgcagccataaaaaatgatgagttcgtgtcctttgtagggacatggatgaaattggaaatcatcattctcagtaaactatcacaagaacaaaaaaccacacaccgcatattctcactcataggtgggaattga

SEQ ID NO: 150295 - DNA, 7581 bp, Homo sapiens
atggtaaagggatcaattcaacaagaggagctaactatcctaaatatttatgcacccaatacaggagcacccagattcataaagcaagtcctgagtgacctacaaagatacttagactcccacacattaataatgggagactttaacaccccactgtcaacattagacagatcaacgagacagaaagtcaacaaggatacccaggaattgaaatcagctctgcaccaagcagacctaatagacatctacagaactctccaccccaaatcaacagaatatacatttttttcagcaccacaccacacctattccaaaattgaccacatagttggaagtaaagctctcctcagcaaatgtaaaagaacagaaattataacaaactatctctcagaccacagtgcaatcaaactagaactcaggattaagaatctcactcaaagccgctcaactacatggaaactgaacaacctgctcctgaatgactactgggtacataacgaaatgaaggcagaaataaagatgttctttgaaaccaacgagaacaaagacaccacataccagaatcgctgggacgcattcaaagcagtgtgtagagggaaatttatagcactaaatgcctacaagagaaagcaggaaagatccaaaattgacaccctaacatcacaattaaaagaactagaaaagcaagagcaaacacattcaaaagctagcagaaggcaagaaataactaaaatcagagcagaactgaaggaaatagagacacaaaaaacccttcaaaaaatcaatgaatccaggagctggttttttgaaaggatcaacaaaattgatagaccgctagcaagactaataaagaaaaaaagagagaagaatcaaatagacacaataaaaaatgataaaggggatatcaccaccgatcccacagaaatacaaactaccatcagagaatactacaaacacctctacgcaaataaactagaaaatctagaagaaatggatacattcctcgacacatacactctcccaagactaaaccaggaagaagtcgaatctctgaatagaccaataacaggatctgaaattgtggcaataatcaatagtttaccaaccaaaaagagtccaggactagatggattcacagccgaattctaccagaggtacaaggaggaactggtaccattccttctgaaactattccaatcaatagaaaaagagggaatcctccctaactcattttatgaggccagcatcattctgataccaaagctgggcagagacacaaccaaaaaagagaattttagaccaatatccttgatgaacattgatgcaaaaatcctcaataaaatactggcaaaccgaatccagcagcacatcaaaaagcttatccaccatgatcaagtgggcttcatccctgggatgcaaggctggttcaatatacgcaaatcaataaatgtaatccagcatataaacagagccaaagacaaaaaccacatgattatctcaatagatgcagaaaaagcctttgacaaaattcaacaacccttcatgctaaaaactctcaataaattaggtattgatgggacgtatttcaaaataataagagctatctatgacaaacccacagccaatatcatactgaatgggcaaaaactggaagcattccctttgaaaactggcacaagacagggatgccctctctcaccgctcctattcaacatagtgttggaagttctggccagggcaatcaggcaggagaaggaaataaagggtattcaattaggaaaagaggaagtcaaattgtccctgtttgcagacgacatgattgtttatctagaaaaccccatcgtctcagcccaaaatctccttaagctgataagcaacttcagcaaagtctcaggatacaaaatcaatgtacaaaaatcacaagcattcttatacaccaacaacagacaaacagagagccaaatcatgagtgaactcccattcacaattgcttcaaagagaataaaatacctaggaatccaacttacaagggatgtgaaggacctcttcaaggagaactacaaaccactgctcaaggaaataaaagaggacacaaacaaatggaagaacattccatgctcatgggtaggaagaatcaatatcgtgaaaatggccatactgcccaaggtaatttacagattcaatgccatccccatcaagctaccaatgactttcttcacagaattggaaaaaactactttaaagttcatatggaaccaaaaaagagcccgcatcgccaagtcaatcctaagccaaaagaacaaagctggaggcatcacactacctgacttcaaactatactacaaggctacagtaaccaaaacagcatggtactggtaccaaaacagagatatagatcaatggaacagaacagagccctcagaaataatgccacatatctacaactatctgatctttgacaaacctgagaaaaacaagcaatggggaaaggattccctatttaataaatggtgctgggaaaactggctagccatatgtagaaagctgaaactggatcccttccttacaccttatacaaaaatcaattcaagatggattaaagatttaaacgttagacctaaaacaataaaaaccctagaagaaaacctaggcattaccattcaggacataggcgtgggcaaggacttcatgtccaaaacaccaaaagcaatggcaacaaaagccaaaattgacaaatgggatctaattaaactaaagagcttctgcacagcaaaagaaactaccatcagagtgaacaggcaacctacaacatgggagaaaattttcgcaacctactcatctgacaaagggctaatatccagaatctacaatgaactcaaacaaatttacaagaaaaaaacaaacaaccccatcaaaaagtgggcgaaggacatgaacagacacttctcaaaagaagacatttatgcagccaaaagacccatgaaaaaattctcatcatcactggccatcagagaaatgcaaatcaaaaccactatgagatatcatctcacaccagttagaatggcaatcattaaaaagtcaggaaacaacagacatggtaggccaactgtgagcaaaaccttgagcaaagtgctgtggcccggtgcttcccaaacatcacattggccacctaaaatcccccagaagccttccaaacacagctctctgggtcccattcccagaagttttgacaagagaatctgtatgtttaacaagccacccagtaagaggcagttatctgggggatttctaccagatgtacagggttacgtgagactatttgtaccttatcaaccaaaacaagacagaatcaagaagttccacatccacgttgtgtgtcaggggagagttgggggtgggaggagaaccaagaaccttaacgcacccacaaggagaataaataaggaaaaagcagcacctaaacaaatcacagccaaactgctgaaaagcagcgctttgaagagagtagtggctctcccagaacggagtgtgagatctgagaacggacagactgcttccttaagtgggcccctgccccctgagtatcctaactgggagacacctcccagacaccatcatcaaagaccaaaggtagataaaaccacaaaggtggggagaatccagagcagaaaagctgaaaattctaaaaatcagagcgcctcttctcctccaaaggatcacagctcctcaccagcaatggaacaaacctggacggagaatgactttgacgagttgacagaagtaggcttcagaagatcggtaataacgaacttctccgagctaaagaaggatgttcgaacccattgcaaagaagctaaaaaccttgaaaaaagattacacgaatggctgactagaataaagagcgtagagaagaccttaaaggacctgatggagctgaaaaccatggcacaaaaactatgtgacgcatgcacaagcttcaggagccaatccgatcaagtggaagaaagggtatcagtgattaaagatcaaatgaatgaaatgaagcgagaagggaagtttagagaaaaaagaataaaaagaaatgagcaaagcctccaagaaatatgggactatgtgaaaagaccaaatctacgtctgattggtgtacctgaaagtgatgtggagaatggaaccaagttggaaaacactctgcaggatattatccaggagaacttccccaatctagcaaggcaggccaacgttcagattcaggaaatacagagaatgccacaaagatactcctcgagaagagcaactccaagacacataattgtcagattcaccaaagttgaaatgaaggaaaaaatgttaagggcagccagacagaaagcaccacaccacacctattccaaaattgaccacatagttggaagtaaagctctcctcagcaaatgtaaaagaacagaaattataacaaactatctctcagaccacagtgcaatcaaactagaactcaggattaagaatctcactcaaagccgctcaactacatggaaactgaacaacctgctcctgaatgactactgggtacataacgaaatgaaggcagaaataaagatgttctttgaaaccaacgagaacaaagacaccacataccagaatctctgggacacattcaaagcagtgtgtagagggaaatttatagcactaaatgcctacaagagaaagcaggaaacatccaaaattgacaccataacatcacaattaaaagaactagaaaagcaagagcaaacacattcaaaagctagcagaaggcaagaaataactaaaatcagagcagaactgaaggaaatagagacacaaaaaacccttcaaaaaatcaatgaatccaggagctggttttttgaaaggatcaacaaaattgatagaccgctagcaagactaataaagaaaaaaagagagaagaatcaaatagacacaataaaaaatgataaaggggatatcaccaccgatcccacagaaatacaaactaccatcagagaatactacaaacacctctacgcaaataaactagaaaatctagaagaaatggatacattcctcgacacatacactctcccaagactaaaccaggaagaagttgaatctctgaatagaccaataacaggctctgaaattgtggcaataatcaatagtttaccaaccaaaaagagtccaggaccagatggattcacagccgaattctaccagaggtacaaggaggaactggtaccattccttctgcaactattccaatcaatagaaaaagagggaatcctccctaactcattttatgaggccagcatcattctgataccaaagccgggcagagacacaaccaaaaaagagaattttagaccaatatccttgatgaacattgatgcaaaaatcctcaataaaatactggcaaaccgaatccagcagcacatcaaaaagcttatccaccatgatcaagtgggcttcatccctgggacgcaaggctggttcaatatacgcaaatcaataaatgtaatccagcatataaacagagccaaagacaaaaaccacatgattatctcaatagatgcagaaaaagcctttgacaaaattcaacaacccttcatgctaaaaactctcaataaattaggtattgatgggacatatttcaaaataataagagctatctatgacaaacccacagccaatatcatactgaatgggcaaaaactggaagcattccctttgaaaactggcacaagacagggatgccctctctcaccgctcctattcaacatagtgttggaagttctggccagggcaatcaggcaggagaaggaaataaagggtattcaattaggaaaagaggaagtcaaattgtccctgtttgcagacgacatgattgtttatctagaaaaccccatcgtctcagcccaaaatctccttaagctgataagcaacttcagcaaagtctcaggatacaaaatcaatgtacaaaaatcacaagcattcttatacaccaataacagacaaacagagagccaaatcatgagtgaactcccattcacaattgcttcaaagagaataaaatacctaggaatccaacttacaagggatgtgaaggacctcttcaaggagaactacaaaccactgctcaaggaaataaaagaggacacaaacaaatggaagaacattccatgctcatgggtaggaagaatcaatatcgtgaaaatggccatactgcccaaggtaatttacagattcaatgccatccccatcaagctaccaatgactttcttcacagaattggaaaaaactactttaaagttcatatggaaccaaaaaagagcctgcatctccaagtcaatcctaagccaaaagaacaaagctggaggcatcacactacctgacttcaaactatactacaaggctacagtaaccaaaacagcatggtactggtaccaaaacagagatatagatcaatggaacagaacagagccctcagaaataatgccacatatctacaactatctgatctttgacaaacctgagaaaaacaagcaatggggaaaggattccctatttaataaatggtgctgggaaaactggctagccatatgtagaaagctgaaactggatcccttccttacaccttatacaaaaatcaattcaagatggattaaagatttaaacgttagacctaaaaccataaaaaccctagaagaaaacctaggcattaccattcaggacataggcgtgggcaaggacttcatgtccaaaacaccaaaagcaatggcaacaaaagccaaaattgacaaatgggatctaattaaactaaagagcttctgcacagcaaaagaaactaccatcagagtgaacaggcaacctacaacatgggagaaaattttcacaacctactcatctgacaaagggctaatatccagaatctacaatgaactcaaacaaatttacaagaaaaaaacaaacaaccccatcaaaaagtgggcgaaggacatgaacagacacttctcaaaagaagacatttatgcagccaaaaaacacatgaagaaatgctcatcatcactggccatcagagaaatgcaaatcaaaaccactatgagatatcatctcgcaccagttagaatggcaatcattaaaaagtcaggaaacaacagcaaaatggtggaagcagatgggcctggcaatcttttcactggtgtcctccatttagaaaccaatgaaaagtcgcttaaagcagtatttgggaaatatggtcccatattggaagacaactttttggatggaaaagcaatgaaagtagaacaagttaacaaaccgtcttttcaaagtggtggtaatgtggagatcaccatcttcttggagaaacaggagcccttcaggaagtctgagacaggaaaaaaattttttaagttgttcctgctgacattagcaaacttttttaaatttagtgaccatgatgactatagtgggggccttggtagagatcattctgaacatccaaatgggagttcttacagagatgcatatcagagttatgggaccttctatggtgcaccacctgcatga

SEQ ID NO: 150296 - DNA, 20138 bp, Homo sapiens
tcagaaacagataatccgcttctcatcttcatagactttggcctcctctggttttatcaggtttccatttaggctgttgaaaaggaggaagacaaaagtacacaggtaaaatgttaaggatcctcgcacactccttcccaaggtgtgttcatagcacacactcgtgtatcacacaatacacatgtatccctgaaattaaggaacataccctttgcagatagttccttcatattagcatggatcctctccagctgccatccctctgttcactgggtctcactaaggtcacctgtagcctccataagcctgaatttaatgacattttccaggtcttgtctttcttggccctcaggattttggctgtcctgacctctcctctccctccttcttgaggcactccctccccttggcttggttatatgcgctgatttttctcctgcatctgagcactctacttcaatttcctttcctatattctcctccatgtgacctctacatctgagatttcctccaggtttggggctaagcccttttccccacccgatctcatcaatgccacggccttgtttgtatgtccgtggaggcagttacctgcttggcatcctcacttggacctctcccccacacctcaaagtagccacacctcctagggtcccctggcttagtgaatggaccactctcatcctgctgagcaggttagtaacctgggggtcaacctggacaccttccttctcatccccatgttccttgtatcacaaagttctcccctaattcctaagaatctagaatgcctccctggaacctctatgtctttggccggccatcttggtctgagcacccatcatctcttccctgcatcagtacaatgtcctactgacaggtcatttccacgtactctggccttctccaattcagtttcctagaagagccaagaattggtctttttgcattgcagatctgatcacatgcctctcctgcttcaaactgttcactgactttccatcacttttaggataaagaccaaaatgcacatcatgacccacagatcttttatggtccagtccctgcctatctcctcagcctcctgtagtcccctcttccacactgtctgaaccctggggcacagcagcttctggcagttcttccaggacaccacactccctcctgccccagaccctttgcacatgctgttccctacgcagaatactcacctcagctgactagctcctattcatccttcatggcttagtgtaagtgctgcttcctcagagaggccttccctgcaacctcatctaaatcaggttccctcttggccttcccctttgtgatagtacccatcacagttgtaattaaataattacgcaaatgattttttctttaatgtgcttctccctttctagacagtgaacccatgaagccatgttgttcaccactggatttttggtgctagcacagtccctgatgctcaagcgtttcgttattcaaggaataaatgaagacacagcactagtccctaggaccttgactcaggccccaccctcccagagccacagtctggaggagatagcctcacagaaagctgttatactggagtgggatacatttctgtaatttacagtgttcattgttcacctctaatttctgttcttaaagacagaactcatcaagggacttcagacttccaagttattttcagaaaggaatgaggtagaaataagtgtcagtacagttaacaagtccaaggagaaggcttactctgtaagtgttggctccaagcagagctgctccctgaacgtggctccccggccagctcaaccacaaccctgtggcctggtgtggcagtccctggcagggccaacaaagccacagccttctcagagcccagtcccatgaagtcacacacagaggagcatgctctggaggctcccagaacaagccagggacctaagtgaagacactcccaagaccagcacccatgccgcctgtcctgccctctctgaattggtggccagttcccctctccaccctgacacaagtgcaggccttgaagctgaagtctcctggccctactaaaatggttccttgtgtaggaatggtgaccctcaagagggaagcaatgcagattttgaaacttgacagaattaaagcaactgtaggtctttactacccgcctgaccagctacagagaaaagtggaagccaactgtgctctgcaaactgttctgtagtctggcagtctccttcctctccccctctgcctgctgtcctcaaaacttaagaatcagcagaaacggagtggcctgagggcaaacacccatgcaaacagttccagtgccctccagtgcttcccaggctgctgggcaggctgggcttcgcaggcacacaggccacaggtgtctgtttagatctgggctctattctctatgatggtgtttttctttttttcttttttgttttttgagacagggtctctggcacccaggctggattgcagtggcatgatcctggctcactgcagccttgatctcccatgcatccatcctcccacatcagcttcctgagtagctgggactacaggcacatagcaccatgtcgggctaatttttgtagtgacggggtttcgcatgttgcccaggctggtctcaaactcctgtgctcaagagatctgcccatcttggcctcccaaagtgctggtattacaggcatgagccaccatgcctagccaacagtgttttttttaaaaaaaaaccttttgtctacaaccctaaataagaattacattttatgttgtgaaccaacacttatgcaaacacacacccactcacatgcaagcatgaactaagatgaatgaaatgatactttcataccatgcacattgcatcctgatattttgttctgttctgttttctttttaaatattgttggttgcaattcaccaaactgatcgattttatgacaagttccaaacaagttctaaagcaaagtttaaaaaacactgtatgaggagcctgtgttggccaaggagctgttttttgtttttttttaattggctatgaaattctccccagtcatgaaaggaggacatagttaataaggcccctctcccagcatccacccagtcccacgtcacccaggcaattaagttgttaagggagctgctgagtggggagtgtctgtgccttatgggaggcaagaaagaagtggcatggcgctcaatgtcacagtaaagcaaactttttttcttctattagcataaggaagttctcaaagcagaaaaaagaagtagacaaagagcacaggtcagttcaagtcagcctggaaatgtcttacggaacccagaaaaggggaagaatgagctccaaactcctggccaacacagtcatctctcaattgctgagtcccagggggatttacttccactaggaaatcatttcactggccacttcccccatcccacccaatgaaggtagatgagggcgggggcccagggcaggagagcacagaatatggaatcaggcattctgggctgaattctagcttctctcgtagtgaccttgggcaaccttatttcactggtctgggcctctgtctacctctgtaaaacagaggtaataccattactgtgcagggttgctggaggaataaacagaaaccaccctgcgttgtgccttgcacagtcagtggtggtgagtaaacagtcactggtgttattactgtgacaaacgctgggatcttaccaaatctctgttatgccagtgttgctctgtaacgcatctgccagctgggcagtccccttagctgtgatctgattctggataagcctgaaagaagaacataacttgtataaaatccataatactggatcaaatttgaccccttcgtaagggagttgcaagggtgttttgggataagagacaagttggtcaggggaagaactgagtccatgtgactttgtatctggctaaaagtgtccaggtaagatccactagagtaaaggatagcttgatattttttaaattttctgtttgtttttatagtgaacataatgtaatacatgaactgatgtgtgtgtttgcatttttcactgcagaggtgcataatcaaaatatttggggccgggtgcagtggctcacacctgtaatcccagcactttgggaggccgaggtgggtggatcacgagctcaggagatcgataccatcctggccaacctgtctctattaaaaatacaaaaaaattagctgggcatggtggtgtgcacctgtactcccagctactcgggagactgaggtaggagaattgcttgaactgggaggtggaggttgcagtgagccaagatcgtgccactgcactccagcctgggtgacagagtgagactccatttatatttttatatatatttgggagaccaccaatctgaacaacaaattgtaagaaacacaccatgggacaggaagtctgacgtctccttccaggtagctagggaaaggcaaggcaggttttaaagttaagaggctaccaacatgcaagagggagggaggagaaacagttatgctgccatgaaatagttctcatgaatagttctcatggggctcagtggaaaagctttaataatggggactctgagaatgcaccccattgttctgggtagcagtgattcaaatgaaacaaagttttcagctatcgctaggaagccaggcctctcctgaaatgctcccttgggcagctacgcttctaacccaaccaggaaataaatgcatcaagaggctgtagtgtctccgcttcatcacagagtcattccctgctcctggctgtttgtagaataggctcctgctaaacatgacccttagaaatcctggcactgacccaagaaggaagcccttaccaggaagacgagggccctatgctgtcatgaatgaagaggactccctcgtgagaggcagtattgcagagcgggtgcagctcctcttaaaccctccctccccactgttcagctacagaaccttgaagaaataaacgcatctgtctgtgcctcagttgtgtcatctgtaaactgagaataactataagagtgccccccatccactgggtgtgtgagatttcaagaggagggtattaggcacagtgtccagggggaagggagctcttgtcactgttactgcccaagcacacaggaccactggtggctgggctgcagccaggatctggtgctcccagccataccccacaagggctagggcccctgggttcaatggcagaggtaatgaccttccctttcaaaagggacaaaaatagaaccaggaagtgggcaccaagttctgtattcagttacactctgctgttttctagtcaccacttaggcttttttgaaggcagggaaggcagcctccaaccaagatgtggcaggaggccaggaaggagagcacctaatgcccctaaaaagcctgcagtgtccaggcacatccacccactcgggctgccttcactagggccagtgcaggttgggaatgcacaaagcagccaagactctctttctgaccctgtcctagctctgctctccctggagaggctggcctgcacttagggaatgggatcaaataattctgcaggctaaaaaggaaagaaaaaacaatatgtagcagagtctagtctttttgcagaaattgacaaggtgagtctgaattcataagaaatgcaaagaacccagaatggtctaaacaatcttgagaaagaagaacaaagtagaactcacacctcctgatttcaaaatgtactacacaaagctacagcaatggtcctggcataggagagacatataaatcaatggaccagaacagagaattcagaaataaacccatacatttatggtcaattgatttttgacaagggtgtcaaggccattcaataggaaaagataatctgttcaacacgtggtgctgccgggacagctggatatccacgtgcaagagaatgaggttaaccctcactttacactatacaaaaattaactcaaaatggattgcagacctatatgtgaggggaaacaactataacgcttaacagaaaacttaggtggagttctttgtgatcttggattaggcaatcatttcttagataagacactgaaagcacaagcaaccaaagaaaaaaatagataaattggacttcatcaaaattaaaaactattggccaggtgcagtggcttttcgcctgtaatcccagcactttgggaggctgaggcaggtggatcacctgaggtcaggagttcaagaccagcctgggcctaaatggtgaaaccccatctctattaaaaatacaaaatgagacaggcatggtggctgatgcctgtaatcccaactactcaggaggctgaggcagaagaatcgcttgaacccaggaggtggaggttgcagagagctgagatcatgccactgcactcctgtctgggtgacaagagcaagactccatctcaaaaaaaacaaaaattaaaaactgttgtcctttaaaggtcactatcaagaaagaggaaaaactccacagaaagaaagaaaatacttgcaaaacctgtatctagtaaaggtctagcacccagaatatatagagaacccctataactcagcattagaagacaaacccaattttaaaatgggcaaaggatatggagacatttctccaaagaagctatacagactcccagtaggcacataaaaagacattcaacattgttgtcatcagggaaatgcaaatcaaaaccacaatattacttcacatccactagtataactagattttaaaagatggacaataataagtgttggtgaggatgtggagaaattggaatccacatacattgctggcgagaatgtaaaatagtacatccactttagaaaacagtttggtggctcctcaaaaagttacagaattgccatatgacccagaaattctattcccaggtatattcccaaaagagatgaaaacatatgttcacccaaaagcatgaacaggagtgttcacagtagcattacgcataatagtcaaaaagtagaaacaacccaaatgtcccatcaactgattaataaactgcaaaatttccttagagtgaattatcatttagccataaaaaggaatgaaacatgctagaacacagagacaaaaggtcacatattgcttgattccatttatatgaaatgcccagagtaggcaaatccatagagacagaaagcggattagtggttgccagggtctggggaggaggacagggagtgactgcttaatggataccagggctttttggagtggggaggaggagtgaaaatgttctagaattaggtggtgatggttgcactaaaaacctctgaattgtatactttaagagagtgaattttacagtatgtaaattttatctcaaaaaatacttttgaaaagtagcacagtctgaaattgtaaggctctctgagttaccataaatgctttaacgtctggttgactttcaacatttctgccaaactctctgccacttcatcgttgagttcattttgggtcagcctaaggaaaaaaaaggaagtatttactcaagagagcctacttggcagacattgttttagagttcacaggagcgggagctcagcccaaggctctccagctatgcagatgatcacttgctgagaacccagaaaacagccaggctccaagcccagcctgtcagccccacagaaggtcaatgggactcatttttaatgcaaatcctgtacctgggctcctatttcttagcccagctacctgtagaggagcccaccctccctccccacctttgctgagccctcagatttcatggaagatgggggcccacggaaaacaaagggccaatgcctgcttctcagttctcctctagtcccagggtcccttgaacaccactgacagtgtgttatccaagttagtttgaagacctgaaacagtcactgactgcacattaaaatgtgttcagtactttgctctcagttaacttgtgagggacccaagttaagtgactgaaagttcaggaagtctctcaatggtccttagaaccagaagtggtctggataaagcaccaaagctccttggtgtaaacagggtaggacccacttgtgccagtggacgaaagaatcattaggaagaagaatagaacagaaagaacatttaaaaaaaaaaattccttgaagggcagtttggatgtgcctgcccaaatttttaatgtgcttcattttaagacaatcagacttctagaaatttaccctacagtgtgcaaggatatacacacaaagctttatacattgcagcatgcattgtggtattatcctaatgtaaaatctgaacaaatttagatcagaaacaactgatgaaatatattgtgatatctattcgagatgttgtgcagcttgtagggagaatgaggtagaatgaggagggagaagaacacagcattgacatctactccggactcagcctgggcaggtttgtatcacccaccagcagggtgacctcgggcaacaggcttaagttctttgggtctgagttttctcactggtgaacgttaacagtagagatcgtatagagtggttgtgaggctgagtgagttaacacagggaaaaagtgtagaataacacatggcatgcagtcagcacttgagggcttctaggtgttgacattactactatccatgtgatttcactctccatggggcacctggccatgtccggaggcatttttgatcctcaccactgggaggtacagggcagagatgcggctaaaccgtctatgatgcacaggacagccctaccataataaagaatcacttggaccaaaatgtcaacagcatcaagatggagaaaccctaaaggagacatgtaaagtatgtgattacaatatttttagagccactgcttgaatgctattctgttttgcatatctttgaacatacatagaacaaaaggctagaaaggaaaggttattttggaaaacacaaagggaggtactttcacttcctccttttagcaggaactttaggaggtactttcatgtcctcctttagtgtcttacattttttccaaaaaacataaactacttttcaaaatgttaaatgatttgttgaggggaaagaatttaaaatgcacttactggacagcaggcctaatgtcaaaactctctcatgaagaggatattgtcattattctcagtaactaatttagcaagatcaaatgagcactgggctctgagtagatgatagggagggttgtaatacaactccctcacttaacctgtaaggaatgttttttttttttgtagatagagggtctcgctatattgcccaggctagtctcgaactcttggcctcaagcgatcctcccacctcagccttccaaagtactgggattacagatgtgagtcactgctcccagccacctgtatggaatttatgatacagagatgtaaatacaaataaagcaaaataaaacattaagtggccataaaaaagggaacaccaacaaaaaacactctcaggaggccacatccacttagtaagtgccctagagtgcagagagggagcgaggactgtgggcttcaggtgacaagtgacagatgagctggatggagcataaaggccaaaccctgatgtgaagacctggggaaggaggaggctgcctgggggaaggcagatgaagaggaggaagggagaaaattttgagccaagtgtgtggaagttggcctctgctaagcacatctgaaggtatccaaggatacctggatagcttgcatggccagcgttctagttctcctggggcctagaaggccaaggcctcagatccaggctcccggagcccacttcctcctcctgtacctgtttatgcttgtagaagtggctattctcttctctaggaggaaattatcaacttaactgaaaggcctagagcctttccaattgggagacaccttttctgttaagattccaggccatgtgcagcccctgggataattcctgggacctaaaccctccaaaatgactctgtgccaggtgcagtggctcacacctgcaatcccagggctttgagaagccagggcaggagaactgcttgagcccaggagttcaagaccagcctgggtaacatagcaaaaccccatctctacaaaaaattttaaaattaactgggtgtggtggtgcatgcctatagtctcaggactcggaaggccaaggcgggaggttcgaatgagcctgggaggtggaggctgcagtgagctgagatcacaccaatgcactcaagcctggacgacaaagcaagaccctatcacagaaaaacaaacaaacaaatgaaatgactcgagctattaccacagtatttctagagacgtgttctgctgcagggccctcgcaaggctctttcctccttctgtggagatgccgttggacgcaagactaggaaggaacacacttggggtgaattattaaagacacatctacattcaatcttagcttcaacatcagaacagctgggaagcctctgcctggctgtggccccagcccaggctcactcggggcaggatgcagaagtgttcagctgcagcagtagtgcccaggcgctgctgccccagagcccacacacagagcacaagggcaggctggacgggaaatgggtcatcagcacagcctgctcacacaacagtgggctggggtcggcacctcaggtttctgcacatgggcaggaggctggcgaggcctggcaagctgtccttctaaaggctggccccatcaaggtaccccatctgcaagacctggcaaagtctcttctgctactgtccccaccttcttggactctttttcagtggtaggaagaacagcagcagagccgtggacataccaaggtcccaagatttggccagcagcctaagcgggggctgggtaggtgcatccccatttatagagaggaagagtccctcttttccagcatcatcctgaggacaaggaaggggcaggaatctgctggccagcatcttattaagtttcatctgcacttaggaaaccctccctctaccagcaagggacatgcagggatggctgaggggctggaaatgtcctctgtcttgatgggggtggtggttggctggtgtgggacacatgcagaattcactgagctgaataaacacttaaggtgattcctcagggatctagaaccagaaataccatttgacccagcaatcccattactgggtatttacccaaaggattataaatcattctgctataaagacacaagcacatgtatgtttattgtagcactatttacaatagcaaagacttggaaccaacccaaatgcccatcagtgatagactggataaagaaaatgtggcacatacacactatggaatactatgcaaccataaaaaaaaatgagatcatgtcctttgctggcacatggatgaagctggaaaccatcattctcagcaaactaacacaggaacaaaaaaccaaacactgcatgttctcactcgtaagtgggagttgaacaatgagaacacatggacacatggaggggaacaacacacaccagggcctgttgggggtggggggcaaggggagggcaagcattaggacaaatacctaatgcatgcagggcttaaaacctagatgacaggttgataggtgcagcaaatcaccatggcatgcatttgcctatgtaacaaacctgcacatcttctacatgtatcccagaacttaaagttaaaaaaagagaagaatgtgctttactagatggcctcttatgcatcaaagaaaggtttgacaagagtaaggaaaatcacacatgcaaattcctcttctattaggagcacgaatcacccttccccagcaaacctagagcagctgggagggaccaggttggcccctggagacagcagggccacagttacctcagggtggtcaagctggggtggttccgcagagcctctgcgaaggcttttgctccttcatccccaacttgattgccccacatcctgagggaggagacaagatagtgaatgttagctccccaagaaacagccatgctcacccctccttttttgccaatggccacagctcagttcctactcaacaggcagatgtttgtgcccagtccctggatctgtggcctggacactaattcctcacactggtctctgagtgggctgctctggatttcaaattcaaggggtgatgcaagatcgaagagcaggggaagccttgtgaacagaggccatcggcaagtggcacagttagagaccgagcctcaccacgagcttcggagagctgtcagcccaggagcctgagctcatgagagaaagcacctgcatgtctcctgtggagcacagaggtgcgcagagtcctggagggaaggccgtgtgcaggtgctgggttcccagcatccgttcaactctgggcagggtcagagacattcctgaagacacagtcttccaggagacaaagagcaggaagtaccttcagaaaccccatcagcaacgttcctgtcacataaagaggacgttacccaaccaagctctgtggctacggccatcttggtggacaggtgcggcgataaagctgtattctgtcccctacagcagatccggagagtctctggctaaaacagtctgcgtggtaagatggtggactcctgacccggctctgccatctgctacctgtgtgaacttcgggaaattatgtagtctcttggacctcagttgccccatctataaaatggggataattagagcattccgtcatggagttgtgaggattcactgagttaacagaagcaaagcacttagaaccgtgtgtggctcacacaaagcgttggctgttcctaataggatcagcacacactgtctacacacaacagaacaagttcgtgtggcccactcacaacacaatggcagctgcctcaacaacacgttcacaccaagcaaactacctgcttacaccattccaggtatggcttgctggaacccagaataagagttttcagtgttttgcttacatatatgtatttactatacaattgaatggcatcacatttttaataaagtggaaagctactcaaggcatgagattaagtgaaaaaggaaggatacatatagtctcacccctactatagtatagatacatatagtctcacccctactatattttttaaaagttgtacaaagagagagaagggagagaaagtgagagagcttaactgagcttaaatgttaacaagaatcattttctgagaagataatttttattatttttcatagtttccaaataaaattacctgtgttccttttgtaatccaataaaaattataatgaaacaaaaagctttaaaaagcctcaagaatcaaaaccacaatgagacaggacctcacactcattaggatgggtactgtcaaaaagagaaaatagcaagtgttggcaaggatgtggagaaactagaatgaactgttggtgggaacataaaatggtgctgctgccgtggaaaacagtatgatgattcttcaaaaaattaaaaattaccatgtgatccagcaatcccactgctggatatatacccaaaagaattggagggaggagccaagatggccgaataggaacagctccggtctacagctcccagcgtgagcgacgcagaagacgggtgatttctgcatttccatctgaggtaccgggttcatctcactagggagcgccagacagtgggcgcaggccagtgtgtgcgcgcaccgtgcgcgagccgaagcagggcgaggcattgcctcacctgggaagcgcaagggatcagggagttccctttccgagtcaaagaaaggggtgacggacgcacctggaaaatcgggtcactcccacccgaatattgcgcttttcagaccggcttaagaaacggcgcaccacgagactatatcccacacctggccttcggagggtcctacgcccacggaatctcgctgattgctagcacagcggtctgagatcaaactgcaaggccgcagcaaggctgggggaggggcgcccgccattgcccaggcttgcttaggtaaacaaagcagccggggaagctcgaactgggtgcagcccaccacagctcaaggaggcctgcctgcctctgtaggctccacctctgggggcagggcacagacaaacaaaaagacagcagtaacctctgcagacttaaatgtccctgtctgacagctttgaagagagcagtggttctcccagcacgcagctggagatctgagaacgggcagactgcctcctcaagtgggtccctgacccctgacccccgagcagcctaactgggaggcaccccccagcaggggcacactgacacctcacacggcagggtattccaacagacctgcagctgagggtcctgtctgttagaaggaaaactaacaaacagaaaggacatccacaccgaaaacgcatctgtacatcaccatcatcaaagaccaaaagtagataaaaccacaaagatggggaaaaaacagaacagaaaaactggaaactctaaaacgcagagcacctctcctcctccaaaggaacgcagttcctcaccagcaacggaccaaagctggatggagaatgattttgacgagctgagagaagaaggcttcagacgctcaaattactctgagctacgggaggacattcaaaccaaaggcaaagaagttgaaaactttgaaaaaaatttagaagaatgtataactagaataaccaatacagagaagtgcttaaaggagctgatggagctgaaaaccaaggctcgagaactacgtgaagaatgcagaagcctcaggagccaatgcgatcaactggaagaaagggtatcagcaatggaagatgaaatgaatgaaatgaagcaagaagggaagtttagagaaaaaagaataaaaagaaacgagcaaagcctccaagaaatatgggactatgtgaaaagaccaaatctacgtctgattggtgtacctgaaagtgatgcggagaatggaaccaagttggaaaacactctgcaggatattatccaggagactttccccaatctagcaaggcaggccaacgttcagattcaggaaatacagagaacgccacaaagatactcctcgagaagagcaactccaagacacataattgtcagattcaccaaagttgaaatgaaggaaaaaatgttaagggcagccagagagaaaggtcgagttaccctcaaagggaagcccatcagactaacagcggatctctcggcagaaaccctacaagccagaagagagtgggggccaatattgaacattcttaaagaaaagaattttcaacccagaatttcatatccagccaaactaagcttcataagtgaaggagaaataaaatactttacagacaagcaaatgctgaccgattttgtcaccagcaggcctgccctaaaagagctcctgaaggaagcgctaaacatggaaaggaacaaccggtaccagccactgcaaaatcatgccaaaatgtaaagaccatcgagactaggaagaaactgcatcaactaacgagcaaaatcaccagctaacatcataatgacaggatcaaattcacacataacaatattaactttaaatgtaaatggactaaattctccaattaaaagacacagactggcaagttggataaagagtcaagacccatcagtgtgctgtattcaggaaacccatctcatgtgcagagacacacataggctcaaaataaaaggatggaggaagatctaccaagcaaatggaaaacaaaaaaaggcaggggttgcaatcctagtctctgataaaacagactttaaaccaacaaagatcaaaagagacaaagaaggccattacatgatggtaaagggatcaattcaacaagaggagctaactatcctaaatatgtatgcacccaatacaggagcacccagattcataaagcaagtcctgagtgacctacaaagagacttagactcccacacattaataatgggagactttaacaccccactgtcaacattagacagatcaacgagacagaaagtcaacaaggatacccaggaattgaactcagctctgcaccaagcagacctaatagacatctacagaactctccaccccaaatcaacagaatatacatttttttcagcaccacaccacagctattccaaaattgaccacatacttggaagtgaagctctcctcagcaaatgtaaaagaacagaaattataacaaactatctctcagaccacagtgcaatcaaactagaactcaggattaagaatctcactcaaagccgctcaactacatggaaactgaacaacctgctcctgaatgactactgggtacataacgaaatgaaggcagaaataaagatgttctttgaaaccaacgagaacaaagacacaacataccagaatctctaggacgcattcaaagcagtgtgtagagggaaatttatagcactaaatgcccacaagagaaagcaggaaagatccaaaattgacaccctaacatcacaattaaaagaactagaaaagcaagagcaaacacattcaaaagctagcagaaggcaagaaataactaaaatcagagcagaactgaaggaaatagagacacaaaaaacccttcaaaaaatcaatgaatccaggagctggttttttgaaaggatcaacaaaattgatagaccgctagcaagactaataaagaaaaaaagagagaagaatcaaatagacacaataaaaaatgataaaggggatatcaccaccgatcccacagaaatacaaaactaccatcagagaatactataaacacctctacgcaaataaactagaaaatctagaagaaatggacaaattcctcgacacatacaccctcccaagactaaaccaggaagaagttgaatctctgaatagatcaataacaggctctgaaattgaggcaataattaatagcttaccaaccaaaaaaagtccaggaccagacggattcacagccgaattctaccagaggtacaaggaggagctggtaccattccttctgaaactattccaatcaatagaaaaagagggaatcctccctaactcattttatgagtccagcagcatcctgataccaaagcctggcagagacacaaccaaaaaagagaattttagaccaatatcaccaatatccttgatgaacattgatgcaaaaatcctcaataaaatactggcaaaacgaatccagcagcacatcaaaaagcttatgcaccatgatcaagtgggcttcatccctgggatgcaaggctggttcaatatacgcaaatcaataaatgtaatccagcatataaacagagccaaagacaaaaaccacatgattatctcaatagatgcagaaaaggcctttgacaaaattcaacaacccttcatgctaaaaactctcaataaattaggtattgatgggacgtatttcaaaataataagagctatctatgacaaacccacagccaatatcatactgaatgggcaaaaactggaagcattccctttgaaaactggcacaagacagggatgccctctctcaccactcctattcaacatagtgctggaagtcctggccagggcaattaggcaggagaaggaaataaagggtattcaattaggaaaagaggaagtcaaattgtccctgtttgcagatgacatgattgtatatgtagaaaaccccattgtctcagcccaaaatctccttaagctgataagcaacttcagcaaagtctcaggatacaaaatcaatgtgcaaaaatcacaagcattcctatacaccaacaacagacaaacagagagccaaatcatgagtgaactcccattcacaattgcttcaaagagaataaaatacctaggaatccaacttacaagggatgtgaaggacctcttcaaggagaactacaaaccactgctcaaggaaataaaagaggatacaaacaaatggaagaacattccatgctcatgggtaggaagaatcaataccgtgaaaatggccatactgcccaaggtaatttacagattcaatgccatccccatcaagctaccaatgcctttcttcacagaattggaaaaaactactttaaagttcatatggaaccaaaaaagagcccgcattgccaagtcaatcctacgccaaaagaacaaagctggaggcatcacactacctgacttcaaactatactacaaggctacagtaaccaaaacagcatggtactggtaccaaaacagagatatagatcaatggaacagaacagagccctcagaaataacgccgcatatctacaactatctgatctttcacaaacctgagaaaaacaagcaatggggaaaggattccctatttaataaatggtgctgggaaaactggctagccatatgtagaaagctgaaactggatcccttccttacaccatatacaaaaatcaattcaagatggattaaagacttaaacgttagacctaaaaccataaaaaccctagaagaaaacctaggcattaccattcaggacataggcatgggcaaggacttcatgtctaaaacaccaaaagcaatggcaacaaaagacaaaattgacaaatgggatctaattaaactaaagagcttctgcacagcaaaagaaactaccatcacagtgaacaggcaacctacaaaatgggagaaaatttttgcaacctactcatctgacaaagggctaatatccagaatctacaatgaactcaaacaaatttacaagcaaaaaaacaaacaaccccatcaaaaagtgggcgagggacatgaacagacacttctcaaaagaagacatctatgcagccaaaaaacacatgaaaaaatgctcatcatcactggccatcagagaaatgcaaatcaaaaccactatgagatatcatctcacaccagttagaatggcaatcattaaaaagtcaggaaacaacaggagctggtattttgaaaagatcaacaaaattgatagactgctagcaagactaataaagaaaaaaagagagaagaatcaaatagacgcaataaaaaatgataaaggggatatcaccactgatcccacagaaatacaaactaccaccagagaatactataaacacctctatgcaaataaactagaaaatctagaagaaatggataaattcctcgacacatacaacctcccaagactaaagcaggaagaagttgaatctctgaatagaccaataagaggctctgaaattgtggcaataatcaatagcttaccaaccaaaaaaagtccaggaccagatggattcacagccgaattctaccacaggtacaaagaggagctggtaccattgcttctgaaactattccaatcaatagaaaaagaggtaatcctccctaactcattttatgaggccagcatcatcctgataccaaagcctgacagagacacagcaaaaaaagagaattttagaccaatatccttgatgaacatcgatgcaaaaatcctcaataaaatactggcaaaccgaatccagcagcacatcaaaaagcttatccaccatgatcaagtgggcttcatccctgggatgcaaggctggttcaacatacgcaaatcagtaaatgtaatccagcatataaacagaaccaaagacaaaaaccacatgatcatctcaatagatgcagaaaagtcctttgataaaattcaacaacacttcatgctaaaaactctcaataaattaggtattgatgggtcatatctcaaaataataagagctacctatgacaaacccacagccaatatcatactgaatgggcaaaaactggaagcattccctttgaaaactggcacaagacacggatgccccctctcaccactcctattcaacatagtgttggaagttctggccagagcaatcaggcaggagaaggaaataaagggtattcaattaggaaaagaggaagtcaaattgtccctgttcatagatgacatgattgtatatctagaaaaccccatcatctcagcccaaaatctccttaagctgataagcaacttcagcagtctcaggatacaaaatcaatgtacaaaaatcacaagcattcttgtacaccaataa

SEQ ID NO: 150297 - DNA, 308 bp, Homo sapiens; identical to SEQ ID NO: 145652

SEQ ID NO: 150298 - DNA, 862 bp, Homo sapiens
ggcgcttctttgggaggctttttggcccagaaatttgctgaatacactcacaaatctcctagagtccattccctaatcctctgcaattccttcagtgacacctctatcttcaaccaaacttggactgcaaacagcttttggctgatgcctgcatttatgctcaaaaaaatagttcttggaaatttttcatctggcccggtggaccctatgatggctgatgccattgatttcatggtagacaggctagaaagtttgggtcagagtgaactggcttcaagacttaccttgaattgtcaaaattcttatgtggaacctcataaaattcgggacatacctgtaactattatgggatgtgtttgatcagagtgcgctttcaactgaagctaaagaagaaatggtacaagctgtatcctaatgccccgaagagctcatctgaaaacaggaggcaatttcccatacctgtgcagaagtgcagagggcaatccttatggtacagatacatttgctgcaattccatggaaccaaatacgcggccattgacccatcaatggtcagtgccgaggagcttgaggtgcagaaaggcagccttggcatcagccaggaggagcagtagtgtgtctctcgctgtcaatgatgagttgacccggtgtgttcttgtatagtcagtgggcattcagcacccgttcagccggcctttttccttcaggttcgtcaggctcaccggttctcactgtgtctgggaagtaggactgatggtcatcttcatgacaggcggcatctccactaagcctgtgtaactgttccctctttggttttcttagcttttgaatttgaagaagtacttttgaagactcccatttta

SEQ ID NO: 150299 - DNA, 301 bp, Homo sapiens
tccttctgacccctccctgtctttaccccatctcagcctggggttacttcagtgttcatattgtcctacagcaactcaatgccatcattgcggcgtccgcttccgtcaagtcttcacagaagctgaagcagatgttggaggtgggaagaggttgtgaacaggggtgctgggggttttcaggtcctaggtgggggcctggggctatacagagaggaagaaggagccttcaggacctgagcctgacctgcctcccacacattctttggacagatcatacttgcactggggaactacatgaaca

SEQ ID NO: 150300 - DNA, 361 bp, Homo sapiens
cccactgttggcaaaatacacttcttcctcatattgataggttccttcttacttaacatttttagtagatctgaaataaaactcaaatggttattcttaataaaaggtcattcctaattggtggatgttgggtgagagaacagatcatatttttgaggatggttaatgttaatatgaaaattgatataatttggttcattggtagttatttagggtattttatgattcttttcaaatttctactttctaggtatgtgaaagcaagaacagagctaacatgggattatggctatgaagctgggactgtgcctgagaaggaaatcttctgccaatgtggggttaatatatgtagaaaaaaaaa

SEQ ID NO: 150301 - DNA, 684 bp, Homo sapiens
cagcatgtcaaagacagcaggtattttgtgatgaagagttgctaagtgaaaccaagaatacttcatctgattctctaacaaagttcaataaagggaatgtgtttttattggatgccacaaaagaaggaaatgtcggccgcttccttaatcatagttgttgcccaaatctcttggtacagaatgtttttgtagaaacacacaacaggaattttccattggtggcattcttcaccaacaggtatgtgaaagcaagaacagagctaacatgggattatggctatgaagctgggactgtgcctgagaaggaaatcttctgccaatgtggggttaataaatgtagaaaaaaaatattataaatatgtaactaacgcctgtttgtgaaattagcttatcaggctgaaattaaagccatgcaaaagaaggtctaggtccatcaaggaaattcccctccgttttcctttgtcatggggtttatgttttatttcagattttatttgtgtgacttagaaattccaggaacacaattaggatattttcatacacatagggtatcttgttacactgctgtgctcactttacatgagtaggatggaagtgtatattttatatgaaataccactgtacaatttataatttatttacaaattatatattaagagaaacaaatgtcaaaaaaaaaaaaaa

SEQ ID NO: 150302 - DNA, 583 bp, Homo sapiens
agcccactagcagcaaagagcccaccatctctgcacttgctggaaccttcaaaaacattacttccagttccccggaaagacatatttttggagaggacagagttgtctctgagcagcctcaagtgggcacacttgaagaaaggaatgacgtcgtggaagcactgacaggcagtgcagcctcgaggctccgcgggggcacttcctccagacgcctctcttccacaccccttccaaaagcaaaaagaagcctcgaaagtgaaatgtatctggaaggtctgggcagatcacacattgcttcccccagtccttgtcctgacagaatgcccctaccatcacccactgagtctaggcacagctcatccatccctcctggtctccagccctccggagcagaaagtgggtctttatcgaagacaaactgaacttcaagacaaaagtgaattttcagatgtggacaagctagcttttaaggataatgaggagtttgaatcatcttttgaatgtgtagatcagaaacaaattgaagaacaaaaggaagaagaaaaaatacgggaacagcaagtgaaagaacgaaggcagagag

SEQ ID NO: 150303 - DNA, 4414 bp, Homo sapiens
cggtcctgcctcgctgccttcagtccctagtgtctgggtccccgccctccagccgcctttgagtcgtgcctgggtcctcgcccttgcctcagaaccgcgaagaaaggaagctcgcgtgtttgctagaaaacctagttgggagtgcgaggcagagaacgttcagcacctttgttcctcccgaaccctcgggacagaggcagggttctgagggcagggattccccctcgtcttggccccaccgcccgggctgggcactaaactcgggccgcggcggggcgagcgaggcgggctccggagggagctgacgcctgatgatggcgcagtccaacatgtttaccgtggctgatgtgttgagtcaagatgaactgcgcaaaaagctataccagacgtttaaggatcggggtatactggatacactcaagacacaacttcgaaaccagctaattcatgagttgatgcaccctgtattgagtggagaactgcagcctcggtccatttcagtagaagggagctccctcttaataggcgcctctaactctttagtggcagatcacttacaaagatgtggctatgaatattcactttctgttttctttccagaaagtggtttggcaaaagaaaaggtatttactatgcaggatctattacaactcattaaaatcaaccctacttccagtctctacaaatcactggtttcaggatctgataaagaaaatcaaaaaggttttcttatgcattttttaaaagaattggcagaatatcatcaagctaaagagagttgtaatatggaaactcagacaagttcgacatttaacagagattctctggctgagaagcttcagcttattgatgatcagtttgcagatgcttaccctcagcgtatcaagttcgaatctttagaaataaagctaaatgagtataagagagaaatagaagagcaacttcgggcagaaatgtgtcaaaagttgaagttttttaaagataccgagatagcaaaaattaaaatggaagcaaaaaaaaagtatgaaaaggagttaaccatgttccagaatgattttgaaaaagcttgtcaagcaaaatctgaagctctcgttcttcgggaaaagagtacccttgaaagaattcacaagcaccaagagattgaaacaaaagaaatttatgctcaaaggcaacttttactaaaagatatggatttgctaagaggaagagaagcagagctgaagcaaagagttgaagcttttgaattgaaccagaagctccaggaagaaaaacataaaagcataactgaggcacttaggagacaggagcagaatataaagagttttgaggagacctatgaccgaaagctcaagaatgaacttctaaacttccacaggctgcatggtgtctgcctggctttgggaatcctcatatgactttggcaggtgttggagtttggaggctcttcgccacaggagtgcttctatttccttttggaaccaaaagggcagctggtaacagctgggaaagggaagtgaaactgtgaaaatgtgccttttggtattgctaacccggatataatgctcttggcagttggctctcaggactgtgcttagtccctgagcacaaaagttcttaccttggttgggggtgggcagatggtacaggtggattggaagtgaccgtctgattatcatttgggattgagtctgttgtgtgctgtgtaaatttaatttacccctttgctctttgtgtcagttgagaccaactgaaaagtgattgctttcagtaagtaaccttatgataacacgacgcttcattttgtgtgattgagttttgggacccagtttataggatcaaggaagggttttactgggcattttatgttcaggggttatatccctggctttagtattgaggactttgaagtttacaagttgtcatgtttagcaccctcaggtgctcctgtgccatagataagctcctgcactgataacagtctttccagaaaaatgcctgaggagctcatatttagtcattctgattctcaggtatcaacttgaactgaaggatgactacatcattagaactaatcgactgattgaagatgaaaggaagaataaagaaaaagctgttcatttgcaagaggagctcatagctattaattcaaaaaaggaggaactcaatcaatctgtaaatcgtgtgaaagaacttgagcttgaattagagtctgtcaaagcccagtctttggcaataacaaaacaaaaccatatgctgaatgaaaaggttaaagagatgagtgattattcactactaaaagaagagaaactggagcttctggcacaaaataaattacttaaacaacaactggaagagagtagaaatgaaaacctgcgtctcctaaaccgcctagctcagccggctcctgaacttgcagtctttcagaaagaactacggaaagccgaaaaggctatagtggttgagcatgaggagttcgaaagctgcaggcaagctctgcacaaacaactgcaagacgaaattgagcattctgcacagctgaaggcccagattctaggttacaaagcttctgtaaagagtttaactactcaggttgccgatttaaaattgcaactgaagcaaactcagacagccctagagaatgaagtgtactgcaatccaaagcagtctgtgatcgatcgttctgtcaatggattaataaatggcaatgtggtgccttgcaatggtgagataagtggggatttcttgaacaatccttttaaacaggaaaacgttctagcacgtatggttgcatcaaggatcacaaattatccaactgcatgggtggagggtagttcccctgattctgaccttgagtttgtagccaatactaaggcaagggtcaaagagcttcagcaagaggccgaacgcttggaaaaggctttcagaagttaccatcggagagtcattaaaaactctgccaaaagcccactagcagcaaagagcccaccatctctgcacttgctggaagccttcaaaaacattacttccagttccccggaaagacatatttttggagaggacagagttgtctctgagcagcctcaagtgggcacacttaaagaagaaaggaatgacgtcgtggaagcactgacaggcagtgaagcctcgaggctccgcgggggcacttcctccagacgcctctcttccacaccccttccaaaagcaaaaagaagccctcgaatgtgaaatgtatctggaaggtctgggcagatcacacattgcttcccccagtccttgtcctgacagaatgcccctaccatcacccactgagtctaggcacagcctctccatccctcctgtctccagccctccggagcagaaagtgggtctttatcgaagacaaactgaacttcaagacaaaagtgaattttcagatgtggacaagctagcttttaaggataatgaggagtttgaatcatcttttgaatttaattctttcaactacgagaacactctgacaagcaaatacgttgccaagtggttatgttgggaacttcatagaatcctgttaggaaagggcgcacccagttactttggcttcagttcccgtgctccagtcagttgcccccacactgcactgcccttctttgtcttggtgttattattaaggactcatgggacaattgtgcctcatgcagctgcagggaacatgccaaggcagttggaaatgggcgggctttctcctgccggggatatgtctcatgtggacgctgctgcagctgctgtgcccctctcatatcagcacccaagtgtagatcagaaacaaattgaagaacaaaaggaagaagaaaaaatacgggaacagcaagtgaaagaacgaaggcagagagaagaaagaaggcagagtaacctacaagaagttttagaaagggaacgaagagaactagaaaaactgtatcaggaaaggaagatgattgaagaatcactgaagattaaaataaaaaaggaattagaaatggaaaatgaattagaaatgagtaatcaagaaataaaagacaaatctgctcacagtgaaaatcctttagagaaatacatgaaaatcatccagcaggagcaagaccaggagtcggcagataaggtgccagtgccatgggcagggcaatctgtgggtgggggacatccagggcttccgtggcttaacttcttgggacgggaatccgtcttctccattgaagacaaaaagagctcaaaaaagatggtccaagaaggctccctagtggacacgctgcaatctagtgacaaagtcgaaagacactgcattgatcccctctggagaacacagcaacaaggcaccatcttggaagccgagaccgggccttcaccagacatcgaacctgccagtgccttccttgatcttcgacttcccagcctctaa

SEQ ID NO: 150304 - DNA, 722 bp, Homo sapiens
atattattgaaactcgaagggtccttgatttaaggataaatctgaagccttcttatctagtagttccacagacgggtttccaccatgaaaagtcagatcttctgattttagattttggtacatttcagctcaacagtaaagatcaaggtttacagaagactactaattcatctctggaagaaataatggataaggcatatgacaagtttgatgttgaaataaaggatgtacaactactttttgcaagagcagaggaaacctggaaaaagtgtcgatttcagcatccatcaactatgcgtatattgcaacccatggatattcatgttgagttggctaaggccatggtagaaaaagacattagaatggccaggcgagtgttgtgtataaaggaagttgaaatcctgggccttatgtgtgtagactggcaatgtccatttgaagattttgtatttcctcctagtgtcagtgaaaatgtgctaaaaatttcagttaaggaacagggtctgttccacaaaaaagacagtgccaatcaaggctgtgttcgaaaagtttacctgaaggacaccgccacagcagaggttgctctcagtgaagatgacttgacagttttaatgaaaattttgctagaaaatcttggagaagcttcctcacaaccaagccctacacagtctgtgcaggagactgtaagagtgagaaaagttgatgtttcaaagtgtacctga

SEQ ID NO: 150305 - DNA, 265 bp, Homo sapiens
tgacaattgggcggcaatatttacgggagaagaagacagggacaattgtggaagaaagagtaaatcgtcctggatggaatgaagatgatgatgtatctgtttcagatgagagtgagctccccacaagtaccaccctgaaggcctccgagaagtctacaatggaacagttggtggaaaaagcttgtttcagagactatcagcgtttaggtttaggaaccataagtggcagctcttcccgttcaagacccgagagtcgacgcggccg

SEQ ID NO: 150306 - DNA, 734 bp, Homo sapiens
ggcctcccactcactgaatcagcatctccaggctcttctcactccggataagcatgacaactcccaggggcaggacttccgagaacagctggctgaggggtgtaggctggcacggcaccttgtccacaagctcagcccaggtaaggtggccataggccctgatgacccaaaaccccaggcttatgagaggctccagacctccatactttcacaatgacagttgtatcactggggttttttttctactacacctatggggccatgacatgatcaggacttcctgggtaagaacagagatgggaaacccatgggtttggaggtcacagtattgcaagtgtccctccttccttgatggaaggtggtctttggagcaagaggcagcatctatctagttttaaaggacaggaaggaggctgtgatggaagggtgcttgttggagtgaaaagagctctgggctaagaatgaaggttcccaggctgtatttttggcaatgttcttagtaagtgtcagtgagtgatttatcttttcagagtttctctctctccatctgcaaaggcagacaaattgtctcttgcaagggtctgaagcatccaaatatgggaacacttacgaatgcttttcaaaatgagatgaagcccctctccatgtggtgttggagaaggcacttgatgtgggggcatttggtgctaggaagtgcttcagactggagcactccccatggatagaatgtccct

SEQ ID NO: 150307 - DNA, 380 bp, Homo sapiens
tcagcgccgagtccaacaggcttgttggagagctcaagctggataggctgctcctggaactgaagcactcaaatattggccccttcccggttgaattgctgcaggatatcatgaactacattgtacccattcttgtgctgcccagggttaacgagaaactacagaaaggcttccctctcccgacgccggccagagtccagctctacaacgtagtgcttcagcctcaccagaacttcctgctgttcggtgcagacgttgtctataaatgaaggcaccaggggtgccgggggctgtcagccacacctgttcctgatgggctgtggggcaccggctgcctttccccagggaatcctctccagatcttaaccaagagccccttg

SEQ ID NO: 150308 - DNA, 575 bp, Homo sapiens
gggtcgacgatttcgtccctttgctccaccagtgatggagtttcccgctgcccatgaccgcatggtatacctgggcctctcagactacttcttcaacacagccgggcttgtataccaagaggctggggtcttgaagatgacccttagagatgacatgattccaaaggagtccaaatttcgactgacaaccaagttctttggaaccttcctacctgaggtggccaagaagtttcccaacatgaagatacagatccatgtctcagcctccaccccgccacacctgtctgtgcagcccaccggccttaccttctaccctgccgtggatgtccaggcctttgccgtcctccccaactcctccctggcttccctcttcctgattggcatggtaagcagttcctgggttggacagatgaggagccccagacagtcccaacagcactgtctttggagtcaggagaccatgtgaatcctgtctggattcaaacctggactgtgtcactccggagcctgaggcttgagtcactgtactcaatggtgccgactcctggaggtattcattcacccagccgtgtatt

SEQ ID NO: 150309 - DNA, 325 bp, Homo sapiens; identical to SEQ ID NO: 98636
  misc_feature (1)...(325): n = a,t,c or g

SEQ ID NO: 150310 - DNA, 213 bp, Homo sapiens; identical to SEQ ID NO: 70732

SEQ ID NO: 150311 - DNA, 663 bp, Homo sapiens
  misc_feature (1)...(663): n = a,t,c or g
ctacagacatggggtccgaagcaggtgtgctcttcttcaggcgcggtggctttgaagagcgggtgctgctgaagaacatccgagaaaatggaatcacaggcgcattactgccttgtcttgatgagtctcgttttgaaaatcttggagtaagttccttgggggagaggaagaagctgcttagttatatccagcgattggttcaaatccacgttgatacaatgaagggtggggtatctagcaggatgtctagttcacgcactgggtgaaaaacaaccagagctgcagataagtgaacgagatgttctctgtgttcagattgctggactttgtcatgatctcggtcatgggccattttctcacatgtttgatggacgatttattccacttgctcgcccggaggtgaaatggacggtatgtattcatacagtcaatagtcaatagaaagaaagcctatttaagcaggttatttagttaatttatctgtttggttccactactgtgttataaaatacttccccattacagtgtccagggtgctttcattcacatatatatatatatgcttttgtttggttctcacagtagtctgtaaggaagttatcgttataatccctttttacaaataaaggaacttgaaactatnnnnnnnnnnnnnnnnnnnnn

SEQ ID NO: 150312 - DNA, 1927 bp, Homo sapiens
ggaccggaactcccgtgtcgacgattacgtgacgccaggtgtagccatgcagcgagccgattccgagcagccctccaagcgtccccgttgcgatgacagcccgagaaccccctcaaacaccccttccgcagaggcagactggtccccgggcctggaactccatcccgactacaagacatggggtccggagcaggtgtgctccttcctcaggcgcggtggctttgaagagccggtgctgctgaagaacatccgagaaaatgaaatcacaggcgcattactgccttgtcttgatgagtctcgttttgaaaatcttggagtaagttccttgggggagaggaagaagctgcttagttatatccagcgattggttcaaatccacgttgatacaatgaaggtaattaatgatcctatccatggccacattgagctccaccctctcctcgtccgaatcattgatacacctcaatttcaacgtcttcgatacatcaaacagctgggacgtggttactacgtttttccaggagcttgccacaatcgatttgaggatagtctaggggtgtggtatctagcaggacgtctagttcacgcactgggtgaaaaacaaccagagctgcagataagtgaacgagatgttctctgtgttcagatcgctggactttgtcatgatctcggtcatgggccattttctcacatgtttgatggacgatttattccacttgctcgcccggaggtgaaatggacgcatgaacaaggctcagttatgatgtttgagcaccttattaattctaatggaattaagcctgtcatggaacaatatggtctcatccctgaagaagatatttgctttataaaggaacaaattgtaggaccacttgaatcacctgtcgaagattcattgtggccatataaagggcgtcctgaaaacaaaagcttcctttatgagatagtatctaataaaagaaatggcattgatgtggacaaatgggattattttgccagggactgccatcatcttgggatccaaaataattttgattacaagcgctttattaagtttgcccgtgtctgtgaagtagacaatgagttgcgtatttgtgctagagataaggaagttggaaatctgtatgacatgttccacactcgcaactctttacaccgtagagcttatcaacacaaagttggcaacattattgatacaatgattacagatgctttcctcaaagcaggtgactacatagagattacaggtgctggaggaaaaaagtatcgcatttctacagcaattgacgacatggaagcctatactaagctgacagataacatttttctggagattttatactctactgatcccaaattgaaagacgcacgagagattttaaaacaaattgaataccgtaatctattcaagtatgtgggtgagacgcagccaacaggacaaataaagattaaaagggaggactatgaatctcttccaaaagaggttgccagtgctaaacccaaagtattgctagacgtgaaactggaggctgaagattttatagtggatgttatcaacatggattatggaatgcaagaaaagaatccaattgatcatgttagcttctattgtaagactgcccccaacagagcaatcaggattactaaaaaccaggtttcacaacttctgccagagaaatttgcagagcagctgattcgagtatattgtaagaaggtggacagaaagagtttgtatgccgcaagacaatattttgttcagtggtgtgcagacagaaatttcaccaagccgcaggatggcgatgttatagccccactcataacgcctcaaaaaaaggaatggaacgacagtacttcagtccaaaatccaactcgcctccgagaagcatccaaaagcagagtccagctttttaaagatgacccaatgtga

SEQ ID NO: 150313 - DNA, 590 bp, Homo sapiens
tcccgggtcgacgatttcgtgcagcttggggaggaagggaacaggcatcacagtctggtctttacaacttaaagctcagcctttatttacattttagttcaagatgggttctttgaaatctcaaatattatgtcagaattagagaaggaagaaagtctgctgattgataggttaagatagttttcctgatggtgattccacaaagtgagtgcctggctggccgggtggagaggagttggaggggagccctgtctcggaaaggggcgtggcgtggttgtgaagaccttggaccgggagggtttcctggcacacagcccagccaagggtgaagtgtggacacctcgctgggcttcagggcacaagagaccttgctcatcactgcttctgtgttacagaccaagctccacgaagatctctgtgagaagaggacggctgccacccttgccacccacgagctccgtgccgtcaaagggcccctgatgtactgcgcccggcccccacaggacctcaaggtgctgcaacctcctttgcaggggctgctgaagagtcttcttggtggtcgaagacgccatgctgcttctcaggcccaa

SEQ ID NO: 150314 - DNA, 329 bp, Homo sapiens
caagggatatgaatagaaaatacataaaagaaataatggccagtgaacacgaaatgtgcctgacatccctaataatcaaagaaatacaaattaaaacacaatcataccaattttcatctaacagattggcaaaaatgtaaaggatcatgtgtatattcattgcagtgttgcttgtaatagcatacagcttgagtgacctccagtagaggtgatgtttaaatatattttgctgcattcttaaaaggaaatgtagcataatgcagccatttggagagaatgagataactatatgcactctctttgacagttttgtgactactatgtgccgg

SEQ ID NO: 150315 - DNA, 332 bp, Homo sapiens
  misc_feature (1)...(332): n = a,t,c or g
agagcaagcctttgatccctatggaaccttatcccagggcattttttccccaaagtttcatgaacctttccataaattgatggccagacctgcagttgctttaccctttcaggtaaacttaaaatgaagggnnnnnnnnnnnnnnnnnnataaagcaaataaatatctcactattttatccttcaaatatttgtaattctggaatcctcgtaatccttcaaatcttgttcattctaaacctgttttggattatcttctgttttctctctggagttctgtctgttcttattgtagaaatcttttatagtacaacatcatgagtactgaatgac

SEQ ID NO: 150316 - DNA, 772 bp, Homo sapiens
gatcttgctctgtcacacaggctggagtgcagtggtaccatcacagctcactacagcctcaacctcgtgggctcaattgatcctcccacctcagcctctcaagtagctgaagatttacaggcacatgcccacccatgccctggcctaaatttttgttagttttttgtaagagacacggtttccacccatgcctgccccaggctggaacttgaaactccctgagcctcaaagtgcatcccgccctgcccttggcctgcccaaagtgcctgggatttccaggcgtgagcccaccgtgccctggtctgcaatctttttattgacttggggaaaacaaggaaaattaatcaccaggctaagggtatgtaacaacaggcatgtgaggagggcaggggttcagctaaccatattggttatgagtgcaaaagaaccagactttattcagtaagtacacaagattgagaagactgatatcagatgaaccttcttgctcaaagcaaacgatgccaagacatttatcgagggaaggattgcctagcagtagctatttagtgtgataatggcgtttgatagtttagacacaaacaccattgtcacactccacagctctgctaagggaaactctgtagccacgaaggtgtttaacttcacctccacattccaccattgtcactgataatagggggaaccttggtcagctccacatattgtgaccctaggcaggggaaaggaggcatcacggggtacaggcatcttgaggcatggggaagagctg

SEQ ID NO: 150317 - DNA, 569 bp, Homo sapiens
  misc_feature (1)...(569): n = a,t,c or g
tgccggttttaagcatctttcggcaaatggcgcttcgagtctgggtgccttccccgcagcttgtggaacactctgtccagttnagagaagccacttcgctgggacagtcatctttcttgcatgctttgctggcaggcaggttttgaagctgaacagaaggtctcaggaagctccaggaagcttgccatcagccatgcgctgctggaaatgctgactcctcctcctgcaggggcgatgataccacctccccccagccttccgggtcctcctcgccctggtatgatgccaagcaccccatatggggggccctcccatgatgccaatgatgggccctcctcctcctgggatgatgccagtgggacctgctcccggaatgaggccgcccatgggaggccatatgccaatgatgcctgggcccccaatnanaagacctcctgcccgtcccatgatggtgcccactcggcccggaatgactcgaccagacagataaggatagaggggaggccttattgtatcggttttatattacctgttctgcttcaccaggagatcacgctgctggaaatgct

SEQ ID NO: 150318 - DNA, 1120 bp, Homo sapiens
gagtggggccccgaaatctgagggtgatcgtagtcactagttgtggcccccatgcaggagcggagagcgagttctggtttctgaaacctcgagggatgggagagtatctgggccgggtggacggaggcggggagatggagagcgctagacaccccagttttagagtgcagatggatcccgcttaaggcaacaaaaaaaagcctggtttatgtgtcgacgctttgatgcttttgagtcgtgaggcggtctggctttttgttttgtttgtttgttttgtttttatcttccatgaacagcgcttccgtggatgggcatctcagtggttgtcgtctttttctcttcctttcacctcttttcaggttttattgtgactactgcgatacatactctcaccccatgactctccatctgtgagacagacacactgcagtggaaagcaaacacatagagaatgtgaaagactattatcagaaattggatggaaaaagcagtctcagagcctgatttgacaaaacaacggcttgcatttcaacaaggaaagatacctcctactccattctctgctcctcctccttgcaggggcgaatgataccacctccccccaagcctttccgggtcctccatcgcccttggtatgaatgcccaagcacccccatatggggggccccttcccatggatggccaatgatggggccctccttccttctgggggatggatggccagtggggacctgcttctggggaattgaggccggcccatggggaggccattattgccaattgattgcctggggtcccccaatggatgtaggaccttcttgcccgttccattgatggtgccccctcgggcccggaatgactcgaccagacagataaggatagaggggaggcccttattgtatcgggttttatatgacctgttctgcttcaaccaggagatcatgctgctgtgatacttgagttttctaaacatgcattaggaagacttgctcccctgttctatgaaagagaatagttttgggaggggagaagtgggacaaaaaagatgcagttttcctttgtattgggaaatgtgaaaataaaattgtcaactctttcagttaaaaaaaaaaaggaattc

SEQ ID NO: 150319 - DNA, 406 bp, Homo sapiens
attccgcagtccggcggatcccccagtccattgcgacaaggaataggtattagaagtccaaagggaggatgaagactatcatgacagtgccaaggaaaaggatgaagaggacgattccattacacgattactcgaatattgaattagaagcttattccctatcacataatgattatgacggaattaaaaaattactgcaacagctttttctaaaggctcctgtgaacactgctgaactaacaaattttttaattcaacagaaccatattgggagtgtgattaagcatacggatgtttcataagacagcattgatgatatggatgaagatgaggcttttggtttcataagccttttaaatttacctgacagaaagggtacccagtgtggtgaacaaattcaagagtg

SEQ ID NO: 150320 - DNA, 379 bp, Homo sapiens
  misc_feature (1)...(379): n = a,t,c or g
gtgccgtggaaagaggggttccgcatccgtttgattccccagtccagcgcgacgaggaagaggagaaggaagtcgatactgaggatgacgacgatgatgacagtgaccaggaaaaggatgatgaggacaacgcccttgacgaggaagtgaatattgaattctgaagcttattccctatcatataatgattatgacggaattaagaaattactgccgcagctttttatcgcggctcctgtgaacactgcaaaactacctgatctcttaattcaacagaaccatattgggagtgcgattaagcaaacggatgtttcagaagacagcaatgatgatatggatgaagaagaagcttcttactccatagaccgtctttataacn

SEQ ID NO: 150321 - DNA, 672 bp, Homo sapiens
cggacgcgtgggcgcagtgtgagcggcaacttggcgtccaggtctaagcttgtgtgtcgtggaaatgtggggcttccgcatcccggcggatgctttaatccagcgcgacgaggaagaggaaaaagaagtcctaaatgaggatgaagacgatgatgacagtgacaaggaaaaggatgaagaggaccgaggtcattgaccgaagaagttgaatattgaatttgaagcttattccctatcagataatgattatgacggaattaagaaattactgcagcaactttttcctaaaaggctccctgtgaacacttgcagaactaacagatctcattaattcaacagaaccatattgggagtgtgattaagcaaacggatgtttcagaagacagcaatgatgatatggatgaagatgaggttttttggtttcataagccttttaaatttaactggaaagaaaggggtacccagtgtgtttgaaccaattccagagttggttctacgcttctgtgagaagaactgtgaaaagagcatggttgaacagctggacaagtttttaaatcgacaccaccaagcctgtgggccttctcctaagtgaaagattcattaatgtccctccacagatcgctctgcccatggtaccagcagcttcagaaagaactgggcgggggcacacag

SEQ ID NO: 150322 - DNA, 365 bp, Homo sapiens
ggcacgagcggacctgggcactttttttccgcaagcggagagctgacatgccgcgggtgtttgtgttacgtgcccttttgttggtcctcatctatctctttgtggattcctattggcttttttacggagtccgcattatggactctcgggaccggaattaccagggcattgtgcaatatgcagtctcccttgcggatgccctcctcttcatccattacctggccatcgtcctgctggagctcaggcagctgcagcccatgttcacgctgcacgaggtccgctccaccgatggcgagtcccgattctacagtctgggacacctgagtatccagcgagcagcactggaggtcctagaatattactat

SEQ ID NO: 150323 - DNA, 356 bp, Homo sapiens
ggcacgaggggacctgggcactttttttccgcaagcggagagctgacgtgccacggatggttgtgtttcgtgcccttttgttggtcctcatctttctctttgtggtttcctattggcttttttacggggtccgcattttggactctcgggaccggaattaccacggcattgtgcaatatgcagtctcccttgtggatgccctcctcttcatccattacctggccatcgtcctgctggagctcaggcagctgcagcccatgttcacgctgcaggtggtccgctccaccgatggcgagtcccgcttctacagcctgggacacctgagtatccagcgagcagcattggtggtcctagaa

SEQ ID NO: 150324 - DNA, 168 bp, Homo sapiens; identical to SEQ ID NO: 66387

SEQ ID NO: 150325 - DNA, 422 bp, Homo sapiens
ggcacgagatagcccaacaggaaccttacagaggatgttaacctcagaagcttggtagtttcttctggtgtatttgtcctgtatttacgtctttcagtaaagtaaaaactcagttattgacttgaattgctttggaagcattgaagtcttccaccaaattgattcattactgtactaattcagttcattccagtggtctgaatctcctattccatggtttaatcatcactctggctccttctgcatatgaagctattgcatcttactggtcctacattgaagtgtattgtatctgtttgtacaaccgatcatacattttaagtttttatatttctccatctaccttgtttcttcacagagctacaggcaaccagctgctttcatcgtcacacaataccctctgccaaacactgtaaaagact

SEQ ID NO: 150326 - DNA, 659 bp, Homo sapiens
gaggaggacgacgatgactccgattatccggaggagctggaagatgacgacgaggacgccagttactccacggaaagcagcttcagcagcactccaggatcttcatgacattcaatgagtagcaaaatttgaagataacttctggaatttcatctaatgtgtattaattttcactcatctggatcttaggggaaataacctatcagattatagggaaggaggacctttaataaccaagctaaatgtgtgggctgtttacctctccctcttatgcaaaggtatcccttgcacacactgaaaacttcatagaccaaaagcattatagctctagtttgccttgaaggaagttgtattgtctgtagagcatgtgggccattttctgccaataaaatgttcaaatgttttctctctctaaagctttgttcattgtatctggtggaattttggttctcagggagtagacacctagccatgcttctaatggtgaagtgtctactagcccagtggtctctattttggatttgaacttacttcgaccccccacctggtgccttaccttttaatcatattatgattgaacgtttttatttccacattttttatttcttatgttattattccttagttcctatctgtaagatcataaagtcctttgaacc

SEQ ID NO: 150327 - DNA, 391 bp, Homo sapiens
  misc_feature (1)...(391): n = a,t,c or g
ggcacgagcctccgaggcagcctcagagggtgaacagtatagactttgtagaattggagcaccttcaacctgatgtattagtccacgcagtactaagagttgttgatttcactatactgacagaggcagtatacagttatagaggacagaagcagaagaaagttatgttaacagtggaacaggcccaagatcatcattatgcgcttgtattatggggtcctggatcagcctggtaccctcaacttcgcagtaaccaaggagtggttctgattagagcccagatttcatagctggcagttactattaccgcatatctgcagctcgagctaaatgcttacaggaaactgaagactattgcccgtgcccacacaaaattgctgtcctgggggcn

SEQ ID NO: 150328 - DNA, 1263 bp, Homo sapiens
tggaggactgcagcattttgggcatttacagtgtttcttggagatataattttactcacagatgttgttattcatgaggaccaatggattggcgagacagtactacaatcaacatttagcagtcagttattaaatcttgggagttattcatctattcagcctgaagaatattccagtgtagtttgtgaagttgtacttcaagacttactggcatatgtgtcctcaaaacattcctacctcagagatcttcctccgaggcagcctcagagggtgaacagtatagactttgtaggaattgggagcaccttcaacctgatgtattagtccacggcagtactaaggagttgttggatttcactatactgacagagggcagttttacagttatagaggacagaagcaggaaaaaagttatgttaacagtgggaccaggcccaaggtcaacattatgcgcttgtattatgggggtcctgggggcagcctgggtaccctcaacttcaaaggaaaaaaggttatatttgggaatttaaatatctttttgttcagtgcaattacacactagaaaacctagaattgcatacaacgccttggtcatcctgtgagtgcttgtttgatgatgatataagggcaattacatttaaagcaaaatttcaaaaaagtgcaccctcctttgtgaagatatcagacttagcaacccacctagaggataagtgttcaggagtggttctgattaaagcccagatttcagagctggcatttcctattacagcatctcagaagatagcgctaaatgctcacagttctctgaagagtattttttcttctcttcccaacatcgtatatactggctgtgcaaaatgtggattggaactagaaacagatgagaacaggatctacaaacaatgttttagctgcttgccatttactatgaagaaaatatattataggccagcgttaatgactgccattgatggaagacatgatgtttgtatccgtgtagaatcaaagctgatagagaagattcttctcaacatttctgcagactgcctcaacagagtgatagttccttcctcagagatcacctatgggatggtcgtggcagacctgttccactccttgttggcagtcagcgcagaaccttgtgtattaaagattcagagcctttttgtgttagatgaaaacagctatccattacaacaagatttctccctcctggatttttatcctgacattgtaaagcatggagccaatgcccgtctctga

SEQ ID NO: 150329 - DNA, 390 bp, Homo sapiens; identical to SEQ ID NO: 144739

SEQ ID NO: 150330 - DNA, 902 bp, Homo sapiens
tgcggtttcaatatgcttacttgagagtcaggcgggtcctgggcccaggaaccggcccggagccgcggacgcgctacagctgagaaggggacccaaggggtcggccgcgggcaaggcccctaagaccgccgccccagctcacgctgccgacggcagctatagacattctgcgtgaggtccgggctcctggacttcgcctttcccgagccctggaggtggggagaaaaggttcaccaattcttaaaatccaaatatatctcatggtacagtggaagaactggccagagagtctggaagattgggttctggtcctggctgtgccactgactcactgtgaccttgggatcttgtgctgtgaagacatttcccaagtgcttcatgttagccagcaaatctgacccacaaggcctggaaagaggtgattgttaggttgcgcagaggttgtcttatccagctcagcttcccctgggacccaccgtgggaccttaggcagaactggggtggacttggcctcctccatgggcacaccggcttgcagataccgacttgcttgaccgtgggatgttgaaggacacgcttgctcaggctccgccaccccctttaggggaggcctattgccaccaaggcccgggcccatgggctggaggtggagccctcagccctggaacaaggcttcaggcaggcatacagggctcagagccacagcttccccaactacggcctgagccacggcctaacctcccgccagtggtggctggatgtggtcctgcagaccttccacctggcgggtgtccaggatgctcaggctgtagcccccatcgctgaacagctttataaagacttcagccacccctgcacctggcaggtgttggatggggctgaggacaccctggagggaggcc

SEQ ID NO: 150331 - DNA, 973 bp, Homo sapiens
ggaagaactggccagagagtctggaagtttgggttctggtcctggctgtgcacatgactcactgtgaccttgggatcttgtgctgtgaagacatttcccaagtgcttcatgttagccagcaaatctgacccacaaggcctggaaagaggtgattgttaggttgcgcagaggtggtcttatccagctcagcttccccaactacggcctgagccacggcctaacctcccgccagtggtggctggatgtggtcctgcagaccttccacctggcgggtgtccaggatgctcaggctgtagcccccatcgctgaacagctttataaagacttcagccacccctgcacctggcaggtgttggatggggctgaggacaccctgagggagtgccgcacacggggtctgagactggcagtgatctccaactttgaccgaacggctaagagggcatcttggaaggcctttggccctgcgtgaaacacttcgactttgtgctgacctccgaggctgctggctggcccaaagccggaccccccgcattttccaagggaaccttgcggtttgctcaatatggaaccaggtaagtggcaagcccatgttgggggataaattaccctctgcggatttacccaggggcctcggggctgtgggcaatgcacagcttccctggtgggttggcccacaggcacttggaccccgtggtcagggattctggtacctaaagaacacatcctcccctctctggcccatctcctgcctgcccttgactgcctagagggctcaactcacagggctttgaggccagtgagggaagtggttgggccctaggcctatgcgagaaaaccttaaacaagaccctggagacagggagccccttctttttccacaggtttggacctttccccctttccctggggcctttgttaaaaaatgtgaaaataaagcagggaggggtgaggttttacccattccccacaa

SEQ ID NO: 150332 - DNA, 10089 bp, Homo sapiens; identical to SEQ ID NO: 150085

SEQ ID NO: 150333 - DNA, 14127 bp, Homo sapiens
attcccaccgggacctgcggggctgagtgcccttctcggttgctgccgctgaggagcccgcccagccagccagggccgcgaggccgaggccaggccgcagcccaggagccgccccaccgcagctggcgatggacccgccgaggcccgcgctgctggcgctgctggcgctgcctgcgctgctgctgctgctgctggcgggcgccagggccgaagaggaaatgctggaaaatgtcagcctggtctgtccaaaagatgcgacccgattcaagcacctccggaagtacacatacaactatgaggctgagagttccagtggagtccctgggactgctgattcaagaagtgccaccaggatcaactgcaaggttgagctggaggttccccagctctgcagcttcatcctgaagaccagccagtgcatcctgaaagaggtgtatggcttcaaccctgagggcaaagccttgctgaagaaaaccaagaactctgaggagtttgctgcagccatgtccaggtatgagctcaagctggccattccagaagggaagcaggttttcctttacccggagaaagatgaacctacttacatcctgaacatcaagaggggcatcatttctgccctcctggttcccccagagacagaagaagccaagcaagtgttgtttctggataccgtgtatggaaactgctccactcactttaccgtcaagacgaggaagggcaatgtggcaacagaaatatccactgaaagagacctggggcagtgtgatcgcttcaagcccatccgcacaggcatcagcccacttgctctcatcaaaggcatgacccgccccttgtcaactctgatcagcagcagccagtcctgtcagtacacactggacgctaagaggaagcatgtggcagaagccatctgcaaggagcaacacctcttcctgcctttctcctacaagaataagtatgggatggtagcacaagtgacacagactttgaaacttgaagacacaccaaagatcaacagccgcttctttggtgaaggtactaagaagatgggcctcgcatttgagagcaccaaatccacatcacctccaaagcaggccgaagctgttttgaagactgtccaggaactgaaaaaactaaccatctctgagcaaaatatccagagagctaatctcttcaataagctggttactgagctgagaggcctcagtgatgaagcagtcacatctctcttgccacagctgattgaggtgtccagccccatcactttacaagccttggttcagtgtggacagcctcagtgctccactcacatcctccagtggctgaaacgtgtgcatgccaacccccttctgatagatgtggtcacctacctggtggccctgatccccgagccctcagcacagcagctgcgagagatcttcaacatggcgagggatcagcgcagccgagccaccttgtatgcgctgagccacgcggtcaacaactatcataagacaaaccctacagggacccaggagctgctggacattgctaattacctgatggaacagattcaagatgactgcactggggatgaagattacacctatttgattctgcgggtcattggaaatatgggccaaaccatggagcagttaactccagaactcaagtcttcaatcctgaaatgtgtccaaagtacaaagccatcactgatgatccagaaagctgccatccaggctctgcggaaaatggagcctaaagacaaggaccaggaggttcttcttcagactttccttgatgatgcttctccgggagataagcgactggctgcctatcttatgttgatgaggagtccttcacaggcagatattaacaaaattgtccaaattctaccatgggaacagaatgagcaagtgaagaactttgtggcttcccatattgccaatatcttgaactcagaagaattggatatccaagatctgaaaaagttagtgaaagaagttctgaaagaatctcaacttccaactgtcatggacttcagaaaattctctcggaactatcaactctacaaatctgtttctattccatcacttgacccagcctcagccaaaatagaagggaatcttatatttgatccaaataactaccttcctaaagaaagcatgctgaaaactaccctcactgcctttggatttgcttcagctgacctcatcgagattggcttggaaggaaaaggctttgagccaacattggaagctctttttgggaagcaaggatttttcccagacagtgtcaacaaagctttgtactgggttaatggtcaagttcctgatggtgtctctaaggtcttagtggaccactttggctataccaaagatgataaacatgagcaggatatggtaaatggaataatgctcagtgttgagaagctgattaaagatttgaaatccaaagaagtcccggaagccagagcctacctccgcatcttgggagaggagcttggttttgccagtctccatgacctccagctcctgggaaagctgcttctgatgggtgcccgcactctgcaggggatcccccagatgattggagaggtcatcaggaagggctcaaagaatgacttttttcttcactacatcttcatggagaatgcctttgaactccccactggagctggattacagttgcaaatatcttcatctggagtcattgctcccggagccaaggctggagtaaaactggaagtagccaacatgcaggctgaactggtggcaaaaccctccgtgtctgtggagtttgtgacaaatatgggcatcatcattccggacttcgctaggagtggggtccagatgaacaccaacttcttccacgagtcgggtctggaggctcatgttgccctaaaacctgggaagctgaagtttatcattccttccccaaagagaccagtcaagctgctcagtggaggcaacacattacatttggtctctaccaccaaaacggaggtgatcccacctctcattgagaacaggcagtcctggtcagtttgcaagcaagtctttcctggcctgaattactgcacctcaggcgcttactccaacgccagctccacagactccgcctcctactatccgctgaccggggacaccagattagagctggaactgaggcctacaggagagattgagcagtattctgtcagcgcaacctatgagctccagagagaggacagagccttggtggataccctgaagtttgtaactcaagcagaaggtgcgaagcagactgaggctaccatgacattcaaatataatcggcagagtatgaccttgtccagtgaagtccaaattccggattttgatgttgacctcggaacaatcctcagagttaatgatgaatctactgagggcaaaacgtcttacagactcaccctggacattcagaacaagaaaattactgaggtcgccctcatgggccacctaagttgtgacacaaaggaagaaagaaaaatcaagggtgttatttccataccccgtttgcaagcagaagccagaagtgagatcctcgcccactggtcgcctgccaaactgcttctccaaatggactcatctgctacagcttatggctccacagtttccaagagggtggcatggcattatgatgaagagaagattgaatttgaatggaacacaggcaccaatgtagataccaaaaaaatgacttccaatttccctgtggatctctccgattatcctaagagcttgcatatgtatgctaatagactcctggatcacagagtccctcaaacagacatgactttccggcacgtgggttccaaattaatagttgcaatgagctcatggcttcagaaggcatctgggagtcttccttatacccagactttgcaagaccacctcaatagcctgaaggagttcaacctccagaacatgggattgccagacttccacatcccagaaaacctcttcttaaaaagcgatggccgggtcaaatataccttgaacaagaacagtttgaaaattgagattcctttgccttttggtggcaaatcctccagagatctaaagatgttagagactgttaggacaccagccctccacttcaagtctgtgggattccatctgccatctcgagagttccaagtccctacttttaccattcccaagttgtatcaactgcaagtgcctctcctgggtgttctagacctctccacgaatgtctacagcaacttgtacaactggtccgcctcctacagtggtggcaacaccagcacagaccatttcagccttcgggctcgttaccacatgaaggctgactctgtggttgacctgctttcctacaatgtgcaaggatctggagaaacaacatatgaccacaagaatacgttcacactatcatgtgatgggtctctacgccacaaatttctagattcgaatatcaaattcagtcatgtagaaaaacttggaaacaacccagtctcaaaaggtttactaatattcgatgcatctagttcctggggaccacagatgtctgcttcagttcatttggactccaaaaagaaacagcatttgtttgtcaaagaagtcaagattgatgggcagttcagagtctcttcgttctatgctaaaggcacatatggcctgtcttgtcagagggatcctaacactggccggctcaatggagagtccaacctgaggtttaactcctcctacctccaaggcaccaaccagataacaggaagatatgaagatggaaccctctccctcacctccacctctgatctgcaaagtggcatcattaaaaatactgcttccctaaagtatgagaactacgagctgactttaaaatctgacaccaatgggaagtataagaactttgccacttctaacaagatggatatgaccttctctaagcaaaatgcactgctgcgttctgaatatcaggctgattacgagtcattgaggttcttcagcctgctttctggatcactaaattcccatggtcttgagttaaatgctgacatcttaggcactgacaaaattaatagtggtgctcacaaggcgacactaaggattggccaagatggaatatctaccagtgcaacgaccaacttgaagtgtagtctcctggtgctggagaatgagctgaatgcagagcttggcctctctggggcatctatgaaattaacaacaaatggccgcttcagggaacacaatgcaaaattcagtctggatgggaaagccgccctcacagagctatcactgggaagtgcttatcaggccatgattctgggtgtcgacagcaaaaacattttcaacttcaaggtcagtcaagaaggacttaagctctcaaatgacatgatgggctcatatgctgaaatgaaatttgaccacacaaacagtctgaacattgcaggcttatcactggacttctcttcaaaacttgacaacatttacagctctgacaagttttataagcaaactgttaatttacagctacagccctattctctggtaactactttaaacagtgacctgaaatacaatgctctggatctcaccaacaatgggaaactacggctagaacccctgaagctgcatgtggctggtaacctaaaaggagcctaccaaaataatgaaataaaacacatctatgccatctcttctgctgccttatcagcaagctataaagcagacactgttgctaaggttcagggtgtggagtttagccatcggctcaacacagacatcgctgggctggcttcagccattgacatgagcacaaactataattcagactcactgcatttcagcaatgtcttccgttctgtaatggccccgtttaccatgaccatcgatgcacatacaaatggcaatgggaaactcgctctctggggagaacatactgggcagctgtatagcaaattcctgttgaaagcagaacctctggcatttactttctctcatgattacaaaggctccacaagtcatcatctcgtgtctaggaaaagcatcagtgcagctcttgaacacaaagtcagtgccctgcttactccagctgagcagacaggcacctggaaactcaagacccaatttaacaacaatgaatacagccaggacttggatgcttacaacactaaagataaaattggcgtggagcttactggacgaactctggctgacctaactctactagactccccaattaaagtgccacttttactcagtgagcccatcaatatcattgatgctttagagatgagagatgccgttgagaagccccaagaatttacaattgttgcttttgtaaagtatgataaaaaccaagatgttcactccattaacctcccattttttgagaccttgcaagaatattttgagaggaatcgacaaaccattatagttgtactggaaaacgtacagagaaacctgaagcacatcaatattgatcaatttgtaagaaaatacagagcagccctgggaaaactcccacagcaagctaatgattatctgaattcattcaattgggagagacaagtttcacatgccaaggagaaactgactgctctcacaaaaaagtatagaattacagaaaatgatatacaaattgcattagatgatgccaaaatcaactttaatgaaaaactatctcaactgcagacatatatgatacaatttgatcagtatattaaagatagttatgatttacatgatttgaaaatagctattgctaatattattgatgaaatcattgaaaaattaaaaagtcttgatgagcactatcatatccgtgtaaatttagtaaaaacaatccatgatctacatttgtttattgaaaatattgattttaacaaaagtggaagtagtactgcatcctggattcaaaatgtggatactaagtaccaaatcagaatccagatacaagaaaaactgcagcagcttaagagacacatacagaatatagacatccagcacctagctggaaagttaaaacaacacattgaggctattgatgttagagtgcttttagatcaattgggaactacaatttcatttgaaagaataaatgatgttcttgagcatgtcaaacactttgttataaatcttattggggattttgaagtagctgagaaaatcaatgccttcagagccaaagtccatgagttaatcgagaggtatgaagtagaccaacaaatccaggttttaatggataaattagtagagttggcccaccaatacaagttgaaggagactattcagaagctaagcaatgtcctacaacaagttaagataaaagattactttgagaaattggttggatttattgatgatgctgtcaagaagcttaatgaattatcttttaaaacattcattgaagatgttaacaaattccttgacatgttgataaagaaattaaagtcatttgattaccaccagtttgtagatgaaaccaatgacaaaatccgtgaggtgactcagagactcaatggtgaaattcaggctctggaactaccacaaaaagctgaagcattaaaactgtttttagaggaaaccaaggccacagttgcagtgtatctggaaagcctacaggacaccaaaataaccttaatcatcaattggttacaggaggctttaagttcagcatctttggctcacatgaaggccaaattccgagagactctagaagatacacgagaccgaatgtatcaaatggacattcagcaggaacttcaacgatacctgtctctggtaggccaggtttatagcacacttgtcacctacatttctgattggtggactcttgctgctaagaaccttactgactttgcagagcaatattctatccaagattgggctaaacgtatgaaagcattggtagagcaagggttcactgttcctgaaatcaagaccatccttgggaccatgcctgcctttgaagtcagtcttcaggctcttcagaaagctaccttccagacacctgattttatagtccccctaacagatttgaggattccatcagttcagataaacttcaaagacttaaaaaatataaaaatcccatccaggttttccacaccagaatttaccatccttaacaccttccacattccttcctttacaattgactttgtagaaatgaaagtaaagatcatcagaaccattgaccagatgctgaacagtgagctgcagtggcccgttccagatatatatctcagggatctgaaggtggaggacattcctctagcgagaatcaccctgccagacttccgtttaccagaaatcgcaattccagaattcataatcccaactctcaaccttaatgattttcaagttcctgaccttcacataccagaattccagcttccccacatctcacacacaattgaagtacctacttttggcaagctatacagtattctgaaaatccaatctcctcttttcacattagatgcaaatgctgacatagggaatggaaccacctcagcaaacgaagcaggtatcgcagcttccatcactgccaaaggagagtccaaattagaagttctcaattttgattttcaagcaaatgcacaactctcaaaccctaagattaatccgctggctctgaaggagtcagtgaagttctccagcaagtacctgagaacggagcatgggagtgaaatgctgttttttggaaatgctattgagggaaaatcaaacacagtggcaagtttacacacagaaaaaaatacactggagcttagtaatggagtgattgtcaagataaacaatcagcttaccctggatagcaacactaaatacttccacaaattgaacatccccaaactggacttctctagtcaggctgacctgcgcaacgagatcaagacactgttgaaagctggccacatagcatggacttcttctggaaaagggtcatggaaatgggcctgccccagattctcagatgagggaacacatgaatcacaaattagtttcaccatagaaggacccctcacttcctttggactgtccaataagatcaatagcaaacacctaagagtaaaccaaaacttggtttatgaatctggctccctcaacttttctaaacttgaaattcaatcacaagtcgattcccagcatgtgggccacagtgttctaactgctaaaggcatggcactgtttggagaagggaaggcagagtttactgggaggcatgatgctcatttaaatggaaaggttattggaactttgaaaaattctcttttcttttcagcccagccatttgagatcacggcatccacaaacaatgaagggaatttgaaagttcgttttccattaaggttaacagggaagatagacttcctgaataactatgcactgtttctgagtcccagtgcccagcaagcaagttggcaagtaagtgctaggttcaatcagtataagtacaaccaaaatttctctgctggaaacaacgagaacattatggaggcccatgtaggaataaatggagaagcaaatctggatttcttaaacattcctttaacaattcctgaaatgcgtctaccttacacaataatcacaactcctccactgaaagatttctctctatgggaaaaaacaggcttgaaggaattcttgaaaacgacaaagcaatcatttgatttaagtgtaaaagctcagtataagaaaaacaaacacaggcattccatcacaaatcctttggctgtgctttgtgagtttatcagtcagagcatcaaatcctttgacaggcattttgaaaaaaacagaaacaatgcattagattttgtcaccaaatcctataatgaaacaaaaattaagtttgataagtacaaagctgaaaaatctcacgacgagctccccaggacctttcaaattcctggatacactgttccagttgtcaatgttgaagtgtctccattcaccatagagatgtcggcattcggctatgtgttcccaaaagcagtcagcatgcctagtttctccatcctaggttctgacgtccgtgtgccttcatacacattaatcctgccatcattagagctgccagtccttcatgtccctagaaatctcaagctttctcttccagatttcaaggaattgtgtaccataagccatatttttattcctgccatgggcaatattacctatgatttctcctttaaatcaagtgtcatcacactgaataccaatgctgaactttttaaccagtcagatattgttgctcatctcctttcttcatcttcatctgtcattgatgcactgcagtacaaattagagggcaccacaagattgacaagaaaaaggggattgaagttagccacagctctgtctctgagcaacaaatttgtggagggtagtcataacagtactgtgagcttaaccacgaaaaatatggaagtgtcagtggcaacaaccacaaaagcccaaattccaattttgagaatgaatttcaagcaagaacttaatggaaataccaagtcaaaacctactgtctcttcctccatggaatttaagtatgatttcaattcttcaatgctgtactctaccgctaaaggagcagttgaccacaagcttagcttggaaagcctcacctcttacttttccattgagtcatctaccaaaggagatgtcaagggttcggttctttctcgggaatattcaggaactattgctagtgaggccaacacttacttgaattccaagagcacacggtcttcagtgaagctgcagggcacttccaaaattgatgatatctggaaccttgaagtaaaagaaaattttgctggagaagccacactccaacgcatatattccctctgggagcacagtacgaaaaaccacttacagctagagggcctctttttcaccaacggagaacatacaagcaaagccaccctggaactctctccatggcaaatgtcagctcttgttcaggtccatgcaagtcagcccagttccttccatgatttccctgaccttggccaggaagtggccctgaatgctaacactaagaaccagaagatcagatggaaaaatgaagtccggattcattctgggtctttccagagccaggtcgagctttccaatgaccaagaaaagggcaacacctggacattgcagggatcccttagaaggacacttaaggttcctcaaaaatatcatcctaccagtctatgacaagagcttatgggatttcctaaagctggatgtaaccaccagcattggtaggagacagcatcttcgtgtttcaactgcctttgtgtacaccaaaaaccccaatggctattcattctccatccctgtaaaagttttggctgataaattcattactcctgggctgaaactaaatgatctaaattcagttcttgtcatgcctacgttccatgtcccatttacagatcttcaggttccatcgtgcaaacttgacttcagagaaatacaaatctataagaagctgagaacttcatcatttgccctcaacctaccaacactccccgaggtaaaattccctgaagttgatgtgttaacaaaatattctcaaccagaagactccttgattcccttttttgagataaccgtgcctgaatctcagttaactgtgtcccagttcacgcgttccgaaaagtgtttcagatggcattgctgctttggatctaaatgcagtagccaacaagatcgcagactttgagttgcccaccatcatcgtgcctgagcagaccattgagattccctccattaagttctctgtacctgctggaattgtcattccttcctttcaagcactgactgcacgctttgaggtagactctcccgtgtataatgccacttggagtgccagtttgaaaaacaaagcagattatgttgaaacaagcctggattccacatgcagctcaaccgtacagttcctagaatatgaactaaatgttttgggaacacacaaaatcgaagatggtacgttagcctctaagactaaaggaacacttgcacaccgtgacttcagtgcagaatatgaagaagatggcaaatttgaaggacttcaggaatgggaaggaaaagcgcacctcaatatcaaaagcccagcgttcaccgatctccatctgcgctaccagaaagacaagaaaggcatctccacctcagcagcctccccagccgtaggcaccgtgggcatggatatggatgaagatgacgacttttctaaatggaacttctactacagccctcagtcctctccagataaaaaactcaccatattcaaaactgagttgagggtccgggaatctgatgaggaaactcagatcaaagttaattgggaagaagaggcagcttctggcttgctaacctctctgaaagacaacgtgcccaaggccacaggggtcctttatgattatgtcaacaagtaccactgggaacacacagggctcaccctgagagaagtgtcttcaaagctgagaagaaatctgcagaacaatgctgagtgggtttatcaaggggccattaggcaaattgatgatatcgacgtgaggttccagaaagcagccagtggcaccactgggacctaccaagagtggaaggacaaggcccagaatctgtaccaggaactgttgactcaggaaggccaagccagtttccagggactcaaggataacgtgtttgatggcttggtacgagttactcaaaaattccatatgaaagtcaagcatctgattgactcactcattgattttctgaacttccccagattccagtttccggggaaacctgggatatacactagggaggaactttgcactatgttcataagggaggtagggacggtactgtcccaggtatattcgaaagtccataatggttcagaaatactgttttcctatttccaagacctagtgattacacttcctttcgagttaaggaaacataaactaatagatgtaatctcgatgtatagggaactgttgaaagatttatcaaaagaagcccaagaggtatttaaagccattcagtctctcaagaccacagaggtgctacgtaatcttcaggaccttttacaattcattttccaactaatagaagataacattaaacagctgaaagagatgaaatttacttatcttattaattatatccaagatgagatcaacacaatcttcaatgattatatcccatatgtttttaaattgttgaaagaaaacctatgccttaatcttcataagttcaatgaatttattcaaaacgagcttcaggaagcttctcaagagttacagcagatccatcaatacattatggcccttcgtgaagaatattttgatccaagtatagttggctggacagtgaaatattatgaacttgaagaaaagatagtcagtctgatcaagaacctgttagttgctcttaaggacttccattctgaatatattgtcagtgcctctaactttacttcccaactctcaagtcaagttgagcaatttctgcacagaaatattcaggaatatcttagcatccttaccgatccagatggaaaagggaaagagaagattgcagagctttctgccactgctcaggaaataattaaaagccaggccattgcgacgaagaaaataatttctgattaccaccagcagtttagatataaactgcaagatttttcagaccaactctctgattactatgaaaaatttattgctgaatccaaaagattgattgacctgtccattcaaaactaccacacatttctgatatacatcacggagttactgaaaaagctgcaatcaaccacagtcatgaacccctacatgaagcttgctccaggagaacttactatcatcctctaatttttttaaaagaaatcttcaatttattcttcttttccaattgaactttcacatagcacagaaaaaattcaaactgcctatattgataaaaccatacagtgagccagccttgcagtaggcagtagactataagcagaagcacatatgaactggacctgcaccaaagctggcaccagggctcggaaggtctctgaactcagaaggatggcattttttgcaagttaaagaaaatcaggatctgagttattttgctaaacttgggggaggaggaacaaataaatggagtctttattgtgtatcat

SEQ ID NO: 150334 - DNA, 384 bp, Homo sapiens
  misc_feature (1)...(384): n = a,t,c or g
cggagcaggctccccgcggccccacagccggatccgaacttgcccccacggcaactcgccccccctggcctccccaagaggcggggattcccggcttgaccccttcaccccggccccccaggggtttctacaaagggcccccaagtcctcccccaggggaagcgcgactttgcacaaccacnnnnnnnnnnnnnnnnnnnnnnnnnnnnnnnnnnnnnnnnnnnnnnnnnnnnnnnnnnnnnnnnnnnnnnnnnnnnnnnnnnnnnnnnnnnnnnnnnnnnnnnnnnnnnnnnnnnnnnnnnnnnnnnnnnnnnnnnnnnnnnnnnnnnntgggtttatttttggacactcattctgtcctctggatctatatatgctcgtgcc

SEQ ID NO: 150335 - DNA, 403 bp, Homo sapiens
ggcacgagctgtcacaagctctatttcaggggtatcctataagtctccatcgggaacggatcccactctgattgcggatgctctggacaaaaaaattgcagaatttgatacagcggaagatctgatcaagtacttcaatccacagtcatgggaagaagatcttgagataatgtatctggacacccctccctttagaggctcagcataccatgatggggagtgagataatgccttgcacggggtctaaggtccttttcagctgaactatctaaggacctcggagagatggcggggtcagaagatgattgtgtgcgaatgccatgcagactgtgcactcccctgactgagaactgcgtctgaagcctgtgatctgtacacttgcaaattgaaagccctcttgtcc

SEQ ID NO: 150336 - DNA, 722 bp, Homo sapiens
catataaagacaaggatgcttttcaaacacatcagttgctgactttttatagatcattatgcccagtataataattagtcctatgtggagtccaggtgacaagacactggtgccctaagggataaagcagaaaatcagtatcacattttaacactgcatttattacaatgtagacattttctgaccatctattttgtgcaagaggcctaaagaacagtgtgatgtagtgtatggcctacaggagtatacaaacctgagttgtgctttccaaggtttcatagaacctgagggtgacagagacataatacagtgccacagatgtctgattccagtttgatattcacacacgttttaaactggctaaaaattaatgcagtttattctatatcaacttttactacatcgaaggcagtccacatgtggattgccaaattaacataattttgtggagatactgaaatagagcttattctgccaattctacaaaatatcactgatgaagaagagtaagaatagtttagttctattcaggtttccttcttttttcctattttctttttttttttttttttttaattttttgtgtttttagtagagacagggtttccccatgttgcccaggccagtctcaaactcccgggctcaagcgatcctcccagcctcagcttctcaaagtgctgggattacaggcgagagccaccacacccagcttatcctagttt

SEQ ID NO: 150337 - DNA, 1149 bp, Homo sapiens
ggggctcgccgtcaacgtggtcaccacgctcgtgctcatctcctactgtctcacggccaccgaagaggcaccatactggacataccttttatgtgcactgggactttttatttaccagccactggatgctattgatgggaaacaagccagaagaacaaactcttgttcccctttaggggagctctttgaccatggctgtgactctctttccacagtatttatggcagtgggagcttcaattgccgctcgcttaggaacttatcctgactggttttttttctgctcttttattgggatgtttgtgttttattgcgctcattggcagacttatgtttcaggcatgttgagatttggaaaagtggatgtaactgaaattcagatagctttagtgattgtctttgtgttgtctgcatttggaggagcaacaatgtgggactatacgattcctattctagaaataaaattgaagatccttccagttcttggatttctaggtggagtaatattttcctgttccaaattattcccatgttatcctccattggtggtgttggcaagaatggaatccactatagcaggcaccagtgtcttgtcacctggactccacataggactaattattatactggcaataatgatctataaaaagtcagcaactgatgtgtttgaaaagcatccttgtctttatatcctaatgtttggatgtgtctttgctaaagtctcacaaaaattagtggtagctcacatgaccaaaagtgaactatatcttcaagacactgtctttttggggccaggtcttttgtttttagacccagtactttaataactttatagacgaatatgttgttctatggatggcaatggtgatttcttcatttgatatggtgatatactttagtgctttgtgcctgcaaatttcaagacaccttcatctaaatatattcaagactgcatgtcatcaagcacctgaacaggttcaagttctttcttcaaagagtcatcagaataacatggattgaagagacttccgaacacttgctatctcttgctgctgctgtttcatggaaggagatattaaacatttgtttaatttttatttaagtgttatacctatttcagcaaataaaatatttcattgcttaaaaaaaa

SEQ ID NO: 150338 - DNA, 582 bp, Homo sapiens
cttctaggtgttgcgccatccagagcctttcaggaagagattttgagggcagggcctccttccacgagcgcctaatctatttgcccttaagcaccccaccagcaaggccgagtgcacggctgaaaagtgctaccgggtcacgaagggccgagggatttttcccagtggaagtccttttaagagtgtgactctggaagatggcaagaccttcattcctgggcagggaaacaatgcttacgtgttccccggggtggcactgggagtcatcgccggcgggatccggcacatcccagatgagatcttcctcctgacagcagagcaaattgcccaggaagtctttgagcagcatctgtcccaggggagactctacccaccactcagcaccatccgagacgtgtctttgagaattgccatcaaagttctcgactacgcgtacaaacacaacctggacagctacacttggcccaaggaagccatgaatgttcagacggtttgaggcagtctcagaggctagtatggggctagatgaagcccagagtaacacccacaatataaatgggttccaaaatggcccaagtgaaa

SEQ ID NO: 150339 - DNA, 449 bp, Homo sapiens
aaatgcccaggaatgccttcacaggagcagcttaactggcagggacctgaggtggaccagtggtcccttagagatgaaaaggaggtctcaggcagctcaagcaggaagatcattttcccttctgctccttcagtccttgtggcagatgctgggcccaagaccgagtctttcatggtattcctagttcccccaccaccaccagcagaagaggaatgggttgtttatagagagcaggcatccccactacccgccttttccctgtaggtgttgctgccatcgcaggagccttcacggagcagattctgagggacatggcctccttccacgagcgccctatcatctttgccctgagcaaccccaccagcaaggccgagtgcacggctgagaagtgctaccgggtcaccgaggtcagcggggagtccttccttcccccggctgagaggacatag

SEQ ID NO: 150340 - DNA, 1966 bp, Homo sapiens
cggaaggagaggaccgaggtctgccaaggaccatgggtgccgcgctggggacaggcacgcggctggctccctggccgggccgggcctgcggcgccctcccgcgctggacacccaccgcgcccgcccaaggctgccactccaagcctggcccggcgcgccctgtgcccctgaagaagcgcggatacgatgtcaccaggaaccctcatctcaacaaggggatggcctttacccttgaagaaaggctgcagcttggaatccacggcctaatcccgccctgctttctgagccaggacgtccagctcctccgaatcatgagatattacgagcggcagcagagtgacctggacaagtacatcattctcatgacactccaagaccggaacgagaagctcttctaccgagtgctgacttcggatgtggagaagttcatgccaatcgtgtacacgcctaccgtggggctggcctgtcagcactatggcctgactttccgcaggccccgtggactgttcatcaccattcatgacaaaggtcatcttgcaacaatgctgaattcttggccagaagacaatattaaggccgtggtggtgactgatggggagcgcatcctgggcctgggagacctgggctgctacggcatgggcatccctgtgggcaagctggccctgtacacggcatgcggaggggtgaacccgcagcagtgcctccctgtgctgctggacgtcggcaccaacaatgaggagctgctcagagaccctctgtacatcggcctgaaacaccagcgcgtgcacgggaaggcatacgatgacttgctggatgagttcatgcaggctgtgacagacaagtttggaataaattgcctcatccaatttgaagacttcgccaatgccaatgccttccgcctgctcaacaaataccgtaacaagtactgcatgttcaatgatgacatccaaggcacagcctccgttgctgtggcagggatcttggctgctctgcgaatcaccaacaacaagctttccaatcacgtgtttgttttccaaggtgcaggcgaggcagctatgggcattgcccacctccttgtcatggccctagagaaagaaggtgtaccgaaggcagaggccacaagaaagatctggatggtggactctaaagggctcattgtcaaggggaggagccacctgaaccatgaaaaggagatgtttgcccaagacccatcctgagtcaaactccctggatgaggtggtgaggctggtgaagcccacagccatcataggtgttgctgccatcgcagaagcccttcacggagcagattttaaggaacatggcttccttcccgaagggccccaatcatttttgccctgagcaacccacccagaaaggccgagtgcacggcttgagaagtgctaccgggtcaccgaggggccgaggggattttttgccagtgggaagtcctttttaaggagtgttgatttgggagatgggcaagaccttcattcctgggggcaggggaaacaatgcttaacgtgttccccgggggtggcaactggaagtcatcgcccggcgggatccggcacatcccaggatgagatcttcctccttgacagcagagccaaattgccccaggaagtctctgagcagcatctggtcccaggggagactctatccaccactcagcaccatccgagacgtgtctttgagaattgccatcaaagttctcgactacgcgtacaaacacaacctggttttcctactacccagagcctaaggacaaggaggctttttgtaagatccctgggtcttacactccagactatgactccttttacactgggacagctacatttgggcccaagggaaggccatgaatgttcagacggtctgaggcagtctcagaggctagtatggggctagatgaagcccagagtaacacccacaatataaatgggttccaaaatggcccaagtgaaaa

SEQ ID NO: 150341 - DNA, 396 bp, Homo sapiens
cccgctagcttaagccctaacttatgtaaatgtactttgcacatttcagatcatggcaaatatactcaagaaatgtttgacaactgtagaagtgctatctttctcatcaatcacatttcccatgattggaacaggaagtttgcagtttcccaaagctgtttttgctaaactaatcctttcagaagtgttcgaatacagtagcagcacaaggccgataactagccctttacaagaagtccactttctggtatatacaaatgacgatgaaggctgtcaggtatggttacatatcccatctggttaattctggcaagtgaacccaagcgcattcagatgtttttatagatctaggaataaccgtgttttctaatcctcgtgccgaattcttggcctcga

SEQ ID NO: 150342 - DNA, 413 bp, Homo sapiens
ggcacgaggaaggatttgaagacgacttagatttggatatttcctttgaggaggttgaaccacttcctgctaccaaaggagggaataagaaatttttggtggaaagcaagaagatgtctatatctaacccaaagaccatttctaggctcatcccccctacctcagcatctctccctgtgaccacggtggctccccagcccattcccatacagagaaaggggaagaatggtgtggccataatgtcaaggctctttgacatgccttgtgatgaaactctctgctctgctgacagcttctgtgtcaatgactacacctgggggggctcgcgatgccagtgcaccctgggcaaaggtggtgagagctgctcagaagatattgttatccagtatcctcagttctttggccactcctat

SEQ ID NO: 150343 - DNA, 339 bp, Homo sapiens
ggcacgaggcaacaagacctcggtgcagttccagaatttctcacccactgtggttcacccgggagacctccagactcagctggctgtgcagaccaagcgcgtggcggcgcaggtggacggcggcgcgcaggtgcagcaggagctcatgatccagagcctgcgggactatgtggcgcctctgtgggagctggtgcggtttagaaacgtcaaggccctgctgggagggaatgtccgcatgatgctgactggaggtgccccgatatctgctcagacacgccgatccatgaaagtcggcttctgctgccagatggccaggtttatggactgacggactcgtgc

SEQ ID NO: 150344 - DNA, 472 bp, Homo sapiens; identical to SEQ ID NO: 144679

SEQ ID NO: 150345 - DNA, 2977 bp, Homo sapiens
atgaagtgggtaacctttatttcccttctttttctctttagctcggcttattccaggggtgtgtttcgtcgaacccccctgggccctgccagctccctgccccagagcttcctgctcaagtgcttagagcaagtgaggaagatccagggcgatggcgcagcgctccaggagaagctgtgtgccacctacaagctgtgccaccccgaggagctggtgctgctcggacactctctgggcatcccctgggctcccctgagctcctgccccagccaggccctgcagctggcaggctgcttgagccaactccatagcggccttttcctctaccaggggctcctgcaggccctggaagggatatcccccgagttgggtcccaccttggacacactgcagctggacgtcgccgactttgccaccaccatctggcagcagatggaagaactgggaatggcccctgccctgcagcccacccagggtgccatgccggccttcgcctctgctttccagcgccgggcaggaggggtcctggttgctagccatctgcagagcttcctggaggtgtcgtaccgcgttctacgccaccttgcgcagcccggtggaggcggtgatgcacacaagagtgaggttgctcatcggtttaaagatttgggagaagaaaatttcaaagccttggtgttgattgcctttgctcagtatcttcagcagtgtccatttgaagatcatgtaaaattagtgaatgaagtaactgaatttgcaaaaacatgtgttgctgatgagtcagcctgaaaaattgtgacaaatcacttcataccctttttggagacaaattatgcacagttgcaactcttcgtgaaacctatggtgaaatggctgactgctgtgcaaaacaagaacctgagagaaatgaatgcttcttgcaacacaaagatgacaacccaaacctcccccgattggtgagaccagaggttgatgtgatgtgcactgcttttcatgacaatgaagagacatttttgaaaaaatacttatatgaaattgccaggaagacatcctacttgtatcgccccgggaactccttttctttgctaaaaaggtataaagctgcttttacaggaatgttgccaagctgctgataaagctgcctgccttgttgccaaagctcgatgaactttcgggatgaagggaaggcttcgtctgccaaacagagactcaagtgtgccagtctccaaaaatttgggagaaagagcttttcaaagcatggggcagtagctcgcctggagccaggaggttttcccaaagctggagttttgccaggaagtttcccaagtttagtggacaggtctttaacccaagttcccacacgggaattgcttgccatgggagatcttgctttgaatgttgctggatggacaggggcgggacctttggcccaagtatatcttgtggaaaattcaagatttcgatcttcccagttaaactggaagggattgctgttgaaaaacctcttgtttggggaaaaatccccacttgcatttgccggaagtgggaaaattgatggaggttgcctggcttggactttgcctttcattaggcttgcttgatttttgtttggaaagtaaagggatgttttggccaaaactattgcttgagggcaaaggatgtctttccgggggcatgttttttgtatggattatgcaagaagggcttcctgatttactctgttcgtgcctgctgctgaggacttgccaaggacatatgaaaccactctagaggagtgctgtgccgctgcagatcctcatgaatgctatgccaaagtgttcgatgaatttaaacctcttgtggaagagcctcagaatttaatcaaacaaaattgtgagctttttgagcagcttggagagtacaaattccagaatgccgctattagttcgttacacccaagaaagtaccccaagtgtcaactccaactcttgtagaggtctcaagaaacctaggaaaagtgggcagcaaatgttgtaaacatcctgaagcaaaaagaatgccctgtgcagaagactatctatccgtggtcctgaaccacttatgtgtgttgcatgagaaaacgccagtaagtgacacagtcaccaaatgctgcacagaatccttcgtcaacaccccaccatgcttttcagctctggaagtcgatgaaacatacgttcccaaacactttaatgctgaaacattcaccttccatgcacatatatccacactttctcagaaggagagacagatcaagaaacaaactgcacttgttgaccttgtcaaacacaagcccaaggcaacaaaagagcaactgaaagctgttatggatgatttcgcagcttttgtagagaagtgctgcaaggctgacgataaggaaacctgctttgccgaggagggtaaaaaacttgttgctgcaagtcaagctgccttaggcttaacccccctgggccctgccagctccctgccccagagcttcctgctcaagtgcttagagcaagtgaggaagatccagggcgatggcgcagcgctccaggagaagctgtgtgccacctacaagctgtgccaccccgaggagctggtgctgctcggacactctctgggcatcccctgggctcccctgagctcctgccccagccaggccctgcagctggcaggctgcttgagccaactccatagcggccttttcctctaccaggggctcctgcaggccctggaagggatatcccccgagttgggtcccaccttggacacactgcagctggacgtcgccgactttgccaccaccatctggcagcagatggaagaactgggaatggcccctgccctgcagcccacccagggtgccatgccggccttcgcctctgctttccagcgccgggcaggaggggtcctggttgctagccatctgcagagcttcctggaggtgtcgtaccgcgttctacgccaccttgcgcagccctga

SEQ ID NO: 150346 - DNA, 949 bp, Homo sapiens
  misc_feature (1)...(949): n = a,t,c or g
ttttttttttttgacagcttgaggttgggtttttatttttttatttgtatagtacaatctctgtggtagcagaaatatatgcacaaaaaacaattcaaataagagttcagagtaaaaaaaaagtcagctaagactgtatcccgcaggacgatttcatatatatggatttcacagctacactcgatccacgccccacaccacatacaggcgtggtgtctcccacaagaatgatgatgtcaggggcatcaggaaaggtaagggccggggaaaccgggcccttgggagaaccctgcccaggggacggcccagcctactcacaaggatccgacactccaggcagagccagaggggcaggagaggcccaaagagctaggtcaatgcagctgggctcccctgggagggggagccgggagacagggaggtcctcacactgcccccgtggccacgcatggctgtctgcacactccatcaggaggaaggtgcaggggagaagtcacatgcagtacagtgaaactcatcagtgtcacacacgcccagcaggaggggaagaagtctgctccactttttatttgtatagtacaatctctgtggtagcagaaatatatgcacaaaaaacaattcaaataagagttcagagtaaaaaaaagtcagctaagactgtatcccgcaggacatttcatatatatggatttcacagctacactcgatccacgccccacaccacatacaggctgctgtctcccacaagaatgatgatgtcaggggcatcaggaaaggtaagggccgggaaaccgggcccttggagaaccctgcccaggggaggcccagcctactcacaggatccgacactccaggcagagcagagggcaggagaggcccaaagagctaggtcaagcagctggctcccctgggaggngagccgngagacagggaggtcctcacactgccc

SEQ ID NO: 150347 - DNA, 361 bp, Homo sapiens
ggcacgagctggaagaattaattctggaatatttcttaaacttgcttgagttgtgtaaggtctggctgctgggctccctgaaaccttgcacatatcttactgtatgactgtatttcgttttgagtctctggattctggggtttggacagatgaccatagtgaggcctgcagaaatatgcatgtcctcagtgtttggactgccagctgcaaggcagagccaaacccaatatggccccatcatccctggctcagctgtgctacctggccatgctggaaggggtttgatcttccaggaatttgcttcacagctctttcctgtcccaagatctatgcctgatgtgtaaattcaggacccaaaagg

SEQ ID NO: 150348 - DNA, 756 bp, Homo sapiens
cgccttttcatcaatcgcccacatcactcgagacgtaaattttttactctctctacaaggttttttcctagtgtccaaagagctgttcctctttggactaacagttaaatttacaaggggatttagagggttctgtgggcaaatttaaagttgaactaagattctatcttggacaaccagctatcaccaggctcggtaggtttgtcgcctctacatgaaaaggatggtttcttggagcgttccacaaactttaaaaccatgaaacatctattattgctaactatggggtgtttttctaagttaagtcccaaggtgtcaacgacaattgaggagggtttcttcagtgcccgtggtcatcgacccccttgacaagaagagagaagaggctcccatgcctgaggcctgccccaccgcccatcagtgggaggtgggctattcgggcttcgtcccagccaaagcagcttgccacttcaaaaggaaagtaggaaaggaaaagcccctggattgctgggaaggttgttttttcacggttggacccagacctggggggttgtttgttgttccttacagggatgttcagtttgccaaggagggtttttcttaacaaccaggggaaagggcccattccaggaattagttgtttgatggagtttaaattaaccattgtgggaagcttgttttcccagacctcctcttctttccttttccagttacatgtattttgctggaaagacctgttggccaaaaagagggcag

SEQ ID NO: 150349 - DNA, 359 bp, Homo sapiens
cccaggcggaattcaatgctgatgatgaacctgctggccttcgtgtccgccgtgctcatgggcttctcgaaactgggcaagtcctttgagatgctgatcctgggccgcttcatcatcggtgtgtactgcggcctgaccacaggcttcgtgcccatgtatgtgggtgaagtgtcacccacagcccttcgtggggccctgggcaccctgcaccagctgggcatcgtcgtcggcatcctcatcgcccaggtaagctggggcaggatctacctgcctggcacggcccctgcccacagcttcagtggctctcggatctgtgcccagcagggcagagtttctcttccgcccagccccctcgtgcc

SEQ ID NO: 150350 - DNA, 343 bp, Homo sapiens
ggcacgagctcctgtgtcatggaagtagtccaggccatgggtaagaagaaagtgttgatcagcgtgcatctcaaggacaagtttgtcatagatgtggacaaaaatatcatcatcagtgatgttacacccagttccttggtggttctaagaaatgacagctacactttgcacaagatcctacccaacaaggtggactcattggtgtcactgatgatggtgaagaatgtaccacattcagcttatcacatgattgttcaactgcatatgcacatcaagaatatcaataaatttatctatctgcatctcaccttctccattttctaaaatacttttcattgcacat

SEQ ID NO: 150351 - DNA, 863 bp, Homo sapiens
tttcgtagacggcaagctgcatgggagaggttcgactgatgataagggcccggtggccggctggataaacgccctggaagcgtatcagaaaacaggccaggagattcctgtcaacgtcccgattctgcctcgaaggcatggaggagtcaggctctgagggcctagacgagctgatttttgcccggaaagacacattctttaaggatgtggactacgtctgcatttctgacaattactggctgggaaagaagaagccctgcatcacctacggcctcaggggcatttgctactttttcatcgaggtggagtgcagcaacaaagacctccattctggggtgtacgggggctcggtgcatgaggccatgactgatctcattttgctgatggaggagcacaagctgtacgacgacatcgactttgacatagaggagtttgccaaggatgtgggggcgcagatcctcctgcacagccacaagtcgcacctgcacctggacctcctgcctgtggttgtcaggctcctgggccaggccctgtttcataccgctcatttcccagacaacattcccagctcctcgaaagacatcctcatgcaccgatggcggtacccgtctctgtccctccatggcatcgaaggcgccttctctgggtctggggccaagaccgtgattcccaggaaggtggttggcaagttctccatcaggctcgtgccgaacatgactcctgaagtcgtcggcgagcaggcatgtggggctgggacacgggaatccatgtcctcacttgggtaccccagcagagcagaggatgacagtggcctgagcgccctgccttctcagccccagcccttcattctctatgccacgtga

SEQ ID NO: 150352 - DNA, 630 bp, Homo sapiens
agccactcagaaggctgaggcaggaggatcgcttgagaccaagagtttgagcctgcggtgagctgtgaatgcacccacggcacttcaagcctgggcaatgtagccaagatcctgtctctacaagaaattttttaaaaatgagcccaagtgtggtgggtgcaatgccctgtagttcccagcctacctcaggaccactgaccgtaggagggttgcttggagcactggagagttggaggctgccgatggagcccatggaaatgcccccaactgcaaattccagcctgggccgaccagaacggagacccccatcttcaaaaaaaattaggtcctggtggtcaatggaatgggattaaccagaggagcttgatgctttctgccttctgtctcaggtgatgcattgcacatttgggatatttggaaaggaaatgaggaaagaaattagggcctcctctgatctctcgctatctgcgggtcctgtccttttctcaagaccttcaccattactggtgttttcctgtcttctctttagtatgatccctcaaaaccagcactaactggaaggatgattttgtctcagtttgtactcctaaataaaaagtaaacatgacccctctaaaaaaaaaaaaaaaa

SEQ ID NO: 150353 - DNA, 458 bp, Homo sapiens; identical to SEQ ID NO: 119947
  misc_feature (1)...(458): n = a,t,c or g

SEQ ID NO: 150354 - DNA, 396 bp, Homo sapiens; identical to SEQ ID NO: 133605
  misc_feature (1)...(396): n = a,t,c or g

SEQ ID NO: 150355 - DNA, 797 bp, Homo sapiens
tgcaggcccagcggcgctagggggtgcaggtctctgtcgagcagcggacgccggtctctgttccgcaggatgtgggtttgttaaagttgttaagaataaggcctactttaagagataccaagtgaaatttagaagacgcccgaaagggtaaaacgtgattattatgctcggaaacgcgttggtgatacaagataaaaataaatacaacacacccaaatacaggatgatagttctgtgtgacaaacagagatatcatttgtcagattgcttatgccccgtatagagggggatatgatagtctgcgcagcgtaatgcacaccgaacctgccaaaatatggtgttgaaggttggcctgacaaattatgctgcagcatatttgtacttggcctgctgctgggcccgcaggctttctcaataggtttgggcatggacaattatctatgaaggccaagttggaagtgactgggtgatgaatacaatgtggaaagcattgattggtcagcccagggtgccttcaacctgctattttggatgcaggccttgccagaaactaccaactggcaataaagtttttgggtgccctgaaagggatgctgtggatgggaggcttgtctatccctcacagtagcaaacgattccttggtttgtctatccctcacagtaccaaatgaatccttggttatgattctgaaaacaaggaatttaatgcagaagtacgccggaagcacatcatgggccagaagtttgcagatgacctgcactgcttaatagaagaagatgaaaatgcttccaaaaaa

SEQ ID NO: 150356 - DNA, 333 bp, Homo sapiens
  misc_feature (1)...(333): n = a,t,c or g
ggcacgagnnnnnnnnnnnnnnnnnnnnnnnnnnnnnnnnnnnnnnnnnnnnnnnnnnnnnnnnnnnnnnnnnnnnnnnnnnnnnnnnnnnnnnnnnnnnnnnnnnnnnnnnnnnnnnnnnnnnnnnnnnnnnnnnnnnnnnnnnnnnnnnnnntattgtttttccattaagttgtactgaaagagatagagagcaacgtaataatactggaggacttcactccacttacatcactatatacatcatcgaggcagaaagtcaacaaagaaactctggacttaaattggacttcagaccaaattaacctaatagacgtttacagaacattctac

SEQ ID NO: 150357 - DNA, 366 bp, Homo sapiens
aagtctgtcgcgggaagtgcagaggcaaatgcatttagtgttcttcagcaagaacaagctgaaagctggatacctaatgtcagtggagtcttctgagtgtttctggaagaagtcgggtccaggctctagttgctggttcttacatgccaccatccacagtccttcagcagattgattcagtgctaatgctgatatcataaatgcggcaaagaagtttgtttctgccagaagtcaatggcagcaggtggaaatttgggacatacacctcttgttgatgagttgtaatactgatgcacacattacaggagagagctgaacgtctctcagccagtgcagcacacatgaagtcagaggctctatatacag

SEQ ID NO: 150358 - DNA, 998 bp, Homo sapiens
tttttttttttttttttttctgagtaaatgggaagggctgggacattactgtgcactgctgtagatacttaaacactgtaaacataggctacgctaaatttatttttttaaaattgcactacaacattatgttgtcagtaagtaataggaatctttcagctccctaataatcttaacgggaccaccatcatatatgtggtccatcattcgaccaaaaacatcattatgtagatacatgactataccttgagtttcgatcttttcctaggctagtgatatgcagtacatgagataatcaatgtcttccttacaaaatgggcttatgttagaagacttttgcccagctgcaggctattgtaagtgttctgagcacatatgagataacctgggccaagctatgatgttcgatacgttaggtgtattaaatgcacttttgactgccatctcagtggatgacagccttctcactgacagcagagagatcttcctcactgtgcccagtgggcaggagaaagagcatgctgcgactggcccagtgacatgcagaggatccagattgcacaaccggatccagaggccttgggaagcattagggagctctccagctgtctcactcaaatctgtagcagcatatggacccacaaatggaggccaaagtgggccctcaattggacactttggcaaccctgaagagacttcttcccttcagacttactgttttagtatgttccagagaagggagtggcattcttcttggggaattcaggaagagggagacacgctgttactctatccattaaataaagctttgatgttcacagccccccgccaccactcagagaaaaaaaataattgccttgctctctaaaactgacttatgccttttattggacaggagcaagctgaaagctggatacctaatgtcagtggagtcttctgagtgtttcctggaagaagtcgggtcccaggctctagttgctggttcttacatgccaccg

SEQ ID NO: 150359 - DNA, 1925 bp, Homo sapiens
atgaagctactaaccagagccggctctttctcgagattttattccctcaaagttgcccccaaagttaaagccacagctgcgcctgcaggagcaccgccacaacctcaggaccttgagtttaccaagttaccaaatggcttggtgattgcttctttggaaaactattctcctgtatcaagaattggtttgttcattaaagcaggcagtagatatgaggacttcagcaatttaggaaccacccatttgctgcgtcttacatccagtctgacgacaaaaggagcttcatctttcaagataacccgtggaattgaagcagttggtggcaaattaagtgtgaccgcaacaagggaaaacatggcttatactgtggaatgcctgcggggtgatgttgatattctaatggagttcctgctcaatgtcaccacagcaccagaatttcgtcgttgggaagtagctgaccttcagcctcagctaaagattgacaaagctgtggcctttcagaatccgcagactcatgtcattgaaaatttgcatgcagcagcttaccagaatgccttggctaatcccttgtattgtcctgactataggattggaaaagtgacatcagaggagttacattacttcgttcagaaccatttcacaagtgcaagaatggctttgattggacttggtgtgagtcatcctgttctaaagcaagttgctgaacagtttctcaacatgaggggtgggcttggtttatctggtgcaaaggccaactaccgtggaggtgaaatccgagaacagaatggagacagtcttgtccatgctgcttttgtagcagaaagtgctgtcgcgggaagtgcagaggcaaatgcatttagtgttcttcagcatggtcctcgggtgttgggccaccatgtcaagagcgggcagcaacaaccaccagcccatctgcaccagggctgttgccaaagccaactcagcagcccatttgatgtttctgcatttaatgccagttactcagattctcggactctttgggatttaatactatctcccaaggccaccagctggctggagattgtatcaagggctgccctataatcaagtaaaaacaattgcctcaagggaaccctttccaacacagatgttccaagctgcccaagaaccaagctgaaaagctgggataccctaatggtcagtggagtcttctgaagtgtttccctggaagaagtccgggtccccagggctctagttgctggttcttacaatgccaccagtccacagttcctttcagcagattattccccaaaaagggggtgggggggggctaaaatgcctgatatcataaatggcggcaaaagaagttttgtttctgggccagaagttcaatgggcagcaagtttggaaaatttggggacattacacctttttgtttgatggagttgtaattactggatggcacacattacaggagagagctgaaccgttctctcagcccagagcagcaaacacattgaaagtccagaagtcctcctatatatccatttgtcttttttccagttgaggtaaaattaaggcataaatgcaggtaaattattcccagctgaccctaaagtcaattaaaaccattcggtttaagtggttttcctacgtttttccccatgaggttaatcaacaagtatttattatgtgctgatatcttggttttaagatgccttaaaggagacagggatataattattgagtatagaagcatcagaaactattaaaattaaggctaagtggctatcggggtaaatagtgccagattactattggtggcgtttaagatgaaagcaagttcaaaatttgtcattttgggtgtcaacagctaaatggtctggtttttacccctgttttgccttttttgcaataacattatttccaaaaaacataaaaaaaaa

SEQ ID NO: 150360 - DNA, 355 bp, Homo sapiens
gagaaaaaagacaccacaaccgaagaaacaaaaaaaagcaaaccccagataaaagagaaggaaagccgaataggcaaaaaaggattaacacagataggaatggaaagaccaccacttaaaatgcacaaaatcacagaaggagcaaataaaaaaaccacagaagaccagaatacagaaaagaccaggacaaccaacacagaaatctgtggcaagcagaaccagctgcacaggcagaagcacctctggtgccactttcaagacaaaacaagagcacagttgaaacatctaatttgaaaatgttgatctcctctcctaagacattgctaaggggcccacaggaaggctggctcgtgcc

SEQ ID NO: 150361 - DNA, 449 bp, Homo sapiens; identical to SEQ ID NO: 150007

SEQ ID NO: 150362 - DNA, 863 bp, Homo sapiens; identical to SEQ ID NO: 150008
  misc_feature (1)...(863): n = a,t,c or g

SEQ ID NO: 150363 - DNA, 1383 bp, Homo sapiens
gacggattcgctctgttgcccaggctgtctcgagaaaaacctgcaacacgaggcccttggttgccttccggggccctcttcgtttcctaatattcataaggagaccacattggcaaacacgtaatggcttaattaagggttcccctggattgcagaattgtcagcagtgggcttgagaacccccagaagggcatagaggcagctgggcagcccccaggcccattgagggtatggagcagggagaagcagcagaaggaggtgatgcccctgccgctccctcccaaaagccaagccccgtcccccacgctccaaatgcccagggaggggtcaagggcccagaaaaggccctacatccttgagtggggcccgagtgtgcgggcaaagctgtctgtcatccccaaggcctggactctggcagaggcgcttttccccaccctggtggctccccagggccgatttgctggtcaaaggagcccagatatactcttaaagacattgatgtggggttttatggggctcccctggctctgggaagtgggcagtgaggcacgcttgaggaagggcttccatctttggtttttgtgggaacctgccgtaatgaccgttggcaaagtgccttctcctgttttggggcatctgtcttctgctctgtaacatcgaaggggctgggcaggatgatctctcagcgtcttccaacctctatggtctaagacggccttccccactccagcactgcctcaaactgggatgatgaggacagtaaaagggcgttctttttttttttttttttaagacggagtctcgactctgttgcccaggctggagtgctagtggtgtactcttggctcactgcaacctccacttcccggggttcaagtgattctcctgcctcagcctcccgagtagctgggattagaggcgtgcaccaccatgcccggctaatttttgtatttttagtagagacagggtttcactatgttggccaggctggtcttgaactccctacttcaggtgattcccccgcctcggcctcacaaagtgctggggttacaggcgtgagccaccagtgcccagcctaaaaggacattgcttaagggcagaaagaaggggggcaggcaagggtgggtcttcagcccccagatgggaagtcagagtggggctgcaaaagatgcagatggggcagggcaggggagacaggtaaacagacagaaaagaccaaggtgccaagggaatcaggaaggagaggtgtcctggccagggaagagggcaccagagcccagcccacacaaccttttcggctacattccttgccctgctggagtcagggaaaacacatccactgtgtccttgggtgggaaatggctttttttaaaaaatagtttc

SEQ ID NO: 150364 - DNA, 383 bp, Homo sapiens
catagtaggtagtaatgacactggttttcataggggtttaagatttgatgggcatttccgcacattccctatcgttaatgccttaaatcagctgcgtgtggcaggaattgcctctttgctcacagtcgggcatggcgaggtagagctagaatctttagtacctcacctgactctcccaggtgcctctgggggtagggaggcctttgccctgatcctgggtgagatctccagccccgtgttccttgcactctgagctgctccctttgcctcccctctccagcacggggcaggatgaggagtggtcagatgaagagagtccccggaaggctgccaccggggttcgggtgagggcactctatgactacgctggccaggaagctgat

SEQ ID NO: 150365 - DNA, 984 bp, Homo sapiens
atgatgcatccaggccttcccgcagcagctctgtggatggatgtagcggtcagcgtctcaggaaaacgaaaaagaacaaacagaaaagaggaaacattcatgaacagagttgaagttaaagtaaagattcctgaagagctaaaaccgtggcttgttgatgactgggacttaattaccaggcaaaaacagctcttttatcttcctgccaagaagaatgtggattccattcttgaggattatgcaaattacaagaaatctcgtggaaacacagataataaggagtatgcggttaatgaagttgtggcagggataaaagaatacttcaacgtaatgttgggtacccagctactctataaatttgagagaccacagtatgctgaaattcttgcagatcatcccgatgcacccatgtcccaggatggttattgcaagttccaacctggaaaggccatcggctttgtcaaggatgtagccaacatcacaatcgtgagtgccgatccccctctgggatggggaatgtgtcctgatgaggaggcctctctcatgctgtcggatagccagtcgctggagctcctgtttgccagtggccagaacaataagctcctgtacggtgaaccccccaagtccccgcgcgccacccgcaagttctcctcgccgccacctctgtccatcaccaagacatcgtcaccgagccgccggcggaagctctccctgaacatccccatcatcactggcggcaaggccctggacctggccgccctcagctgcaactccaatggctacaccagcatgtactcggccatgtcacccttcagcaaggccacgctggacaccagcaagctctatgtgtccagcagcttcaccaacaagattccagatgagggcgatacgacccctgagaagcccgaagacccttcagcgctcagcaagcagagtgagtggccatgccgtcggagctgccccccagcctcccagccccactga

SEQ ID NO: 150366 - DNA, 528 bp, Homo sapiens
accagaccctaagctccttgaggacaaggatgctttaattctctctgaaattatcccatcccccaggccctggcacatcttgttttgtttagtaaatgttattgaactgcgtggggaggctgagacttcgggtccataacctgtatttcatgccctttgcatcctcaacaggatggttattgcaagttccaacctggaaaggccatcggctttgtcaaggatgtagccaacatcacaatcgtgagtgccgatccccctctgggatggggaatgtgtcctgatgaggaggcctctctcatgctgtcggatagccagtgggcccagcaaggcagcccttctggcagcacatccctttgacgagttcatattatccctgggtctcagtcgctgtgatggtggcgaggcaggagatgggagggagagcgcaaactggcaggcaggccctctggttctgaactccagatccacacatgccttcattcttttggttctgttttcttgcttgtaaaatgcaagcaattgtccgca

SEQ ID NO: 150367 - DNA, 646 bp, Homo sapiens
gtgtggcggaattcatgggaaccacacatttaaaatggcactgaaccaattttcagacatgagctttgctgaaataaaacacaagtatctctggtcagagcctcagaattgctcagccaccaaaagtaactaccttcgaggtactggtccctacccaccttccgtggactggcggaaaaaaggaaattttgtctcacctgtgaaaaatcagggtgcctgcggcagttgctggactttctccaccactggggccctggagtctgcgatcgccatcgcaaccggaaagatgctgtccttggcggaacagcagctggtggactgcgcccaggacttcaataatcacggctgccaagggggtctccccagccaggctttcgagtatatcctgtacaacaaggggatcatgggtgaagacacctacccctaccacgggcaaggatggttattgcaaagttccaaccttggaaaggccatcggctttgtcaaggatgtaagccaacatcacaatctatgacgaggaagcgatggtggaggctgtggccctctacaaccctgtgagctttgcctttgaggtgactcaggacttcatgatgtatagaaccggcatctactccagtacttcctgccataaaactccagataaagt

SEQ ID NO: 150368 - DNA, 380 bp, Homo sapiens
ggcacgagacttcttggtcaagaagattatgaagtagccctttcagggggacatctggcttctttatataattatgacatgaatcagtatgaaaatgctgataaactttatttgcgatctatagcaattgcgaagaaactttttgcggaaacttcctttgacctaaaatatatttgcaaaaaagttgttcccccaaaaattgtttttaattggatttaaatgttttttattataaatctttcccccccaaagataagtttttgaaaattctctataatatccctgtgttatatctaaacgggacatgttaaaagagagggctctttttaaatgtagtgtgtctctaaatattttaagaatatttggtgtgcctccctatt

SEQ ID NO: 150369 - DNA, 364 bp, Homo sapiens
ggcacgagaacaaagatgatgccagctgttaataaaaatgtccgctaatcaggcagttcacttgctgcagttttttggggtcccaagggcccagcccaggctcctgtgcccttggccaccgtgggccagtccctggggtcttgtgggagcctccgcgggcctgggagtggcaggacccttagagggcgagagttcacatgagagcgtggggttctgactcgcgagggttcacgtgagagcgtggggttctgagtcgcgagggttcacgtgagagcgtggggttctgactccctcgtgtcatttcagccgcggcgagtcctttgcacatgttggcaacacacgcatccgcatcggcctccctgcg

SEQ ID NO: 150370 - DNA, 1956 bp, Homo sapiens
ggatcacaacaaacacaaccgccacagaagcactatggcattacttctcctatcagcttagcagcccccaaggagactgactgcgtacttacacagaaactaattgagacattgaaaccctttggggtttttgaagaggaagaggaactgcagcgcaggattttaattttgggaaaactaaataacctggtaaaagagtggatacgagaaatcagtgaaagcaagaatcttccacaatctgtaattgaaaatgttggaggaaaaatttttacatttggatcttacagattaggagtgcatacaaaaggtgctgatattgatgcgttgtgtgttgcaccaagacatgttgatcgaagtgactttttcacctcattctatgataagttgaaattacaggaagaagtaaaagatttaagagctgttgaagaggcattcgtaccagttattaaactctgttttgatgggatagagattgatattttgtttgcaagattagcactgcagacaattcctgaagatttggatctacgagatgacagtctgctaaaaaatttagatataagatgtataagaagtcttaacggttgcagggtaaccgatgaaattttacatctagtaccaaacattgacaacttcaggttaactctgagagctatcaaactatgggccaaacgccacaacatctattccaatatattaggtttcctcggtggtgtttcctgggctatgctagtagcaagaacttgccagctttatccaaatgcaatagcatcaactcttgtacataaatttttcttggtattttctaaatgggaatggccaaatccagtgctattgaaacagcctgaagaatgcaatcttaatttgcctgtatgggacccaagggtaaaccccagtgataggtaccatcttatgcctataattacaccagcatacccacaacagaactccacgtacaatgtgtccgtttcaacacggatggtcatggttgaggagtttaaacaaggtcttgctatcacagatgaaattttgctgagtaaggcagagtggtccaaactttttgaagctccaaacttctttcaaaagtacaagcattatattgtacttctagcaagtgcaccaacagaaaaacaacgcctggaatgggtgggcttggtggaatcaaaaatccgaatcctggttggaagcttggagaagaatgaatttattacactggctcatgtgaatccccagtcatttccagcacccaaagaaaatcccgacaaggaagaatttcgcacgatgtgggtgattgggttagtgtttaaaaaaacagaaaactctgaaaacctcagtgttgatctcacctatgatattcagtctttcacagatacagtttataggcaagcaataaacagcaagatgtttgaggtggatatgaaaattgctgcaatgcatgtaaaaagaaagcaactccatcaactactacctaatcatgtgcttcagaaaaagaaaaagcattcaacagaaggtgtcaaattgacagctctcaatgacagcagcctcgacttgtctatggacagtgataacagcatgtctgtgccttcacctactagtgctacgaagaccagtccattgaacagttctggcagctctcagggcagaaacagtcctgctccagctgtaacagcagcatctgtgaccaacatacaggctactgaagtttctgtgccacaagtaaattccagtgaaagctcagggggtacatcgagtgaaagcattcctcaaactgccacacaaccagccatttctccaccaccaaagcctacggtctccagagttgtttcttcaacacgtctggtaaacccaccacctagatcttcaggaaatgcagcaacttcaggaaatgcagcaacaaaaatacctactcctatagtaggagtcaagaggacatcctcacctcataaagaagagagc

SEQ ID NO: 150371 - DNA, 1002 bp, Homo sapiens
ggcacgagtgcgttttcatggagcttgggcttagaacttttagtttgctcatacatttgtattgtaagtttttccatgtctctgattgtcagccacactgatagctacattttcatgaaatccagataaactatggtaatgctcttctttgcagggaagaatttcgcacgatgtgggtgattgggttagtgtttaaaaaaacagaaaactctgaaaacctcagtgttgatctcacctatgatattcagtctttcacagatacagtttataggcaagcaataaacagcaagatgtttgaggtggatatgaaaattgctgccatgcatgtaaaaagaaagcaacttcatcaactactacctaatcatgtgcttcagaaaaagaaaaagcattcaacagaaggtgtcaaattgacagctctcaatgacagcagcctcgacttgtctatggacagtgataacagcatgtctgtgccttcacctactagtgctacgaagaccagtccattgaacagttctggcagctctcaggggtaaggaaaaagagggaaatagaagtggaggggctgtttgctaaatcaatcagatacattctctttttgctattaaagtcatctatttagaatgttattttcattccatctactaatttttttttaaatagcaatttaattcccaaggtttgggggatagtactttttggttttgtcctgtcatacttaacattttatttttgagactgacaacgtgcttcagtctgatgagaatgaatgttaacacctatcccctgcaaattcatgcatttagatagctactgctacagtgcactggttatgggtgtgctgatgagaaccagacaaaagggaccaaaaccacctttctgtccccagagctgcttataccctttgtaacagggaatgtgtctatgatagttagggaaacctgttttagaagagctagatatctgtctaacatttacagcagttaaaattttaaaaatttatta

SEQ ID NO: 150372 - DNA, 568 bp, Homo sapiens
  misc_feature (1)...(568): n = a,t,c or g
tttcgtgcagtgtacagtgaagcggaggcagagcgtctccgcgagcttctctccactttcccatagagaaaccctgactggccgctgagggctagctacacacacgccctcacgcccggcgagcccgcgaggtcactatcatatgacaaaggctttgcgcnacgttcatcttcctccctgtgtactttccatttgccttcctggaatcctgctgcatcacagaagctggaagttctgatgttccactgaaatcacaatggaaagtcttgacttgactggtcacagtaatgaaaggcagtaatagaaataaggatcattcagcagaaggagaaggggttggaaaacgaccaaaacgaaagtgtctttcagtggcatccattgctagcaaagaaacttcttgatttttcagaagaggaagaagaggaagacgaagaggaggatattgataaggttcaacttcttggggccgatggcctagagcaagatgttggtgaaactgaagatgatgaatcaccagagcagcgagcccggagaccaatgaatgcatttcttttattttgcaaacgcc

SEQ ID NO: 150373 - DNA, 324 bp, Homo sapiens
ggcacgagcggcacgagagcatatcagcaactcgaagaatcaaggatggcagaccaggatacgataccttgccaagggtattcatccagtggtttaaaaacccaacgaaatacatcaataaatatgcaactgccttcaagagagacaaacccctattttaatagcttggagcaaaaggacctggtgggctattcatccacaagggccagttctgtgcccattattccttcagcgtctaaagaccatatcctacatgaagagaaacggagtaaacaaatatagatgctatatatgagacgtatttagtaaaacggtaacaatatg

SEQ ID NO: 150374 - DNA, 352 bp, Homo sapiens
ggcacgagcgaagatttgagcttaccatacggctcttgaactggactgaggagcgggacaatctctggggggatgcattcacgactgacatctttgaggatgatgccatggtgaccatcactttctgcctgaaggatggaccgccgagatgtaccatgggtcggaccctgatcccacgctacttccgtagcatcattgaggggggtgctacggagctgtactatgatcttaagcaccccgaggaggcgttccacagcatctttgtggccatcgactgctacctgggctgcatggagacccagcatgcgcagcccatgttcacccaggtgcgtgtggagggccggctgtacct

SEQ ID NO: 150375 - DNA, 561 bp, Homo sapiens; identical to SEQ ID NO: 134281
  misc_feature (1)...(561): n = a,t,c or g

SEQ ID NO: 150376 - DNA, 462 bp, Homo sapiens
  misc_feature (1)...(462): n = a,t,c or g
tttttttttttttttttttgagacggagtcttgctcttgtcacccaggctagagtacaatggcatgatctcggttcactgcaaccttcgccttctgggttcaagagattctcctgcctcagccttccaagtacctgggatcacaggcacccaccaccacgcctggccaattttttttttttttttggatctttagtagggttttgccatgttggccagggntggtctcgaactcctgaccttaagtgatccacttgccttggccttccaaagtgctagggattacagggcgtgagccaccaacggcccagccccctgtctctttttttaaaacacaatttaaaagcaggaaagaaaaaatctgtgctttttagactcagattcttaattagctagtatttcttaattcaatcaataaattattaagaccttttcactgctccctttttaaagtcttctttgg

SEQ ID NO: 150377 - DNA, 1890 bp, Homo sapiens
gagcaatggagcttaccatctttatcctgagactggccatttacatcctgacatttcccttgtacctgctgaactttctgggcttgtggagctggatatgcaaaaaatggttcccctacttcttggtgaggttcactgtgatatacaacgaacagatggcaagcaagaagcgggagctcttcagtaacctgcaggagtttgcgggcccctccgggaaactctccctgctggaagtgggctgtggcacgggggccaacttcaagttctacccacctgggtgcagggtgacctgtattgaccccaaccccaactttgagaagtttttgatcaagagcattgcagagaaccgacacctgcagtttgagcgctttgtggtagctgccggggagaacatgcaccaggtggctgatggctctgtggatgtggtggtctgcaccctggtgctgtgctctgtgaagaaccaggagcgggattctccgcgaggtgtgcaagaatgcctgaagaccgggaggggctttcctatttcatggaagcatgtggcaagctgaagtgttcgacttggaattacttctggcaacaagtccctggatcctgccctggcaccttctgtttgatgggtgcaacctgaccagagagagctggaaggccctggagcgggccagcttctctaagctgaagctgcagcacatccaggccccactgtcctgggagttggtgcgccctcatatctatggatatgctgtgaaatagtgtgagctggcagttaagagctgaatggctcaaagaatttaaagcttcagttttacatttaaaatgctaagtgggagaagagaaacctttttttttggggggcggtttttttggtttgttgttggttttttttttttttttggcgggaagagggagttttgctcttgttgcccaggctggagtgcagtggcgtgatctccgctcactgcaacctccacctcgcgggtttaggcgattcttctgcctcagcctccctggtgcctgtggtcccaggtacttggggggctgaggcaggagaatctcttgaacccagaaggcgaaggttgcagtgaaccgagatcgtgccgttgtactctggcctgggtgacaagagcaagactccgtctcaaaaaaaaaaaaaagaaaaaaaaagaagtagagacagggaggcggggtctcactgtgttgcctaggccggtcttgaactcctgggctcaagtgattctcccaccttgacctcctaaattgttgggattacaggtgtgagacagtgcacctggccgaaatagctcaagtttctgaaaaacaaatctgaatctatttgttattcttagcgtcactggtctggctttcagaattaacatacaaggttgccacacctagttctggcccagctttatggtcttttattccagtattccaccaaagtttgtttttcctgcattccagttctcaagtcttaaggataaagattgtacttgacagtttagtatatccataaaactatttgaaggtggttaaggttccttgggttcaattttccttaaaactttgcctgaatattgtagattgtagggcaatgaaaaggtctactaaattaggaaaaccttgaataattaggtatcctaggtaagagcccctaaacatcaagcaatctgtgagtctgtaaagaaataaatattttttggattattcttatctaattccacccctgttggaagatgatttctttgttctttgcaactatggaagctgtgaaaatcatcacaagtgcctctgaaagcgagtgttaggttggttagagggtttaatattttctgcaatggtttgtaggaattttaataaatgtagtatattttctgagaaaaaaaaaaaaaaaaa

SEQ ID NO: 150378 - DNA, 334 bp, Homo sapiens
ggcacgaggatgtccaatcaaatcacagtgatatgagtgattcgggcaagtcttctcccgtagcccattctattctctggatttggggcagggactctgatgcatatagggacaaacagcatattctatggcctaaaagagcagattgtacagaaagctaccctagagtccctgctggtggggaattgccaacgtattttctgcctccggaaaacaaaggactcaggatccacgaactcaacagtgatgattattctacagaagaagaggcccaaacccctgactgttccataactgacttcacaagacgccacactctgtcctacttagtccg

SEQ ID NO: 150379 - DNA, 593 bp, Homo sapiens
cgaggaagacattgccctggtcaacctggcaaacgttctacacagagcacacttctctgctgatgctgctgtcgtggtccatgcagctattacactttggggaatatatatgcaatgcttggggaatataaccactcagtgctctgttatgaccacgctttgcaggccagacctgggtttgagcaagctataaagaggaagcatgctgtcctatgtcagcaaaaactggagcagaaattggaggctcagcctggatctcctccagggaacactgaatgagttaaaagagtatcaaaagcagcatgaccactacctgagacagcaggaaatcctagaaaaacataaactgattcaggaggagcaaatcttaagaaatatcattcatgagactcagatggcaaaagaggcacaattaggaaatcatcagatatgccgactggtcaaccagcagcatagtttacattgccagtgggaccagcctgtacgctatcatcgtggagatatctttgaaaatgtggactatgttcaggtctttttcttggtccagtctaattcttataaacgtttgctttataaagattttttaaaacttt

SEQ ID NO: 150380 - DNA, 1033 bp, Homo sapiens
gttctacacagagcacacttctctgctgatgctgctgtcgtggtccatgcagctctggatgacagtgacttcttcaccagctattacactttggggaatatatatgcaatgcttggggaatataaccactcagtgctctgttatgaccacgctttgcaggccagacctgggtttgggcaagctataaagaggaagcatgctgtcctatgtcagcaaaaactggagcagaaattggaggctcagcatagatctctccagcgaacactgaatgagttaaaagagtatcaaaagcagcatgaccactacctgagacagcaggaaatcctagaaaaacataaactgattcaggaggagcaaatcttaagaaatatcattcatgagactcagatggcaaaagaggcacaattaggaaatcatcagatatgccgactggtcaaccagcagcatagtttacattgccagtgggaccagcctgtacgctatcatcgtggagatatctttgaaaatgtggactatgttcagtttggtgaggattcatcaacctccagtatgatgtctgtgaactttgatgttcaatcaaatcagagtgatatcaatgattcggtcaagtcttctcccgtagcccattctattctctggatttggggcagggactctgatgcatatagggacaaacagcatattctatggcctaaaagagcagattgtacagaaagctaccctagagtccctgttggtggggaattgccaacgtattttctgcctccggaaaacaaaggactcaggcaagtggtgatggatttggcaaagcacctgattctgcatgattgtcatctaagcggttctttgagagcaccagccttggacttgaaaagttaagtctttatcttgaagtcacccaaactttgaaaatatgaatcttgttcctttttcttgtgccaggatccacgaactcagcagtgatgattattctacagaagaagaggcccaaacccctgactgttccataactgacttcggaaaaagccacact

SEQ ID NO: 150381 - DNA, 352 bp, Homo sapiens
  misc_feature (1)...(352): n = a,t,c or g
ggcacgagagcttacggtgggtgctggaccacggctggatgatgggagatggcaccaggtggaagtcaagatggagggggactctgtgctgctggaggtggatggggaggaggtgctgnncctganactggtatctgggcgcttggccagcgcacgccattcgatcatgaggattgcgcttgatgggctggtattccccggatccaacctttgggtgccgctggttcctgccctggatggatgcctgcgacggaattcccgggtggacaaacaggccgggatctcggcatgtgccgcccctagcctgataagctgtgatgtatactcggatcccggaagatttcttcctccg

SEQ ID NO: 150382 - DNA, 1051 bp, Homo sapiens; identical to SEQ ID NO: 149829
  misc_feature (1)...(1051): n = a,t,c or g

SEQ ID NO: 150383 - DNA, 15994 bp, Homo sapiens
gcacaatgaagtgggtaacctttatttcccttctttttctctttagctcggcttattccaggggtgtgtttcgtcgagatgcacgtaagaaatccatttttctattgttcaacttttattctattttcccactaaaataaagttttagtaaactctgcatctttaaagacttattttggcatttatttctaaaatggcatcgtattttgtatttgtgaagtcttacaaggttatcttattaataaaattcaaacatcctaggtaaaaaaaaaaaaaggtcagaattgtttagtgactgtaattttcttttgcgcactaaggaaagtgcaaagtaacttagagtgactgaaacttcacagaatagggttgaagattgaattcataactatcccaaagacctatccattgcactatgctttatttaaaaaccacaaaccctgtgctgttgatctcataaatagaacttgtatttatatttattttcattttagtctgtcttcttggttgctgttgatagacactaaaagagtattagatattatctaagtttgaatataaggctataaatatttaataatttttaaaatagtattcttggtaattgaattattcttctgtttaaaggcagaagaaataattgaacatcatcctgagtttttctgtaggaatcagagcccaatattttgaaacaaatgcataatctaagtcaaatggaaagaaatataaaaagtaacattattacttcttgttttcttcagtatttaacaatccttttttttcttcccttgcccagacaagagtgaggttgctcatcggtttaaagatttgggagaagaaaatttcaaagccttgtaagttaaaatattgatgaatcaaatttaatgtttctaatagtgttgtttattattctaaagtgcttatatttccttgtcatcagggttcagattctaaaacagtgctgcctcgtagagttttctgcgttgaggaagatattctgtatctgggctatccactaaggtcgtcactggtcacatggctattgagtacttcaaatatgaccagtgcaactgagaaacaaaaacttaaattgtatttaattgtagttaatttgaatgtatatagtcacatgtggctaatggctactgtattggacagtacagctctggaacttgcttggtggaaaggactttaatataggtttcctttggtggcttacccactaaatcttctttacatagcaagcattcctgtgcttagttgggaatatttaatttttttttttttttaagacagggtctcgctctgtcgcccaggctggagtgcagtggcgcaatctcggctcactgcaaactccgctcccgggttcacgccattctcctgcctcagcctcccgagtagctgggactacaggcgcccgccatcacgcccggctaatcttttgtatttttagtagagatggggtttcaccgtgtgccaggatggtctcaatctcctgacatcgtgatctgcccacctcggcctcccaaagtgctgggattacaggagtgagtcaccgcgcccggcctatttaaatgttttttaatctagtaaaaaatgagaaaattgtttttttaaaagtctacctaatcctacaggctaattaaagacgtgtgtggggatcaggtgcggtggttcacacctgtaatcccagcactttggaaggctgatgcaggaggattgcttgagcccaggagtacaagaccagcctgggcaagtctctttaaaaaaaacaaaacaaacaaacaaaaaaattaggcatggtggcacatgcctgtagtcctagctacttaggaggctgacgtaggaggatcgtttggacctgagaggtcaaggctacagtgagccatgattgtgccactgcactccagcctgggtgacagagtgagactctgtctcaaaaaagaaaaaggaaatctgtggggtttgttttagttttaagtaattctaaggactttaaaaatgcctagtcttgacaattagatctatttggcatacaatttgcttgcttaatctatgtgtgtgcatagatctactgacacacgcatacatataaacattagggaactaccattctctttgcgtaggaagccacatatgcctatctaggcctcagatcatacctgatatgaataggctttctggataatggtgaagaagatgtataaaagatagaacctatacccatacatgatttgttctctagcgtagcaacctgttacatattaaagttttattatactacatttttctacatcctttgtttcagggtgttgattgcctttgctcagtatcttcagcagtgtccatttgaagatcatgtaaaaattagtgaatgaagtaactgaatttgcaaaaacatgtgttgctgatgagtcagctgaaaattgtgacaaatcacttgtaagtacattctaattgtggagattctttcttctgtttgaagtaatcccaagcatttcaaaggaattttttttaagttttctcaattattattaagtgtcctgatttgtaagaaacactaaaaagttgctcatagactgataagccattgtttcttttgtgatagagatgctttagctatgtccacagttttaaaatcatttctttattgagaccaaacacaacagtcatggtgtatttaaatggcaatttgtcatttataaacacctctttttaaaatttgaggtttggtttctttttgtagaggctaatagggatatgatagcatgtatttatttatttatttatcttattttattatagtaagaacccttaacatgagatctaccctgttatatttttaagtgtacaatccattattgttaactacgggtacactgttgtatagcttactcatcttgctgtattaaaactttgtgcccattgattagtaacccctcgtttcgtcctcccccagccactggcaaccagcattatactctttgattctatgagtttgactactttagctaccttatataagtggtattatgtactgtttatctttttatgactgacttatttcccttagcatagtgcattcaaagtccaaccatgttgttgcctattgcagaatttccttcttttcaaggctgaataatattccagtgcatgtgtgtaccacattttctttatccattaatttgttgattgatagacatttaggttggttttctacatcttgactatcatgaatagtgttgcaatgaacacaggagagctactatctcttagagatgatatcatggtttttatcatcagaaaacacccactgatttctatgctaattttgttacctgggtggaataatagtacagctatatattcctcattttagatatctttgtatttctacatacaataaaaaagcagagtacttagtcatgttgaagaactttaaacttttagtatttccagatcaatcttcaaaacaaggacaggtttatctttctctcaccactcaatctatatatacctcttgtgggcaaggccagtttttatcactggagcctttcccctttttattatgtacctctccctcacagcagagtcaggactttaactttacacaatactatggctctacatatgaaatcttaaaaatacataaaaattaataaattcbgtctagagtagtatattttccctggggttacgattactttcataataaaaattagagataaggaaaggactcatttattggaaagtgattttaggtaacatttctggaagaaaaatctctatatcttaatagtcacttaatctatgatggattgtgttactcctcagttttcaatggcatatattaaaacatggccctctaaaaagggggcaaatgaaatgagaaactctctgaatgtttttctcccctaggtgaattcacctgctgcttagaagcttattttctcttgatttctgttataatgattgctcttaccctttagttttaagtttcaaaataggagtcatataactttccttaaagctattgactgtctttttgtcctgttttattcaccatgagttatagtgtgacagttaattcttatgaaaattatatagagatggttaaatcatcagaaactgtaaaccaacgattgggaggggaagcggatttttaaatgatttcctgaccaagcttaaccagtatattaaatcctttgtactgttctttggctataaagaaaaaaggtactgtccagcaactgaaacctagctttcttccatttagcataccctttttggagacaaattatgcacagttgcaactcttcgtgaaacctatggtgaaatggctgactgctgtgcaaaacaagaacctgagagaaatgaatgcttcttgcaacacaaagatgacaacccaaacctcccccgattggtgagaccagaggttgatgtgatgtgcactgcttttcatgacaatggagagacatttttgaaaaagtaagtaatcagatgtttatagttcaaaattaaaaagcatggagtaactccataggccaacactctataaaaattaccataacaaaaatattttcaacattaagacttggaagttttgttatgatgattttttaaagaagtagtatttgataccacaaaattctacacagcaaaaaatatgatcaaagatattttgaagtttattgaaacaggatacaatctttctcaaaaatttaagatagacaaattctttaatgtattccgcagatatgtatatatggttgttataattgatttcgttttagtcagcaacattatattgccaaaatttaaccatttatgcacacacacacacacacacacacacttaacccttttttccacatacttaaagaatgacagagacaagaccatcatgtgcaaattgagcttaattggttaattagatatctttggaatttggaggttctggggagaatgtcgattacaattatttctgtaatattgtctgctatagaaaagtgactgtttttcttttttaaaatttagatacttatatgaaattgccagaagacatccttacttttatgccccggaactccttttctttgctaaaaggtataaagctgcttttacagaatgttgccaagctgctgataaagctgcctgcctgttgccaaaggtattatgcacacgaatagaaaaaaagagtttattatccaacctgattttgtccattttgtggctagatttagggaccctgagtgtctgatacaaactttcccacatggtcaaaaaagccttccttttatctgtcttgaaaatctttcatctttgaaggcctacactctcgtttcttcttttaagatttgccaatgctgatctgtcagaggtaatcactgtgcatgtgtttaaagatttcaccactttttctgctggtgatcactatagtgaaatactgaaacttgtttgtcaaattgcacagcaaggggacacagttcttgtttatcttttcatgataatttttagtagggagggaattcaaagtagagaattttactgcatctagatgcctgagttcatgcattcattccataaatatatattatggaatgctttattttcttttctgaggagtttactgatgttggtggaggagagactgaaatgaattatacacaaaatttaaaaattagcaaaattgcagcccctgggatattagcgtactctttctctgacttttctcccacttttaaggctctttttcctggcaatgtttccagttggtttctaactacatagggaattccgctgtgaccagaatgatcgaatgatctttccttttcttagagagcaaaatcattattcgctaaagggagtacttgggaatttaggcataaattatgccttcaaaatttaatttggcacagtctcatctgagcttatggaggggtgtttcatgtagaatttttcttctaattttcatcaaattattcctttttgtagctcgatgaacttcgggatgaagggaaggcttcgtctgccaaacagagactcaagtgtgccagtctccaaaaatttggagaaagagctttcaaagcatggtaaatacttttaaacatagttggcatctttataacgatgtaaatgataatgcttcagtgacaaattgtacatttttctgtattttgcaaagtgctgtcaaatacatttctttggttgtctaacaggtagcactctaatagaggtcaaaatcagaatatcaatgacaatttgacattatttttaatcttttcttttctaaatagttgaataatttagaggacgctgtcctttttgtcctaaaaaaagggacacatatttaagttctatttatttataaaatcttggactcttattctaatggttcattatttttatagagctgtaggcatggttctttatttaattttttaaagttatttttaatttttgtggatatagagtaggtatacatatttacggggtatatgagatattttgatctaagtatacaacatatataatccctttatttaattttatcttccccccaatgatctaaaactatttgcttgtccttttctgtcttatagttaaattcagtcaccaactaagttgaagttacttcttatttttgcatagctccagctctgatcttcatctcatgtttttgcctgagcctctgttttcatattacttagttggttctgggagcatactttaatagccgagtcaagaaaaatactagctgccccgtcacccacactcctcacctgctagtcaacagcaaatcaacacaacaggaaataaaatgaaaataatagacattatgtatgctctctagaaactgtcaattgaactgtatttgctcatcattcctaccatctacaccaccaaaatcaacccaatttatgaaaaaaaaaccgccccaccatacaattctacacagataaacaggctatgattggttttgggaaagcagtcacctttacctgatttaggcaactgtgaaatgactagagaatgccgaaaattagacgtttacatcttgtcatagactttgcagatagtgctggatctttctttttataagtaagatcaataaaaactccctcattctgtagaagttatgatttcttttctaagagacctttagaagtcagaaaaaatgtgtttcccttgcgaaaaaagataactggagtttgtgtagtacttcccagattataaaatgcttttgtatgtattatctaatttaatcctcaaaacttcttcaatttagcatgttgtcatgacactgcagaggctgaagctcagagacgctgagccctctgctaacaagtcctactgctaacaagtgataaagcccgagctggaagtcacatctggactccaaacctgatgcttctcagcctgttgccccttttagagttcctttttaatttctgcttttatgacttgctagatttctacctaccacacacactcttaaatggataattctgccctcaggataagtgattaccatttggttcacaactcgaactaatgaattttaaaaattatttctgtatgtccattttgaattttcttatgagaaatagtatttgcctagtgttttcatataaaatctcgcatgataataccattttgattggcgattttctttttagggcagtagctcgcctgagccagagatttcccaaagctgagtttgcagaagtttccaagttagtgacagatcttaccaaagtccacacggaatgctgccatggagatctgcttgaatgtgctgatgacagggtaaagagtcgtcgatatgctttttggtagcttgcatgctcaagttggtagaatggatgcgtttggtatcattggtgatagctgacagtgggttggattgtcttctgtgctttcgtctgtcctatcttcaatctttccctgcctatggtggtggtacctttctgtttttaacctgctataaattaccagataaacccattcactgatttgtaactcctttcagtcatgctctaactgtaaatgaaggcttaaactgaagtagaacagttacaaggttttacttggcagaacatcttgcaaggtagatgtctaagaagatttttttttctttttttaagacagagtttcgctcttgtttcccaggctggggtgcaatggtgtgatcttggctcagcgcaacctctgcctcctgggttcaagtgattttcatgcctcagcctcccaagtagctgggattacaggcatgcgccaccacacctggctaattttgtatttttagtagaggcggggtttcaccatattgtccagactggtctcgaactcctgacctcaggtgatccacccgccttggcctcccaaagtgctgggattacaggcatgagccaccttgcccagcctaagaagattttttgagggaggtaggtggacttggagaaggtcactacttgaagagatttttggaaatgatgtatttttcttctctatattccttccctaaattcactctgtttgttagatgtgcaaatatttggaatgatatctcttttctcaaaacttataatattttctttctccctttcttcaagattaaacttatgggcaaatactagaatcctaatctctcatggcactttctggaaaatttaaggcggttattttatatatgtaagcagggcctatgactatgatcttgattcatttttcaaaaatcttctatattttatttagttatttggtttcaaaaggcctgcacttaattttgggggattatttggaaaaccagcattgagttttaatgaaaaaaacttaaatgccctaacagtagaaatataaaattaataaataactgagctgagcacctgctactgattagtctattttacttccgtgggaatgtttttgtagtcctatctccatctccaggtttaggagcaaacagagtatgttcatagaaggaatatgtgtatggtcttagaatacaatgaacatgttctgccaacttaataaaggtctgaggagaaagtgtagcaatgtcccttcgtgttgaacaatttccaccaacttacttataggcgccccttgccccgtatatctgtgaaaatcaagattcgctctccagtaaactgaaggaatgctgtgaaaaacctctgttggaaaaatcccactgcattgccgaagtggaaaatgatgagatgcctgctgacttgccttcattagctgctgattttgttgaaagtaaggatgtttgcaaaaactatgctcaggcaaacgatgtcttcctgggcatgtacgtagataagaaattattcttttatagctttggcatgacctcacaacttaggaggatagcctaggcttttctgtggagttcctacaatttccctgctgcccacaatgtttcttcctccttccctttcccacgctttcccaatttttgacatcgttaattcgttgaatacattgtcataacataatacatgttcacggcaaagctcaacattccttactccttaggggtatttctgaaaatacgtctagaaacattttgtgtatatataaattatgtatacttcagtcattcattccaagtgtatttcttgaacatctataatatatgtgtgtgactatgtattgcctgtctatctaactaatctaatctaatctagtctatctatctactctatgcaatgatagcaaagaagtataaaaagaaatatagagtctgacacaggtgctttatatttggtgaaaagaccagaagttcagtatcctggcaatatggtaggcaactcaattacaaaataaatgtttacgtattgtcagaagttgtggtgataaactgcatttttgttgttggattatgataatgcactaaataatatttcctaaaattatgtaccctacaagatttcactcatacagagaagaaagagaatattttaagaacatatctctgcccatctatttatcagaatccttttgagatgtagtttaaatcaaacaacctgttaataaaaataacaagtatcattcatcaaagacttcatatgtgccaagcagtgtgtgttttgtgtagattatgtcatatagttctcataatccaccttccgagacagatactatttattttttgagacagagttttactcttgttgcccaggctggagtgcaatggtgccatctcggctcactataaccttcgcctcccaggttcaagcgattctcctgcctcagcctcctgggattacaggcatgcaccaccatgcctggctaattttgtatttttactagagatggggtttcaccatgttggtcagactggtctcaaactcctgacctctggtgatatgcctgcctcagcctcctaaagtgctgggattacaggcatgagccactgtgcccagccgacagatactattattatttccattctaccgagaaggagactaaggctctgatcatttaaataagttgcctaaggtgatgcagtgatataagtagcagagctaggaattgagccttggtaactttaactctggaccccaagtccttagctactaagctttactgcatggggtttagtcaaattaagacttttggaatatgcgttacttttgagattagctttgtgatattttttgtgctcatttgtccaacaaagtctattttattttcatcttaattcgctttttgtatgaatatccaagaaggcatcctgattactctgtcgtgctgctgctgagacttgccaagacatatgaaaccactctagagaagtgctgtgccggtgcagatcctcatgaatgctatgccaaagtggtaggtttattgttcgcaaaaaatgtagttctttgactgatgattccaataatgagaaagaaaaataatgcaagaatgtaaaatgatatacagtgcaatttagatcttttcttgagatcgtttcaattctggaatcttaaacatgaaagaaaaagtagccttagaatgattaacaaaatttagactagttagaatagaaagatctgaatagagcaatctctacacacttttgatctttttttctctttttcacaatcctgagaacaaaaaaaaattaaatttaaatgttaattagaagatatttaacttagatgtaaagtgagttaacctgattccaggattcatcacgtactagaattagtatcttatggtaaattatagaacctatccctttagaatattttcaaatctttttgaggatgtttaggaatagttttacaagaaattaagttaggagaggaaatctgttctggaggatttttagggttcccactagcatatgtaatggtttctgaactattcagaatcagagaaaactcatttttcctgctttcaagaagctactgtatgccaggcaccatgcacaaacaatgaccaacgtaaaatctctcattttggagagcctggaatctaactggaaaggtgaactaataataatactatgtacaatcatagccatcatttattaaacttttcttctatgcaaggcactgtttaatttccttagcttacctggtttacagagcagctctatgagatgagtgccatctttgcccctattttagggataaggattccgaaatgtggagatggtaagtcaaattgcacaactgaagcatgacttacatgacttggctcaaatactggtcattgaactccagagcctgaatattcttaaccacttacatgatgcaagctgaccaaataaatagttcgaatgtattgtgacagagcggcattgatattcatctattcatgtggctttgagtaggaagaagaaaggatatcattctgaccagagcggtgaaaaacaacctgcatctgatcctgaggcataatactattaacacaattcttttatgtttcagttcgatgaatttaaacctcttgtggaagagcctcagaaatttaatcaaacaaaattgtgagctttttgagcagcttggagagtacaaattccagaatgcgtaagtaatttttattgactgattttttttatcaatttgtaattatttaagacttaatatagagccacctagcatagaacttttcagaatgaaaatacattgcatatttctaatcactctttgtcaagaaagataggagaggagagataaaatagttgatggggtggagaggtctatatttgwatgtagtctaaaaattgttctcttaagattggaagtatgtaggctgggagggtaaataccaaatcttggtatatcagaactgagcatgtcccttgacggttaagaaatagttaatgggcaaatagagcatggcaatattttgtagagcagcaagtagtaggccttgaatagatgtcgctcaaaaagtaatatgtaagctgaacacaaaaatgtaacaaatgaatttagatacatatttgaatattaaattcaggttgtttgggagatgcacctagtctttgatggttaaacctttccctccatagaagagacagagacagaatggcttgctggactaatgtcccaattcaatagagtcttatctacgaaggttaaaaacaagaagagacatattatacagtagatatttcttgtgtggctcatacacatggtgctcttctgattatggattttagagataataacagtgaacaagacatagtttctttcctcgagtagattaaagtcctacattgacttttaatggtgactggcattcttaatacatgattattatatattaggtactatgtcacattaattataatactttactatttttaatttaacccttgaactatccctattgagtcagatatatttccttccattttctacttgtatctttcaagtttagcatatgctgatacatatgaagctctctccaggttttattgaaagaagaaattaatcaatttattactgtccctgaattaggcaactcactttcccaagattatgcccgtggtacaggtggaactcaaagccaagtttaactagttgttcaggagaatgttttctaccctccactaacccactactctgcagatggagataatatgatgaatggaacatagcaacatcttagttgattccggccaagtgttctctgttttatctactatgttagacagtttcttgccttgctgaaaacacatgacttctttttttcaggctattagttcgttacaccaagaaagtaccccaagtgtcaactccaactcttgtagaggtctcaagaaacctaggaaaagtcagcagcaaatgttgtaaacatcctgaagcaaaaagaatgccctgtgcagaagactatgtgagtctttaaaaacatataataaattaataatgaaaaaattttccctttagatattgctaatgctacctttcataagcagaaggaagtaatgtgtgtgtgtgcatgttttgtgcatgtgtgtgtgcatgcacgtgtgtgtatgtgtgatattggcagtcaaggccccgaggatgataattttttttttttttttgagacggagtctcgctttgttgtccaggctggagtgcagtggtgccatctcggctcactgcaacctccgcctcccaagttcaagccattctcctgcctcagcctcccaagtagctgggactacaggtgcatgccaccatgcctggctaattttttgtatttttagtagaaaattttcagcttcacctcttttgaatttctgctctcctgcctgttctttagctatccgtggtcctgaaaccagtttattgtgtgttgccatgaggaaaccgccattaagtgacagagtcaccaaaattgctgcacaagaacccttgggtgaaccgggcgaccaatgctttttcagctctgggaagtcgaagaaaacataccgttccccaaagagttttaatgcttgaaacattccaccttccatgcagatatatgcacactttctgagaaggacgagacaaatcaaagaaacaaacgtgaggagtatttcattactgcatgtgtttgtagtcttgatagcaagaactgtcaattcaagctagcaactttttcctgaagtagtgattatatttcttagaggaaagtattggagtgttgcccttattatgctgataagagtacccagaataaaatgaataactttttaaagataaaatcctctgttataatattgctaaaattattcagagtaatattgtggattaaagccacaatagaataacatgttagaccatattcagtagaaaaagatgaccaattaactgataaatttgtgcacatggcaaattagttaatgggaaccataggagaatttatttctagatgtaaataattattttaagtttgccctatggtggccccacacatgagacaaacccccaagatgtgacttttgagaatgagacttggataaaaaacatgtagaaatgcaagccctgaagctcaactccctattgctatcacaggggttataattgcataaaatttagctatagaaagttgctgtcatctcttgtgggctgtactcctcgtctaggcttaagagtaatattgcaaaacctgtcatgcccacaccaatctctccctggcattgttgtctttgcagatgtcagtgaacgcgacccagcagctcccatgagtttgcatagccttattttctatagcctccccactattagctttgaagggagcaaagtttaagaaccaaatataaagtttctcatctttatagatgagacccattttaaataaagtccaagataattaaatttttaaggatcatttttagctctttaatagcaataaaactcaatatgacataatatggcacttccaaaatctgaataatatataattgcaatgacatacttcttttcagagatttactgaaaagaaatttgttgacactacataacgtgatgagtggtttatactgattgtttcagttggtcttcccaccaactccatgaaagtggattttattatcctcatcatgcagatgagaatattgagacttatagcggtatgcctggcccaagtactcagagttgcctggctccaagatttataatcttaaatgatgggactaccatccttactctctccatttttctatacgtgagtaatgttttttctgttttttttttttctttttccattcaaactcagtgcacttgttgagctcgtgaaacacaagcccaaggcaacaaaagagcaactgaaagttgttatggatgatttcgcagcttttgtagagaagtgctgcaaggctgacgataaggagacctgctttgccgaggaggtactacagttctcttcattttaatatgtccagtattcatttttgcatgtttggttaggctagggcttacggatttatatatcaaaggaggctttgtacatgtgggcccgggatcttattttacacacaattgtcttacaaaatgactaaaacagcactttgtttttatctcctgctctattgtgccatactgttgaatgtttataatgcatgttctgtttccaaatttgtgatgcttatgaatattaataggaatatttgtaaggcctgaaatattttgatcatgaaatcaaaatattaatttatttaaacatttacttgaaatgtggtggtttgtgatttagttgattttataggctagtgggagaatttacattcaaatgtctaaatcacttaaaatttccctttatggcctgacagtaacttttttttattcatttggggacaactatgtccgtgagcttccatccagagattatagtagtaaattgtaattaaaggctatgatgcacgtgaaatcactttgcaatcatcaatagcttcataaatgttaattttgtatcctaatagtaatgctaatattttcctaacatctgtcatgtctttgtgttcagggtcaaaaacttgttgctgcaagtcaagctgccttaggcttataac

SEQ ID NO: 150384 - DNA, 324 bp, Homo sapiens
ggcacgagacatagaggcaactaaaaatcctctttgaggagttgggtcccaggcagtgcagctgctccctactccctccctaccacccgtatgctgcgccctctcccccacctttgtgcccaccctcctcctcaaactccaggccaagtcctttttctcctcttccttccctgcctaaaagattcctcggggcctccttccctgtcagatgccactgaagacaaattttgaggctgaacaaatagaattctagcatgtctcccaatgtgcctccttgaggtttggctggtcccgatattcacctagaagcacaggtgttacccg

SEQ ID NO: 150385 - DNA, 355 bp, Homo sapiens
ggcacgaggaaaatatgtgtgcaaagtgcctattggatgcctttataaagttctttcagaacccagactgtgggttcttaaaattcagaagataagactacttgttccataaaagaataggtgaaaggagtgagggttgaaacaggtggttatacttttttccttttgttcttccaggccacacgtgtctacacttaggctctatccatggctacctgggcatcgtggagcttttggcgtacctgggtgatggtgggagtgctggggaggcaggtgaggccggaggggcgattgctagcaggggagctcttgtctagtggggggggaggaggcgttgggaggaacgcggagggag

SEQ ID NO: 150386 - DNA, 755 bp, Homo sapiens
accatgagtttgaaccgcctgcaggaattcggcacgagcttagttaccctggacgctccccacatccttccagaaggagacgagctgctggaagagaatcaggaggggtgtttttcttgaagtttcctttttgccacaaatgccactcttgggccaaggctgtggtccccgtggctggcatctggcttgagtctccccgaggcctgtgcgtctcccaaacacgcagctcaaggtccacatccgcagaagcctcctcgccttcagcctcctcagcattcagtttgtcaatgaagtgatgaaagcttagagccagtatttatactttgcggttaaaatacttgattcccccttgtttgttttacaaaaacagatgtttcctagaaaaatgacaaatattaaaatgaacaagaccctacgaaagaatggcaacagccagggtggccgggccctgccagtgggcggcgtgtgctagcaaggcctgccgggtgtgccgcagtcaccacagggtttctgagaacatttcacagaagtgcctgagacgcggagacatggctggtgttaaatggagctattcaatagcagtgaccgcgctctcctcagccaccaaatgtccctgacaccctccccagcccccacagataacatcagctgaggttttttttcagtatgaacacagtcctaaatcaattcctcaaagtgtgcacaaaactaaagaatataaataaacaaaagaaaggtgaaaaaaaaaaaaaaaa

SEQ ID NO: 150387 - DNA, 786 bp, Homo sapiens
  misc_feature (1)...(786): n = a,t,c or g
cggcacgaggctttttgagcagcttggagagtacaaattccagaatgcgctattaattcgttacaccaagaaagtaccccaagtgtcaactccaactcttgtagaggtctcaagaaacctaggaaaagtgggcagcaaatgttgtaaacatcctgaaagcaaaaaggaatgccctgtgcaggaagactatctatcccgtgggtcctggaaccagttattgtgtgtttgcattgaggaaaacgccagtaaagttgacagagtcaccaaaatgctggcacagaatccttgggttgaacagggcgacccntgcttttttcagctcttgggaagttcgattggaaacattacggtttccccaaaaggagttttaattgcttgaaaacatttcacctttccatggcaggttttatggcacatttttttgaggaagggaggaggaccaattcaaggaaaacaaactggcacttgtttgagctcgtggaaacacaaggcccaaggcaacaaaagaggcaactgaaagcttgttatgggtggtttcgcagcttttgtagagaagtgctgcaaggctgacgataaggagacctgctttgccgaggagggtaaaaaacttgttgctgcaagtcaagctgccttaggcttataacatcacatttaaaaagcatctcagcctaccctggagaataagaagaaagaaaatgaagatccaaagcttattcatctgtttttctttttnccgttgggtgtaaagccaacaccctgtctaaaaaaacataaatttctttaatc

SEQ ID NO: 150388 - DNA, 312 bp, Homo sapiens
ggcacgagagaatctgaaagacagctacgattgctgtttgatcaggcctatcagatgcgcccatcaattattttttttgacgatattgatggtctggctccactacggtcatgcaggctagatctaatcctctggtaaaacttgctttatggatactcctcgtttcttccaatttcttgtatgctaattacttagtggtgattgcggtgaatttgctttcgattagtctgttgttttgatatgtttggtgtggactgagtgtttttgttatctgaatctgttatgcgtagtggctgtaatgtctcgttttgg

SEQ ID NO: 150389 - DNA, 342 bp, Homo sapiens
ggcacgagggagttaatacacaagcaaatgcgacctttctcccacggaattgcgatcctctctagaagctgggctgtggacctgaacttgcaggagaagccaggagtcatctgtgatgctctgctgatagcacagaacagcacccccattctctacaccattctcagggagcaggatgcagagggccaggactactgcattcgcaccgcctttactttgaagcacatgctagtgaccatgctgggctacaccgagatggcgagtctgagcacaatgaagaacatgatcccaaggggctgggtgggtccagggaggccaggagctcgatgttagacgtgcagc

SEQ ID NO: 150390 - DNA, 524 bp, Homo sapiens
actaaagtcctgggattacaggtgtgagccaccgcgcccggcccaggaatctattttaaactacaagaacttataatcactttaactctagaagaatgtttccttaaatgaggcattacatatttcttcaacatatatgtgtttattgagcactttatatgctaggcattgaggtgggttgagatgacaaaaaggggtgagaaccactgttttcaactattacctaaagattgaattagctgttaagtggtcttgatatattttcattttttgttgtattttttagatgtgatggaagacctctataactacataaatccacataatggcaaacactctcccatggtggccaagtcaacattggatattgttctggccaataaagatgtatgtataacacttatctggtggaaattttttgagagtcttttttaataatgcacacattttagaaaatttaaacacttgcaaagatacagggtaaatactaattctgtttcctaccctgattcctgattttcctc

SEQ ID NO: 150391 - DNA, 3078 bp, Homo sapiens
ggggaaggggatttggattgttgcgcctctgctctgaagaaagtgctgtctggctccaactccagttctttcccctgagcaacgcctggaacctaacccttcccactctgtcaccttctcgatcccgccggcgctttagagcggcagtccagtcttggatccttcagagcctcagccactagctgcgatgcatgtgatcaagcgagatggccgccaagaacgagtcatgtttgacaaaattacatctcgaatccagaagctttgttatggactcaatatggattttgttgatcctgctcagatcaccatgaaagtaatccaaggcttgtacagtggggtcaccacagtggaactagatactttggctgctgaaacagctgcaaccttgactactaagcaccctgactatgctatcctggcagccaggatcgcttgtctctaacttgcacaaagaaacaaagaaagtgttcagtgatgttgatggaagacctctataactacataaatccacataatggcaaacactctcccatggtggccaagtcaacattgggatattgttctggccaataaagatcgcctgaattctgctattatctatgaccgagatttctcttacaattacttcggctttaagacgctagagcggtcttatttgttgaagatcaatggaaaagtggctgaaagaccacaacatatgttgatgagagtatctgttgggatccacaaagaagacattgatgcagcaattgaaacatataatcttctttctgagaggtggtttactcatgcttcgcccactctcttcaatgctggtaccaaccgcccacaactttctagctgttttcttctgagtatgaaagatgacagcattgaaggcatttatgacactctaaagcaatgtgcattgatttctaagtctgctggaggaattggtgttgctgtgagttgtattcgggctactggcagctacattgctgggactaatggcaattccaatggccttgtaccgatgctgagagtatataacaacacagctcgatatgtggatcaaggtgggaacaagcgtcctggggcatttgctatttacctggagccttggcatttagacatctttgaattccttgatttaaagaagaacacaggaaaggaagagcagcgtgccagagatcttttctttgctctttggattccggatctcttcatgaaacgagtggagactaatcaggactggtctttgatgtgtccaaatgagtgtcctggtctggatgaggtttggggagaggaatttgagaaactatatgcaagttatgagaaacaaggtcgtgtccgcaaagttgtaaaagctcagcagctttggtatgccatcattgagtctcagacggaaacaggcaccccgtatatgctctacaaagattcctgtaatcgaaagagcaaccagcagaacctgggaaccatcaaatgcagcaacctgtgcacagaaatagtggagtacaccagcaaagatgaggttgctgtttgtaatttggcttccctggccctgaatatgtatgtcacatcagaacacacatacgactttaagaagttggctgaagtcactaaagtcgttgtccgaaacttgaataaaattattgatataaactactatcctgtaccagaggcatgcctatcaaataaacgccatcgccccattggaattggggtacaaggtctggcagatgcttttatcctgatgagatacccttttgagagtgcagaagcccagttactgaataagcagatctttgaaactatttattatggtgctctggaagccagctgtgaccttgccaaggagcagggcccatacgaaacctatgagggctctccagttagcaaaggaattcttcagtatgatatgtggaatgttactcctacagacctatgggactggaaggttctcaaggagaagattgcaaagtatggtataagaaacagtttacttattgccccgatgcctacagcttccactgctcagatcctggggaataatgagtccattgaaccttacaccagcaacatctatactcgcagagtcttgtcaggagaatttcagattgtaaatcctcacttattgaaagatcttaccgagcggggcctatggcatgaagagatgaaaaaccagattattgcatgcaatggctctattcagagcataccagaaattcctgatgacctgaagcaactttataaaactgtgtgggaaatctctcagaaaactgttctcaagatggcagctgagagaggtgctttcattgatcaaagccaatctttgaacatccacattgctgagcctaactatggcaaactcactagtatgcacttctacggctggaagcagggtttgaagactgggatgtattatttaaggacgagaccagcagctaatccaatccagttcactctaaataaggagaagctaaaagataaagaaaaggtatcaaaagaggaagaagagaaggagaggaacacagcagccatggtgtgctctttggagaatagagatgaatgtctgatgtgtggatcctgaggaaagacttggaagagaccagcatgtcttcagtagccaaactacttcttgagcatagataggtatagtgggtttgcttgaggtggtaaggctttgctggaccctgttgcaggcaaaaggagtaattgatttaaagtactgttaatgatgttaatgatttttttttaaactcatatattgggattttcaccaaaataatgcttttgaaaaaaagaaaaaaaaaacggatatattgagaatcaaagtagaagcttttaggaatgcaaaataagtcatcttgcatacagggagtggttaagtaaggtttcatcacccatttagcactgcttttctgaagacttcagttttgttaaggagatttagttttactgctttgactggtgggtcctctagatgcaaaactgagtgataactcatgagaagtactgataggacctttatctggatatggtcctataggttattctgaaataaagataaacatttctaagtgaaaaaaaaaaaaaaaa

SEQ ID NO: 150392 - DNA, 344 bp, Homo sapiens
  misc_feature (1)...(344): n = a,t,c or g
ggcacgaggacagtgctccttaaattaatctatagattcaatgcaacctatatcagaatctcagcagacttcttcgtagaaattgacaagctaactccaaaattcatatggaatttgatagccatatggttagccaaaacaatctttaaaaaaaagaagtaaaaatcacaggcaggagccccnnnnnnnnnnnnnnnnnnnnnnnnnnnnnnnnnnnnnnnnnnnnnnnnnnnnnnnnnnnnnnnnnnnnnnnnnnnnnnnnnnnnnnnnnnnnnnnnnnnnnnnnnnnnnnnnnnnnnnnnnnnnnnnnnnnnnnnnnnnnnnnnnnnnnnnnnnnnnnnnnn

SEQ ID NO: 150393 - DNA, 349 bp, Homo sapiens
  misc_feature (1)...(349): n = a,t,c or g
cagaaggagaacacagagcaaccaaacccgagaacagacaagcagaacaaagaccagcagcagagacagaaaacagaccagagagagaccgggggagaggggaaaagaaggagcaggcaggaggaagagaagacaaagggccacgagaaaacccacgcccaacgcaaacanccacagncaagacnnnnnnnnnnnnnnnnnnnnnnnnnnnnnnnnnnnnnnnnnnnnnnntgaagaggtttcttcctctgacccctaatccaatgtagtctatttcaatctggaggcaaccgcaatcatgtaagactcctgaagaccaacagaaaacaaacgaacatctcctcgtgcc

SEQ ID NO: 150394 - DNA, 418 bp, Homo sapiens
  misc_feature (1)...(418): n = a,t,c or g
tttcgtcgatttcgtnnnnnnnnnnnnnnnnnnnnnnnnnnnnnnnnnnnnnnnnnnnnnnnnnnnnnnnnnnnnnnnnnnnnnnnnnnnnnnnnnnnnnnnnnnnnnnnnnnnnnnnnnnnnnnnnnnnnnnnnnnnnnnnnnnnnnnnnnnnnnnnnnnngtttggatgggattcccttaggattctacagccaataaagatcctatttcctatgcatgtcccaggaatcagtaatcctcttttactctgttgggatgagtctttttttgtttctgttcagagtggttactaacttcaccttctttcctcttgctgtcatctgcattcgtgcttcccacctgttgttggcatgtcctttaccttctctttccctgccacatcaacctacacactgactcatcattgacggggaaga

SEQ ID NO: 150395 - DNA, 879 bp, Homo sapiens
  misc_feature (1)...(879): n = a,t,c or g
aggctttggggaccgggaccgggatcgtgaccgtgaaggatttggagcaagaggtggtggtggccttccnccgaagaaatttggtaatcctggggagcgtttgcgtaaaaaaaagtgggatttgagtgagctccncaagtttgagaaaaatttttatgtggaacatccggaagtagcaaggctgacaccatatgaggttgatgagctacgccgaaagaaggagattacagtgagggggggagatgtttgtcctaaacccgtgtttgccttccatcatgctaacttcccacaatatgtaatggatgtgttgatggatcagcactttacagaaccaactccaattcgttgtgtggacttctcatctaaaaggttagtggcttttgcttgggatcagtgctctctattgatgttcttgctggtctccagacacattcctgttgcattaagacttgaaagacttgtagatgtgtgatgttcaggcacaggatgctgaaagctatgttactattcttagtttgtaaattgtccttttgataccatcatcttgttttctttttgtaggtataaataaaaacactgttgacaatnnnnnnnnnnnnnnnnnnnngggcgcccgttttaaagaatccaagtttacgaccccgtgcatgcaacagaaaactttttttatggggcccccaaaattcatttccctgcccgccttttaacaacgnggggactggaaaaaccctggggttacccaactaaatggctttgagaaaatccccttttccccagttggcgnnnnnnnnnnnnncgcgnaaaaanggggggaaaaaaaagaaatattttctcgcgcccgccacaacccccattaaaaataaaacccaccccggggga

SEQ ID NO: 150396 - DNA, 5366 bp, Homo sapiens
  misc_feature (1)...(5366): n = a,t,c or g
cgctgtggtacaggtccggaattcccgggcgatgcaagctccccgcgctacatcggccccgtgccaaaacgctaatttttctataggaggccgtcaatcatattacgtgccgagcactttatcagctgcagagcttgcaaaaggaggagggagtgtgcatcggtctggtaacaaacagagaatgttttttaattatttatatcacaaaaatctgtgttttatctaggatattttctgaatattctttgtaaaatgcagatttttttccacaaaacagtaggattctttgttatattcttaaaattgtttgtttaagtaggtaaaaatatacattcagctgaaagcattacactaacatttacattttaagccttaggaggttattcagcccaattcccagcagtagagagaatactaaacttgtgtctcaaggtttcatggttttcccacgttctttggctattaatttaatttcccaggtcacgtagacaatcattgataattgaaacaagtcctgagttgaaataaccttgagttgagcaaaaatatcctcattttggcagaagctgggcttggtagtacagtaaaattttagtgtaatgtgctcttgtaattgaaaagggatagataatctggatgtttctgcaaaggaaaataggtgtgtacttaacagctttggctctactcagtttcttaaaaagataagagcaaaaaaaagttaaatgttaatcaaaacatttaagtttcctttaaattgtagtaataaaatatatgaagctcctttttttactttgctctgtgactggtttaaaaggaagtttgttatgttgttggtagattttgccaggcttctcccaacagagtagaagtgatttgggcctcattaacttcacagtggtttaccactttgttctatgttctggttttgtaaaggatagtactggaatttgcgtctgaagaccaatattggtgtaactcctgtcagtatattggtaaaatgtagcagaggcaggagtttggatgtttggatgggattcccttaggattctacagccaataaagatcctatttcctatgcatgtcccaggaatcagtaatcctcttttactctgttgggatgagtctttttttgtttctgttcagagtggttactaacttcaccttctttcctcttgctgtcatctgcattcgtgcttcccacctgttgttggcatgtcctttaccttctctttccctgccacatcaacctacacactgactcatcattgacgtggaagatgtggaagatgtcaagtttgtgatcaactatgactatccaaacagctcagaggattatgtgcaccgtattggccgaacagcccgtagcaccaacaagggtaccgcctataccttcttcaccccagggaacctaaaacaggccagagagcttatcaaagtgctggaagaggccaatcaggctatcaatccaaaactgatgcagcttgtggaccacagaggaggcggcggaggcgggggtaagggtggtcgttctcgttaccggaccacttcttcagccaacaatcccaatctgatgtatcaggatgagtgtgaccgaaggcttcgaggagtcaaggatggtggccggagagactctgcaagctatcgggatcgtagtgaaaccgatagagctggttatgctaatggcagtggctatggaagtccaaattctgcctttggagcacaagcaggccaatacacctatggtcaaggcacctatggggccaactttctatggcaccagtagctatacagctcaagaatatggtgctggcacttatggagctagtagcaccacctcaaactgggagaagttcacagagctctagccagcaagtttagtgggataggcccggtctgggccagcagccacagccactgatgtccacaacagtttgcacagcctccgggagctaccaatatgatagggttacatggggcagactgcctaccaataccctcctcctccttcgtctcctcctccttcacgtaaatgaaaccactcaagtggtagtgactccagcagacttaattacattttaagggaacactgtctttccttttttttttcctcttcgccttttctttttttttccttttttcttttttttttttttttaatttttccccccaaccatcgtgatttgtcttttcatgcagattagttagaattcactgccaggtttcttctgcccaccaaaatgatccaagtctggaataacattttgtaaaaaaaaaatatatatatatatatatatagctgactggaagagattaatttcttcccccaacttcttgcatgttgaagatatttgagctatttttcatctaaaagagtaaggtattaggcccttttgtgggagccccatgttttgtttttctgagttggtggggagggagggagggggaaggctgaattgttttgcagaggaagatggcatctgtgctttaaatttctcattactgggttagaaaacaaagagggagtgccctgcacattttcttttgtgcttttaaatgtttcttaagttggaacaggtttcctcgggcctgttttgactgattgctggagtgcatttgatagttaaaaattactaattggttttatttcccttcacactctgcctccccacttctccccccgttactgaaaaataaccattttagtgtcaggctagaaattgaattgctgagttttgtgtatcctttaaattaaaaaccacaagtgtttattgtagtggttaaactgtagcatctcagcatctgggtggaagctgcctatatttcttcccagtttaactggggaccattctgtggaaattaaatttttccatccaggacaggctgctgtggaggcaaatggaacataaatgctcggngggaaatttactataccagtttttatatcgacctgcagaggaaaaagcacatttaattataaacaatatattcaaaatgggcaaattttattttcaaatgcagggtatagctagattaaaagcaactctttgccacctactctgcccttttggcaaagttaccttgaacaaagaatcttaagggtttattaagaactctttattttcttcataccctgttctctgcagtgctttctaacagcttctggggtgcagattttcttcggcatccttttgcactcagcttattacaggtaggtagtgcttaagaaaagtcatggaggactaaagcctaagtccttttcacttttcctccatctgaaggtaggtgagttcatcctcttcatagtaatgctgttttaccaagactttatagcagatggacccagaaagaattttctgctattgtgttcactacaacaggatagggacatcagacagccccagaaaccccttccagatctgatatgggactattaatttttatgctgttaattggtattcattcacaatgcagttgaagggggggaaggctccactgcattctttggctaaggcctggaatgcttgctcatctggtaagatctatactcgaggttttggttttcctttttaaaattctttagggagagagggatggtttctgaggggttctgaaagtatgattcaatgtgcaacatacaggtaaggtcttcagcataagctgaaatatatgcatgtaaaaactttgacatctttttttttaattttccactttcttcttaacctttacttccctttttgtcccccccccatcttacagaagttgagggccaagggagaatggtaggcacagaagaaacatggtcaaactgctctggtgctttcaaaccaaagtgttccccccaaccccaaatctgtctagttctggctcctaccagagagcttgcccagcaagtacagcaggtggccgatgactatggcaaatgttctagattgaagagtacttgtatttatggaggtgctcctaaaggtccccagattcgagacttggaaagaggtgttgagatctgcatatccactcctggacgtctgatagatttcctggagtcaggaaagacaaatctttcgcgatgtacttacctcgtattggacgaaactgacaaaatgcttgatatggggtctgaaccccagatcctgtaaattggtgacccaatcaggcctgataggcagacactgatgtggagtgcaacctggccaaaagaagtaagacagcttgcagaggatttccttcgtgattacacccagatcaacgtaggcaatctggagttgagtgccaaccacaacatcctccagatagtggatgtctgcatggaaagtgaaaaagaccacaagttgatccaactaatggaagaaataatggctgaaaaggaaaacaaaacaataatatttgtggagacaaagagacgctgtgatgatctgactcgaaggatgcgcagagatggttggccagctatgtgtatccatggagacaagagtcaaccagaaagagattgggtacttaatgagttccgttctggaaaggcacccatccttattgctacagatgtagcctcacgtgggctagatgtggaagatgtcaagtttgtgatcaactatgactatccaaacagctcagaggattatgtgcaccgtattggccgaacagcccgtagcaccaacaagggtaccgcctataccttcttcaccccagggaacctaaaacaggccagagagcttatcaaagtgctggaagaggccaatcaggctatcaatccaaaactgatgcagcttgtggaccacagaggaggcggcggaggcgggggtaagggtggtcgttctcgttaccggaccacttcttcagccaacaatcccaatctgatgtatcaggatgagtgtgaccgaaggcttcgaggagtcaaggatggtggccggagagactctgcaagctatcgggatcgtagtgaaaccgatagagctggttatgctaatggcagtggctatggaagtccaaattctgcctttggagcacaagcaggccaatacacctatggtcaaggcacctatggggcagctgcttatggcaccagtagctatacagctcaagaatatggtgctggcacttatggagctagtagcaccacctcaactgggagaagttcacagagctctagccagcagtttagtgggataggccggtctgggcagcagccacagccactgatgtcacaacagtttgcacagcctccgggagctaccaatatgataggttacatggggcagactgcctaccaataccctcctcctcctccccctcctcctccttcacgtaaatgaaaccactcaagtggtagtgactccagcagacttaattacattttaaggaacactgtc

SEQ ID NO: 150397 - DNA, 307 bp, Homo sapiens
ggcacgagagtgaactcagatgtggagcactacctttgtgagcagtgtgacccaaggcctgtggacagggaggttcccatgatccctcggccccactatgcccaacctggctgtgtctacttcatctgtttgctccgagatgacttgctgcttcgtcagggtgactgtgtgtatctgatgagggatagtcggcgcacccctgatggccacccggtccgtcagtcctatcgactgttatctcacattaaccgagataaacttgacatctttcgcattgagaagctttggaagaatgaaaaagaggaac

SEQ ID NO: 150398 - DNA, 5976 bp, Homo sapiens; identical to SEQ ID NO: 119514
  misc_feature (1)...(5976): n = a,t,c or g

SEQ ID NO: 150399 - DNA, 984 bp, Homo sapiens
atgaacatcgatgcaaaaatcctcaataaaatactggcaaaccgaatccagcagcacatcaaaaggcttatccaccatgatcaagtgggcttcatccctggaatgcaaggctggttcaacatacacaaatcaataaatgtaatccagcatataaacagaaccaatgacaaaaaccacatgattatctcagtagatgcagaaaaggcctttgacaaaattcaacagcccttcatgctaaaaactctcaataaattagatgacatgattgtatatctggaaaaccccatcgtctcagcccaaagtctccttaagctgataagcaacttcagcaaagtctcaggatataaaattaatgtacaaaaatcacaagcattcttatacacttataacagacaaacagagagccaaatcatgagtgaactcccattcacaattgcttcaaagagaataaaatacctaggaatccaacttacaagggatgtgaaggacctcttcaaggagaactacaaaccaatgctcattgaaataaaagaggatacaaacaaatggaagaacattccatgctcatggataggaagaatcaatatcgtgaaaatggccatactgcccaaggtaatttatagattcaatgccatgcccatcaagctaccaatggctttcttcacagaattggaaaaaactactttaaagttcatatggaaccaaaaaagagcccgcattgccaagtcaatcctgagccaaaagaacaaagctggaggcatcacgctacctgacttcaaactatactacaaggctacagtaaccaaaacagcatggtactggtaccaaaacagagatatagaccaatggaacagaacagagccctcagaaataatgccgcatgtctacaactatctgatctttgacaaacctgacaaaaacaagaaatggggaaaggattccacatttaacaaaaggtgctgggaaaactggctagccatatga

SEQ ID NO: 150400 - DNA, 1023 bp, Homo sapiens
gggtcctgactgttagaaggaaaactaacaaacagaaaggacatccacaccaaaaccccatctgtacatcagcatcatcaaagaccaaaggtagataaaaccacaaagatggggaaaaaacagagcagaaaaatgggaaactctaaaaatcagagtgcctctcaaagaataaagctggaggcatcacgctacctgacttcaaactatactacaaggctacagtaaccaaaacagcatggtactggtaccaaaacagagatatagaccaatggaacagaacagagccctcagaaataatgccacatatctacaaccatctgatctttgacaaacctgacaaaaataagaaatggggaaacgattccctatttaataaatggtgctgggaaaactggctagccatatgtagaaagctgaaactggatcccttccttacaccttatacaaaaattaattcaagatggattcaagacttaaacattagacctaaaaacataaaaaccctagaagaaatcctaggcaataccattcaggacataggcatgggcaaggactttaagtctaaaacaccaaaagccatggcaataaaagccaaaattgacaaatgggatctaattaaactaaagagcttctgcacagaaaaagaaactaccatcagagtgaacaggcaacctacagaatgggagaaaatttttgcaatctactcatctgaaaaagggctaatatcaagaatctataatgaactccaacaaatttacaaaaaaaaaacaaacaaccccatccaaaagcgggtgaaggatatgaacagacacttctcaaaagaagacatttatgcagccaaaagagacatgaaaaaatgctcatcatcacatgaaaaaatgctcatcatcaccggccatcagagaaattcaaatcaaaaccacaatgagataccatctcataccaattagaatggtgatcattaaaaagtcaggaaacaaggggtgctggagaggatgtggagaaataggaacagttttacac

SEQ ID NO: 150401 - DNA, 1218 bp, Homo sapiens
aaatacaaactaccatcagagaatactacaaacacctctatgcaaataaactagaaaatctggaagaaatggataaattcctggacacatacactctcccaagactaaagcaggaagaagttgaatctctgaatagaccaataacaggatctgaaattgtggcaataatcaatagcttaccaaccaaaaagagtccaggaccagatggattcacagccgaattctaccagaggtacaaggaggaactggtaccattccttctgaaactattccaatcaatagaaaaagagggaatcctccctagctcattttatgaggccagcatcatcctgataccaaagccgggcagagacacaaccaaaaaagagaattttagaccaatatccttgatgacattgatgcaaaaatcctcaataaaatactggcaaactgaatccagcagcacatcaaaaagcttatccaccatgatcaagtgggcttcatccctgggatgcaaggctgtgttggaagttctggccagggcaattaggcaggagaaggaaataaagggtattcaattaggaaaagaggaagtcaaattgtccctgtttgcagatgacatgattgtatatctagaaaaccccattgtctcagctcaaaatctccttaagctgataagcaacttcagcaaagtctcaggatacaaaatcaatgtacaaaaatcacaagcattcttatacaccaataacagacaaacagagagccaaatcatgagtgaactcccattcacaattgcttcaaagagaataaaatacctaggagtccaccttacaagggatgtgaaggacctcttcaaggagaactacaaaccactgctcaatgaaattaaagaggatacaaacaaatggaagaacattccatgctcacggataggaagaatcaatatcgtgaaaatggccatactgcccaaggtaatttatagattcaatgccatccccatcaacctaccaatgactttcttcacagaattggaaaaaactactttaaagttcatatggaaccaaaaaagagcccgcatcaccaagtcaatcctaagccaaaagaacaaagctggaggcatcatgctacctgacttcaaactatactacaaggctacagtaaccaaaacagcatggtactggtaccaaaacagagatatagatcaatggaacagaacagagccctcagaaataacgccac

SEQ ID NO: 150402 - DNA, 1098 bp, Homo sapiens
atgatagataaaggggatatcatcaccgatccctcagaaatacaaactaccatcagagaatactataactacctctacacaaataaactagaaaacctagaagaaatggataaattcctcgacacatacaccctcccaagactaaaccaggaagaagttgaatccctgaatagaccaacaacaggctctgaaattgaggcaataatgaatagtttaccaacaaaaaaagtccaggaccagatggattcacagccgaattctaccagagtgttggaagttctggccagggcaatcaggcaggagaaggaaataaagggtattcaattaggcaaagaggaagtcaaattgtccctgtttgcagatgacatgattgtatatttagaaaaccccatcgtctcagcccgaaatctccttaagctgataggcaacttcagcaaagtctcaggatacaaaatcaatgtgcaaaaatcacaagcattcttatataccaataacagacaaacagagagccaaatcatgagtgaactcccattcacaattgcttcaaagagaataaaatacctaggaatccaacttaaaagggacgtgaaggacctcttcaaggagaactacaaaccactgctcaaggaaataaaagaggatacaaacaaatggaagagcattccatgctcatgggtaggaagaatcaatatcatgaaaatggccatactgcccaaagtaatttatagattcaatgccatccccaacaagctaccaatgcctttcttcacagaattggaaaaaactactttaaagttcatatggaaccaaaaaagagcccacattgccaagtcaatcctaagccaaaagaacaaagctggaggcatcacactacctgacttcaaactatactacaaggctacagtaaccaaaacagcatggtactggtaccaaaacagagatatagaccaatggaacagaacagagccctcagaaataatgccacatatctacaaccatctgatctttgacaaacctgacaaaaacaagaaatggggaaaggattccctctttaataaatggtgctgggaaaactggcagccatatgtagaaagctga

SEQ ID NO: 150403 - DNA, 1248 bp, Homo sapiens
atgagtgaactcccattcacaactgcttcaaagagaataaaatacttaggaatccagcttacaagggatgtgaaggacctcttcaaggagaactacaaaccactgctcaaggaaataaaagaagatacaaacaaatggaagaccattccatgctcgtggataggaagaatcaataccgtgaaaatggccataatgcccaaggtaatttatagattcaatgccatccccatcaagctaccaatgactttcttcacagaattggaaaaaactactttaaagttcatatggaaccaaaaaagagcctgcattgccaagacaatcctaagccaaaagaacaaagctggaggcatcacactacctgacttcaaactatactacaaggctacagtaaccaaaacagcatggtactggtaccaaaacagagatatagatcaatggaacagaacagagccctcagaaataacgccacatacctacaactatctgatctttgacaaacctgagaaaaacaagcaatggggaaaggattccctatttaataaatggtgctgggaaaactggctagccatatggagaaagctgaaactggatcccttccttacaccttatacaaaaatcaattcaagatggattaaagacttaaacgttagacctaaaaccataaaaaccctagaagaaaacctaggcaataccattcaggacacaggcgtgggcaaggacttcatgtctaaaacaccaaaagcaatggcaacaaaagccaaaattgacaaatgggatctaattaaactaaagagcttctgcacaacaaaagaaactaccatcagagtgaacaggcaacctacagaatgggagaaaattttcgcaacctactcatctgacgaagggctaatatccagaatctacaatgaactcaaacaaatttacaagaaaaaaacaaacaagcccatcaaaaagtgggcaaaggagatgaacagacacttctcaaaagaagacatttatgcagccaaaagacacatgaaaaaatgctcatcgtcactgaccatcagagaaattgaaatcaaaaccacaatgagataccatctcacaccagttagaatggcaatcattaaaaagtcaggaaacaacagatgggaattgaacaatgagaacacatggacacaggaaggggaacatcacactctggagactgttgtgaggtcgggggagcggggagggatagcattaggagatatacctaatgctaagtga

SEQ ID NO: 150404 - DNA, 969 bp, Homo sapiens
atgattgtatatctagaaaaccccatcgtctcagcccaaaatctccttaagctgataggcaacttcagcagagtctcaggatacaaaatcaatgtgcaaaaatcacaggcattcttatataccaataacagacaaacagagaaccaaatcataagtgaactcccattcacaattgcttcaaagagaataaaatacctaggaatccaacttacaagggacgtgaaggacctcttcaaggagaactacaaaacactgctgaaggaaataaaagaggatacaaaaaaatggaagaacattccatgctcatgggtaggaagaatcaatattgtgaaaatagccatactgcccaaggtaatttatagattcagtgccatccccatcaagctaccaatgactttcttcacagaattggaaaaaactactttaaagttcatatggaaccaaaaaagagcccgcattgccaagtcaatcctaagccaaaagaacaaagctggaggcatcatgctacctgacttcaaactatactataaggctacagtaaccaaaacagcatggtactggtaccaaaacagagatatagaccaatggaacagaacagagccctcagaaataatgctgcatatctacaaacatctgatctttgacaaacctgacaaaaacaagcaatggggaaaggattccctatttaataaatggtgctgggaaaactggctagccatatgtagaaagctgaaactggatcccttccttacaccttatacaaaaattaattcaagatggattaaagacttaaatgttagacctaaaaccataaaaaccctagaagaaaacctaggcaataccattcaggacataggcacgggtaaagacttcatgtctaaaacaccaaaagcaatggcaacaaaagccaaaattgacaaatgggatcttcgagattctgcacagcaaaataaactaccatcagagtga

SEQ ID NO: 150405 - DNA, 1383 bp, Homo sapiens; identical to SEQ ID NO: 131330

SEQ ID NO: 150406 - DNA, 1272 bp, Homo sapiens
atgattatctcaatggatgcagaaaaggcctttgacaaaattcaacaatgcttcatgctaaaaactctcaataaattaggtattgatgggacgtatctcaaaaaaataagagctatctatgacaaacccacagtcaatatcatactgaatgggcaaaaactggaagcactacctttgaaaactggcacaagacagggatgccctctctcaccactcctattcaacatagtgttgcaagctctggccagggcaatcaggcaggagaaggaaataaagggtattcaattaggaaaagaggaagtcaaattgtccctgtttgcagatgacatgattgtatatctagaaaaccccatcgtcaaagcccaaaatctccttaaattgataagcaacttcagcaaagtctcaggatacaaaatcagtatgcaaaaatcacaagcattcttatacaccaataacagacaaatagagagccaaatcatgagtgaactcccattcacaattgcttcaaagagaataaaatacctaggaatccaacttacaagggatgtgaaggacctcttcaaggagaactacaaaccactgctcaatgaaataaaagaggacaaaaacaaatggaaaaacattccatgctcatgggtaggaagaatcaatatcgtgaaaatggccatacttcccaagttcatatggcgccaaaaaagagcccacatcgccaagtcaatcctaagccaaaagaacaaagctggaggcatcaagctacctgacttcaaactatactacaaggctacagtaaccaaaacagcatggtactggtaccaaaacagagatatagaccaatggaacagaacagagccctcagaaataatgctgcatatccacaactatctgatctttgacaaacctgacaaaaacaagaaatggagaaaggattccctatttaataaatggtgctgggaaaactggctagccaaatgtagaaagctgaaactgcatcccttccttacaccttatacaaaaattaattcaagatggattaaagacttacatgttagacctaaaaccataaaaaccctagaagaaaacctagggattaccattcaggacaaaggcatgggaaaggacttcatgtctaaaacaccagaagcactggcaacaaaagccaacattgacaaatcggatctaattaaactaaagagctcctgcaaaagaaactaccatcagagtgaacaggcaacctacagaatgggagaaaatttttgcaatctactcatctga

SEQ ID NO: 150407 - DNA, 1401 bp, Homo sapiens
atgagtgaactcccattcacaattgcttcaaagagaataaaatacctaggaatccaacttacaagggatgtgaaggacctcttcaaggagaactacaaaccactgctcaatgaaataaaagaagatacaaacaaatggaagaacattccatgctcatgggtaggaagaatcaatatcatgaaaatggccatactgcccaaggtaatttatagattcaatgccatccccatcaagctacaaatgactttcttcacagaattggaaaaaactactttaaagttcacatggaaccgaaaaagagcccgcattgcgaagtccatcctaagccaaaagaacaaagctagaagcatcatgctacctgacttcaaactatactacaaggctacagtaaccaaaacagcatggtactggtaccaaaacagagatatagaccaatggaacagaacagagccctcaaaaataatgccacatatctacaactatctgatctttgacaaacctgacaaaaacaggaaatggggaaaggattcgctatttaataaatggtgctgggaaaactggctagccatatatagaaagctgaaactggatcccttccttacaccttatacaaaaattaattcaagatggattaaagacttaaatattagatctaaaaccataaaaaccctagaagaaaacctaggcaatactattcaggacataggcatggggaaggacttcatgtctaaaacaccaaaaccaatggcaacaaaagccaaaattgacaaatgggatctaattaaactaaagagcttctgcacagcaaaagaaactcacagctcatggaggcctgcctgcctctgtaggctccacctctgggggcagcgcacaggcaaacaaaaggacagcagtaacctctgcagacttaaatgtccctgtctgacagctttgaagagagcagtggttctcccagcatgcagctggagatctgagaaggggcagactgcctcctcaaaacaaagctggacggagaatgactttgacgagctgagagaagaaggcttcagacgatcaaattactccgagctacgggaggacattcaaaccaaaggcaaagaagttgaaaactttgaaaaaaatttagaagaatgtataactagaataaccaatacagagaagtgcttaaaggagctgatggagctgaaaaccaaggctcgagaactacgtgaagaatgcagaagcctcaggagccgatgcgatgaattggaagaaagggtatcagcgatggaagatgaaatgaatgaaatgaagcgagaagggaagtttagagaaaaaagaataaaaagaaacgagcaaagcctccaagaaatatgggactatgtgaaaagaccaaatctacgtctgattggtgtaccttaa

SEQ ID NO: 150408 - DNA, 2468 bp, Homo sapiens
atggggctgaaagctctgactgggggagcagccttgactcgtcctctcactgtccctcagaggagggaggaggacaaagtgtggcctccgctgctgatacccaggcaaacagggtctggagtggaccaccagcaaactccaacagacccgcagctgaggatcctgactgttagaaggaaaactaacacacagaaaggacatccacaccaaaaccccaactgtacatcaccatcatcaaagaccaaagagctaaaggaggaagttggaacccaacgcaaagaagttaaaaaccttgaaaaaagattagacgaatggctaactagaatagccaatgcagagaagtccttaaaggacctgatgcagctgaaaaccatggcacaagaactccaaatacaaactaccatcagagaatactataaacacctctatgcaaataaactagaaaatctagaagaaatggataaattcctcgacacatacactctcccaagactaaaccaggaagaagttgaatctctgaatagaccaataacaggctctgaaattgaggcaataattaatagcttaccaaccaaaagaagtccaggaccagatggattcacagccgaattctaccagaggtacaaggaggagctgtgttggaagttctggccagggcgatcaggcaggaaaaaagaagtaaagggtattcaattaggaaaagaggaagtcaaattgtccctgtttgcagatgacatgattgtatatttagaaaaccccatcatctcagcccaaaatctccttaagctgataggcaacttcagcaaagtctcaggatacaaaatcaatgtacaaaaatcacaagcattcctgtacaccaataacagagaaacagagagccaaatcatgagtgaactcccattcacaactgcttcaaagagaataaaatacctaggaatccaacttaccagggatgtgaaggagctcttcaaggagacctacaacccactgctcaatgaaataaaagaggatacaaccaaatggaagaacattccatgctcatgggtaggaagaatcaatatcgtgaaaatcgccatactgcccaaggtaatttgtatattcaatgccatccccatcaagctaccaatgactttcttcacagaattggaaaaaactactttgaagttcatacggaaccaaaaaagagcccgcattgccaagtcaatcctaagccaaaagaacaaagccggagacgtcacgctacctgacttcaaactatactacaaggctacagtaaccaaaacagtatggtactggtaccaaaacagagatatagaccaatggaacagaacagagccctcagaaataatactgcatatctacaaccatctgatctttgacacacctgacaaaaacaagaaatggggaaaggattccctatttaacaaattgtgctgggaaaactggctagccatatgtagaaagctgaaactggatcccttctttacaccttatacaaaaattaattcaagatggattaaagacttacacgttagacctaaaaccataaaaaccctagaagaaaacctaggcaataccattcaggacatagggataggcaaggactttatgactaaaacacaaaaagcaatggcaacaaacgccgaaatacacaaatgggatctcattaaactaaagcacttctgcacagcaaaagaaactaccatcagagtgaacaggcaacctaccaaatgggagaacatttttgcaatctactcatctgacaaacggctaatatccagaatctacaaagaactcaaacatatttacaaaagaaaaacaaacaaccccatcaacaagtgggcgaaggatatgaacagacacttctcaaaagaagacatttatgcagccaacagacacatgaaaaaatgctcatcatcactggccatcagagaaatgcaaatcaaaaccacaatgagatatcatctcacaccagttagaatggcgatcattaaaaagtcaggaaacaacaggtgctggagaggatgtggagaaaatcattctcagcaaactatcacaaggacaaaaatccaaacactgcatgttctcaatcataggtgggaattgaacaatgagaacacttggacacaggaaggggaacatcacactctggggcctgttgtggggtgggggaggggggagggacagcagtgtatatctccttatagcatgggaaaagcctcaattccacatgctgtcctctgggtcttctttggtctctgccaaaatgctcctaatcttgattggtcactagtaagcctttggtggtgtctgctcggcttcacaaactttttctgtaaagaaccggattgtaaatatgttaggcttttcaggccactcgggattgtctttgccactcctcctcttcctcctcctcctcctccttcttcgtccacttcttcatgaatcacccgtcaaaaatgttaaat

SEQ ID NO: 150409 - DNA, 2433 bp, Homo sapiens
atggtggttctgcccatgcagtactgtaccacaatgcagtgcactctctctaaatctctgctcctagaagctgttttagggctggagaatctacctcctaaacttgccatagtggtaagtgaaatcaaacttacaagggacgtgaaggacctcttcaaggagaactacaaaccactgctcaatgaaataaaagaggatacaaagaaatggaagaacattccatgctcatggataggaagaatcaatatcatgaaaacggccatactgcccaaggtaattgatagattcaatgccatcctcatcaagctaacaatgactttcttcacagagttggaaaaaactactttaaagttcatatggaaccaaaaaagagccggcattcccaagtcattcctaagccaaaagaacaaagctggaggcatcacactacctgacttcaaactatactacaaggctacagtaaccaaaacagcatggtactggtaccaaaacagagatatagaccaatggaacagaacagagccctcagaaataatgccacatatctacaactatctgatctttgacaaacctgacaaaaacaagaaatggggaaaggattccctatttaataaatggtgctgggaaaactggctagccatatgtagaaagctgaaactggatcccttccttacaccttatacaaaaattaattcaagatggattaaagacttaaacattagacctaaaaccataaaaaccctagaagaaaacctaggcaataccattcaggacataggcatgggcaaggacttcatgtctaaaacaccaaaagcaatggcaacaaaagccaaaattgacaaatgggatctaattaaactaaagagcttctgcacagcaaaagaaactaccatcagagtgaacaggcaacctacaaaatgggagaaaattttcgcaactgactcatctgacaaagggctaatatccagaatctacaatgaactcaaacaaatttacaagaaaaacacaaacaaccccatgaacaagtgggcaaaggatatgaacagacacttctcaaaagaagacatttatgcagccaaaaaacacatgaaaaaatgctcaccatcactggccatcagagaaacactgtataatgacagaaggataggaaagttgacacagacttgtgacgagactgccttccagccacatgtctgcacaatttcaaggcccatgctctctagcccttaccgctcctcgcttacagagaagtggtcccaagatttctccaaacctccttatcctttcctttttcataagggttacctaaaccccagagagcaagataaggaagttctgaccagggcaatcaggcaggagaaagaaagaaagggtattcaattaggaaaagaggaagtcaaattgtcgctgtttgcagatgacatgattgtatatttagaaaaccccatcgtctcagcccaaaacccccttaaggtggtaagcaacttcagcaaagtctcaggatacaaaatcagtgtgcaaaaatcacaagcattcttatacaccaataacagacaaacagagagccaaatcatgagtgaactcccattcacaattgcttcaaagagaataaaatacctaagaatccaacttacaagggatgtgaaggacctcttcaaggagaactgcaaaccactgctcaatgaaatagaagaggacacaaacaaatggaagaacattccatgctcatggataggaagaatcaatatcgtgaaaatggccatactgcccaaggtaatttatagattcaatgccatccccatcaagctaccaatgactttcttcacagtattggaaaaaacgactttaaagttcatatggaaccaaaaaagagcccacattgccaagacaatcctaagccaaaagaacaaagctggaggcatcacactacctgacttcaaactatactacaaggctacagtaaccaaaacagcatggtactggtaccaaaacagagatatagaccaatggaacagaacagagccctcagaaataataccacacatctacaaccatgtgatctttgacaaatctgacaaaaacaagaagtggggaaaagattccctatttaataaatggaagaggaaaagagacacaaagacagatacacaaggagaccatgatgaggcagaagcaagagatcacagtgatgcttctatgagccaagaaaatctaagaactgccagccatcaccagaagctaaaagagaagcctgaaacaaattctgcctcagagcctccaggaggaatcatcccgggagacatcttgatatcagatttccagcctccaaaacttcatcccggtgcttatgcaatgggctcagatgaagcagccatcgtggcagagatgcatgggtccaacggcaagagattcttttggcaaagggtgaattag

SEQ ID NO: 150410 - DNA, 4574 bp, Homo sapiens
atgaatgatctcccattcacaattgcttcaaagagaataaaatacctaggaatccaacttagaagggatgtgaaggacctcttcaatgagaactacaaaccactgctcaatgaaataagagaggatacaaacaaatggaagaacattccatgctcatgggtaggaagaatcaatatcgtgaaaatggccatactgcccaaggtaatttatagattcaatgccatccccatcaagctaccaaagactttcttcacagaattggaaaaaactactttaaagttcatatggaaccacaaaagagcccacattgccaagtcaatcctaagccaaaagaacaaagctggaggcatcccactacctgacttcaaactatactacaaggctacagtaaccaaaacagcatggtactggtaccaaaacagagatatagaccaatggaacagaacagagccctcagaaataatgccacgtatctacaactatctgatctttgacaaccctgacaaaaacaagcaatggggaaaggattccctatttaataaatgctactgggaaaactggctaaccataggtagaaagctgaaactggatcccttccttacactttatactaaaattaattcaagatggattaaagatttaaatgttagacctaaaaccataaaaaccctagaagaaaacctaggcaataccattcaggacataggcatgggcaaggacttcatgtctaaaacaccaaaagccatggcaacaaaagcaaaaattgacaattgggatctaattaaagtaaagagcttgtgcacagcaaaagaaactaccatcagagtgaacaggcaacctacagaatgggagaaaatttttgcaatctactcctctgacaaagggctaatatccagaatctacaatgaactcaaacaaatttacaagaaaaaaacaaaaaaccccatcaacaagtggatgaaggatatgaacagacacttcccaaaagaagacatttatgcagccaaaaaacacatgaaaaaatgctcatcatcactggccatcagagaaatgcaaatcaaaaccatagtgagataccatctcacaccagttagaatggcgatcattaaaatgtcaggaaacaacagattaataaagaagaaaagagcaaataatcaaatagacacaataaaaaatgataaaggggatatcaccactgacctcacagaagtacaaataaccgtcagagaatactacaaatacctctatgcaaataaactagaaaatctagaagaaatggataaattcctggacacctacaccttcccaagactgaatcaggaagaagttgaatccctgaatagaacaataacagggtttgaaattgaggcaataattaaaagcctaccaaccaaaaaaagtccagcaccagacggattcacagccgaattctaccagagcccaaaagcttcttaagctgataagcaacttcagcaaagtctcaggatacaaaatcaatgtgcaaaaatcacaagcattcctatacaccaataacagacaaacagagagccaaatcatgagtgaactcccattcacaattgcttcaaagagaataaaatacctaggaatccaacttacaagggatgtgaaggacctcttcaaggagaactacaaatcactgctcaacgaaataaaagaggatgcaaacaaatggaagaacattccatgctcatggataggaagaatcaatatcgtgaaaatggccatactgcccaagaattggaaaaaactacttttatggttcatttggaaccataaaagagcctgtattgccaagacaatcctaagccaaaagaacaaagctggaggcatcacactacctgacttcaaactatactacaaggctacagtaaccaaaacagcatggtactggtaccaaaacatagatatagaccaatggaacagaacagagccctcaaaaataataccacgcatctacaacaatctgatctttgacaaacctgacaaaaaacaagaaataggggaaggattccctatttaataaatggtgcttggaaaactggctagccatatgtagaaagctgaaactggatcccttccttacatcttatacaaaaattaattcaagatggattaaagacttaaatgtcagacctaaaaccataaaaaccctagagggaaacctaggcaataccattcaggacataggcatgggcaaggacttcatgtctaaaacaccaaaagcaatggcaacaaaagccaaaattgacaaatgggatctaaataatctaaagagcttctgcacagcgaaagaaactaccatcagagtgaacatgcaacctacagaatgggagaaaatttttgcaatctacccatctgacaaagggctaatatccagaatctacaaagaacttaaacaaatttacaaaaaaaacaacaacaacaacaacaacatcaaaaagtgggcaaaggatatgtacagacacttctcaaaagaaggcatttatgcagccaatcgacatatgaaaacatgctcatcatcactggtcatcagagaaatgcaaatcaaaaccacaatgagataccatctcacaccagttagaatggagatcattaaaaagtcaggacacaacaggcaaacagggtctggagtggacctccagcaaactccaacagacctgcagctgacggtcttcactgttagaaggaaaatcaacaaacagaaaggacatccacaccaaaacaccatcgtgttggatgttctagccagggcaatcaggcaggagaaagaaataaagcgtattcaattaggaaaagagggagtcaaattgtccctgtttgcagatgacatgattgtatatttagaaaaccccatcatcccagcccaaagtctctttaagctgataagcaacttcagcaaagtctcaggatacaaaatcaatgtgcaaaaatcacaggcatttttatacagcaacaacagacaaacagagagccaaatcataagtgaactctcaatcacaatttcttcacagagaataaaatacttaggaatccaacttacaagggatgtgaaggacttcttcaaggagaattacaaaccactgctcaacgaaataaaagaggatacaaacaaatggaggaacattccatgctcatggataggaagaatcaatatcatgaaaatggtcatactgcccaaggtaatttatagattcaatgccatccccatcaagctaccaatgactttctccacagaattggaaaaaactactttaaagttcacatggaaccaaaaaaaagcctgcattgccaagacaatcctaagccacaagaacaaagctggaggcatcatgctacctgacttcaaactatactacaaggctacagtaaccaaaacagcatggtactggtaccaaaacagagatatagaccaatggaacagaacagagccctcagaaatcatatcacacatctactaccacctgatctttgacaaatctgacaaaaacaagaaatggggaaaggattccctatttttaaaaagctgctgggaaaactggctagtcatatgcagaaagctgaaactggatcccttccttacaccttatacaaaaattaattcaagatggattaaagacttcaatgttagacctaaaaccataaaaaccctagaagaaaacctaggcaataccattcaggacataggcatgggcaaggacttcatgtctaaaacaccaaaagcaatggcaacaaaagtcaaaattgacaaatgggatctaattaaactaaagagcttctgcacagcaaaagaaactaccatcagagcgaacaggcaacctacagaatgggagaaaatttttgcaatctactcatctgaccaagggctaatatccagaatctacaaagaactcaaatttacaagaaaaaaaacaaacaaccccatcaaaaagtgggcaaaggatatgaacagacacttctcaaaagaagacatttatgcagccaacagacatatgaaaaaatgctcatcatcactggccatcagagaaatgcaaatcaaaaccacaatgagataccatctcacacctgttagaatggtgatcattaaaatgacaggaaacaacagatacagaggatacagctgtgaagaggcttttgccctcatgaagccatctgtcttcctaagtagagggcttgtgagtgaaagcagaggaaaaggcaagggcatcatagagcctccagaggggacaaaaatttacaaggattcctgggattttgaaccttatttggaaatcttgaatgctgctctaggagatgaaatatttcttcactcatcctggataaaagaatacttcacttgggctggatttaaagattacaaccttgtggtcaggatgattgagacagatgaggacttcaatccttttcctggaggatatgactatttggttgactttttagatttatccttcccaaaagaaagaccacaacgagaacatccctatgaggaagccattgctgaggacgctgtggatatgcataagcagtcagtgactgccgaagcccccagattctga

SEQ ID NO: 150411 - DNA, 3079 bp, Homo sapiens
aaaaatggcaaatttaaaatattttttattcagaaatattttttcaaccaagcaatcaggagtgccaagatcgcatgatttgtgtaaaacacaactttggtctgaaagtaacaagtgaattttacaaaagaaaatatcctgatcctagttccagacttagagagaaaatgcttttgctgaatgttaaccaggaaagttggtaaccagcacttcagtcttatggaagaatcttgatttgttcattctgtaatctctttgagagctcagcacaaaaactgtactcaggagtttgtttgtttttttttgaactttttttttttaatttaagttttagggtacatgtgcacaatgtgcaggtttgttacgtatgtatacatgtgccatgttggtgtgctgcacccattaactcatcatttacattaggtatatctcctaatgctatccctcccctctccccgcaccccacaacaggccctggtgggtgatgttccccttcctttgtccatgtgttctcattgttcatttcccacctatgagtgagaacatgtggtgtttggtttttgtccttgcgatagtttgctgagaatgatggtttccagcttcacccatgttcctacaaaggacatgaactcatcctttttatggctccatagtattccatggtgtatatgtgccacattttcttaatccagtctatcattgttggacatttgggttggttccaagtctttgctattgtgaatagtgctgcaataaacatatgtgtgcatgtgtctttatagcagcatgatttataatcctttgggtatatacccagtaatgggatggctgggtcaaatggtatttctagttctagatccttgaggaatcgccacattgacttccacaatggttgaatgagtttacagtcccaccaacagtgtaaaagtgttcctatttctccacatcctctccagcacctgttgttccctgactttttaatgatcgccattctaactggtgtgaaatggtatctcattgtggttttgatttgcatttctctgatggccagtgatgatgagcattttttcatgtgtttgttggctgcatcaatgtcttcttttgagaagggtcttttcatatccttagcccgttgattgggttgtttttttcttgtaaatttgtttgagttcattgtagattctggatattagccctttgtcagatgagtagattgcaaaaatcaccactcctattcaacatagtgttggaagttctggccaaggcaatcaagcaggagaaggaaataaagggtattcaattaggaaaagaggaagtcaaattgtccctgtttgcagatgacatgattgtatatctagaaaaccccatcgtctcagcccaaaatctcctgatattgcaactgataagcaacttcagcaaagtctcaggatacaaaatcaatgtgcaaaaatcacaagcattcttatacaccaataacagacaaacagagagccaaatgaggagtgaactcccattcacagttgctacaaagagaataaaatacttaggaatccaacttacaagggatgtgaaggacctcttcaaggagaactacaaactactgctcaatgaaataaaagaggacacaaacaaatggaagaacattccacgctcatgggtaggaggaagaatcaatctcgtgaaaatggccatactgcccaaggtaatttacagattcaatgccatccccatcaagctaccaatgactttcttcacagaattggaaaaaactactttaaagttcatatggaaccaaaagagagccctcattgccaagtcatccctaagccaaaagaacaaaactggaggcatcacgctacctgacttcaaactatactacaaggctacagtaaccaaaacatcatggtactggtaccaaaacagagatatagatcaatggaacagaacagagccctcagaaataatgccacatatctacaactatctgatctttgacaaacctgacaaaaacaaaaaaatggggaaaggattccctatttaataaatggttctgggaaaactgcctagccatatgtagaaagctgaaactggatcccttccttaacaaattatacaaaaatcaattcaagatggattaaagacttaaactttagacctaaaaccataaaaaccctagaagataacctaggtaataccattcaggacataggcatgggcaaggacttcatgtctttgcccaaacaccagaagcaatggcaacaaaagccaaaattgacaaatgggatctaattaaaactaaagagcttctgcacagcaaaagaaactaccatcagagtgaacaggcaacctacaaaatgggagaaaatttttgcaatctactcatctgacaaagggctaatatccagaatctacaatgaactcaaacaaatttacaagaaaaaaatcaaacaaccccatcaaaaagtgggcaaaggatacgaacagacacttttcaaaagaagacatttatgcagccaacagacacatgagaaaatgctcatcatcgctggtcatcagagaaatgcagatcaaaaccacaatgagataccatctcacaccagttagaacggcgatcattaaaaagtcaggagacaacaggtgctggagaggatgtggagaaataggaacacttttacactgttggtgggactgtaaactagttcaaccattgtggaagtcagtgtggcgattcctcagggatctagaactagaaataccatttgacccagccatcccattactgggtatatacccaaaggactataaatcatgctgctataaagacacatgcacatgtatgtttattgcggcattattcacaatagcaaagacttggaaccaacccaaatgtccaacaatgatagactggattaagaaaatgtggcacatatacaccatggaatactatgcagccataaaaaatgatgagttcgtgtcctttgtagggacatggatgaaattggaaatcatcattcttagtaaactatcgcaagaacaaaaaaccaaacactgcatattctcactcataggtgggaattga

SEQ ID NO: 150412 - DNA, 599 bp, Homo sapiens
tgattcggacgagccgcacaggggtcagcttgctggtgcccaatggagccattccccagggcaagttctacgagatgtatctactcatcaacaaggcagaaagtaccctcccgctttcagaagggacccagacagtattgagcccctcggtgacctgtggacccacaggcctcctgctgtgccgccccgtcatcctcaccatgccccactgtgccgaagtcagtgcccgtgactggatctttcagctcaagacccaggcccaccagggccactgggaggaggtggtgaccctggatgaggagaccctgaacacaccctgctactgccagctggagcccagggcctgtcacatcctgctggaccagctgggcacctacgtgttcacgggcgagtcctattcccgctcagcagtcaagcggctccagctggccgtcttcgcccccgccctctgcacctccctggagtacagcctccgggtctactgcctggaggacacgcctgtagcactgaaggaggtgctggagctggagcggactctgggcggatacttggtggaggagccgaaaccgctaatgttcaaggacagttaccacaacctt

SEQ ID NO: 150413 - DNA, 358 bp, Homo sapiens
ggcacgaggtcagtgtacttgggcctttggccttagtgatttctgagaagacactggataagtaggaggaccatagtagggccaggcttcaggcagcacaggtgggtggcagtgcagcagctttggggctgatgtggctgcaccagcacagccttccttggtgcctctgcagtggtggccggaggggcgccatgcctggggggctctcccacatcagaggcaggcctccagacttgtccttggaaatgccaagatgtaaaaataaacccagcacttcatcctgagttctcttccctccgctcaatagggtggcatgaaatggatgcagagaacccattacatcagcccagcccatcct

SEQ ID NO: 150414 - DNA, 366 bp, Homo sapiens
cgcagtttcccaaagctgtttttgctaaactaatcctttcagaagtgttcgaatacagtagcagcacaaggccgataactagccctttacaagaagtccactttctggtatatacaaatgacgatgaaggctgtcaggtatggttacatatcccatctggttaattctggcaagtgaacccaagcgcattcagatgtttttatagatctaggaataaccgtgttttctaatcctgtgcctataagtgatggttgctaatgggaggttgtcatatgacttaactatgagccaacactgataactcatgttcctagacagttcatcaagagacaagctaatctgtaataaatacattcttctcgtgcc

SEQ ID NO: 150415 - DNA, 1720 bp, Homo sapiens
  misc_feature (1)...(1720): n = a,t,c or g
acagttctgcaaggggcagctcctctacacctgaccgtggatgccacaaaacctataatatagagggaaagtttaaatatataacaagaatggaagttcagacatactaggctaaaggacacagaaaagggatcagttagagccttaacatttccagagcaagaaatctcccattttcctacatagaggtttatactaatcatgctacaaattcactctgggtggggtgggggaaggaaggtcactgacaagaggggtagtaaaatacacaggaaccaaagcaagtgagtcagactcaactaaatcgattcaaatgcttcagctcaacaattttcataacacatggtataccacaatcaacccaaggtgagaacatttcttttaaatagtagatatcacatgttcataatcatctgggttgtcccccaaaaggtggggtgcctataaactttccagctgttacatagactgtcaaacacctttccttccttgaagtttaaaactttcctttaaccttatttgtttcctccgttgggaataatacccagtcccaaccctctttggggaaaggcacctgccatgtttcccatattttaaaaaatgaacatcccagaaagtaagcctgagaggaccctggccccatccccatgtggcccacacatttgactttgaccattagcagcagtgacactgtgagagggggagaaggtgcaggtgggtgaagtgggcaagggtctgcaacacgagacgctctcaggaggctggcccaggccagggcctggccccaggttcaacagtgaactttgctctgctccgccctcttcccctgggaaaaaccaatctaaattatcaagcatgatcttccttcttcgtccctgganttacacacagttaaagggaaaagtctgctttgaggcttcctactttcaatggttttccccttaccccaaaacccaggaattgaaaggggctgcccaatattctcaaagtggggaaggcaagagggaacagtacttgggcttgcccttcccacggtgtggtaaaaccctgcagcttgcttacattgtcttcaacagccccaggaattccaaggccccaggtggcaagccaggaagaaacagtggaaaagcaagggcaagagaaaagagaaaaaggagcgggaaagtctgcatagctgtcataacctctgcttctcctgatctgtagcgaacccacaaccaggaagagtcatggtctggaacaatcatgggaccccaaacgcctgtaggttttttacctaccaaacatcacccatggctgctcctaaagctgtcaatttggttccccacagttacctcagcattcacggatgccccaatttatggccccaggaaggctgaccccaggctaagggcagtctcactcccacagccatgcaatggacagtctgaaatgtttccctaccccagaccttcactgacctctactatttcctcctctgatataaagaaaacactttaattttctcctgcatcctacatctcctcctaaaattttggccctaattgtcatcaaaaccttgtaggattctgaattttttgtttcttcctgaatcttagccagttctctcagagccaatcctggatttataaggaattttcacctattttttttttttttttattttttgagacggagtcttgctctgtcgcccaggctggagtgcagtggcacgatcttg

SEQ ID NO: 150416 - DNA, 1720 bp, Homo sapiens; identical to SEQ ID NO: 150415
  misc_feature (1)...(1720): n = a,t,c or g

SEQ ID NO: 150417 - DNA, 4863 bp, Homo sapiens
atgggcggcaagaacaagaaacacaaggctccagcggccgcggtggtccgggccgccgtgtctgcttccagagccaaatctgccgaggctggaattgccggggaggcccaaagcaagaagccagtgtccaggccggccaccgctgccgctgccgctgccggctccagggagccccgtgtcaagcaaggtccaaaaatttatagttttaattctacaaatgattctagtggtcctgcaaatctggataaatctattttgaaagtggtaattaataacaaactagagcaaagaattattggagtgatcaatgagcataaaaagcaaaataatgacaaaggaatgatttctggaagacttactgccaaaaaattgcaggatttatacatggctttacaagcattttcatttaagacaaaggacattgaagatgccatgaccaatacactcttatatggaggtgaccttcattctgccttggattggctctgtttaaacctttcagatgatgcacttcctgaaggattcagtcaggaatttgaagagcagcaacctaaaagtaggcctaaatttcagtctcctcaaatacaagccactatttcacctccattgcaacctaaaacaaaaacatatgaagaggaccctaagagtaagccaaaaaaggaagaaaaaaatatggaagtaaatatgaaagagtggattttacgatatgctgaacaacaaaatgaagaagaaaagaatgagaattctaaaagtttagaagaggaggaaaaatttgaccctaatgaaaggtacttacatcttgcagcaaaactgctggatgcaaaagaacaagcagctacctttaaactagaaaaaaacaagcaaggccaaaaagaggctcaggaaaaaataaggaaatttcaaagagaaatggaaactttagaagaccatccagtatttaacccagccatgaagatttcacatcaacaaaatgaaaggaaaaagcctcctgtagccacagaaggagaaagtgcattgaattttaatttatttgaaaaatctgcagctgctactgaagaagagaaagataaaaagaaagaacctcatgatgtaagaaattttgactatactgctcgaagttggactggaaaatctcccaaacaatttctgattgattgggtcaggaagaatcttcccaagagtccaaatccttcctttgaaaaagttccagtaggtagatactggaaatgtagggttagggtaatcaagtctgaagatgatgtcctggtagtatgccctacaatcttaacagaagatggcatgcaagctcagcacctgggagctactttagccctttaccgtttagttaaagggcagtcagttcatcagttacttcctcccacttaccgagatgtttggctggagtggagtgatgcagaaaagaaaagggaagaattaaataaaatggaaaccaataaaccacgtgatctttttattgccaaacttctgaataaactgaaacagcagcaacagcagcaacaacagcattctgaaaataagagagaaaactctgaagatcccgaggaatcttgggaaaatttagtttcggatgaggatttttctgcactgtccttggaatcagcaaatgtggaagatttggaacctgttagaaacctctttagaaagttgcaaagcacacctaagtatcagaaacttctaaaggaaagacaacagctacctgtatttaaacatcgggactcaattgttgaaactcttaaaaggcatcgggtagtggttgtggcaggtgaaacagggagtggtaaaagtactcaggtaccacattttctattggaagatttgcttctaaatgagtgggaagcaagtaaatgtaacattgtctgtacccaaccccgaagaatctcagcagttagtttagccaacagagtatgtgatgaattgggctgtgaaaatggacctggaggaaggaattccttgtgtggatatcagatccggatggaatctcgagcttgtgaatctaccaggttactctattgtacaacaggggttttgctaaggaaacttcaagaagatggtcttctaagtaatgtgtctcatgttattgtagatgaggttcatgaaagaagtgtccagtcagacttcctactaattatcttgaaggaaattttacagaaacgttctgatctacacttgattctaatgagtgccactgtggacagcgaaaaattttctacatatttcacacactgccccattctcagaatttcaggaagaagttatcctgttgaggtttttcatcttgaagatataatagaagaaacaggctttgtactggaaaaagactcagaatattgtcagaaatttctggaagaggaagaagaagtaaccattaatgttacaagcaaagcagggggaataaaaaaatatcaggaatacatcccagttcagactggagcacatgctgatttaaatccattttaccaaaagtacagcagccgcactcagcatgctattctatacatgaatcctcataaaatcaacctggatctcattttggaacttcttgcatacttagtgtcttctaaagagaaactcttgctaagaactatgattttaactttcagatataaagtgatagctctgcattctattctttcaacccaagatcaagctgcagcattcacacttccccctccaggagtcaggaagattgttttagcaaccaatattgcagagacgggtatcactattcctgatgttgtatttgtaattgatactggaagaacaaaagaaaataaatttgaaggctttatggattattctgttcctgaaatcttacgtgtacctttggaggaattatgccttcatattatgaaatgtaatcttggttctcctgaagatttcctctccaaagccttagatcctcctcagctccaagtgatcagcaatgcaatgaatttgctccgaaaaattggagcttgtgaattaaatgagcctaaactgactccgttgggccaacaccttgcagctttacctgtgaatgtcaagattggcaagatgcttatttttggtgccatatttggctgccttgacccagtggcaacactagctgcagttatgacagagaagtctccttttaccacaccaattggtcgaaaagatgaagcagatcttgcaaaatcagctttggccatggcggattcagaccacctgacgatctacaatgcatatctaggatggaagaaagcacgacaagaaggaggttatcgttctgaaatcacatactgccggaggaactttcttaatagaacatcactgttaaccctagaggatgtaaagcaggagttaataaagttggttaaggcagcaggattttcatcttccacaacttctaccagctgggaaggaaacagagcctcacagaccctctcattccaagaaattgcccttcttaaagctgtactggtggctggactgtatgacaatgtggggaagataatctatacaaagtcagtggatgttacagaaaaattggcttgcattgtggagacggcccaaggcaaagcacaagtacacccatcctcagtaaatcgagatttgcaaactcatggatggctcttataccaggagaagataaggtatgccagagtgtatttgagagaaactaccctaataaccccttttccagttttactttttggtggtgatatagaagttcagcaccgagaacgtcttctttctattgatggctggatctattttcaggcccctgtaaagatagctgtcattttcaagcagctgagagttctcattgattcagttttaagaaaaaagcttgaaaatccaaagatgtcccttgaaatgacccgggctcccgcagcgacccgggctccggttgcccagcccctcgagccccgcgctcgagcggggaggcgggacaacgaccagaaccttcgcgccccggtgaagaagagcaggcgtccgcgctcccggaggaagcagccgctgcatcccctgaacccgtgcccgctcccgggagactccggcatttgcgacctgttcgagtcccccagctccggctcagacggcgcagagagcccctctgcggcgcggggtggtagccccctgcccggcccggcccagcccgtggcgcagctagatctacagaccttccgcgactacggccagagctgctacgccttccgcaaggcgcaggagagccacttccacccgcgggaggcgctggcacggcagccacaagtgacggcggaatcccgctgtaagctgctcagctggctgatcccggtgcaccgccaattcggcctctccttcgagtcgctgtgcctgacggtgaacactctggaccgcttcctcaccaccacgccggtggctgcagactgcttccagctgcttggggtcacctccttgctcatcgcttgcaaacagcagctctgcaacctcgagtgcatcgtgctgcacaagctgcacttcaccctgggtgcgcccaccattagcttcttcctggagcatttcacgcacgctcgcgtggaggcggggcaggctgaggcctccgaagctctggaagcgcaagccctggcgcggggggtggcagagctgagtctggccgactatgccttcaccagctactccccttccctcctggcgatctgctgcctggcgctggcggaccgcatgctgcgggtctcgcggcccgtggacttgcgactgggagaccacccggaggcggcgctggaggactgtatgggcaagttgcagctgctggtggccataaacagtacttccttgactcacatgctgcccgttcagatctgcgagaagtgcagcctgcccccgagctcgaaataa

SEQ ID NO: 150418 - DNA, 3149 bp, Homo sapiens
ggttagggtaatcaagtctgaagatgatgtcctggtagtatgccctacaatcttaacagaagatggcatgcaagctcagcacctgggagctactttagccctttaccgtttagttaaagggcagtcagttcatcagttacttcctcccacttaccgagatgtttggctggagtggagtgatgcagaaaagaaaagggaagaattaaataaaatggaaaccaataaaccacgtgatctttttattgccaaacttctgaataaactgaaacagcagcaacagcagcaacaacagcattctgaaaataagagagaaaactctgaagatcccgaggaatcttgggaaaatttagtttcggatgaggatttttctgcactgtccttggaatcagcaaatgtggaagatttggaacctgttagaaacctctttagaaagttgcaaagcacacctaagtatcagaaacttctaaaggaaagacaacagctacctgtatttaaacatcgggactcaattgttgaaactcttaaaaggcatcgggtagtggttgtggcaggtgaaacagggagtggtaaaagtactcaggtaccacattttctattggaagatttgcttctaaatgagtgggaagcaagtaaatgtaacattgtctgtacccaaccccgaagaatctcagcagttagtttagccaacagagtatgtgatgaattgggctgtgaaaatggacctgggaggaaggaattccttgtgtggatatcagatcccggatggaatctcgagcttgtgaatctaccaggttactctattgtacaacaggggtttttgcttaagggaaacttcaagaagatggtctttctaagtaatgtgtctccatgtttattgtagatgaggtttcatgaaaggaagtgtccagtcagacttcctactaattatcttgaaggaaattttacagaaacgttctgatctacacttgattctaatgagtgccactgtggacagcgaaaaattttctacatatttcacacactgccccattctcagaatttcaggaagaagttatcctgttgaggtttttcatcttgaagatataatagaagaaacaggctttgtactggaaaaagactcagaatattgtcagaaatttctggaagaggaagaagaagtaaccattaatgttacaagcaaagcagggggaataaaaaaatatcaggaatacatcccagttcagactggagcacatgctgatttaaatccattttaccaaaagtacagcagccgcactcagcatgctattctatacatgaatcctcataaaatcaacctggatctcattttggaacttcttgcatacttagataaaagtccccaattcagaaatattgaaggagcagtattgatctttttaccaggacttgctcatattcagcagttgtatgatcttctatcaaatgatagaagattttattctgaacgatataaagtgatagctctgcattctattctttcaacccaagatcaagctgcagcattcacacttccccctccaggagtcaggaagattgttttagcaaccaatattgcagagacgggtatcactattcctgatgttgtatttgtaattgatactggaagaacaaaagaaaataagtaccatgaaagcagtcagatgagttctttggtggagacgtttgtcagtaaagccagtgctttgcagcgccagggaagagctgggcgggtcagagatggcttctgtttccgaatgtacacaagagaaagatttgaaggctttatggattattctgttcctgaaatcttacgtgtacctttggaggaattatgccttcatattatgaaatgtaatcttggttctcctgaagatttcctctccaaagccttagatcctcctcagctccaagtgatcagcaatgcaatgaatttgctccgaaaaattggagcttgtgaattaaatgagcctaaactgactccgttgggccaacaccttgcagctttacctgtgaatgtcaagattggcaagatgcttatttttggtgccatatttggctgccttgacccagtggcaacactagctgcagttatgacagagaagtctccttttaccacaccaattggtcgaaaagatgaagcagatcttgcaaaatcagctttggccatggcggattcagaccacctgacgatctacaatgcatatctaggatggaagaaagcacgacaagaaggaggttatcgttctgaaatcacatactgccggaggaactttcttaatagaacatcactgttaaccctagaggatgtaaagcaggagttaataaagttggttaaggcagcaggattttcatcttccacaacttctaccagctgggaaggaaacagagcctcacagaccctctcattccaagaaattgcccttcttaaagctgtactggtggctggactgtatgacaatgtggggaagataatctatacaaagtcagtggatgttacagaaaaattggcttgcattgtggagacggcccaaggcaaagcacaagtacacccatcctcagtaaatcgagatttgcaaactcatggatggctcttataccaggagaagataaggtatgccagagtgtatttgagagaaactaccctaataaccccttttccagttttactttttggtggtgatatagaagttcagcaccgagaacgtcttctttctattgatggctggatctattttcaggcccctgtaaagatagctgtcattttcaagcagctgagagttctcattgattcagttttaagaaaaaagcttgaaaatccaaagatgtcccttgaaaatgacaagattctgcagatcattacggaattgataaaaacagagaataactgaaactgaaattcatggtcaactgctttaaaaattaagatgaagatacagtcatgaaattatctgaaaatgggtcatcacattaagtatttcattacttaaaatgttggtactagccattaacttaaaggtggtgggaaaaaagcacatactttaaacatgtataattttctagttcctttttaatgatgattattctgaatgtatttgccactacatttacaataaattctttggtattatgcaaaaaaaaaaaaaaaaaaa

SEQ ID NO: 150419 - DNA, 1101 bp, Homo sapiens
agtaaatgtaacattgtctgtacccaaccccgaagaatctcagcagttagtttagccaacagagtatgtgatgaattgggctgtgaaaatggacctggaggaagggtaagctgtcattcaactccacctcagtgaatgatggtgacattactcacctttgcttttgtgatccaaatggaatgtgtaccatatgtgagttttcactgctattggttgatcagtagcacatttcaggcacttttcacattttctttgatagatgtgatagtatgcccactgcccctatgagaaggattatccagtagagttctgtcattaaaattcctcatataaaagaaaaaatatattaactataataattgaatattcaaatatgttacacactaaattgaacagccaaagaatgtggacaaactcaaattctactaaaatatatctcaagtttttgcaaaccttttctgtggaatatattcctgaatgattttcattaattcttttcagtgagcagaagggaaaaacagtataaattaaaatgttagtattttccaaccccatatttaaaaaaaaaaatgagaaaaatacttaaatatctattgtcatgcattttgccatgcaagtatatgcaaaactggccaaaccttaaccagagtgacggcaaagtataggaattagtttaattaattaaactagttagaaccaaatatgacaaattgcaagttcatgtaattctgattatttatactttgaattgttctttctggagatggcatattatatttttatctctaaactgggtaccccttcattaaaagttttctatttagcaaattgtctgggtttctgtcatggaatagaggaggaaaaaaaaggcacggtttctgctgttagagaatgacagacatatacacaaataagacaacggaatgactgaaggagtaagaaagaaaatgtgatggggaatgttacattaaaattccgctaggcactcctagtatgatactagctgctttttaatggtggcaaattttatgagatcttgatagaaaagtagaccaaattatagaagctgcttaaattccattcctgagtacctcaatattt

SEQ ID NO: 150420 - DNA, 667 bp, Homo sapiens
  misc_feature (1)...(667): n = a,t,c or g
cggacgcgcgggcttatgtctcttcccttatcaagtatttatatggcccataccatatcattttccacttgcaggtaggagacagggaccatgcccatcttatctttatattcccagcatctagtacagtgcctgaaatggaggaggtacccagtaaataatggtttggatgaatgaatgattgaagttgctctgctggattcttatattgggtcttgggtatgtgtcggcttcccaactgcactcgaagctacgttgtatacttgacagcagcagctccattccatttactagtataggcgaagtcccagttagggttgccgtagatgtttcgatgaggcttcactgagcgtgtgtctttgtgtacgtggcggtgaagtgaaggcgtgtttgtgggctggtttcccagctgcccagcctgactttctacagtcagcaggatgggacctgggagatgtcagggctgaagaccctggggagcatgtgggcagtgacagtcttccatcacttcaccccacggcgtggccagctttnggagctgaagctgttctgccccagtggcatgatacccctcgtgcgcgcccctcgcaccgctgacattgctaatcccaagctcatgggcaccacgagcctacttcctccatcaagcttaattcacatggtattc

SEQ ID NO: 150421 - DNA, 5811 bp, Homo sapiens; identical to SEQ ID NO: 150167

SEQ ID NO: 150422 - DNA, 2446 bp, Homo sapiens
  misc_feature (1)...(2446): n = a,t,c or g
ttttttttttttttttttgagacagggtcttgttctatcaccccaggctggagtgcagtggtgtgatctcagctcgctgcaggcttgacctcctgggcccaagtgatcctcctgcctggacctcccaaaagtgttgggattacaggcatgagccactgcatccagcttgcttctaattttcctacccaggctgttttaaacctagttctccagctaagtaaaatgtgcccaaatggaaaacatctaaatcttctgcagcccattcttcctgtgtctttgtgttgacaaacctctaatcttcccatgtctttgtgttgacaaacctaaccttccatgtctttttgttgacaaacctctaaccttccatgtctttgtgttgacaaacctctccatgggtggtgcatctgaccctatcccaacatgcccttaggacgcctncatctcccttgactgtctgcccatcccctccccaaaactaagtggaggctctgtcttttcctccctagtttgaggttcctcctcctccccagtgtcctaaaatggttccaatatgcccctagagtagatggcctgcctgaaagaccgcaaagtaagtaatccctgccaacccggaaaccaaaggcctgtgggttggagggggaaaccgggtgtgaagggcctgaatgaataaagccctaggaggcctccctgaagtccatatcccctatgttgcctcccctgggagagatgggcctaaactgtttatctttttaaaaaccagatgattaaaaaagttacattttagtattatactgataggaatataggataatctcttctaaagcctatttggtttcccagaagagttagatcattggaccaaaagtgcacagagtaagataccttagctacagcaatagaaatcacaaactgttctgtggttttaatcttcctatttctgatttagaagtatgaagtgatcatatttaatctttctgctcctgctcaaaaataattctataacatcatttaggttatagaaagtttctacttatagcccttacattcttcatgaccgaaatctgtgtctttccctcatgactgataattatctcccaatttggtcacttctgctaattgctattttattaaacttgaaattttagggttgggaagcaaagggaaaccacttgggcatcccctttgtttctagggagaaaagactaacttgtcccatctgctcacttgcttatggagctaaaagacccccagtcctagaagtgttctgttcctgaggagtggttaaagaggtgaaaagaagaggtgaattaaaagatgaaagagctttttaaatagccagcaactctctctaccatctgttttggtaagagctagcacctcttgttcctctttaaaaccctggagggaataaacccaaaatcaagtggttcccaggatccttcagagccaaaagaccccaataccacagtcttgacctttgccctgcctgcttctgaaactggagaatggcatctcccagcagcctaaggcagacataggtcatacctatccctgggcagcgagctgagctcccacagactgagttgtgctggatctcagaattctaagcattaatgtttccttgctgttataattcttgctcatcaggttcaactgccttatccctctgaggtttgcaaatgaggatggagaagccactgagaaatggaacccagtgagctgagctcaccttttatatgagtggatttttttttttttttttttttttgaaatggagtctcactctgtcgcccaggctggagtgctgtggcgtgatctcagctcactgcaagctccacctcccgggttcacaaagcgattctcctgcctcagcctcctgggtagctgggattacaggcgcgtgccaccacgcccggcatgagtggaattttaagtgttaaatctcttcctgactctgggttcagtaggtccctcctctttctgttaccctccctggttctcttctgttcaccaactacctggccatgtgcccaaactagaaaaaggaaataattttacacccctgccccaacagctccttccctcctaggggactttctgtgttccaccccccactttggggtctttaggaactgtgggctaggaagataaaagggaggagtttgagtcagaggctttatgtccccaaacccaaccccctctgagtattaaactatagtggcattgtccctcaagctcccctctgccttggctccagagtcttcctcctcttcttccagactgggcagggtggctgttgttattggtgaagataggcatctagccagagctgccctgactcctttagtgagtggatgatgtcggcgaaggctgacagcaggggcttggactggtactctatgccatgcttggcacacaaggactgcaccaggggagcactttgtgg

SEQ ID NO: 150423 - DNA, 4191 bp, Homo sapiens
atgggagactttaacaccccactgtcaacattagacagatcaacgagacagaaagtcagcaaggatacccaggaattgaactcagctctgcaccaagcggacctaatagacatctacagaaccctccaccccaaatcaacagaatatacatttttttcagcaccacaccacacctattccaaaattgaccacatacttggaagtaaagctctcctcagcaaatgtaaaagaacagaaattataacaaactatctctcagaccacagtgcaatcaaactagaactcaggattaagaatctcactcaaaaccgctcaactacatggaaactgaacaacctgctcctgaatgactactgggtacataacgaaatgaaggcagaaataaagatgttctttgaaaccaacgagaacaaggacacaacataccagaatctctgggacacattcaaagcaaccactagcaagactaataaagaaaaaaagaagaatcaaatagatgcaataaaaaatgataaaggggatatcaccactgatcctacagaaatacaaactaccgtcagagaatactacaaacacctctacgcaaataaactagaaaatctagaagaaatggataaattcctcgacacatacactctcccaagactaaaccaggaagaagttgaatctctgaatagaccaagaacaggagctgaaattgtggcaataatcaatagcttaccaaccaaaaagagtccaagaccagatggattcacagccgaattctaccagaggtacaaggaggagctgtcaagagaagagagcagaaagcaggctcttgctgctaaaagagaaaaaagaaaagaaaagagaaaaaagaaaaaagaggaacagaaaaggaaacaggaagaagatgaagaaaacaaacctaaggagaattcggaactaccagaggatgaagatgaagaggagaatgatgaagatgtggagcaagaagttcccatagaacctcctagtgcaaccaccaccactacgattggaatctctgcaacatctgcaacattcacaaatgtgtttgggaaaaaaagggccaatgtggtgacaactcccagcaccaatcggaaaaataagaagaacaaaacaaaagaaacccctcctacagcacatttaattttaccagaacaacatatgtctttagcccaacaaaaggcagataaaaataaaataaatggagaacctagaggtggtggtgcaggtgggaatagtgattcagataacttggacagcacagactgcaacagtgagagtagcagtggtggtaaaagccaagagttaaattttgtgatggatgtgaattcctctaaatacccctcactgctccttcattcccaagaagaaaagacaagtactgctacttccaaaactcagacacgacttgaaggtgaagtgactcctaattccttgtcaaccagctacaagacagtgtcattgccattaagctctccaaacataaagctgaatctcactagccctaaaaggggtcagaaaagagaagaagggtggaaagaagttgtacgaaggtcaaagaaattgtctgttccagcctcagtggtgtcgaggataatgggaagaggaggatgcaacatcactgcaatacaggatgttactggtgcccatattgatgtggataaacaaaaagataagaatggcgagagaatgatcacaataaggggtggcacagaatcaacaagatatgcagttcaactaatcaatgcactcattcaagatcctgctaaggaactggaagacttgattcctaaaaatcatatcagaacacctgccagcaccaaatcaattcatgctaacttctcatctggagtaggtaccacagcagcttccagtaaaaatgcatttcctttgggtgctccaactcttgtaacttcacaggcaacaacgttatctacgttccagcccgctaataaacttaataagaatgttccaacaaatgtacgttcttctttcccagtttctctacccttagcttatcctcaccctcattttgccctgctggctgctcaaactatgcaacagattcggcatcctcgcttacccatggcccagtttggaggaaccttctcaccttctcctaacacatggggaccattcccagtgagacctgtgaatcctggcaacacaaatagctctccaaagcataataacacaagccgtctacctaaccagaacgggactgttttaccctcagagtctgctggactagctactgccagttgtcctatcactgtctcttctgtagttgctgccagtcagcaactgtgtgtcactaatacccggactccttcatcagtcagaaagcagttgtttgcctgtgtgcctaagacaagtcctccagcaacagtgatttcttctgtgacaagcacttgtagttccctgccttctgtctcctctgcacctatcactagcgggcaagctcccaccacatttctacctgcaagtacttctcaagcacagctttcttcacaaaagatggagtctttctctgctgtgccacccaccaaagagaaagtgtccacacaggaccagcccatggcaaacctatgtaccccatcttcaactgcaaacagttgcagtagctctgccagcaacaccccgggagctccagaaactcacccatccagtagtcccactcctacttccagtaacacacaagaggaggcacagccatccagtgtgtctgatttaagtcctatgtcaatgccttttgcatctaactcagaacctgctccattgactttgacatcacccagaatggttgctgctgataatcaggacaccagtaatttacctcagttagctgtaccagcacctcgagtttctcatcgaatgcagcccagaggttctttttactccatggtaccaaatgcaactattcaccaggatccccagtctatttttgttacgaatccagttactttaacaccacctcaaggcccaccagctgcagtgcagctttcttcagctgtgaacattatgaatggttctcagatgcacataaacccagcaaataagtctttgccacctacatttggcccagccacacttttcaatcacttcagcagtctttttgatagtagtcaggtgccagctaaccagggctggggagatggtccactgtcctcacgagttgctacagatgcctctttcactgttcagtcagcgttcctgggtaactcagtgcttggacacttggaaaacatgcaccctgataactcaaaggcacctggcttcagaccaccttcccagcgagtttctactagtccagttgccacttctgccccaccaacgttgggccaaccaaaaggagtcagtgccagtcaagatcgaaagatacctcccccaattggaacagagagactggcccgaattcggcaaggagggtctgttgcacaagccccggcggggaccagttttgtcgctcccgttggacacagtggaatctggtcatttggtgtcaatgctgtgtcagaaggcttatcaggttggtcgcaatctgtgatggggaaccatccaatgcatcaacaattatcagacccaagcacattctcccaacatcagccaatggagagagatgattctggaatggtagccccctctaacatttttcatcagcctatggcaagtggttttgtggatttttctaaaggtctgccaatttccatgtatggaggcaccataataccctctcatcctcagcttgctgatgttccaggaggccctctgtttaatggacttcacaatccagatcctgcttggaaccctatgataaaagttatccaaaattcaactgaatgcactgatgcccagcaggccagtctgcttccttcagtccctgctctcaaaggggaaatcccatcacctcagctaaccagaccgaagaagagaattggacggccgatggtggcctctcctaaccagagtcccaaccccttgacaggcaccaggatcatctacgaccgaaagttcctgctggagtgcaagaactcacccattgcccggacacccccctgctgcctccctcagattcccggggtcacaactcctccaacagcccctctctccaagctggaggagctgaaggagcaggagacagaggaagagatacccgatgacgcacaatttgaaatggacatctaa

SEQ ID NO: 150424 - DNA, 2499 bp, Homo sapiens
  misc_feature (1)...(2499): n = a,t,c or g
atgggaagaggaggatgcaacatcactgcaatacrkgatgttactggtgcccatattgatgtggataaacaaaaagataagaatggcgagagaatgatcacaataaggggtggcacagaatcaacaagatatgcagttcaactaatcaatgcactcattcaagatcctgctaaggaactggaagacttgattcctaaaaatcatatcagaacacctgccagcaccaaatcaattcatgctaacttctcatctggagtaggtaccacagcagcttccagtaaaaatgcatttcctttgggtgctccaactcttgtaacttcacaggcaacaacgttatctacgttccagcccgctaataaacttaataagaatgttccaacaaatgtacgttcttctttcccagtttctctacccttagcttatcctcaccctcattttgccctgctggctgctcaaactatgcaacagattcggcatcctcgcttacccatggcccagtttggaggaaccttctcaccttctcctaacacatggggaccattcccagtgagacctgtgaatcctggcaacacaaatagctctccaaagcataataacacaagccgtctacctaaccagaacgggactgttttaccctcagagtctgctggactagctactgccagttgtcctatcactgtctcttctgtagttgctgccagtcagcaactgtgtgtcactaatacccggactccttcatcagtcagaaagcagttgtttgcctgtgtgcctaagacaagtcctccagcaacagtgatttcttctgtgacaagcacttgtagttccctgccttctgtctcctctgcacctatcactagcgggcaagctcccaccacatttctacctgcaagtacttctcaagcacagctttcttcacaaaagatggagtctttctctgctgtgccacccaccaaagagaaagtgtccacacaggaccagcccatggcaaacctatgtaccccatcttcaactgcaaacagttgcagtagctctgccagcaacaccccgggagctccagaaactcacccatccagtagtcccactcctacttccagtaacacacaagaggaggcacagccatccagtgtgtctgatttaagtcctatgtcaatgccttttgcatctaactcagaacctgctccattgactttgacatcacccagaatggttgctgctgataatcaggacaccagtaatttacctcagttagctgtaccagcacctcgagtttctcatcgaatgcagcccagaggttctttttactccatggtaccaaatgcaactattcaccaggatccccagtctatntttgttacgaatccagttactttaacaccacctcaaggcccaccagctgcagtgcagctttcttcagctgtgaacattatgaatggttctcagatgcacataaacccagcaaataagtctttgccacctacatttggcccagccacacttttcaatcacttcagcagtctttttgatagtagtcaggtgccagctaaccagggctggggagatggtccactgtcctcacgagttgctacagatgcctctttcactgttcagtcagcgttcctgggtaactcagtgcttggacacttggaaaacatgcaccctgataactcaaaggcacctggcttcagaccaccttcccagcgagtttctactagtccagttgggttaccatccattgacccatcaggcagctccccatcttcctcttctgctcctctggcaagtttttccggcataccaggaacaagggttttcctgcaagggccagctcctgttgggactcctagtttcaacagacaacatttttctccccatccttggacaagcgcctcaaactcatccacttctgccccaccaacgttgggccaaccaaaaggagtcagtgccagtcaagatcgaaagatacctcccccaattggaacagagagactggcccgaattcggcaaggagggtctgttgcacaagccccggcggggaccagttttgtcgctcccgttggacacagtggaatctggtcatttggtgtcaatgctgtgtcagaaggcttatcaggttggtcgcaatctgtgatggggaaccatccaatgcatcaacaattatcagacccaagcacattctcccaacatcagccaatggagagagatgattctggaatggtagccccctctaacatttttcatcagcctatggcaagtggttttgtggatttttctaaaggtctgccaatttccatgtatggaggcaccataataccctctcatcctcagcttgctgatgttccaggaggccctctgtttaatggacttcacaatccagatcctgcttggaaccctatgataaaagttatccaaaattcaactgaatgcactgatgcccagcagatttggcctggcacgtgggcacctcatattggaaacatgcatctcaaatatgtcaactaa

SEQ ID NO: 150425 - DNA, 1814 bp, Homo sapiens
gggtggcacagaatcaacaagatatgcagttcaactaatcaatgcactcattcaagatcctgctaaggaactggaagacttgattcctaaaaatcatatcagaacacctgccagcaccaaatcaattcatgctaacttctcatctggagtaggtaccacagcagcttccagtaaaaatgcatttcctttgggtgctccaactcttgtaacttcacaggcaacaacgttatctacgttccagcccgctaataaacttaataagaatgttccaacaaatgtacgttcttctttcccagtttctctacccttagcttatcctcaccctcattttgccctgctggctgctcaaactatgcaacagattcggcatcctcgcttacccatggcccagtttggaggaaccttctcaccttctcctaacacatggggaccattcccagtgagacctgtgaatcctggcaacacaaatagctctccaaagcataataacacaagccgtctacctaaccagaacgggactgttttaccctcagagtctgctggactagctactgccagttgtcctatcactgtctcttctgtagttgctgccagtcagcaactgtgtgtcactaatacccggactccttcatcagtcagaaagcagttgtttgcctgtgtgcctaagacaagtcctccagcaacagtgatttcttctgtgacaagcacttgtagttccctgccttctgtctcctctgcacctatcactagcgggcaagctcccaccacatttctacctgcaagtacttctcaagcacagctttcttcacaaaagatggagtctttctctgctgtgccacccaccaaagagaaagtgtccacacaggaccagcccatggcaaacctatgtaccccatcttcaactgcaaacagttgcagtagctctgccagcaacaccccgggagctccagaaactcacccatccagtagtcccactcctacttccagtaacacacaagaggaggcacagccatccagtgtgtctgatttaagtcctatgtcaatgccttttgcatctaactcagaacctgctccattgactttgacatcacccagaatggttgctgctgataatcaggacaccagtaatttacctcagttagctgtaccagcacctcgagtttctcatcgaatgcagcccagaggttctttttactccatggtaccaaatgcaactattcaccaggatccccagtctatttttgttacgaatccagttactttaacaccacctcaaggcccaccagctgcagtgcagctttcttcagctgtgaacattatgaatggttctcagatgcacataaacccagcaaataagtctttgccacctacatttggcccagccacacttttcaatcacttcagcagtctttttgatagtagtcaggtgccagctaaccagggctggggagatggtccactgtcctcacgagttgctacagatgcctctttcactgttcagtcagcgttcctgggtaactcagtgcttggacacttggaaaacatgcaccctgataactcaaaggcacctggcttcagaccaccttcccagcgagtttctactagtccagttgccacttctgccccaccaacgttgggccaaccaaaaggagtcagtgccagtcaagatcgaaagatacctcccccaattggaacagagagactggcccgaattcggcaaggagggtctgttgcacaagccccggcggggaccagttttgtcgctcccgttggacacagtggaatctggtcatttggtgtcaatgctgtgtcag

SEQ ID NO: 150426 - DNA, 394 bp, Homo sapiens
agcagtctttttgatagtagtcaggtgccagcttttcagcgagtttctactagtccagttgggttaccatccattgacccatcaggcagctccccatcttcctcttctgctcctctggcaagtttttccggcataccaggaacaagggttttcctgcaagggccagctcctgttgggactcctagtttcaacagacaacatttttctccccatccttggacaagcgcctcaaactcatccacttctgccccaccaacgttgggccaaccaaaaggagtcagtgccagtcaagatcgaaagatacctcccccaattggaacagagagactggcccgaattcggcaaggagggtctgttgcacaagccccggcggggaccagttttgtcgctcccg

SEQ ID NO: 150427 - DNA, 5487 bp, Homo sapiens
gcagttgtttgcctgtgtgcctaagacaagtcctccagcaacagtgatttcttctgtgacaagcacttgtagttccctgccttctgtctcctctgcacctatcactagcgggcaagctcccaccacatttctacctgcaagtacttctcaagcacagctttcttcacaaaagatggagtctttctctgctgtgccacccaccaaagagaaagtgtccacacaggaccagcccatggcaaacctatgtaccccatcttcaactgcaaacagttgcagtagctctgccagcaacaccccgggagctccagaaactcacccatccagtagtcccactcctacttccagtaacacacaagaggaggcacagccatccagtgtgtctgatttaagtcctatgtcaatgccttttgcatctaactcagaacctgctccattgactttgacatcacccagaatggttgctgctgataatcaggacaccagtaatttacctcagttagctgtaccagcacctcgagtttctcatcgaatgcagcccagaggttctttttactccatggtaccaaatgcaactattcaccaggatccccagtctatttttgttacgaatccagttactttaacaccacctcaaggcccaccagctgcagtgcagctttcttcagctgtgaacattatgaatggttctcagatgcacataaacccagcaaataagtctttgccacctacatttggcccagccacacttttcaatcacttcagcagtctttttgatagtagtcaggtgccagctaaccagggctggggagatggtccactgtcctcacgagttgctacagatgcctctttcactgttcagtcagcgttcctgggtaactcagtgcttggacacttggaaaacatgcaccctgataactcaaaggcacctggcttcagaccaccttcccagcgaggtttctactagtccagttgggttaccatccattgacccatcagggcagctccccatcttcctcttctgctcctctgggcaagtttttccggcatacccgggaaccaggggtttttcctgcaagggcccagctcctgttgggggactccttagtttcaacagacaacatttttcttcccccatccttgggacaagcgcctcaaactcatgtgactctcctattccatctgtttcttcgggatcatcttcacctctttcagccacttcttgccccaccaacgttggggccaaccaaaagggagtcagtgccagtcaaggattcggaaaggttaccttcccccaattggaacagagagactggcccgaattctgcaaggagggtctgttgcacaagccccggcggggtaccagttttgtcgctcccgttggacacagtgggaatctggtcatttggtgtcaatgctgtgtcaggaaggcttattcaggttggtcgcaatctgtgatgggggaaccatccaatggcattcaacaatttttcaggacccaaggcacatttttcccaacatcagccaatggagagagatgattctggaatggtagccccctctaacatttttcatcagcctatggcaagtggttttgtggatttttctaaaggtctgccaatttccatgtatggaggcaccataataccctctcatcctcagcttgctgatgttccaggaggccctctgtttaatggacttcacaatccagatcctgcttggaaccctatgataaaagttatccaaaattcaactgaatgcactgatgcccagcaggtaaaatgggcttaatgctcttttgttttttagatttgtcacatcattctttttgttttgtgagaagtataagtactgaatatcaaaagtcataattgaccatttcgatctggattgctttttcaatatcaagatgatgctactgaacactttatttaatatatgtgtattcttcctaggcagaaacagtgaattgccattgcatttatatattcattttgtaactgtctaaagattcctaattagaaattccaatttttcctcccccttttcagatttggcctggcacgtgggcacctcatattggaaacatgcatctcaaatatgtcaactaagttagaaggtctttactctttagccttgtttaagaaacctatgaccttggaagaaccatggggatttttttttaatgtgcctaagaaattttctctgaggctttagcaatggaaatttgattgcccattgtataagaacaaattgatttcctatccacctgattatgttctctggttagtttagccattttgaacttaagatcatatgaccttagtgcttttggctaaacatacagaatactacttgtatgcagaagagaattagttgattacatgtttcaaccttttagggtgataaatacatgtataattgtttacatacttaaaaggaaaaagttgagtaaatttcttgtcatatagtggctctacgtaatgtagcctgtattaatgtgaaatatttaccagaatattcaataaaaagatgaacagtctttagaagtggggtgtgatcctttcagtggtcatgcaggtaccactcaatccacattatattgaaccagatggttaatactatatttgtaacaggcttctcacatttaacacttgagtcccttcttagactgccttaaaaaagcacttttaagactatttacctatttattctgtgttaaacattccttgttcccttgttgtcttccataatcctttaacatatgagaaagtttcaagctctggcaatgtgtcttatctgactttagctagcagataggccactgataggttttttctctatggatcatgagaatgtcaataagaacaattggatttaaatcagatgacactaaacaaatgtagggacacccaaattatcaacttcaggttccttctgtgcttcctgaccttttttatctgaaagatttgtctggttatagatattttaagctttatatgagttgggacataaggaggtgactcctgtcattctgttgtattattgaatcagctgagtaatatttataaatatgtgagtaattccaggcttagttccatggccctaagcatggagagtcaatatgtttaacaagctaaacagaggaaccctggaatgggctgctttggccaaaccataggctatgccgagaatcagcatagagaaggaaaagttatcccactgaaaagtatagtcatcaacttatttgtgttttaatatagctgaatttttcctggtcagtataggcaatacagaaaagaaaacaagaaaatgtttggagctgatggagaagccaaaactcatatgaaggcaaagaaggatgcacagagaaagagtagtaactagggacagaactatattagcagcacctttctacacttatgccaacaggaattcttaattttctctgcccaggtcctaaagccaggaccacatcagacacaccatgtttgttctgtgtcagatatacctgcttctttaatcttctatatcatcttacatatgagaaagcttccttaattaagcttatgtcttatgttttgttttgaatggattttgaaagtgttgtttattgaagctactactttgtagtgattgataaccacatcaagtatcattaaggggccccttgacctttgtgggggcagttgggtggggcacaaaagactccttggatcacctgtgtatcttgctgtttccacttaccattaacagcaacaagaaaaatcacctaaaattggtgaaatgaatgaaactactcttgatgaaatatatactagtgagaaataatattaaataaattattcagtgggacaaaaaggtgagttttattctatcttaactgtctacaatacatttgaattgtctggaggagccttaagtccatattctgcaccttgaggacaaccaaatgagaaattttatttcaggtcagtaagtagaatttatgaagagaaaggagataattatgaggaatccctaggaaaattgggaggaaaacaacagttgtatagttgggagtagttctttaggatacgctcctcccttccttcttaccagcacttccttcctttctttctgactatttggatcccagtagcctgctcccaacctcatttcacctgctaaatctcttcttcctctgcctgcctcttcctggcactactttactgctattttaccaacctgaacatttggataaaacctagctcaggtaagaacttaattactttcaaaatatacaagggatatgggaggagacagcatggatacagtggagcagtagtcagtagtcagagcctaaattctattttcatttctgccgcttgaagctttatggccttaggcaaatcatctcacctttctgggtttcacttttctcatctgaaattgaactcaagagtcttctagttctaacacaggatttcttcttgtgaatgagaatataagatatggaaatatttgaagccattagattgtttacagtgctgagatttgagagcccctagcattggttctgataaggaatcgaaataaatcctgccattattatgggggccagtattgagattttagtggaggcagaagaagaccttgcacatctttagtgagccttcaagttgtgaagaaacatcctgctaaggtatagatcaaacccagtgaaatgaaactataggaatgaaactacatcatcaaggtttctggacccacttatttcaacttgtgttcaatgtaataaaattccgctaccaataaaattattaatgttttaagaccctttaaacctattgtggctacagtgtgctgacttgcccttttataggccagtctgcttccttcagtccctgctctcaaaggggaaatcccatcacctcagctaaccagaccgaagaagagaattggacggccgatggtggcctctcctaaccagaggcaccaggatcatctacgaccgaaagttcctgctggagtgcaagaactcacccattgcccggacacccccctgctgcctccctcagattcccggggtcacaactcctccaacagcccctctctccaagctggaggagctgaaggagcaggagacagaggaagagatacccgatgacgcacaatttgaaatggacatctaatccagtgcagatgacctggcatgtggagttacagagggatccctcatgccactgctgccaccacctcttcctggggcatccaaaggccagctggcctcatctaatctggaagggagtgacttgttagttccaggcctcctttagttctgaggcagctagaccagggataggagtgggcaacttgccaagcccttaactctacttcctcttcagtctgtggtactcctcctaaccctaaaccctctatgctcaggggctggaactggggaatggagtaagtcaccttctgactgcttagtaaacattcaaagaaatg

SEQ ID NO: 150428 - DNA, 360 bp, Homo sapiens
  misc_feature (1)...(360): n = a,t,c or g
ggcacgagaagacagctgaacctttgaaattcccaaagaagagaggtcccaaacctggcagcaaggtaggtaaaatgtgggtttcccagaaagggataagggattataaaggggtcattcggcnnnnnnnnnnnnnnnnnnnnnnnnnttcaactaacatttttaaagaaactaccacttgctgagtttcagagtgagctttttaatttttttaacttttaatttaaaaaattatttttaattgtaggtatgtaattgttannnnnnnnnnnnnnnnnnnnnnnnnnnnnnnnnnnnnnnnnnnnnnnnnnnnnnnnnnnnnnnnnnnnnnnnnnnnnnnnnnnnnnnnnnnnnnnnnnn

SEQ ID NO: 150429 - DNA, 4288 bp, Homo sapiens
tataaaaaaaacccaaatttttttttttttttttttagcagggggcccaataccagtcccaaaaacccctgccccctggggttaaaaaatcctccccccccaacccccccaaaaagggggggttaaaaattattaccccccggccccgtttttttttttttttttttgagacagagtcttgctctgctgcccaggctggagtgcagtggtgtgatcttggctcaatgcagcctctgtctcctgggttcaagcaattctcctacctcagcctcctgagtagctgggactataggtgcccgccaccatgcctggctaattttttctatttttaatagagacggggtttcaccaggttggtcaggctggtctcgaactcctgacctcaggttttaaaaagtgggttacttgatccagaaaatccaaaagctttggaaattccaggaaagcaactactcttttggcagtggactcttccagggttgttaatcccactctgacacaatatggatggactagggaggcttcctgattatccaaatggaataccaagcatgccatcatctctccaaagcaagcccaaagggggctttaacttcccaaagtgctactgtaatcaccaattcccctgggcctcccagtgctaaataataagccaaagccaaaaaataaagtgtcattcagtgcagttgtcactttgcagccctgcaaccccgaggcacttcttccatgaggaagaacactttgtgacccttctttggcagctcaagcaaagacacaagaatgcatctgagagctgacaggtactagtcgagagttctatgagtcccctatttctatctgtggtagtaatgcattctttcctccactgcttccttgaattttagtgttaaaaattaggagaatctgctgcctaggctctgtccccttgaagttgatggagtcaaaagtgactctctttggtctgggaacaaccagcacagtcctcctgaagcgcttgctcagtcaatgagctactctttgcagaggatcagggaactaaggtatgcctggggaaaccccacccaaatgagccatgccagacagcccttgccatcagctctctaggcacagggtcagccattccagggccccaggctccaccatttctcctgactgctctgcaggaaggcctctcactcatttctgaaacaaaatgagagaccagacttcaagctctggccattaaaaatggccaggtcatcattttcatgttggggtaagctgccctaattatgttgattagaaggacagaccacaataagggtcattctttcatgccatcctttttcttcctccagccacaatctcacctcaccacttgggaacacatacaaccaaagctgggaggtaaaatctttaggactttggtcatgctgagccctctataacccaagtgctgccagacttctttgaaaacctagtgtcctcccaagtaatatacaatacagtacatttcatggcattccatcacttataataagaatggatgccaaagaacaaagccaaaattagctgacaatgttataaaacaaaagcaaagtatacacactctatacacacgtatacctgcactcagcctgctgagtatttaaataacatccccaaatatccatatgtggactttggctggcctagagactttcaagaatattttgcaccttttctcaaagtacttttttttaaagaaaatgaactgtaacacaactactcatctccttacttatatcagtccctcccttccaccctccccactggggaaaaaactgttggggaatctgctagagaactggtatctgacagcaaactaagccgtggggtaaactaaaaagggactctgggtagaggaaaaaaatctaacctcccatatgtgaatgagagtatgagctaatacttcccaagaatgctaggaatgtgaccttcataatggaagcacagacttatgattatagttagagtcaaaagaaaacagtctggaaagggaactatataagacttttcctaaaatttcatacacaacagacttacaatgattttccagcaagtagagagtacttacccctcctttcttgacacctgactcccttgaagccccatcatagttcccagaaggacagtaagttagtgcagagaatagagtacttgaagtatagctaaataggtggtaaaaattctgagaatatactgaacatcctaccaaaacaaggctaaagcctgcagagcccaaagacactgagtcagttactttatcatttgcaagtaaaaaggttattagcactacatggaatttctgaaaggctccaagagtttagggagctactatgctcaaacatatcatgatcagagcccaggatagccaaagagttaaaagttatatgaaagacccattatagactccatttatactccattaatatttaaaagatggtcattctgtcatagacaaccctagaaaatcccagcagcagatgtgcgactcatctttgttttttgttttttttttttgttttttttttttgatagagtctcgctctgttgcccaggctggagtgcagtggcgtgatctcggctcaccatgacctctgcctctcgggttcaagtgattctcctgcctcagcctcccaagtagctgggattactggtgcgtgccagcatgcccggctaatttgcaactcatcttatacacctacctggggacctgttttacaaactctggggctgaacacaggggccagaccacagttattggggattaggcagatggagggagactactcacttccactgtctacttcctcgtctacctgtttttcggaatctaatggaccagtttggttgaggaaggcttgaagtcaagtgcatctgagatgcaccaatatttaaattgttccccttcctctgcctagaatcagaatttctttcctcaagcacacttcatgaggaaccctccaaaagaccacccacccgcctcccacctttcagggaaacttcacagacactagcacacaggggtgaggggcacacacagaactaccagaggagggtttttctctttcgtctgctgctttttttcttctaacagatttttaaaaaggtaaaaagaaggaacaaattgcgggagaaatcgtggttaaaagctcattgatcaagttttccaaacgtcagtgtgttagattcaaacacaaaaagaaaaatttctgattgtgttaagttttaaaaacaagctggttttcttccagtatgtttgtacataggccatggcctccaatcatctcccacctctcagttctcacccaaatacttcgcattgggttggttttgcttagacactcactcctaagtaccatgttatctggagctttcccactttgagatgaaaagaggtaaacaaaagaaaagactcaaaggtaaaagaacagattctgttctggggttagcagtaactctaaatccaataactcctgtgtgtatgtctatatagatagagatatagacacacacacatatatacatatacacacaaatatatgcatacacattctatttttttttttttttgagacggagtctcacgctctgtcacccaggctggagtgcaatggcgtgatctcggctcactgcaacctccaccctcctgggttcaagtgattctcctgcctcagccgctcgagtagctgggactaacaggcacatgccaccatgcccagctaattttttttttttttgtatttttagtagagacagggtttcaccatgctgcccaggctgggtctcaaactcctgacctcaggtgatccacccccctcggcttcccaaagtgctaggattacaggcgtgagccatcgtacctggcatttttctattacattaaatcagataaaacagtaccaacacttctgaccgacatgagaaacgcaagtgaatatgactgtgatttcagcacaaataaaatagacaaagaggagacttttagttgaaatgcaagtctgaatttgtgtttattgtctacctgaccatatgaaatggtaacacattttaaaggttactaaattcttcctctttttttttttttttttttgagacagagtctcagtctgtcacccaggctggagtgcagtggcataatctcggctcactgcaacctctgcctcctgggttcaagcaattctcctgcctcagcctcccaagtagctgggactacaggtaccagctaccacgcctggctatttcttgtatttttagtagagacggg

SEQ ID NO: 150430 - DNA, 534 bp, Homo sapiens; identical to SEQ ID NO: 144862

SEQ ID NO: 150431 - DNA, 656 bp, Homo sapiens
  misc_feature (1)...(656): n = a,t,c or g
atcgagaccatattccatgtggnggaattccacagactcagagagaacccaccatggtgctcgtctcctgccgacaagaccaacgtcaaggccgcctggggtaaggtcggcgcgcacgctggcgagtatggtgcggaggccctggagaggatgttcctgtccttccccaccaccaagacctacttcccgcacttcgacctgagccacggtttctgcccaggtttaagggccacgggcaagaaggtggccgacgcgctgaccaacgccgtggcgcacgtgggacgacatgcccaacgtcgctgtccgccctgagcgacctgcacgcgcacaagctttcgggtgggacccggtcaattttcaaagctcctaaagccaattgccttgcttgggtgaaccttgggccgcccacctccccggccgagtttcaacccctggcggttgcaacgtcttccctggggacaaagtttcctgggctttctgttgaagcaccgttgctgaccttccaaataacctttaaaggttggaagcctcgggtgggccatgctttctttgccctttgggcttccccccagcccctcctcccctttcctgcacccgtacccccgtggtctttgaaataaagtcttgagtgggcggcaaaaaaaaaaaaaaaaaaa

SEQ ID NO: 150432 - DNA, 474 bp, Homo sapiens; identical to SEQ ID NO: 149763

SEQ ID NO: 150433 - DNA, 4038 bp, Homo sapiens; identical to SEQ ID NO: 145716

SEQ ID NO: 150434 - DNA, 1883 bp, Homo sapiens
ttttcatgacttttaatgctttattgggattgcaagcgttacaaggttaaagacaaaacccaagcatgggattttgccggaaatattagcgttaaaggagctgagttgagtcaaacacgggccgcaagtggaccgaggcggcaggcacaggtgacattcagtgtttggcgtgggggtcttcaggtgatggcagaggaggggacccaagaggccgagtccctgccgcagccctaggcgccgcggtggtggctgctatggcatcaccagacccgtgggctccggggcccaagcaacctggtcgatgggcagacctggcagctctcctgctctgtgggctcagacccgcctgacctccctactccccggcctcaccccaccttgcccccaagaggtcccacagagcttcggacctcctggagacaaggcagggtgctgaggggcgggcaaaatgtcacctagggagaggggagggttcctcaagtgtgcggaaggcggccaccctgccccagcctgatggaaccctttgtttacacacctgctagccccttcccctccggccagcctcaggggacaccggggaggagacaagatggagagccacgactaggcaccggaggtcagacaggcagcccgggcccaggattggttagtgggcccagggggagagctgcaaaacctggggggacgcaagggggcttggtccggcaagtgccccccggggaacaccccactcccggcgaggccagaatataacacttgggttgggtgggttgtccttgacgaatggggcagggtaattttggggttgcctcgaagccgtttttggatcttcaggcccaatgttgggttccacaaattgtgacaatttgggctcttttgggctttctgtccaatgtttccgaaatggcccacttcaacagggcgcttgccgaagggaccctctgcgaactgaggcggactggcatggaacgacccccgggggtcatgcccagctccgtcaccaggacccagaagcctcagggcctctagacttgctagtccgggctgcgttgcaagggggctgagccttggggcacaaagtggggggcgagttaaacctcccaaraggccgagtccctgccccaacccctaggcccccccggtggtggctgctatggcatcacccagaacccgttggcttcggggcccaagcaaacctggtcgatgggcagacctggcagctttcctgctctgtgggctcagaaccgcctgaccttcctaactccccggccttaccccaccttgcccccaagaggtcccacagagcttcggacctcctggacacaagccagggtgctgagcgtcgggcaagattgtcaccgagggagaggggagggttcctcaaagtgtgcggaaggcggccaccctgccccagcatgatggaaccctcttgtttacacacctgctagcccctttcccttccggccagcctcaggcaagccaaggagcccccttcctgtggcctccgagcaccctcctgacacctgaggagaccttgcttaacaccccccttccgccctcaaggacttctggggaccagccactgtccccaaaagccagcgccggacagtggccttctccactcccctttgaattctccaagggggttcagtggccagtgcaaccccaggaggctccaccctcaactcaacccaagcaacagggacagatgaaaaacaaaatccaatcagggcgataaatggcggggggcaggacgtggtggtctccaggctggcttcgtgcgttcttgcttttgtcactgcccccctgttacatggggggggggtttaatttggtttctgagcgcataaagctaaggaggggtaaaaaaaaaaccaaaaaaa

SEQ ID NO: 150435 - DNA, 456 bp, Homo sapiens
ggttagcatttcatttggagctgagaaaaatgttgtgagaagggtacatgacatttacactgttaggacaaatgctcagattctggaatcaatgtagtcttaaacagaagtgttactttgtggttatttttcctctgtagtgaaatatggttttgagtttgatttttcatatccaggaattgccacaagcagtctgtgagatccttgggcttcaaggcagtgaagttacaacaccagattcagacgttggtgaagacgaaaatgttgtcatgactccttgtcctacatctgcatttcaaagtaatgccttgcctacactctctgccagtggagccagaaatgacagcccaacacagataccagtgtcctcagatgtctgcagattaacacctgcatgatcactggtcttgcttttttgggaagagacactttggtgcaaccctttttcaagtactt

SEQ ID NO: 150436 - DNA, 1654 bp, Homo sapiens
gtggtggaattctgatatttatagggggacttactcatgcattgagaaagcaagcatggaaatttcttctgggttattttcctctgttactgtaccaaggaggaaagaacccagttacaaaagcaaaaaactgatgaatacttcagaatgaaactgcagtggaaatccatcagccaggaacaagagaaaagaaattcgaggttaagagattatagaagtcttatcgaaaaagatgttaacagaacagatcgaacaaacaagttttatgaaggccaagataatccagggttgattttacttcatgacattttgatgacctactgtatgtatgattttgatttaggatatgttcagggaatgagtgatttacttttccccttttttatatgtgatggaaaatgaagtggatgccttttggtgctttgcctcttacatggaccaaatgcatcagaattttgaagaacaaatgcaaggcatgaagacccagctaattcagctgagtaccttacttcgattgttagacagtggattttgcagttacttagaatctcaggactctggatacctttatttttgcttcagatggcttttaatcagattcaaaagggaatttagttttctagatattcttcgattatgggaggtaatgtggaccgaactaccatgtacaaatttccatcttcttctctgttgtgctattctggaatcagaaaagcagcaaataatggaaaagcattatggcttcaatgaaatacttaagcatatcaatgaattagtccatgaaaattgatgtggaagatatactctgcaaggcagaagcaatttctctacagatggtaaaatgcaaggaattgccacaagcagtctgtgagatccttgggcttcaaggcagtgacggttacaacaccagattcagacgttgggtgaaggacgaaaatgttggtcaatgacttccttggtcctacagtctgcatttcaaaggtaactgccttgcctacactctctgccagtggagccagaaatgacagcccaacacagataccagtgtcctcaagatgtctgcaagattaacacctgcaatgatcaactgttcttgcttttttggggaagaagacactttgttgcaaccctttttcaagtacttgaaagtttgaaaatttgaaaatcttgggtattggatcatgctttaaaggtttatgtaaagaaagtgtactgatggtccttacattaaaagctttacaaagatttaaactaattatttttgtagttacttctaccaaatagcctttccttttcgataacattcctcagtatttttatagcccaagtacattttattttcttgcctgatgaactggaattggataaatattgcaagtggatgagttggaaattatgcactttgaaaaacattcactttgtttaagcttattgggtttcagatttgattaaattaaatgtggaggctttctatagcattctaagctgagaagtagattgttacccagtaatgaaataaaaaataaaaataaaaggatttttttctctattgtttacgacagtactcagcttaaatatttatgctggtcaaatgtgatttaaattggacattttcatcaatgcagtctaatgtgtagataaatatttcaaccat

SEQ ID NO: 150437 - DNA, 696 bp, Homo sapiens; identical to SEQ ID NO: 130621

SEQ ID NO: 150438 - DNA, 1377 bp, Homo sapiens
  misc_feature (1)...(1377): n = a,t,c or g
tgggaccctccgggccggacggtttggtctattatttcccgggcgccggcgcggcaaaaggggggaagaggggaggcacttgagaaatgtctttcctccaggacccagagtttcttcaccatggggatgtggtccattggtgtaggagccctgggggctgctgccttggcattgctgcttgccaacacagacgtgtttctgtccaagccccagaaagcggccctgggagtacctgggaggatatagacctgaaaacactggagaaggaaccaaggactttcaaagcaaaggagctatggggaaaaaaatggagctgttgattattggccgtgcggaggccagggcttgttttcctcttgttcgagagggaagctgcggatcttgtcctccctgaaaagcatgtttggaccagctgggcgtccccctctatgcagtgggaaaaggagcacatcaggactgaagttgaaggatttccagccttatttcaaaggagaaatcttcctggatgaaaagaaaaagttctatggtccacaaaggcgggaggatgatgtttatgggatttatccgtctgggaagtgtggtacaacttcttcccgagcctggaaccggaggcttctctgggaaacctggaaggaagaaaggcttcatccttgggggagttttcgtggtgggatcaggaaagcagggcattcttctttgagcaccgagaaaaagaatttggagacaaagtaaacctactttctgttctggaagctgctaagatgatcaaaccacagacttttggcctcagagaaaaaaatgattgttttgaactgcccagctcagggataaccagggacattcacctgtgttcatgggatgtattgtttccactcgtgtccctaaggagtgagaaacccatttatactctactctcagtatggattattaatgtattttaatattctgtttaggcccaactaagggnaaaattagccccaaaaacaaagacttgaccaaaaaatctgaaaaactaaatgaggattattaagctaaaaccctgggaaattaggaggccttaaaattgaacttccaggctgggttcggtggctcacacctgtaatcccagcactttgggaggccaaggtgagcaagtcacttgaggtcgggagttcgagaccagcctgagcaacatggcgaaaccccgactctaactaaaaatacaaaaatcacccgggtgtggtggcaggcacctgtagtcccagctacccgggaggctgaggcaggagaatcacttgaacctgggaggtggaggttgcggtgagctgagatcacaccactgtattccagcctgggtgactgagactctaactaaaaaaaaaaaaaaaaaaagacgac

SEQ ID NO: 150439 - DNA, 463 bp, Homo sapiens; identical to SEQ ID NO: 130872

SEQ ID NO: 150440 - DNA, 795 bp, Homo sapiens; identical to SEQ ID NO: 144725
  misc_feature (1)...(795): n = a,t,c or g

SEQ ID NO: 150441 - DNA, 966 bp, Homo sapiens; identical to SEQ ID NO: 144726

SEQ ID NO: 150442 - DNA, 685 bp, Homo sapiens; identical to SEQ ID NO: 144727
  misc_feature (1)...(685): n = a,t,c or g

SEQ ID NO: 150443 - DNA, 533 bp, Homo sapiens; identical to SEQ ID NO: 144751

SEQ ID NO: 150444 - DNA, 420 bp, Homo sapiens; identical to SEQ ID NO: 144752
  misc_feature (1)...(420): n = a,t,c or g

SEQ ID NO: 150445 - DNA, 323 bp, Homo sapiens; identical to SEQ ID NO: 144753

SEQ ID NO: 150446 - DNA, 470 bp, Homo sapiens; identical to SEQ ID NO: 144754

SEQ ID NO: 150447 - DNA, 730 bp, Homo sapiens; identical to SEQ ID NO: 144755

SEQ ID NO: 150448 - DNA, 962 bp, Homo sapiens; identical to SEQ ID NO: 144756

SEQ ID NO: 150449 - DNA, 295 bp, Homo sapiens
  misc_feature (1)...(295): n = a,t,c or g
tggtggcccaacaccccgggagacagtgtctntnaagaactaggccctgggaggagcggggacgctgaggacctctctccaaattggcctctcaactcacaggaagacacagctgcccagagcagcccaggccgtggtgaggaggcggaggcatcggcggcggaggctcagggtggggagcaggcctacctggcaggcctggcagggcagtaccacttggagcggtacccggacagttacgagtccatgtccgagccgcccattgctcatcttttgcgccccgtgctttcccggg

SEQ ID NO: 150450 - DNA, 1916 bp, Homo sapiens
  misc_feature (1)...(1916): n = a,t,c or g
tttttttttttttttttccgagaacaccttatattgtgtcacgtcccccgcagagcagcgtcagacgtcctggtagtagttgttgaagttgatgcgcagcagaaagtcctccaggtggggctggtagccgcggttcaccagcttggtcaccactttgaagagaaagtgggagtagtacttgaaggtgttgtaggactgctgcatgagtgcaaagttgggggtgctctgcccccccccgggcccccaggggggcccccagggcctgggcagatgagctggctgcggaacttgagcacgaggctgaagatgctgtggatgacgttcaatgaacggcgccgccttctccgtgagcaggcccctgggggggaaaggcagtgctgcttggggtggggcttagccttgaccacagggacccaggtcgcccacggtggccaacctggccctgaactcgcaccaggtgacgtgcaggatctggttggcgatgtagccctggatgaccttcacgaaatgctgcatctcgtgcttgaacagctgcagctgacggaactgcacagagccggccatgtggctcagcagggctgtgcgcttgaggtggaagcagacgtccttgagcgcccacatcatgagcttcagctgcagcaggaaggagaagacgccgctgtaacttgcttcaggcagccctcggtgatgacaatgttgaagaggccagtcccaccttgtacctgaagctcccaggccagctcagcacatccggggcgttgggggcaaacacctcgggcaggtacttgagagcgagggagaggttggaggcgtgcggggtgtccccatgcaggctgcactgcagggccttgctcagcacagagttcagcaccagcgggttgagcagctctccgggcgtttgcccagctccaagctaggcagaaaagggaccaccgtccccaggagtcccaagcacatgcctggcgaactcgccgtcctccatcagcaggaagtgccgcagtgcctcatagtgcgcctccaggtgcagctccacgaagaagtagtcgacagcggccttgttcaccaaggagatgctggcaggagggagctggagtcagggcgggccaggacgggctgggtgggtcagcaactcgctcagctgcacagcagtctcatcagcggcagactggacctgggggtccacggggaaggcgaaggcccggggaagcacggggcgcaaaagatgagcaatgggcggctcggctgcgggagatggagcacgcacgtgctgggaaccggccagcccagggctccgcccccatccacaggagatggagcacgtgctgggaactggctagcccagggctccgccccaacccacaggaggtggagcacgtgctgggaaccagccagcccagggctccctgccagcagcaactgctgcactcacacatggactcgtaactgtccgggtaccgctccaagtggtactgccctgccaggcctgccaggtaggcctgctccccaccctgagcctccgccgccgatgcctccgcctcctcaccacggcctgggctgctctgggcagctgtgtcttcctgtgagttgagaggccaatttggagagaggtcctcagcgtccccgctcctcccagggcctgtgtggacacaagtggacacgagggcatcagggccgagtgcctgtggcgggtacggagccgagccggccctggctcaagcagcccctcccatgtcccccacagcagcccaggtcctggctgacgaggaggcctgaggggaacttcacatgccacccaccccactgcccgcctacctcccaggctctgagcgtcccacagtcccactcctgaccaccagccaccctactccgacntagttcttcagaggaattgctccacaatggctantggtctcaat

SEQ ID NO: 150451 - DNA, 476 bp, Homo sapiens; identical to SEQ ID NO: 119066
  misc_feature (1)...(476): n = a,t,c or g

SEQ ID NO: 150452 - DNA, 452 bp, Homo sapiens; identical to SEQ ID NO: 144799
  misc_feature (1)...(452): n = a,t,c or g

SEQ ID NO: 150453 - DNA, 752 bp, Homo sapiens; identical to SEQ ID NO: 144800
  misc_feature (1)...(752): n = a,t,c or g

SEQ ID NO: 150454 - DNA, 2877 bp, Homo sapiens
  misc_feature (1)...(2877): n = a,t,c or g
cccctccaaactgactcttaaggcccatccagatccacatatcctgattttgaactatgtgaaagtgggactgttaagtgcaagactaaaataaattatagcagactttttagtaataactttccattttcaaacagtatatcctgtgggccaaagggctatttcttaaagaggcatgtaaatgtatttatttatctaatgtttttttccccatgtaaacttgatatacaaggtttagtatttgctcctctttcatattattttcacacgtatactcagatttggcatgtacctttcaacatctccataaaattaaacaccttttggagaaaagatccactattttctgctcaaaggtttcgcctacctaaagtggaacatgttaaaaatctatgttgaccatcactggacagctttctctcaaaacttcccttcaacgccatggattagcaccagttttgtttactttaaggtacttttcccattcatcatcctggttataataaatggatggaagaatatttcccactgatggttggtctgttgcttgccaaatttttagggagagctgttcatcatacaacataagggataatgactcctgtcaggtaaaacagaagcccaagaaataacaactttttttcttaaaaagttagttacacttgttttcttggagaaaaaaacctgtcaactcctttgcttttccaaaatatttcagggtatttcctataaggttcataagaataagagcttaacacagaaatagttgctgttcataagtttattatctatatctgaaaaaatcatagaaaattgctgggtttagctctcagcagcccgctcctgagctctgaggaagcttgccttcttttgagctacccgatccttcttctgagcaagggacattttgggacggttccacctacaaaagataggaatatatattttttaaactataactgaagagaatagaatatttaatttaaaattttaataaaatttaattttgatagagaatatttaagactttgcaatcagaaggttaaataatccaagttcaaatacatttacttatgtatgatcttaagctaactttcccaaaccccaacttctgtgatgtcctactaccatagggccaaaagtcaaatagaagacatgttagattcagtaataccacttctaggtatttgcccaaatgttttgaaatcagtttgtccaagagagtggcactcccatgttcattgcagcactatatattaatagcaacagataaatggataaaggaaatgtggtatacatatacataatggattattacccagtctttaaaaatgatggaaattctgtcatttgcaacatgaatgaattggagaatattgtgctcagtgnaaataagccaggcacaaaaagacaaatacttcatattcatatagaatctaaaacaatggaactcacagaagcagagagcagaatggtggttacagaggctggtgggtgcaaagaatgggcagatgatagtcaagtataaaatctccaacaggaggagtagggaggagtatgattttgtttttagttctattgcgcagcatgatgaatatagaatatcgtacatttcacaattaagagaataaatttcaaatgttgttgccacaaagtgttaagtatttgaggtgatatgttaaatacattgatttaattactatacattgtatttgtgggccatcacatcactttatgcttacatgttcattaattattactttctattccatttaaagattcaaaacatgaaaattcaacaaaaagcaacttgtcagccaataaaaaaatgcagtaaccagtacttagactgtactaagatagaaagaaccncctccgttatgtctgaggtaacacattccatccccacagttacttttgcaaacctggttcccttcgcttctgccacatcacgcagagctagtgatcgagtttgcacaattacaccaacagtctgccccacgtgggaaccattcccaaccgttttcttgaaaagacaaaaaaaaagacgacatacctcttctttttaacttcttttcttgggcttcttttcatagacctggattctctcggtatagcagcatgagcttttctaataccatctcctccatcatgtctggagttacgctgttctttacgtattgacgcacgaactgtttcttgtaaggcatcttcatcttcttccattaaggtaggcgcatgtaatcctgcaacaattctgggcccatggatgtggcttccgatggtactttctgcattaaaattcctttgcttttcagaaatcataaaccagggggaatcggtttgggtactgtggagggaataggacaagccctccatccacaggctccccttcagggcaaccaaaaaactttaatggccagtgggtaggttctgggcaagggcctggcatcccaataggcagggtgaaggcaccctggctgaccatcaatgctttccacattgtattcatcaccagtcaactccaacttggcctttcatagatcttgttcatgccaaacctatggaagaagcctgcgggcccagccagcaggccagtacaatatggctgcagcataatttgtcaggccaacccttcacacccatatttttggcagttcgggtgcatacggntgcgcagactatcatataccccctctatacggggcataagcaatctgacaaatgaatatctctgtttgtcacacgaactatcacctggaatttgggggtggtggaattaatttaatctggtatcaccaagcgtttccgagcagattaatcgggtttaccctctggtcggcttccaaatttcccttggaatcccctaaagagagc

SEQ ID NO: 150455 - DNA, 446 bp, Homo sapiens
  misc_feature (1)...(446): n = a,t,c or g
gaaacaaaggacaaaggaaacaatagatgctctgcagaagctgatacaagtcaaaggatttcgtttcctgctgcttttcaaagcaatggcaggataagcggaatctttcaaatagaatgccgtgtgttggtaatttaacagtaatatactgaaaacgtagtgtataactccaggaaccaaataatggtacagtggtaaaatggaatagtgcccgctgaaataaatattatttcataagggtttgtggtttcgctggatagtaggtagggacagtgggaatctcgttcatccattcatgcgcgtcactaattagannnnnnnnnnnnnnnnnnnnnnnnnnnnnnnnnnnnnnntcccgccgtttacccgcgcttcattgaatatcttcacaaagacattcagagcactgggcagaaatcaccggacgcgtgggtcgcggggggact

SEQ ID NO: 150456 - DNA, 370 bp, Homo sapiens
gaactttttttttactgcagaaaacatttttataactttagaacttttctaaaatactactttgtcagctgaacaatatagaaaagtgcagaggcaagtgcctttccagaaccgcgtggtgacttagaagcggggcttgcgcttgcggccggtgtactgggtcaaaaagcgacgtcgctatgaacgcttggccgccacaagccagttatccctgtggtaacttttctgacacctcctgcttaaaacccaaaaggtcagaaggatcgtgaggccccgctttcacggtctgtattcgtactgaaaatcaagatcaagcgagcttttgcccttctgctccacgggaggtttctgctcgtgccgaaatcgtcaa

SEQ ID NO: 150457 - DNA, 1820 bp, Homo sapiens
  misc_feature (1)...(1820): n = a,t,c or g
ggccacagcaacgcggcatccacaggtctcgagtgccgaagtccttcaggattggggcaacgtcccctctagagcatgggccgaggccggggtggggtttggctccagccaaccgcacacagcctacgcgccgttgctgagcaacgcttgcccgctgaatcccgaggttttagctctagtcaagtgccaaaagagcccaatgtgtgttcgggtttcaattctccagtcagcgtcagagttggaggcctcaattttaaagaaggcaaagccatggtcatcgttgcgggtaaggaacaacgcagaagcctcttccacccccaaatttcgacctgcttctgggtcggggtttcgtacgtagcagagcagctccctcgctgcgatctattgaaagtcagccctcgacacaagggtttgtctacgaatggtttagcgccaggttccccacgaacgtgcggtgcgtgacgggcgagggggcggccgcctttccggccgcgccccgtttcccaggacgatatgtcactccgcaccggaccccggtcccggcgcgcggcggggcacgcgccctcccgcgcgcgcggggcgcgtggagggggggggggccggcccgccggcggggacaggcgggggaccggctaatccgaggccaaaccgaggctccgcggcgctgccgtatcgttccgcctgggcgggattcatgacttagaggcgttcagtcataatcccaccagatgggtagctttcggccccattgggctcctcaancccaagcacattacaccaaatgtctgaacctggcggttccttctcgtactgggagcaggattaccatggcaaccaaacacaatcatcaagtaggggtaaaaacttaaccttgtctcacgacgggtcttaaccccagctcacggttccctattagtgggggtgaacaattcacgcttttgggtgaaatttctgttttacatgtagggggaagagccgaattcaaaagggatcaaaagcgcgaacgtcgctatgaacgcttggccgccacaagccagttatccctgtggtaacttttctgacacctcctgctttaaaacccaaaaggtcagaaggatcgtgaggccccgctttcacggtctgtattcgtactgaaaatcaagatcaagcgagcttttgcccttctgcttcacggggaggttttctgtcctcccttgagctcgccttatgacacctgcgttaccgtttgacaggagtaccgccccagtcaaactccccacctggcactgtccccggagcgggtcgcgcccggccggcgcgcggccgggcgcttggcgccagaagcgagagcccctcggggctcgcccccccgcctcaccgggtcagtgaaaaaacgatcagagtagtggtatttcacccgggggcccgcaaggccggcgggaccccgccccgggcccctcgcggggacaccgggggggcgccgggggcctcccacttattctacacctctcatgtctcttcaccgtgccagactagagtcaagctcaacagggtcttctttccccgctgattccgccaagcccgttcccttggctgtggtttcgctggatagtaggtagggacagtgggaatctcgttcatccattcatgcgcgtcactaattagannnnnnnnnnnnnnnnnnnnnnnnnnnnnnnnnnnnnnntcccgccgtttacccgcgcttcattgaatttcttcactttgacattcagagcactgggcagaaatcacatcgcgtcaacacccgccgcgggccttcgcgatgctttgttttaattaaacagtcggattcccctggt

SEQ ID NO: 150458 - DNA, 610 bp, Homo sapiens
ggcacgagagaatatttatgttaactcccttattttacagctgatgaagttgaccctagggaggttagatgactctccacccagtcccaaagctcctaaagcaaggaatcgagttcctaatgtaggatttttaattctcttattggtgtattttccacttgtctatctttacccaaaggagccatcagtgatttttagtggatttccacaaaagggagtaataggacagcttcccttgtccctgtttatttctttaaaaactacaaccccaataatgatgagtgaggctgttgtaatttttggaaacatgataaatgggttgttgccaaatatattgaaagttaggggctgtgtgcagtggccttacacctgtaattcccagccttttgggagtcccaggtcaggtggattgcttcagcctcaggagttcaagatcagcctgaccaatatggtgaaatcctgtttctactaaaactacaaaaactaggtgggcatggtggcacaggtgagaggatcacttgagcctgggaggtcaaggctgcaaggagccaagattgtaccactgtactccagcctgggtgacagagcactatcttgtctcaaaaaaaaa

SEQ ID NO: 150459 - DNA, 766 bp, Homo sapiens
ttgtattttttgtagagacggggtttcgccacgttgctcaggctggtctcaaagtcctgggctaggatgacaggcatgagccaccgtgcccagccttgcctgcgcttttcctcccacactccaaccagatccgcagacgaggctgaggggccctccatctaatcagaaagggcagccctctgcatggacaggcccataagcatgtggctcagcaaggacgtggcattttgtccagagtgcacaggccaacacatgtgcacacacaggggcgtaaggccaccaggttaggtctctgttctgcacatgggagggccccgcatccaagcttcctgcccttagttcccgtatgttgttcatgcaccactgtgagacccccatggccctgcccgctgctgccctgcccaccccctagttctggtgcctcaacttccaggactgcaagctcaccagtcctttctctcacagactagccttacctctctgagacagaagaacaagtcagtcccgtggctcactcacaaagccagccttgaacccaggtctgactcagatgccaaaacctccagccatcccagggactggccccaccccatggtggactgtgccgcggctctcagctggactcagcccctgtggatgttctgtggcagcaggcttgcctttcatgatgcgccagctcctgcgcacatgcgagccatttgggcctccagagctatacctgcagcaaggccaggtccgcatcttgggctagctgctgcctcgtgcc

SEQ ID NO: 150460 - DNA, 404 bp, Homo sapiens; identical to SEQ ID NO: 12052

SEQ ID NO: 150461 - DNA, 855 bp, Homo sapiens
ggcacgagttttatggtccacaaatgaaggatggtttttatacttttaggtggctgagggaaaaaaaccaagagtattattttgcttggaaattgtatgaaattcagacttcattgtctatgaatttttattgggactcagctatactcatgtatttatgtattgcctgttggtactttcacactacaaaggcagagttgactggttgcagcagagactgtaatggcctacaagcctaaaatatttactgtgtgactctttacaagaaaatgtttgctgatttctgatagagagttgatgaagagtaagacaaaaatgtcatatagggtgaaatgcagatccttggtgatccttacaagttggtgaaactggaacctaaaacaagtttgtccggtgggggctttattaggtgacattgtgaaacttcctggatgacagtccttgccaggtaccttaaaaaaggtagtaccaccaaagtgagtaattcatgtgcagtccaggggaaaacttaacagatagcaaaagaaagtatatgattaaaaaattcaaataggccgggcacattggctcacgcctgtaatcccagcactttggaaggctaaggcgggtggatcatgaggtcaggagttcgagaccagcctgaccaacatggtgaaaccctgtctctactaaaattacaaaaattagctgggcatggtggtgcgtgcctgtaatcccagctagtcaggaggctgaggcaggagtatcacttgaacccaggaggtggaggttgcagtgagccgagatttgtgccactgcgctccagcctgggcaacagagtgagactccgtctcaggaaaaaaaaaaaaaaaaaaa

SEQ ID NO: 150462 - DNA, 801 bp, Homo sapiens
ggcacgagagaacttgtagtttgcatagtatccgacagatgtcaccgtatttaccttgaaaatttaaaatattttgcagcatccttgtgaatttgatgtgatacccccaaggcaccctgagcacacagtttgggaacccattgcccttggaatattaatcatagttaccctcccagagagtgaaattttggataattaaaaaaatttcttttttcttgagatggagttttggtcttgttgcccaggctagagtgcaatggcgtgatctcggctcaccgcagactccgcctcccgctttcaagctattctcccgcctcatcctcccaagtagctggggattacagggcatgcaccaccacggccggctaaattttgtatttttagtaggagacggggtttctccatgttgggtcaggctggtctcgaattcccgacctcaggtgatcagcccgccttggcctcccaaagtgctgggattacaggtgtgagccactgcccccagctgaagaagtcaatcttacacgaaactccgaaaggacttactggggtcacttcctaaatctgaacaacttaggttatgggcacgccacgtgtggtcctttcccagctgtcagtgttctcccggctgaaatagactttagcatttttggatgcaacacaacttcctagcctggaaaagccatattctcaacaattattgtgtaaatttaagaggtacagttgtaataataacccttgtccctatgcctcctacctttgcacagccatttctttggcatagaatgtccttctctgccttga

SEQ ID NO: 150463 - DNA, 9234 bp, Homo sapiens; identical to SEQ ID NO: 145209

SEQ ID NO: 150464 - DNA, 901 bp, Homo sapiens
tcgatacgacttttttttttttttttttttttttttttttgtgacggagtctcgctctgtcacccaggctagagtgcaatggcgctatctcggctcactgcaagctccgcctcccaggttcacgccattctcctgcctcagcctcccgagcagctgggactacaggcgcccaccaccgcgcccggctaattttttttgtatttttagtagagacggggtttcaccgtgttagccaggatggtctcgaactcctgacctcgtgatccacccgcctcagcctcccaaagtgctgggattacaggcgtgacagccgcacccagccgagcctgctctttcaaactggccagaggcagagcctgtcctggctgggactgggcagaggaactaactggaacctctcacactcggcgtgtccacccaggacaggccttgtggggctgggactggaggcggtgcagctgtgggtcaagatcatggcagacatgactgcagcgctgccccgctgtgcttcgggggtggctggcctgcctcacggcccaggaggagcaaattgggccctatgtttcagtttctccaccagtcatccctggggcagcttgctgctttattgatgttttaagatgaaagatttcagataaagatgtgttcaaggccgggcgcggtgctcagccaaaaacattttcttttcttttgagaaagagtctcaccctgtcacccaggctagagtgcaatggtgtgatctcagctcactgcaacttctgcctcccaggttcaagtgattctcttgcttcagcctcccgagtaggacaatcacttgaacctggaacacggaggttgcagtgagctgagactgtgccactgcactccagcctgtgcaacagagcaagactctgactcaaaa

SEQ ID NO: 150465 - DNA, 534 bp, Homo sapiens; identical to SEQ ID NO: 144862

SEQ ID NO: 150466 - DNA, 648 bp, Homo sapiens
ccccgactcttctggtccccacagactcagagagaacccacccatggttgctgtctcctgccgacaaagaccaacgtcaaggccggcttggggtaaggtcggcgcgcacgctgtgcgcagtatgtgtgcggaggccctggagaggatgttcctgtccttccccaccaccaagacctacttcccgcacttcgacctgagccacggtttctgcccaggtttaagggccacgggcaagaaggtggccgacgcgctgaccaacgccgtggcgcacgtgggacgacatgcccaacgtcgctgtccgccctgagcgacctgcacgcgcacaagctttcgggtgggacccggttcaactttcaagctcctaaagccacttgccttgctggtggaccctgggccggcccacttccccgtccgagtttcaacccctggcggttgcaacgtcttccctggggacaaagtttcctgggcttcttgttgaagcaccgttgctgaccttccaaatacccgttaagcttggaagcctcgggtgggccatgcttcttggccccttgggcctccccccagcccctcctcccctttcctgcacccgtacccccgtggtctttgaaataaagtcttgagtgggcggcaaaaaaaaaaaaaaaaaaa

SEQ ID NO: 150467 - DNA, 203 bp, Homo sapiens; identical to SEQ ID NO: 111968

SEQ ID NO: 150468 - DNA, 370 bp, Homo sapiens
  misc_feature (1)...(370): n = a,t,c or g
agcaatttccccaggggattaaggggctctagggccaccnnnnnnnnnnnnnnncgaaaagggagtctcgttttgcccccaggttgaagggcaggggcccaatttgggaaaacctccgctttgggggttaaagcaattctccggcctaaccctccggagaaccgggaactatgggggcaggccaccttgcccagtaaattttggaattttaagaaaaaacggggttcccccatgtggcccaggagggcctaaatctccggacctaaggacccacccacttgggcctccaaaagggcgggaatcccgggcggaacccattgccccgggccacccctgggttttaaaaaaccctggcccccagggagggttg

SEQ ID NO: 150469 - DNA, 413 bp, Homo sapiens
tggttgccggctgaaataacctgaattcaagccaggaagaagcagcaatctgtcttggggattaaaactgaagatcaaggtactttcaacttactaagaaaggggatcatggacattgaagcatatcttgaaagaattggctataagaagtttacgagcaaattggacttcgaaactttaactgacattctatcgcaccagatcccagctgtttcctttgataatcttaccgttctatgtggggatgccatggacttaggcttagaggccatttttgatcaagctgtgagatgaaatcgggcgtggatggatacatccaggtcaatcatcttctgtactgggctttgaccactattggttatgagaccacgaagattggaaggtatggttaccagactccagccgaaaaatag

SEQ ID NO: 150470 - DNA, 1002 bp, Homo sapiens
gcgcttgcgagtcctccaaagagagtctagggtacaggtccgatagtagaataacacagaaggcaggccaggggcactgtgagatggtaaaagagatctgaagggatccagacgtgtacagaagggccatgctgttattactcttacacaaggaggcagccctcgagccacagggtccagctgttggctataatagcctaccggtctctgatgatcaccatgtttctggtaaaagcaaacaaatatggctgtctggatctacaggaatactgaaaaaggcaccgcagagattcacaactgagaaatactggctggtaaattcaagccaggaagaagcagcaatctgtcttctggattaaaactgaagatcaacctactttcaacttactaagaaaggggatcatggacattgaagcatatcttgaaagaattggctataagaagtctaggaacaaattggacttggaaacattaactgacattcttcaacaccagatccgagctgttccctttgagaaccttaacatccattgtggggatgccatggacttaggcttagaggccatttttgatcaagttgtgagaagaaatcggggtggatggtgtctccagggcaatcatcttctgtactgggctctgaccactattggttgtgagaccacgatgttgggagggtatgtttacagcactccagccaaaaaatacagcactggcatgattcaccttctcctgcaggtgaccattgatggcaggaactacattgtcgatgctgggtttggacgctcataccagatgtggcagcctctggagttaatttctgggaaggatcagcctcaggtgccttgtgtcttccgtttgacggaagagaatggattctggtatctagaccaaatcagaagggaacagtacattccaaatgaagaatttcttcattctgatctcctagaagacagcaaataccgaaaaatctactcctttactcttaagcctcgaacaattgaa

SEQ ID NO: 150471 - DNA, 867 bp, Homo sapiens
atggccggagccgagggcgccgctgggcggcagtcggagctggagcccgtggtatcgttggtcgacgtccttgaggaggacgaggagctggagaatgaggcgtgcgctgtcctgggcggcagcgactccgagaagtgctcctactctcaggacaaagcaaaggtaaattctggcaataagtacaatgacaacttttttggattgtactgcatttgcaagagaccttatcctgatcctgaagacgaggtaagagaattggaagttaaacctggggtaaccaaaatatccactgaggatgatggattggtgcggaacattgatggaataggtgatcaggaagttatcaaacctgaaaatggagagcatcaagatagtaccctcaaagaggatgttccagaacagggaaaggatgatgtccgggaggttaaagtagagcagaacagtgaaccatgtgccggctctagttctgaatctgatctccagacagtgtttaagaatgaaagcctcaacgcagaatcaaaatctggctgcaaacttcaggagcttaaagctaagcagcttataaagaaagacactgccacctattggcccctgaactggcgtagcaagttgtgtacctgccaagactgtatgaaaatgtatggagatctagatgtcttattcctgacagatgaatacgacacagttctggcttatgaaaacaaagggaagattgcccaggccactgacaggagcgatcccctaatggatacccttagcagcatgaatagagtccagcaagtggaactcatttgtgaatacaatgatttgaagactgaacttaaagactatctcaagagatttgctgatgaaggcacggtatgttga

SEQ ID NO: 150472 - DNA, 511 bp, Homo sapiens
gccgcttttcccgcctccgccggggccgagccgctgttcggctgacagttgaggatggccggagccgagggcgccgctgggcggcagtcggagctggagcccgtggtatcgttggtcgacgtccttgaggaggacgaggagctggagaatgaggcgtgcgctgtcctgggcggcagcgagctccgagaagtgctcctactctcagggctcagtaaagagacaagcactatatgcctgtagtacctgcaccccagagggagaagaaccagcaggaatttgtttagcttgcagttatgaatgtcatggaagtcacaaactatttgagctatacacaaaaagaattttccgttgttgattgtggaaacagcaagttttaaaattttggaatgcaattacttccctgacaaagcaaagtgtaaattctggcaataagtacaatgacaacttttttggattgtactgcatttgcaagagaccttatcctgatcctgaagacgagattccagatgag

SEQ ID NO: 150473 - DNA, 403 bp, Homo sapiens
tctggaattcgcggccgcgtcgacgcaaagtcccttttaccatataagggatcttgtgatggggtgattatcctggtttatcctggaatgcgggagggcctgtgatgatggaagcagagactggagatctttgaaggtggaagaaggggcttgccagccaaggcggctattagaagctgaaaaagacacggaaatataatagattctttcctcagggcctccagggaggaaccagctctgccatccctgggactttaagcccagtggaacttgattttcacacttctggcctccagaatttttaagagattaaatgtggctgggcgtggggctcatgcctgtaatcccagcactttgggaggtcgaggcagatggatcacttgaggtcaggaatccgagacta

SEQ ID NO: 150474 - DNA, 343 bp, Homo sapiens
caatctctgccaagtttttattccttttctctttcattcgcttctttatgtcttcaagactatcttgaaaggactttttcaggcatctttccttggccatcttttgcttcttcctctttcagggactccaggaaggccggggggaggtggggctggcggaagtggacgcggcgaccctcctgccgcaggcgcgtccagaacgataccttggccactacttctgcaacagctatcttcctcctcctcacatttcaaggctcttcgaagctctccagccacggctagccccgcgcactgggccctccaggaccgtaccaccgtccgccgtcgcctggaactaccg

SEQ ID NO: 150475 - DNA, 328 bp, Homo sapiens
cctggacagggtgcagacttcaactgcccatccagaaccatcaaagggctttacatctatacgtaggcaatgacactttttatggccctacttggaacaactaaagggacttgcacatgaagactataacctctaaagtctactaactgactatcacactaaagcggctctgtgggcagggactatgagctacatgagaaccccttagtgggccctaacatcaagcttggagactttgtagacatatcgcaccccaacgatgaatacagccctctgcttttgcaggtcaagtctcttaaggaagatttacagaaggaaactatcagtg

SEQ ID NO: 150476 - DNA, 1732 bp, Homo sapiens
catgctccttattaaacatcattcacaattttttttaaaaactaagcaaaccaacaaacctctttagaaaacaaaggacaaatgttttaataatcaagatccaaccagccaaaattttagaatgtgaaaaaattgacaagaataaaaaataaaaactttctcatgtttcatatttaccacttccacatatggcttcatttcccaagcttgtatattagtgttatctattataactggagatcttccctgatcgatagcttgttttgctgaaataaaatataaatttaaaaataaaaaaacaaattaggttaaaaaccacacaaaagttaaacatttaattattaaagaaatgtactacgtcccctgtaccttaaaacccaaaactgtgcaatcctccttcagtccagtatccatgaaaaaaagaactcccactagattgaaagggaattaaaggacacaaccatatgccaggtgcattctccagacctggatgctggccttggacaaactggctctgaaaggcattttggctgaacttacagcctaataaaggcttcaagtcctaggactaactttcacttatgggaaatataagagatgaacaatttacatctgaatatagactaagtaagagaagaggtgaaaaattattttgacacggaaggatggaggttattaaatgaaaatggcaagttacaagacaatagttaaatatgatcctatttaagtcaaaagatagagctggggaagacttatggagatattaaaattggtcgcctgtaggtggtaagaatattttcatttaatattttatctgtattttctcttttttgggaaagttaccgcagatgattatctgtattttctaattttctacaatgtacaaataatgcttttgaagtaaggcttatgtttttgaaaagttatggatttaagtcattacttaccagcaaaactttatatgccaagtagctaaaaatcatagttcaactgactttgtgggatatttcttaggaactatgggtcctcaaattgtgagttgctgtaggaatgggaacttttctggaactattatctccccatcccaaatgcccatcttttgcactatggaggataaggaatcactgttcacaagggctggggtgttgggtagctcacacctataatccccagcactttgggaggccaaagacaggtggatcaccagaggtcaggaattcaagaccaccctggccaaaatggcaaaacctcatctctattaaaaataaaaaaattagccaggtgtggtggtatgcgcctgtagtcccagctacttgggaggctgaggcacgagaatcacttgaaccttatgaagtggaggttgctgtgagccaagatcacgccgcagcactacagcctgagcaaagagtgagactctgtctcaaaaaaaaaaaaaaggccaggcatggtggttcacacctgtaatcctagtccttagggaggccaaggcaggtggatcacaaggtcagcagttcaagacccccatggccaagatggtgaaaagccatctctactcaaaatacaaaaattagctaggcatggtggcaggcgcctgtaatcccagctacttgggaggctgagcaagagaactgcttaaacctgggaggcggaggttgcagtgagccaagatcgcacccctgcactccagcctgggtgacagagcaagactccgtctcaaaaaaaaaaaaaaaaa

SEQ ID NO: 150477 - DNA, 1858 bp, Homo sapiens
atcgataatggggatagattttcatctgtttatttttagagagatcttgtacttaactcactagtctgggatgttttatttatgtcacctaatattaactattgctaaatttcactttaataaaaaagtagatacaaagactcattttacttagcaagactgcaaataaaactaagacataaattcacatgttagtattgtccaaaacaattcctccagctatcaacccacggcaatcaatccagcagtatcatttatagaatgattactaaaacaagaatcatttctcagttacaaatggggtcattaagcccttggggtcatttgaaagtagaagtagtttgcctacttaatcatcagtctacacaaaggcagaaataaaaaggaatggaaatacaaacacaaaatgattggttattacctgttttataaggaaacaagaaaaaaaaaacaggtggctagaaacaacaaaaaagcagtggctggaaccctactgaatagagcttaaagaagtactggttacattcacagacacagtagccactagccaagatatagtttatctccatcaaacttaaatagataaagtcagtaagtatgaccatcttactttcactatttacgctctttaaatagtaaaggtatcggtttgaaagatacataggaaccatagggaacagtggaatggatccatttattaaaacagctcccttttccctgaatccaatatattggctaaaattcttttcaggtaaccctccctttttatatggatcacagatccctccacatctgttttattttagttatataaaaacttattaataaactttggtttccttgcattcggtccttatattttaaaaagtgattaaaaacagtactgaatatgaatcacttctcgcaaagtttaatgagtgagaaacattcaaccaaggtgatttttccttggaaaaccctacaaaaactgaattttataaacagttacttattttgatagatgttccatttataaatagcagccattacttcactgtctacaaaattgcaggctgtcacattttacatgtttagaatccaaatgttttaggattagatttttcttagtaagagttaaaataaaaacaaagttaccacagacaggttacgttgtcctatgcaaataaaacagctggattttcatggattttgctatttaggacagataaggaggacaacccattggggattggacactaatgtgttaggaataacatattttttggtttaaggaggggaaatgataggaaccttgggggtgggggccgctgcagcaggactttgactctactggaggctcttctgtgcctcatgggaaccaactatcgcaggatgttagtacccggagaggcccctcaagttaagaccctgaaccaaaatgtgcctaatccagaaaaagctgaacctatcccctgcctccccggttcctactgtggtgaaattggtgttttcctgaaggtcctaggcaacaagagcctccagagtaagaaggagtagacattttcggggaagtgggatgctgggcatgtcatgttgctctaacaagtgattaatagcacggaaatgggaggaagatgaatgtattttaaatggatactccctatgctagtcttgggaaatgaccttcttttcttgagacggagccttgctctattgcccaagctagagtgggatggcatgatcttggctcactgcaacctctgcctcccgagttcaagcaattctcctgcctcagcctcccaagtagctgggattacaggtgcctgacaccatgcccggctaatatttctatttttcgtagagatgggctgtgccgaaa

SEQ ID NO: 150478 - DNA, 1335 bp, Homo sapiens
atgcggggccgactcgggcctgcctttcactgcgggtgctgggcgggatcagggtgtccccgcctgctccagagtgtccacacggtggcgcgcgcggtccagagacgtgacttgggcgccgcggctgccggggggcgtttccaccccgaggaacccacgcgcaggacgggattaatgggaaacctggacccctccgaggcccaggacgggagcctcgcccgcaagtctggatgggccgaactaaaacccaccaaacgcgtgcgtcaagccagagttcgagaatcaaccgaagctgaaatggagccagcgtggggtggggggacccagaagggaggggcctccagcacaacctgcccccgaggggacggcgggcagaagggccgacaagctggtccgggtgggctggcggcctccacccgccacaagcgcacagggctctgcccactccccgccccttttctgctgatcctcgaggagcaggggaccgagctccccttgcctggaagctccgaccccaggagccagcccatcaacctgaaccattacgccaccaagaagagcgtggcggagagcatgctggacgtggccctgttcatgtccaacgccatgcggctgaaggcggtgctggagcagggaccatcctctcactactacaccaccctggtcaccctcatcagcctctctctgctcctgcaggtggtcatcggtgtcctgctcgtggtcattgcacggctgaacctgaatgaggtagaaaagcagtggcgactcaaccagctcaacaacgcagccaccatcttggtcttcttcactgtggtcatcaatgttttcattacagccttcggggcacataaaacaggactctggagttcaagatccagtgtccaatgcaccatgggtgaattcacagcagtggtggaggcagcagcagcaacagaaaaacccccagccacaaaagcaccggggttattagtgcaagagaagtacaaggtctccaggaaattgacagatatgtccacatcctctttacctcttctccatgtcctctcgggaggccttacccacaggcacgccggcctcaatgtccagtgccagggagtggcaagcccctgcccgccagctccccacctcccaatgcccaagcaccagaaacagcccgttctgtgcttctggtctgacgtgagccatccggaggaagttaatgccctaatcagtggccagctgtttggtggctactgggagatgtgtgtctctggaaggcacgagcctggggtggagcagagacctgccccacgtgggaccagtcccgcggccagggacaacgcccaagggacatag

SEQ ID NO: 150479 - DNA, 547 bp, Homo sapiens
agggattcctccccgacccccccagaaggttctcccacgggctccattctcccatgtgccaaactcgtgctctcggggaatgcagagcccactaggcagaccctgcagctccagtgccgtggtttggaccgtcacagcctggagcgcgggctcagtggcctggtcttttgggccccgccgcacctcccccagccctgtgctcacctccctaaacagactctggagttcaagatccagtgtccaatgcaccatgggtgaattcacagcagtggtggaggcagcagcagcaacagaaaaacccccagccacaaaagcaccggggttattagtgcaagagaagtacaaggtctccaggtgacagaaagggtggcatcgactaaaaaggctaagggctattttccctgaaactgcccccctcttcagttcctcctgcccccactcctctccctgcctccaggggatatctcagggcaatgtcctcacctccccaaacctctcatcccgcccccttcttatcctgctccctgtccagggttttgcccccgta

SEQ ID NO: 150480 - DNA, 1752 bp, Homo sapiens
tttttttttttgagactccataatcagatttattttcctctaataagacagtttagcatctccgagttttgcattctacagtcttacaaactttagttattagcatcagagacacaaaaacattgccagaccctcaaaacacaaataaataccaaataagaaccacaccataatataccaatacaacaacaacgtagaaaacagtatatgctatcaggacagtcaggcatggcttgctaagctcacagtaacaacatgcattattggctgggcaataactcacggctctttttatctttttcttagaagagcggaaaacaggacccaaatcactggtcacaaaatcacttggactgtcaagatgtgtcttcacagcaagcggctactacagacgcaacttttaaaacaggcagattaaaaaagacagggtcaaatgagagattggccttctttggtctttgtttttgggtaacagaaccgaacagaggcaccggcagagaagaggctgcgaatctgcagatgctgtgcagcgtcgacactgccctccacacttcacagaccttctcctacaggcatttcttacagaaatcaccggacatcatgccagcttgtgtgttttccaattaagtcattgaatttgctgttggagggtatcttacttgtctgaggggactaagttgtcaaatccagtcatcacctaattacaggagcggtacagcgatcctggacttctagcctcttttcacggtgagagttcacaagacagactagacacagtgcagcaggagaaatgaaacgcaggctctgcttcgccaccggggcctcctcaccccaacacctgccagccccgagacggccgaggcttcacacgtctgccctgccaccgcatgtggggcacaccagggatcaggtggaaaatgcccttgcagtgagctgctggccccgcctcacgccgcctgatggcccggctccctaatgccaccgtgcctgtgaccatcagcatcagcctggacgaggcagcaataatgaccaggtagcctgccgacactgacctcgcctggctaggaccccggtgcgcacattctactttggagaaaacagagctactgagatttgcaaacggaaaacagaactatggtcatgggctgagaagtagatttgggtgacagaccctcattcacctcacagatacaaaagcaatggggcttcccccactctccctagctctccttctgcagtctaataagtaaagatctggactaaaatttttaaaaaaacagtattttacagctctgccagagcccttctgacacacaaattacccccagtagagggaggagtctgggagggccggggattgagcaaggggcccgcaaggggagtctgcacccgcccaatcctgcacgggcccaagaagacagtggcactgccaccctactggggctgtgcacagggtgacggtcctcaggccaatcctccccgtgcaggggagaaaggaggtgtcagcccagctgttgggatcagtgtactccccggccctcccttgggctgacaaggaatgaccccgctgcggacagaatggtcgtttaaggacccatccagactccccttcctttgtccaacatcacctctggctgtaggatgtgggtccaccatgctgactaccaccagacgccatcaagcaaaaggggtgctggaatgtgacgttggcatggtcgacatccatgggacaccgttgcccctggcccaggg

SEQ ID NO: 150481 - DNA, 470 bp, Homo sapiens
  misc_feature (1)...(470): n = a,t,c or g
ttgcggaggaattcctatcattcagagatactggccatcaatcaagtgtttgatatcctgtccacttacttatagactcacaactggcctgaagcattgaagaaaggagtttcttcaggaaaaggctatattcttcggaactcagtggaatgatgggcctaagattgcagctgcgnnnnnnnnnnnnnnnnnnnnnnnnnnnnnnnnnnnnnnnnnnnnnnnnnnnnnnnnnnnnnnnnnnnnnnnnnnnnnnnnnnnnnnnnnnnnnnnnnnnnnnnnnnnnnnnnnnnnnnnnnnnnnnnnnnnnnnnnnnnnnnnnnnnnnnnnnnnnnnnnnnnnnnnnnnnnnnnnnnnnnnnnnnnnnnnnnnnnnnnnnnnnnnnnnnnnnnnnnnnnnnnnnnnnnnnnnnnnnnnnnnnnnnnnnnnnnnnnnnnnnnnnnnnnnnnnnnnnnnnnnnnnnnnnntaaaaa

SEQ ID NO: 150482 - DNA, 491 bp, Homo sapiens
  misc_feature (1)...(491): n = a,t,c or g
gtcgtgggcaattcctatcattcagagatactggccatcaatcaagtgtttgatatcctgtccacttacttagagactcactactggcctgaagcattgaagaaaggagtttcttcaggaaaaggctatattcttcggaactcagtggaatgatgggcctaagattgcagctgcgnnnnnnnnnnnnnnnnnnnnnnnnnnnnnnnnnnnnnnnnnnnnnnnnnnnnnnnnnnnnnnnnnnnnnnnnnnnnnnnnnnnnnnnnnnnnnnnnnnnnnnnnnnnnnnnnnnnnnnnnnnnnnnnnnnnnnnnnnnnnnnnnnnnnnnnnnnnnnnnnnnnnnnnnnnnnnnnnnnnnnnnnnnnnnnnnnnnnnnnnnnnnnnnnnnnnnnnnnnnnnnnnnnnnnnnnnnnnnnnnnnnnnnnnnnnnnnnnnnnnnnnnnnnnnnnnnnnnnnnnnnnnntaaataaaaaaaaatgcagctgcaggagtgg

SEQ ID NO: 150483 - DNA, 906 bp, Homo sapiens
cctagtacagtgcggtggaattcgagttggcatgtttttgccctgagttgttcttatttctttgaaggaattaagtagactggctggacaaaattcaaaggttgaatggttcaaacaaaaaagctgacaggccattttggatctgcctcactggattcacaacagacagtcccctttatgaagagtgtgtgaggatgaatgatggattttctagttacctgttagacataacagaagaagactgctttagtttatttcccttggaaacccttgtgtacctgactcctgactcagaacacgctcttgaagatgttgatctaaacaaagtttacatcctcggtgggcttgtggatgaaagcattcagaagaaggtgacatttcaaaaggcccgggaatactctgtcaagaccgcacgcttgccaatccaggaatacatggtcagaaaccagaatgggaaaaactatcattcagagatactggccatcaatcaagtgtttgatatcctgtccacttacttagagactcacaactggcctgaagcattgaagaaaggagtttcttcaggaaaaggctatattcttcggaactcagtggaatgatgggcctaagattgcagctgcgtggccaggtgctcacgccgtaatgccaacactttggtagaccgaagtgggcagatcacctgaggtcaggagttcacgaccagcctggccaacatggtgaaacccttctctactgaaaatacaaaaattagccaggtgtggtggcgcatacctgtagtcccagctacttgggaggctgaggcaggagaatcacttgaactcgggaggcgaaggttgcagtgagccgagatttcaccagtgcactccagcctgggtgacagagcaagactccatctcaaaaaaaaaa

SEQ ID NO: 150484 - DNA, 950 bp, Homo sapiens
  misc_feature (1)...(950): n = a,t,c or g
tttttttttttttttttttgtggtccaaaggacagtttatttaaaacaaacgtgatgaggtataggaagaagaaaagaaggagaacaacaattctaacataaaaacacaggaagcatctcaaacttaaaaaagaaaaaaggagtcgggggcaatggaggaagctatgtctcataccaaactgctggacctccaaatttgaatnacttacattccaaaccttacaaaatgagcatttcaagtcagcacttaagccagtgttattagatttttcttacaaaaagttaaagctaccaaacttcacatttttaaactgtaccatagcaaaaacctttaagcttttttttttccaagttggtccgagtgcaagctggtaaaagagattttttttccaaacacaaacaagaacatgtattccaaagacaatggaatataatactgataaaaacacaaacatagtgcttaagaaaagatggggtgaggtggagatgtagattgggcaggaacaattttcttagtaaataaggagctgcaatctttagaggcaacatgggtatgctagaaaggacactggaataagaatcagaaagacctggatctgaatcatggctctgccatattctagccacatgaccttgagcaatagacttttacttctctgagcctcaaattttcaacatctgtaaaaaatggaggataaataatacctaatatctccccagcactattaaagtttcctaaaagatatagggctattcaagattatctacttcttcttttttttttttgagacgggggtctcattctgtcaccccaggctagagtgcagtggtgagaccatggctcactgcatccctgacctccctgggcccaggtgatcctcccacttcagcctcctgacaagctgggattacaggtgtgcaccaccatgcccgactaatttttttttttt

SEQ ID NO: 150485 - DNA, 1603 bp, Homo sapiens
acaatgttaactttcgattaagaaagaaaaaaaccccaaacatcttcaggaattccatgccaggttcagtctcttccagtgagcccgcttgctaaaagtccacgtgcaccattaattagctgggctggcagcaccatgtaaaaagaagcctattcaccaccaaccacacagcctagacatgtaaagtaggatcaagtaatggatgacaaccatggtcgtggaatatggtcaatgagagtcagaaaagtacaggcaccagtacaagcagcagataacagagttgacgggccaaaggataaaataggcttatttaaataggatgctacagaacacatccactcctaattgtagctgctttacactgggtgccattgtaccatatgcatcagccacccttcaggcaccccatggtgaaagaaaaggattcagaatagaagccaagcaggggactgttgttaaccccgaatatccattatgcatagaaacagctcacatatcccagggactcaaacagggcttcaaaatggttgtgaagggtcccaaatgacatctaggcctcagtttcctctctgtagcatgaagaaattgtgattcttaactcttctgggtcacagcccccttggaaaacttgctagcgatggatcatcattcccctaaaacgcacattcccacaaattcccatcattcccccaaaccgcacattcccacaatttcaggaagtttggggatccccaactccaatccsayggttccgaggttcaaaacccaaggattggggaactgctaagttttcttacaactcaaaaaaaattataaacaataaccatcctttacgtacacccacgctttatagtttacaaagcgatttcaaccccacacacattgataggcagaggaggaaactgaggcgcagacaaattacagagtgactcgcctaaggtcactccgccaactggtggctaggcccggaagaaaacccagctcttccgactccggagctcgtctccccaccccggggctgccgccagagctcccgcccctcactaaggcggcataaggaggaaaaggcaaagtagaaatccccacaaccaaccatcctccggccccctcctgcccccccaactgggtccttgcaggccccgaagggtggcgccaggcctccaagccggccccggccacccccgcctcgcccggccgctccaaatcccgcggccgctgccgccgccgccttccccggagcggggcggagcagctgcccggcgccgccgaccacccggacgactcctcgtcgaatcgcaaacgcataggccgccgcccgagttctgcgtacgagaagaaagacgcggcgcgagcgccaacggccaccgggcgcgcgccgcggcggccgggcctgcgccccaagagctggatgccagagcaggagaaagagccgccaaccgatcgctcgatcgaccgcacgcccgttccttcgccctaccagacccgggagggggggagggcgcgccagggcttcttcgatttaggggcctgactccccggcgacgagacaagatggctcctccggtccgcaccgcagctaccgtcccggctgcgtcgcacgaaa

SEQ ID NO: 150486 - DNA, 1513 bp, Homo sapiens; identical to SEQ ID NO: 132664

SEQ ID NO: 150487 - DNA, 2250 bp, Homo sapiens
ttagctgcagctgaaagaggtgtctgctaaggcaatgccaccagagacttttactgtcatggatttggagctttccttgccagtggctgagttacgaacagagcaagcatagagcccgctatgctttgtagtaatttgggggataaagagcttttgtcctgatagctgaaacttcccattaattgtccaagaatactgtgccggtgggttagagtccgcagaacaggacaagtagaggacttctcctgaacggtaataggtgaatgaagggtaaattctggggaggtctggaccatagaggacattcagggtgactgggtaactgcggatgccaccatattggtcccttatttcacattgatagggtcctgtttcatttctcgtgacactgggtagaatgaggatcctgttttcaatgggtcgctttaccctgggactgaccgggaggctctgaccatttagccaccaaatgtaggtgtagttctcactcttaggttcacaggtgaagtttaagacatccttattctccctgggttttaagttgttgatggtgatgtagggcttgggcagcttcgcagggactatgatcctcttgattatgagatttgttccagcagtggctgagttatggatgaaacagacatagacccctctatatgttttagtgatttgggggataaagaacacttgtgctgattgctggaacttcccatcaatcagccaagaatgctggaggagattcagggtgaatgggtcactgcggctggcactcactgggttccgtatttcacattcatagggtcctgcagtgtactttgtgacacccaatagaaagagggtcctgttggtttcagacaactgcaacctgtgagacatagggaggctctgaccattcatccaccacaggtagcttgcgtccggagtctcaggatcacaggttaagctcacagcctccatggcctccctggggtttaatttgctgctggagatggagggcttgggagtctccagatataaggtgaaggtgaaatgtccagttactcctctattctcatcacctcccattatgatgtgtaaggtgtaggatcctgcgtcttcctgggtgacattctggatcagcagggatgcattggaatatattgtttctcgtccactgtatgcaggcccatatataattatttgaccgtctactacatatgatgtaatgtaatggtagaggtccctgatttgccctttgtaccagatgtagccagtaagattctggggcaaattgtggacaagtagaagaacatccttcccctcagaaactttggttggctgggcttcaatcgtgacttgggcagtcgtgggtgggttccagaagtttaaaagtgatgctgtgagcaggagccccttccaggtgatgcgctgtgtgcagggaggggctgagaggagccccatggtctctgctgtctgtgtgttctcctctgtggagatgagctttttgatggggttgtttgtttttttcttgtaaatttgtttgagttcattgtagattctggatattagccctttgtcagatgagtaggttgtgaaaattttctcccattttgtaggttgcctgttcactctgatggtagtttcttttgctgtgcagaagctctttagtttaattagatcccatttgtcaattttggcttttgttgccattgcttttggtgttttagacatgaagtccttgcccatgcctatgtcctgaatggtaatgcctaggttttcttctagggtttttatggttttaggtctaacatttaagtctttaatccatcttgaattgatttttgtataaggtgtaaggaagggatccagtttcagctttctacatatggctagccagttttcccagcaccatttattaaatagggaatcctttccccattgcttgtttttctcaggtttgtcaaagatcagatagttgtagatatgaggtgttatttctgaggggtctgttctattccattgatctatatctctgttttggtaccagtaccatgctgttttggttactgtagccttgtagtatagtttgaagtcaggtagtgtgatgcctccagctttgttcttttggcttaggattgacttggcgatgcaggctcttttttggttccatatgaactttaaagtagttctttccaattctgtgaagaaagtcattggtagcttgatgggtatggcattgaatctgtaaattaccttgggcagtatggccat

SEQ ID NO: 150488 - DNA, 1303 bp, Homo sapiens
atgagcttgagaagtgctccttccaccgggaagagtctcagcgcagaaggaggaaggacagcacagctgacagccgtgctctggaagcttctggatcctaggctcatctccacagaggagaacatgcacgcagcagagatcatggggcccctctcagcccctccctgcacagagcacatcaaatggaaggggctcctgctcacagcattacttttaaacttctggaacttgcctaccactgcccaagtcatgattgaagcccagccacccaaagtgtccgaggggaaggatgttcttctacttgtccacaatttgccccagaatcttactggctacatctggtacaaagggcaaatcagggacctctaccattacattacatcatatgtagtagacggtcaaataattatatatggaccggcatacagtggacgagaaacagtatattccaatgcatccctgctgatccagaatgtcacccgggaggacgcaggatcctacaccttacacatcataaagcgaggtgatgggactagaggagtaactggatatttcaccttcaccttataccataaagctgaggagcctgttccagggctgggttgtggcttcttgggcagggcttactgggaccaagaatttaccagctgtctgaggactgtgtctcctggagctgttcaccagccagggctcagccctcagagcctcatctgggcaaggacagagctttcttcacctgacactcagagtggagaggacagaaagacaagctttgtaggtcatcagccaactgccttaggaggcttaggacagtccatagaaagtctaatgtcctcagaagcagaaacagaagagagaagatgtacctggatgcagctgtctgaaaccaacaggaccctctttctatttggtgtcacaaagtatactgcaggaccctatgaatgtgaaatatggaactcagggagtgccagccgcagtgacccagtcaccctgaatctcctccatggcctggatgccctcaccatttcttcctcatacacctattaccatacaggggaagtccccaagctctcctgtctcatagacactcacccactggcagagcattcttggctgattggtgggaagttccagcaatcagcacaagtgttcttcataccccaaatcactaaaacatatagaggggtctatgtctgtttcatccataactcagccactggtggaacaaatctcataatcaagaggatcatagtccctgatcattccttgcgctctgctctatctttagaggtcactggttcaa

SEQ ID NO: 150489 - DNA, 1686 bp, Homo sapiens
atgacccagttccctatggataaacgtcagggtcgttcccgatctgtggccatcaccaacactgccgtgactagtctagaatgggtgccatttcatgcatttgcaattcccagaagtacactggttagtcagcagaggctcagcacagaaagaggaaggacagcacagctgacagccgtgctcagagagtttctggatcctaggcttatctccacagaggagaacacacaagcagcagagaccatgggaaccctctcagcccctccctgcacacagcgcatcaaatggaaggggctcctgctcacagcatcacttttaaacttctggaacctgcccaccactgcccaagtcacgattgaagccgagccaaccaaagtttccgaggggaaggatgttcttctacttgtccacaatttgccccagaatcttaccggctacatctggtacaaagggcaaatgagggacctctaccattacattacatcatatgtagtagacggtgaaataattatatatgggcctgcatatagtggacgagaaacagcatattccaatgcatccctgctgatccagaatgtcacccgggaggacgcaggatcctacaccttacacatcataaagggagatgatgggactagaggagtaactggacgtttcaccttcaccttacacctggagactcctaagccctccatctccagcagcaacttaaatcccagggagaccatggaggctgtgagcttaacctgtgaccctgagactccagacgcaagctacctgtggtggatgaatggtcagagcctccctatgactcacagcttgaagctgtccgaaaccaacaggaccctctttctattgggtgtcacaaagtatactgcaggaccctatgaatgtgaaatacggaacccagtgagtgccagccgcagtgacccagtcaccctgaatctcctccatcattccttgcactctgctctatctttagaggtcactggttcaacgaagctgcccaagccctacatcaccatcaacaacttaaaccccagggagaataaggatgtcttaaacttcacctgtgaacctaagagtgagaactacacctacatttggtggctaaatggtcagagcctcccggtcagtcccagggtaaagcgacccattgaaaacaggatcctcattctacccagtgtcacgagaaatgaaacaggaccctatcaatgtgaaatacgggaccgatatggtggcatccgcagtgacccagtcaccctgaatgtcctctatggtccagacctccccagaatttacccttcattcacctattaccgttcaggagaagtcctctacttgtcctgttctgcggactctaacccaccggcacagtattcttggacaattaatgaaaagtttcagctaccaggacaaaagctctttatccgccatattactacaaagcatagcgggctctatgtttgctctgttcgtaactcagccactggcaaggaaagctccaaatccatgacagtcgaagtctctgggccgtacaagcccatggcccaaatcttcagctgcagagctgagacagaacatgggatacctggcatcccttaccttcttccagtccactgcaatgtctactggcatggcccatttacccctgaggacacccatctgctgacccatagtttctaa

SEQ ID NO: 150490 - DNA, 1197 bp, Homo sapiens
atggggcccctctcagcccctccctgcacacagcacatcacctggaaggggctcctgctcacagcatcacttttaaacttctggaacctgcctatcactgctcaagtcacgattgaagccctgccacccaaagtttccgaggggaaggatgttcttctacttgtccacaatttgcctcagaatcttgctggctacatctggtacaaaggacaactgatggacctctaccattacattacatcatatgtagtagacggtcaaataaatatatatgggcctgcatacactggacgagaaacagtatattccaatgcatccctgctgatccagaatgtcacccgggaagacgcaggatcctacaccttacacatcataaagcgaggtgataggactagaggagtaactggatatttcaccttcaacttataccacacaagctacctgtggtggatgaatggtcagagcctccctatgactcacaggttgcagctgtccaaaaccaacaggaccctctttatatttggtgtcacaaagtatattgcaggaccctatgaatgtgaaatacggaacccagtgagtgccagccacagtgacccagtcaccctgaatctcctcctgaagctgcccaagccctacatcaccatcaacaactcaaaacccagggagaataaggatgtcttagccttcacctgtgaacctaagagtgagaactacacctacatttggtggctaaatggtcagagcctcccggtcagtcccagggtaaagcgacccattgaaaacaggatcctcattctacccagtgtcacgagaaatgaaacaggaccctatgaatgtgaaatacgggaccgagatggtggcatgcgcagtgacccagtcaccctgaatgtcctctatggtccagacctccccagcatttacccttcattcacctattaccgttcaggagaaaacctctacttgtcctgcttcgcggaatctaacccaccggcagagtatttttggacaattaatgggaagtttcagcaatcaggacaaaagctctctatcccccaaattactacaaagcatagagggctctatacttgctctgttcgtaactcagctactggcaaggaaagctccaaatccatgacagtcgaagtctctgaggacccttatgatgacactgggagccacacagataagccagaataa

SEQ ID NO: 150491 - DNA, 1108 bp, Homo sapiens
gggcactcagagagcaaaagcaaatgtttcaatttttgtttacaaaagtatactttaccaattgctgaagaaaaaaattcataaatctggagggataaaacattcaaaaaatcagcacatttttccaataaaaaattatgaaaacattatccttttgttatttagtccaatgaaatggagttcttttcttctttgtcttgaatttcatgaaggtatcagcctgttcatcaaaattttgaaagttcttagtccagtggtatgatcttgaagttatcaggaacttgtattcaagagtccttttcatagtcttttccataaatctcctgccagtcttcctgaaatacaaaaatgacatcagggctgctacttggattattgaaagcaaaaagttcctaatcctggaggagcaatgactctgattgtcaaggatgtggagctttcctcgccagtggctgagttacgagcagagcaagcatagagcccattatgctttggagtaatctgagggataaagagcttttgtcctgatagctgaaacttcccattaattgtccaagaatactgtgctggtgggttagagtttgcgaagcaggacaagtcgaggttctctcctgaatagtaagaggtgactgaagggaaaattctggggaggtctggaccatggaggagattcagggtgactgggtcactgcggctggcactccctgagttccatatttcacattcatagggtcctgcagtatactttgtgacaccaaatagaaagagggtcctgttggtttcagacagctgcatcctatgagtcatagggaggctctgaccattcatccaccacaggtagcttgcgtccggagtctcaggattacaggttaagatcacagtctccatggcctccctggggtttaagttgctgctggagatggagggcttgggagtctccactgtgagcaggagccccttccatttgatgtgctctgtgcagggaggggctgagaggggccccatgatctctgctgcgtgcatgttctcctctgtggagatgagcctaggatccagaagcttccagagcacggctggtcagctgtgctgtccttcctcctgcaaaaaa

SEQ ID NO: 150492 - DNA, 1679 bp, Homo sapiens
gctgacagccgtactcaggaagcttctggatcctaggcttatctccacagaggagaacacacaagcagcagagaccatggggcccctctcagcccctccctgcacacacctcatcacttggaagggggtcctgctcacagcatcacttttaaacttctggaatccgcccacaactgcccaagtcacgattaaaagcccagccacccaaagtttctgaggggaaggatgttcttctacttatccacaatttgccccagaatcttgctggctacatttggtacaaagggcaaatgacatacgtctaccattacattacatcatatgtagtagacggtcaaagaattatatatgggcctgcatacagtggaagagaaagagtatattccaatgcatccctgctgatccagaatgtcacgcaggaggatgcaggatcctacaccttacacatcataaagcgacgcgatgggactggaggagtaactggacatttcaccttcaccttacacctggagactcccaagccctccatctccagcagcaacttaaatcccagggaggccatggaggctgtgatcttaacctgtgatcctgcgactccagccgcaagctaccagtggtggatgaatggtcagagcctccctatgactcacaggttgcagctgtccaaaaccaacaggaccctctttatatttggtgtcacaaagtatattgcaggaccctatgaatgtgaaatacggaacccagtgagtgccagccgcagtgacccagtcaccctgaatctcctccatggtccagacctccccagcatttacccttcattcacctattaccgttcaggagaaaacctctacttgtcctgcttcgccgagtctaacccacgggcacaatattcttggacaattaatgggaagtttcagctatcaggacaaaagctctctatcccccaaataactacaaagcatagtgggctctatgcttgctctgttcgtaactcagccactggcaaggaaagctccaaatccatcacagtcaaagtctctgactggatattaccctgaattctactagttcctccaattccattttctcccatggaatcacgaagagcaagacccactctgttccagaagccctataagctggaggtggacaactcgatgtaaatttcatgggaaaacccttgtacctgacatgtgagccactcagaactcaccaaaatgttcgacaccataacaacagctactcaaactgtaaaccaggataagaagttgatgacttcacactgtggacagtttttccaaagatgtcagaacaagactccccatcatgataaggctcccacccctcttaactgtccttgctcatgcctgcctctttcacttggcaggataatgcagtcattagaatttcacatgtagtagcttctgagggtaacaacagagtgtcagatatgtcatctcaacctcaaacttttacgtaacatctcaggggaaatgtggctctctccatcttgcatacagggctcccaatagaaatgaacacagagatattgcctgtgtgtttgcagagaagatggtttctataaagagtaggaaagctgaaattatagtagagtctcctttaaatgcacattgtgtggatggctctcaccatttcctaagagatacagtgtaaaacgt

SEQ ID NO: 150493 - DNA, 2261 bp, Homo sapiens
atggccatactgcccaaggtaatttacagattcaatgccatacccatcaagctaccaatgactttcttcacagaattggaaagaactactttaaagttcatatggaaccaaaaaagagcctgcatcgccaagtcaatcctaagccaaaagaacaaagctggaggcatcacactacctgacttcaaactatactacaaggctacagtaaccaaaacagcatggtactggtaccaaaacagagatatagatcaatggaatagaacagacccctcagaaataacacctcatatctacaactatctgatctttgacaaacctgagaaaaacaagcaatggggaaaggattccctatttaataaatggtgctgggaaaactggctagccatatgtagaaagctgaaactggatcccttccttacaccttatacaaaaatcaattcaagatggattaaagacttaaatgttagacctaaaaccataaaaaccctagaagaaaacctaggcattaccattcaggacataggcatgggcaaggacttcatgtctaaaacaccaaaagcaatggcaacaaaagccaaaattgacaaatgggatctaattaaactaaagagcttctgcacagcaaaagaaactaccatcagagtgaacaggcaacctacaaaatgggagaaaattttcacaacctactcatctgacaaagggctaatatccagaatctacaatgaactcaaacaaatttacaagaaaaaaacaaacaaccccatcaaaaagctcatctccacagaggagaacacacagacagcagagaccatggggctcctctcagcccctccctgcacacagcgcatcacctggaaggggctcctgctcacagcatcacttttaaacttctggaacccacccacgactgcccaagtcacgattgaagcccagccaaccaaagtttctgaggggaaggatgttcttctacttgtccacaatttgccccagaatcttactggctacatctggtacaaagggcaaatcagggacctctaccattacattacatcatatgtagtagacggtcaaataattatatatgggcctgcatacagtggacgagaaacaatatattccaatgcatccctgctgatccagaatgtcacccaggaagacgcaggatcctacaccttacacatcataatgggaggtgatgagaatagaggagtaactggacatttcaccttcaccttatacctggagactcccaagccctccatctccagcagcaacttaaaccccagggaggccatggaaactgtgatcttaacctgtgatcctgagactccggacacaagctaccagtggtggatgaatggtcagagcctccctatgactcataggtttcagctgtccgaaaccaacaggaccctctttctatttggtgtcacaaagtatactgcaggaccctatgaatgtgaaatacggaactcagggagtgccagccgcagtgacccagtcaccctgaatctcctccatggtccagacctccccagaattcacccttcatacaccaattaccgttcaggagataacctctacttgtcttgcttcgcgaactctaacccaccggcacagtattcttggacaattaatgggaagtttcagcaatcaggacaaaatctgtttatcccccaaattactacaaagcatagcgggctctatgtttgctctgttcgtaactcagccactgggcaggaaagctccacatcgttgacagtcaaagtctctgcttctacaagaataggacttcttcctctccttaatccaacatagcagctgtgatgtcatttctgtatttcaggaagactggcaggagatttatggaaaggtctcttacaaggactcttgaatacaagctcctgataacttcaagatcataccactggactaagaactttcaaaattttaatgaacaggctgataccttcatgaaattcaagacaaagaagaaaaatactcaatgttattggactaaataatcaaaaggataatgatttcataattttctatttgaaaatgtgctgattcttggaatgtttcattctccagatttatgaacattttttcttgagcaattggtaaagtatacttttgtaaacaaaaattgaaacatttccttttgctctctatctgagtgccccagaattgggaatctattcatgagtattcatatgtttatggtaataaagctatttgcacaagttcagtaaaaaaaa

SEQ ID NO: 150494 - DNA, 2173 bp, Homo sapiens
atgacccagttccctatggataaacgtcagggtcgttcccgatctgtggccatcaccaacactgccgtgactagtctagaatgggtgccatttcatgcatttgcaattcccagaagtacactggttagtcagcagaggctcagcacagaaagaggaaggacagcacagctgacagccgtgctcagagagtttctggatcctaggcttatctccacagaggagaacacacaagcagcagagaccatgggaaccctctcagcccctccctgcacacagcgcatcaaatggaaggggctcctgctcacagcatcacttttaaacttctggaacctgcccaccactgcccaagtcacgattgaagccgagccaaccaaagtttccgaggggaaggatgttcttctacttgtccacaatttgccccagaatcttaccggctacatctggtacaaagggcaaatgagggacctctaccattacattacatcatatgtagtagacggtgaaataattatatatgggcctgcatatagtggacgagaaacagcatattccaatgcatccctgctgatccagaatgtcacccgggaggacgcaggatcctacaccttacacatcataaaagcgaggtgataggactagaggagtaactggatatttcaccttcaacttatacctggagactcccaagccctccatctccagcagcaacttataccccagggaggacatggaggctgtgagcttaacctgtgatcctgagactccggacgcaagctacctgtggtggatgaatggtcagagcctccctatgactcacagcttgcagttgtccaaaaacaaaaggaccctctttctattgggtgtcacaaagtatactgcaggaccctatgaatgtgaaatacggaacccagtgagtgccagccgcagtgacccagtcaccctgaatctcctcccgaagctgcccaagccctacatcaccatcaacaacttaaaccccagggagaataaggatgtcttaaacttcacctgtgaacctaagagtgagaactacacctacatttggtggctaaatggtcagagcctcccggtcagtcccagggtaaagcgacccattgaaaacaggatcctcattctacccagtgtcacgagaaatgaaacaggaccctatcaatgtgaaatacgggaccgatatggtggcatccgcagtgacccagtcaccctgaatgtcctctatggtccagacctccccagaatttacccttcattcacctattaccgttcaggagaagtcctctacttgtcctgcttctgcggactctaacccaccggcacagtattcttggacaattaatgaaaagtttcagctaccaggacaaaagctctttatccgccatattactacaaagcatagcgggctctatgtttgctctgttcgtaactcagccactggcaaggaaagctccaaatccatgacagtcgaagtctctgactggacagttccctgaattctactagtacctccaattccattttctcccatggaatcactaagagcaagacccactctgttccagaagccctataagctggaggtggacaactcaatgtaaatttcatgggaaaacccttgtacgtgaagcatgagccactcagaactcaccaaaatattcgacaccataacaacagatgctcaaactgtaaaccaggacaacaagtggatgacttcacactgtggacagtttttcccaagatgtcagaacacgactccccatcatgatgaggctctcccccctcttaactgtccttgctcatgcctgcctctttcacttggcaggataatgcagtcattagaatttcacatgtagtagcttctgagagtaacaacagagtgtcagatatgtcatctcaacctcaaacttttacataacatctcagggggaaatgtggctctctccaccttgcatacagggctcccaatagaaatgaacacagagatattgcctgtgtgtttgcagagaagatggtttgtatgaagacgtaggaaagctgaaattataatagagtcccctttaaatccacattgtgtggatggctcttgccgtttcctaagagatacattgtaaaacgtgacagtaagacattctagcagaataaaacatgtacctcctttgct

SEQ ID NO: 150495 - DNA, 14291 bp, Homo sapiens
gggaaggacagcacagctgacagccgtgctctggaagcttctggatcctaggctcatctccacagaggagaacatgcacgcagcagagatcatggggcccctctcagcccctccctgcacagagcacatcaaatggaaggggctcctgctcacaggtgaggagagaacttcctgggagaggacaggaggaggaagcagagttcacttgatggggtctcctggggagactcctggggtcctaaaaaataaaaaagccagcacttagggaggctgaggtgggtggatcacgagatcaggagttcaagatcagtctggccaacacagtgtagacgtgtctctaccaaaaaatacaaaaaattaaccaagtatggtggtgtgctcctgtaatcccagctttcgggaggctgaggcaggataatcacatgaacccaggaggcagaagttgcagctagccgagacagcaccactgcacgccagcctgggtgacagtacgagactccatttcaaaaaaaaaaaaaaaaaagaataaaaagaagaaagaaaaaaagggaaagaaggctctgttggagcctggataggggaaaatacaccagagagggacaggggtcaaaataggaaagtcacattgaaccggaattggtaagaggtagtaaaatcttaagtgttctgttttcctgattaatcatcaggggccaccacattttgaaaaatgataataatgactatatcagatgacacctcaaataaaaatgtaaccagggcatgaaacactttcctcagcaaaaaacctcaacaattgggggaaaaaaaacacccagggcatggagggccctgagaactctcacatctacaggagtctgcatcctgttccaggcactggggtgcaaccaacatgacaaaagtctctgtcctcacagagctcacactctcatggggaggaagacagacatgcaaagagatatagaatgtgaggtcaggtgttgacaagaaccctagagggagcagagcagggaaaggtcagaaagggaagacccagggtctctgaagcaggcatcaggaaagaagtctaaggatgccctgatgtgagcaggacctgagggcagtgtggagggggccgtgcggacccctggggaagaggattgcaaacagaaaaatgccaaggtcaggagtgttgaaggaatgggggtcatgctgctgaccttgacctagtaggacagtaggacacacacacatacacacacacaaacacacatgcccttttgtgtgtgtgtgtttgtatgtgtgtgtgtgcatatcttcaaggctgatgattgaagagaccttctcaggacacagggccccatcttttcaccccaatacataggtccaaatattaactgatgctgtctctacctcctagcatcacttttaaacttctggaacctgcccaccactgcccaagtaataattgaagccaagccacccaaagtttccgaggggaaggatgttcttctacttgtccacaatttgccccagaatcttactggctacatctggtacaaagggcaaatgacggacctctaccattacattacatcatatgtagtacacggtcaaattatatatgggcctgcctacagtggacgagaaacagtatattccaatgcatccctgctgatccagaatgtcacacaggaggatgcaggatcctacaccttacacatcataaagcgaggcgatgggactggaggagtaactggatatttcactgtcaccttatactgtgagtgattccgcatgatccctgggtgttggggggcaggggtcatttctacttcacacacacagaattgtcaggcctggactctgcctgtgtcactctctgcattatgtcccatgctggggtttgggcatttagtgcaggacacacacagaggagacacatttcaacagatcagaattcctttcccgcatccagaccctgcagacactcgctgcagaggaaggacagtctgatggggggactcagcaggaggagatcagtctcagccaagcacctcatgccctcttcataaatttgaccctgagaaagaccctggaaaactgagtagggcttggcctgaggggcccactgagataccctcagagaacctcagctctggaagcctcaatcccagacccctgtccctaaatccttgctccaggtaaagctgaggagcctgtgccaggactgggttgtggcttctttggcagggcttactgggaccaaggatttaccagctgtctgaggactgtgtctcctggagctgttcaccagccagggctcagtcctcagagcctcatctgggcaaggacagagctttcttcacctgacactcagagtggagaggacagaaagacaagctttgtaggccatcagccaactgccttaggaggcctaggacactccatagaaagtctaatatccccagaagcagaaacagaagagagaagatgcaccaggtagccgtttgtccacagggatctgacgcaaaggtgctttctcatggaagcaaattaataataaatgctgtttgtgtgaacacctccactgtgccaagcattaagtcagttgactgtgaatactttaacatttattcacagatagcatgaaaagccacagtccatttgccatttagctcatttgattgagagaaaactgaggcacaggaaggcacagtcactgagccacagtcacacaaacacaaaggggagatcggggtcacatgaggtctgtctgcagccacaggcccatcctctcctctaccagaagtgagggcttactgggttccaaggaccccatagtcatttattgactcaaatcctctcttcttaggcatccaaacctcagaggagtgagagcaaatggtcagctgattagtctgtactccagaactaaatcactggcttcaaccgccagagtcagtgcaaaaaaaatgtccaggtctccccctcagatcttaacctccatcactgaatgtgaaatcctgtgtttcccaagtgtccatgtcaccgtcatgagaggatcaaggagaggaccttgttttctttccccactcacaccctgcctcagcacaggcccagtgagagagacacactcaggagctctcacataacaaatgaaggaatggaatgaagaaatggatgatccaaaacctctttagagactggatcttggaatcagaatcctaggaggttctagccacacctgtcccttgtccttcagaggctgacacccatgtttcatccccccactacctcttgaccctaaagccaccccacctcatgcaactctgaagttctttggccaccggagggttctcagggctctttggtcctggactgtggagctgggggcacctggtccctggggtttttgaagtcagtgtctccctcactgctcactgccatggtgtctctgcctctctctgcttctctgtgtccctcatcttcctcccacttcattctgactggcaagccctgtcctgcacagcttcttcctccaaccctaggccttccccagacactccctctaactaggctggctgttctgttcccttcccgctaacactgtggcctggcccacctcccaggaaataggaaaggtgcagaaatcacctggagttgccactcctgccaggcttcctctcgagccaatgtccccaggtcactaagagaaaccttccactgtattcccatccagggctctttccctttgtgaggctgacctgtggacaagaccatgggacagggataggcagttcccccatccacccttgtaattgccagacaagttcctctggcctcctgcacacaaaaaaatataaaataaaataaaatttattgaaatggtggtttgcagtaaagaaagattttaagaactccaagtctgccaaacaggagggtggaggtttattattactcaaatcagcctccccagtggatcaggtgttagagattttcaaggatagtttcaggggcacaggactaaaaaatgagtactgctgattggtgatggaatcatgcgggcggagggaaatgatctgttagtgcttgaatctgcctctaggtaggggccacatgactggctgagccattaggcataggtatggatgaggtcagccggttgtcagaaggcaaaagaatgagaaacatttcaaaagaccaatctcacgttctacaatagtgatgttatctataggagcaattataggagcaattaagcccataggctcatttcacccatttcactagtgactccatcctcaacctgctatggagctcacattctccggtcactttctagagacttctggcttcctgtcaggcataaaacaagcttgaaatttgtcactcggttctaacactaagtaaaaagctgaacaaactcaaaagtcaacaactcattaaaatccttcagagatggctgggcacagtggctcacgcctataatcccagcactttgggaggctgaggcgggcacaaggtcaggagatagagaccatcctggctaacatggtgaaaccccgtctctactaaaaatacaaaaaattagctgggcatggtggtggtcacctgtagtcccagctacttgggaggccgaggcaggagaatggcatgaacccaggaggtggagcttgcagtgagctgagatcatgccactgcagctggggtgacagagcgagactctgtctcagaaaaaaaaatgctgttagagaaatgaagaatgcttttgatgcttactgatagaccgcacagagctgaggaaagaatccctagcttgagaatgtgtcaatagaaacttccaaaactgaaacaggaaagctcaaaaagagtggggaaaaaaagcggaacaacatattcaacttcatatttaatattttgttttgacaatagcaatttttaaattttgtagttgtgggacaactacaaaggctgtcacatacacttaacgggaatacttgtggtttggggaccagatggaggtggccaggtaggtcctatctcatggttttactgcctgtgccacatacaactatttcctcatgatgatgccgttttcataagttggagttcttcgtgtggggagacacaagagccattggcatctcacttagactcttcctaattcacacaaacttaaattttagtggtgtttcctgaccttaagagaaaatgaagaagacatttcacatacctgttttggggtcctccccatgttttgtaactctgcacagaaattagaagcaggttctttctatatttactaacataacacacatcacttcttttaatttggcatccttcctccttttatgtaattgacacactaaccagttcggtccttttaacaggactctctctacttaaggagttgctaatttcaaatcacctttggcatctttctttgagcataatgtgatcctgctggaattcatggcacacctaaaccttattttggtctcaagagaaatatgactaccagcaattgatcttagatgtttggaccatcagtaaaaatttccacttatgaaaacattttaaggtttcctccaaattttttttgttactagagtcagaatataacatgaggtctaaactcctgacaactttttatgggaaaattacagtattacaaattgagcatcggaaatccagaaatccacaatctgaaatgctcaaaactcaacacttctgaccactgatgtgatgctaaaaagaagtgctcactcgcgcattgtggattttaaatttttcagatttgggatgctaaaccagtacatatactgcaaatattccaaaataaaaaaaattagaaatccaaaacactttgttttaagctttctgcataaggagcactgtatctgcatgaagtataggcacgaggctgcacaggagatctctagaacctcctcatcctgcataacagaaaccgcacacccacggaacaacgccctatacccgtgatttcagttgctgcaaactactattctaatctctgattccctctggaatccactgatatgaggtacatagagtagtcaaactcagaatcagagagtagaatgtctaataagagaaagtatctgcaagacttcttcccaaatattggtctaatatccaccaaacacataaggtccctgagggccagacttctgtcatctgttcatgtttgccctttccaccagtcagttctgcatttgcaaacatcaacatgtatttctagaaagatccatatggtcctcaactgccctctacagggggaagggagcatcatggacccagaacagggatcatggtcttgggccaaacctatcagctcttgcctgtccctttcactctttgtaggtcattccttggactctgctctatctttagagtcattggctcaactcagtcactatgagacacctggaaaactgccccaccttgtggctccactgcctgatgactgaactgacctccaggcctgactctggtctcccctgtgttatttctgctgaagtacccagttccaggccaggctttctaatacccaaagggcttaaggacaatgggaagttccatcatccatctctaggatgtccttggcaagggaagctgatgagaaaacatacctcagggggcaaagtgagactgaaactaacaagattccagcactgcatgccccaagtaaggaccaaaaggtgggccaggcaggcagttggagacggagggactcagagaggcaccaggggctgtgactgctggtcctgtgtctttccatgacccaatgctgctgctcaattcacatttgagaaagtccatgcttctcctacataaagcaggcagcctcacaatcactgagccctcaggttgccatgcatctgtcttgtaacacacacacctgccatgggcttttaaggacttgggtgggctgagaggttggaaatgccaactctgattgaaaaatgcctttggaggaatcaaaggtgccacacagggcaatcttctctctgttttctgcacagcggagactcccaagccctccatctccagcagcaacttaaaccccagggaggtcatggaggctgtgcgcttaatctgtgatcctgagactccggatgcaagctacctgtggttgctgaatggtcagaacctccctatgactcacaggttgcagctgtccaaaaccaacaggaccctctatctatttggtgtcacaaagtatattgcaggaccctatgaatgtgaaatacggaacccagtgagtgccagccgcagtgacccagtcaccctgaatctcctccgtgagtatcttctgttcctctgtgagccaggctgccatcccaaatacaagtggccagaggccaggcctctcagtccctctcaggtccaagtacagagacctttatccctgaacatcaaagctggccatgactttctgctccaggcaaaccagagtaggcctaggcttgatcaacaataagagagaagaggcttctcctgtcatgggagactcaggttccacagcttgtgatggaagaaacaggtgaatgtctcaggctccagatcagtgaacacagcggggatttggctgggacttcagtgttgcaacttggctcacagggtcactgtgactgtgtcccttccacagaccaggattttcccttccctctgacaatatcgcctgtgacattattctctttgctccgcatggcctggatgctcccaccgtttcttcctcatacacctattaccatacaggggaagtccccaagctctcctgcctcacagactctcacccactggcagagcattcttggctgattgatgggaagttccagcaatcagcacaagtgttctttataccccaaatcactaaaacatatagaggggtctatgtctgtttcatccataactcagccactggtggaacaaatctcataatcaagaggatcatagtccctggtaagtggatccctggagcattggcaccatgttttccagtaaagtctatctagctgtcagggaagagccacctgctctctgcaaagggagagggaaaatcaaaacccaggaaagggaatatgtttctgctccaaaaccaccagcttctgcctgtccccttcactctttctagatcattctttagacaatacactaacaatgaacaatctgaaaggaagttaaggaaagaatttcaattcacattaacatcaaaaggaataaaatattttggaataagtttaaccaaaaaggtcaaatgattataccctgaaaactacaaaacattgctgaaagaaattaaagacgatatcaatatatggaaacacatttcattttcatggattggaagaagcaatattgttagaaaggcaatactacccaattgagttgcagattcaatgcaacccctaccagaatcccagtaacattttttgcagaatttagaaaactctgtcctaaatctgagctgacaggctcttcttaatgactgccacaacacaaacactgagaaaaagaagcaaccagaaaaggtggaaagttctgatgacatagaaaatagcaatcagcctttctcacatcccaaagccttcaaaaatatacgagtgcagcatggccactatggaattcaccgaaaactaatcaccaagctagaaacatggtgagagaaaaaaaagggcaagaatatatctggcttatcacctcccacttttgcctactaatctgatgctgaaaagaaatgctcactgaagcattttacattttgaatctttcagatttgggatgctaaaccagtaagtatatgacaaatatttgagaatcaaaaaatatcagaaatccaaaacactttttgtcctaaaacttatgcataagagataatctgtgtgaactataggcatcaagctctacagcagatctctagaacctctccaacttgtataactgaaactgcacacccatgaacaacttctgattctccccactcccagctcctggcttccagcagcctcgtctcatattcaatctggaatcaacttacatgaggtccctagattagtggaacccatggaatcagagagtagaatgtccaatgaaagaaaatatttgcaaaacttctctccaaatttgtctcatatccatcaaacacacatggtccatgaggactagatttccagcagttcattcccaccctttccaccactcagttctgcatttgcaaatgtccacatgtatttctagaaagatccacatggtcctcacctgccctctgcagaaggagaggaaacttaaagaacccaggacagggaacatgcttctgctccaaagccaccagctcttgcctgtccccttcactctttctagatcattccttgcactctgctctatctttagaggtcactggttcaagtaagtcatcatgaaacacctgcaaaaaaactgccccacctggtgcctctagtgcctgatgactgaactgacctacaggcttgactctggtcttccctgtgttatttctgctgaaacatccagtcccaggccaggctgctcagtatctgcagggtttcaggacaatgggaagtcccattattactcatctctagaatgtccttggaaatggaagctgcagagaaatcacatctaggggggcaaagtaggatgtaatttggaaggggcccagcagttgcacattccaggtaaggaacccagggtgagccagccagtcaactgattatggagggactgggaggggtaccaggggctgtgactcccactgacgtgtctgtccatgacccaacactgctgctcaattgacacttgagaaagtctgtgcttccctaagacagagcaggaggcctcacagtctttgagcccttagatcatcatacatctgtcttgtgacacatgcaccagctactggctttcaaggactcatgtgggttgacaggtgggagatgccaactctgaatgaaggatgcctgtggaggaatcaaaggtgccacacaggacaatcttctgttatccacacagcgaagctgcccatgccttacatcaccatcaacaacttaaaccccagggagaagaaggatgtgttagccttcacctgtgaacctaagagtcggaactacacctacatttggtggctaaatggtcagagcctcccggtcagtccgagggtaaagcgacccattgaaaacaggatactcattctacccagtgtcacgagaaatgaaacaggaccctatcaatgtgaaatacgggaccgatatggtggcatccgcagtaacccagtcaccctgaatgtcctctgtgagtatcctttgttcctctgtgggccaggacaccagcttaactccaaacgaccagaggccaggcctctcagtctctctccggtccaagtatagacaactttacttctggacatcagacctggccatgactccctgccctgggaaatcctgggtaggcacagccttaaccaagaatataaggggaggggcgctcttgtcatgggacactaggggcccacagcttgtaatgagagaaacaggggaatacctcaggcttgggcttagtaaacatagatgggatttggctgtcacttgaggttgtgtcttggttcagagggtcactgtgtccctttaagagaccaggagcatccccttcccttggatgacatcacctgtggctttattctctttcctccagatggtccagacctccccagaatttacccttcattcacctattaccgttcaggagaaaacctcgacttgtcctgctttgcggactctaacccaccggcagagtattcttggacaattaatgggaagtttcagctatcaggacaaaagctctttatcccccaaattactacaaatcatagcgggctctatgcttgctctgttcgtaactcagccactggcaaggaaatctccaaatccatgatagtcaaagtctctggtaagtgggatcccagcatccttggcagtaggggtttatgtggagtctatcttggcttttcagagagagtcaggaaaacatttttattcccaacctgtgtcccatgggcacaagcaaatcccaaattctcctcctgaaccctcccaatatgtctctacagactctcttctccttgtgactctgttctcttatggctgaccttgtgcctggcctgaaaaaggtagggagggggctttatcagccctgagccctatgtggtagaagaggcttcagagagggacaagaaggagagtcctcaagatcaagttgcttctcgctgtcaccgacacatgccccttttgccacgtctttgttttcttgtacctattccatggagctacaagggaacatctggagggtctgaaaacaagcttcacactttttcccccaaatgaggagggagggaaggccctttcggtgagggaggagcagctcagactctgctttcctgctctgctccgggctcctctggtgactggcctggccctgcctgactccacctggggtggaaccaacatgtgtggagaaagggccctggtggcctgtcctgaagttggctaaatcgagctgccagttgaagccaagcctcccccgggccaggctgcagggaaataagaagagagggagcttcagggctgactcctgagctgcatcctggctctgaagtcaccagctgtatgaggctttgggcacagcacgtgggacacagcacggaggacagtgactgatgcagagctagagaaatagggagattcacccctggggctctgcatggcaggaaaggggcagtgccaaaaagtgtgtaattatagagagggcaagaccacgagacactttatatatatctaatattagacttaccattaactatttctatgtgtgcaatttagtgttgtgtaaccatcacactatccatttccagaactttttcctcttaccatattaaacctctgtacccaataaacagtaactctcactccttcttcccctaacccttagcacccatcattctactttctgtctctatgtaactggctattctaactatcttttataaatggaattatataataattatccttttgtgtctggcttatttcagttggcataatatcttcaaggttcatccattttgcacgatgtattgtaattttcttccttgttaaggttgaataacatttcaatgtatagatacatctcatttgcctacccacttatctttcaatggacttttcagttgtttccatttttggctagtgtgagtaatgcttctctgtacatcagtgtacaaatatttcttcaaatttctttcaattctatagggagtatgtccagaaggggaattgctggatcaaatggtaatttattgtttaattttttgaaaaacagccacactactttttacattggctataacatttcccattcccatcagcaatgcactagagctccaatttttccatctacttggaaacacctgttgtttagtgttgctgtcattgttgttgtttatcaaagccatcctaaagtgtgtgaggtgttgtaacattgtggttttgatttgcatatctctaagtattcgtgatgctgaggaactttgcatgggctatataaaaggttttgatttttatgaagtctgatttatccattttatttgttgcctatgcttttgttgttacaaccaagaaatcattgtgaaatccactatcatgaagtttttcttctaagagttgtatagtttttactcttacatttagatctttgatctattgtgggttaatttttgtacatggtgttaggtaaaggttccactcttcttgcccttggatatccacctttcccaatatcatttggtgagaacactgtcccttccccattgaacgatcttggcacactcgatgaaaatcatttggccatatatgcaagcatttctttctgggctatgatatttcattaatttctatgtcctcctttatgccagtaccacactgtattgattactggggctttgtagtaaatgctgaaatcaggaagtgtgagtcctccagcttcattcttcctcttcaaagctgtgtgtctatttagagtcatgagatgcaatataaattttaggacagatttttctttttctgcaaaaatgtcactgagattctgataggaattgtattgaatctgcagctcactttgggcagcactgtcctcctaacaatattgagtcttccaattcatgaacacaaaatgtctttcaatttattgatgtcatctttcatttctttcagcaatactttgtagatttcaggtataatcatttcacctctttggttaaacttattcctaaatattttattctttttgatgtgaatataaattgaaattatttttcttaatttcccttcagattgttcatggttagtgtattgaaatacaactgatgtttgaatgttgattttgtattgtgcaacattactgaatttattaattctaataggtttgttccatctttaggattttctacaaataagttcaagttatctataaacagaaataattttactccttccttccaatttgaatgtctttttaaaaattcttccctaatttttctgattagacctttcactactatgttgaataaaagtgtcaatagcaggcatccttgtcttttcctgctcatacagggaaagttttcagtctttctctgttatgtaagatgttagcattgggtttttcacatattgcctttatgttgaggtggttgccttccattcttagaatgtttttattatgaaaaaatactgaatttcatcaaatgcttttattgattcaatcttcttactgattatagttatattcatatttttgtgtgtttctaggagtttgtctatttcatctaggttatccaatttattggcatacaattatttatagtactttcataatcattattttattagaattggtagtaatcgcttcatttttcttttttctttttcttttaagacagagagacaggctctcactctgtaggccaccctaggatggaatacagtggtgtgattatggctcactgcagcctcaacctcctgggctcaagcaattctccttcttcagcctcccaagatgctaggactacaggtgcatgtcaacatgcccagctaattggttttttttttttttgtagagacagcatctccccaggttacctatgctggtccaaacacctggtttcaagaaatccttctgctgtgacctcccaaagtgctaggattaaaacatgacccaccatg

SEQ ID NO: 150496 - DNA, 1461 bp, Homo sapiens
ttttttttttaggatggattttttttattcctgccactaccaaaaactataaatctacacacacactcacacgcacatacatgtcccattttttaagaaaagcttttccctcccctgtgaactacaggaaccccagaatcccagcctcccctcaggctgaagaagacgaatgcctattaacggcacagatctagcatatcaacatactatagaaggctcctgtgttgtctcacaagcttgagagggcagggcaaagaagtggacacttcatgggggacttgctttttgtcttaaatcccaatctactcagtaacacttgcaggtccaggggctgggagaggttctgtgggcacaacgtggttggacgacctggatggtcccagcccactgtggtaagcaggggagtgattgagcggggaccaagttcgcatctctcacaaagtctctgtggggcttggcttctaaacaactcagaaaggcttgagtccagcacagcaagtgagcagtcttcactgagagaggccaggaagggaacactgtgtggggagaacaccagccccagtgacaccatgggaagtgtccagttgagctcaggacacagcttgtactcttggtgtccacaagggagactgtcccattctcatcaccaaagacaaagacttcactttgctgaggatgccaagccagcgaggtaggaaggtagccaggcgcactgcagccaatctgtgatgctggcttggggacagcgggtatcccagagttaaaattctattgtcctcgctgcatgaaagaaacacagagtccttgtgaggaagaggcagccaacacaagtgacctgagcagcatgagctcgggtatgaactcagtacccacctgctgagcaaggtcccaacaacttgatgcaagatgtctttgccttaccactgaacagcttgtgtgcccagagctcaaagacactgaactgtaagacacaatgtcatcatgcttcatacttgcaagaacttgctgacaataagtgtctcattctcatcttagttccccacaattcaacagccacctgaatcggaggcctactagaatacctctttctccccaacccaagtgaggtccagcctactccaggcctccggtttggactccggcggagccagaagcccttcgttgggggcggcacaggggtccttaaaaagccagagggagccggcccagcagcgcccactcaggctggaggccccgaggagaagcgccccatcggaccggtaccgcgcagcctccaactgccgttccatgcaggcgggcgcatttgggggaagattccactcccgggccgccgggggcactagggggggtggggtttccttccgcatctccacggttccaactccaacctagactcaaactggacgccggccggagactcagctccggcagcaaaccccacgtggtgcacctcctcgtgcc

SEQ ID NO: 150497 - DNA, 492 bp, Homo sapiens
ccctcccatcagacctggcgcagcctgttagcagtccatgtggcagaggcgaggagtgccactccagctgcaccgtagctgcactctgtcttggtgtggggttctggcaggtctgggagcttaccgcactggttggcagcagagcagaattggaaacagggcacgtctttctgggatgtaagtcctgatgtttccccattaagaaaaaaggccaggcatcccaacactttggaaggctgaggcggacagatcatgaggtcaggatattgagaccatcctggctaacaggtgaaacccggtctctactaaaaatacgaaaaattagctgggcatggtggccggcacctgtagtcccagctactcaggaggccgaggctggagaatcgcttgaacttgggaggcagaggctgcagtgagccgagttcacgccactgcactgcagcctgggcaacagagtgagactctgtctcaaaaaaaaaaaaaagtcgacgc

SEQ ID NO: 150498 - DNA, 941 bp, Homo sapiens
tgcaaatgtttgctgattcctgcattactgatatcattttcataacagtcttaaaaacttggcatttttaaacttaaatacttttttctttttgtcgctttcttctctaccctatctctgccagcagttctttgtgaattaccattgtgatcttctaaaggcaaaaaaaatggtaggtagtcaatgactgatagctatagacctatgaaactaacatttcctatcttgtctcaatattctgatgtatataatcattttaaaacataataaatttaggccttttttgtttttgtttttaacacaagatatgccactaatgtctgacaagcatttaatctagtggctttcctgcattttccatggatcagatgcattctaatcctctgaaatgattattaaatacagattgccagcctttatataatgcctgctaaatttaccagttgggatctgcacatatattggtaaagagtgcccctagcagtttctgaccttctgtctgctttcagaatccacatgagtcaaattatctccttttatgtataatcttatcaaggactattgaggtggcacaggtggggatggaatcctggatgtgttcagaactcctttcattttactaagcttcctttatactaccagaggaatccacttccagtctcgagtcacttagaagagggggccgggcgtgatggctcatgcctgtaatcccagcactttgagaggtcaggagatcaacaccatcctggccaacatggtgaaaccctgtctctactaaaaatgcaaaaattagctgggtgtggtggcatgcgcctgtaatctcagctatgtggggaggctgaggcaggagaatctcttgaacccaggaggcagaggttgcagtaagccaagatctcaccactgcactccagcctgggtcacacagcaagactccatctcaa

SEQ ID NO: 150499 - DNA, 340 bp, Homo sapiens
ggcacgagcagctacactgggctccttgatcacccagctgtggcagttcttcttgaggacttcctgcccctaggtgggggctgccttcagctccctgctgcgtgtgataacttgggtgtggccctcacagctgtgcagaagcttcccagagggttttggccccaggtaaacagattctgctctgggctcgccttgcctccatcccacagccctgtgtgctgtctgtggcacagcctagagcagcactgcctcgtggccctggcccttatgcggctggagctgatcctgaagtccagtgtcccagcggtcatggctggcatcatcaccatctacaacctgg

SEQ ID NO: 150500 - DNA, 450 bp, Homo sapiens
cggcacgaggctgtctcagtgccgagtgcctcagcagcttctccacatgctcttcagtccccaaagttggagaatcccatcaaggagagtagccctgtaaggaattcgaatttccagcatttttcacctgtgacagagcccagactccatgaacgcacgtgaattccgaaggagagggatggagatggtggattacgtggcctactacatggaaggcatcgagggactcctggtctaccctgacgtgtagcccgggtacctgcgtgcgctgatccctgccgctgcccctcactagctagacacgtgtgaggacatcatcagcgacgctgacgaagattatcatgcctggcttgtcgcactggcacagccccgacttgttcgtctactttgacagtgtcagctcgtacgcgcgcatgcttgaagacatgcagtgcggggcccttgactgct

SEQ ID NO: 150501 - DNA, 428 bp, Homo sapiens
gcttttgaaaactcagaaatgtgaatctgacaaaacccacaccccaaatgaactgaaaaaaacaatcacctgatttgacatcaaacacactaatgtagtctatggaaccagctgcaatgtgggtaccagagggatgccagctgagactcaggatgcgaccttgggagttggacaacaaaaaaagaaagtgacatacacataaatatacgaagagtaactgagctctcttcccacaactatctctagagtgttctacaatcttagctctctcatctatagtactccttgaagcaccattttatttatttatttatttatttatttatttatttatttatttatttatttatttttgagacggagtctcctctgtcgcccaggctggagtgccgcagtgggatctcggctcactgcaacctccgcctccc

SEQ ID NO: 150502 - DNA, 1281 bp, Homo sapiens
aaaagaaaaataaaagggaagtaatttataataaaatttatttcagtatttaatgatgtggcacaactatgccataaagcataagatcaagtgtttgcatctatctgtaaatagaatcatcgtgtaatttagaaagtatgtctgctgcctatacagttgtgtgcattgttgactcatgttgtgttgccattagtggtgtaatttcttcctgaaattgcagacaactcttaggaaagctctaaacaaagaattaatcaatactttctgagttgggaaaagattttttaaagtcacttagtagtccaagcactcatcttattgaatcaagatatattccctgtttatcataatttcaaagatccttacttctgttgtgtgaatattattgcacatgtgatcagtagagtgggaagtgttactgggactcctaattttttcttccaggtattgcttatggctttcagctgtgtgatatctgaagcgatactctttctcaattattcaaatgattggccttcatctttttttaaatcgcagcctgcagtaaccaatagaataccagtagtaaccagtagacacattcttcccatccgtgaaccgtgagaagctatatttaacgtctattcaaatgcctaactttaatgggcacaattttattgttctgtctagtacagtcgtgactagctacagttggcgattgagcagttgaaatgtacctggtggtctgtggcacagttgccatttcccgggtaaggatgtctgcagtctgtgtactgaggacctggagccaggaatgctgggccagctgatttggtttcactgttttccaaccatgtagtaatgttcatgttttgaaggcccaaattatgtgtgtttctttggattatccttcattccaagtatagtcatcccacataactttgtgaaaacaattaatgctgtatgtggacagcctggttcagttcagattcccagacactgaagaagggattagaaaagtaactgttaatgttatgtaaaagaaggagatacagtgtctcagtttgataacatcggtaaagttcaaagtgataaagcttctgttacccatcgctagtccttatgatggagtcattgaaaactctagcatagtctagatgatattgcctatgtggggaagccattagtaaacatagaaacagaagctttaaagggtactgttaatttgttttaccaaattgattattgtccaccttttgtcattgggtctcaattaaaagtgacctttaaaaaaaaaaaaag

SEQ ID NO: 150503 - DNA, 1233 bp, Homo sapiens
cccacgcgtccgcccacgcgtccggcctaaaacccaaagaaaagcaccacaaaaacaagaccccgttcagagatgtgtcatataggtattgtccgtgtcgaagtcagaaatacatttgtggcatgtggaataggctttatggacacacagatatcaagtaacctgatctcttgctgagtttaaggcctgtcacgtaaatgcacactgcttacgttttctttttatttccacttttgaattggggataaaaggggaaactggtgaaggaaagacatgttcctagagagctgaacacctgtaatattgactaatagaagggaagagagtaggtaggaagtaagtgcaataggaaactggtaaacagagaagagaaaaaccgtgttttgagatggattggaggcattttttgtccacacacttgctttggggatttttattaggtagacggtaattagaggtgtcagtcatatgaaagtaaatcactagtctttcgtattactgttttctcagtggtccttatcagttttttttgttgctctgtaatcattcatatggtaagacttaacttttagtcatgtaaatttgtttagggacaatttaaactattttgtcaaattagtcgttttattccaagttgtacgtcttatgcatttatttagtatagtgaaagccttatatacacatttgaatatgaattagtctctgggatatttgggattattttttagtagtacttttttaggagtgtggggttttttcttttccttttctgtttttgagacagtgtctggttctgtcaccccaggctggagttcggtggccccagtcttggctcactgcaacctcaagactccccgggctcaagccgtccttcccacctcaccctcctgagtagctgggacctaacaggcacttgcccaccgtgtctggctaattttagaatattttttgtagagacagggtttcatgtttccccaggctggtcttgaactcctaaggctcaagtgatccacccactccccaaagtgttggggattgtagggcagggagccaccacaccctggcagttttttccttcttgttttgagatggggccttgctccatcacccgagctggagtgtaggtagcatgatcatagctcgctgcagccttgaaatcctgggctcaagcgatccccctgcctcagccttccaagtagtggggactattggtccatgccaccatgcttagca

SEQ ID NO: 150504 - DNA, 298 bp, Homo sapiens
gtgtgttccagagaacaagccttcagacatttgctatattgacgctgagctgtcaggggactcaggcttatgaggagagatctattcgatcttttgctaatgatgatcgccatgttatggtgaaacattcaacaatctatccatctccggaggaacttgaagctgttcagaatatggtatctactgttgaatgtgctcttaaacatgtctcagattggttggatgaaacaaataaaggcacaaaaacagagggtgagacagaagtgaagaaagatgaggccggagaaaactattccaa

SEQ ID NO: 150505 - DNA, 442 bp, Homo sapiens
accgggcgcgcgcagagcgcggcggcgcgggtgtgttccagagaattagcctttttacatttgctatattgacgctgagctgtcaggggactcaggcttatgaggaggtattgttacacaaaacagtgtctagtgaagacgacaagaaagaggggaaaggatcggaaaaagaagctaaaatactatagaaaaccatgagatctattcgatcttttgctaatgatgatcgccatgttatggtgaaacattcaacaatctatccatctccggaggaacttgaagctgttcagaatatggtatctactgttgaatgtgctcttaaacatgtctcagattggttggatgaaacaaataaaggcacaaaaacagagggtgagacagaagtgaagaaagatgaggccggagaaaactattccaaggattaatggctgacggacattgt

SEQ ID NO: 150506 - DNA, 423 bp, Homo sapiens
  misc_feature (1)...(423): n = a,t,c or g
atgttttgcaactcagttaattcgagtccacttttgaaatgcatcatgattagaaagtgtctgtagtttgaaaattagtccaaatttctcctgttgtgagtgtatttagaagtagataccaaaatggaagcttgacacccctgttagctcagcaagcagagacgatcactatatatatattgatgtatggccttccagggtttttctatgcacatagatnnnnnnnnnnnnnnnnnnnnnnnnnnnnnnnnnnnnatcgacatgcaccggcgctgagggtcacgaatcggagtcattctcctactgggggacgcgtggcccttccgcaaccatggcttgtgatggtttaacgcgtacagaccattcctccccgtcccgcgcgcggtatacgatnnnnngatccgggaattccggacgggtaca

SEQ ID NO: 150507 - DNA, 481 bp, Homo sapiens
  misc_feature (1)...(481): n = a,t,c or g
catgttntgcaactcagttaattcgagtccacttttgaaatgcatcatgattagaaagtgtctgtagtttgaaaatttagcccaaatttctcctgttctgagtgtatttagaagtagataccaaaatggaagcttgacacccctgttagctcagcaagcagagacgatcactctatatatattgttgtatggccttccagggtttttctatgcacatagatatagtgcctggcacacagtagacactcaataaatatatcgacatgcaccggcgctgagggtcacgaatcggagtcattctcctactgggggacgcgtggcccttccgcaaccatggcttgtgatggtttaacgcggacaggccattcctccccgtcccgcgcgcggtctcctcccctcctgtgcgcccgctctttaaccaaagctgcgtgtcagtgagccgtgccggtcacatggtgtcactgctggcggccgcaagggg

SEQ ID NO: 150508 - DNA, 1327 bp, Homo sapiens
cgctcatccaccagaattagtttcaagttatgtaaagaaaagcatgttctttttacctccagtgttctgtagagaggtggctccaaagattacgaactttccctgtggtgccaaagacttgttcccccagcttttcatacaccatgcagcctgtttcttttgaacagatcaataggaggtttattgaatatatagacagcaatgtcactgaagtcaaaagtaccagaaaaagtaggattccagtgtttgccagggcaaaggcgagtcccaaaatcccactgcccataatggcgttgcttaggttaaaaacagacatgcctaaggaggttgtacctggaatatactcatcacacttcttttttttccaaatggctgtttgtgagacttcttctactttcacgatcagaaataaacttgctatttatctgaccattttctacttcggtgaaatcattgggagtcattggttaatgttaatccatccctcgggcactgtccatgttttgcaactccagttaattcgagtcccacttttgaaatgcatcatgaatagaaagtgtctggtagtttgaaaattaagtccaaatttcctcctgttctgagtgtatttagaaagtagataccaaaaattggaaagcttgacacccctgttaggctcagcaaggcagagacgatcactctatatatattgttgtatgggccttccggggtttttctatggcacataggatataggtgcctgggcacacagtaggacactccaataaatatctccggaaataaagggaaaggtggcaaaaggcgatgtggaggtgtccgcccttccggggtttttaccctcggcagtttgatgtcctttgtgtcaaggtctggctgcggaggccgggaaaatgtggcccccgtcagtaagggttgggcagggagcttggcgtggcctggcggatttccgaggaaggtgaagggcggaggctcctggcgaccttctggcggagtggcgtggccgccccagtccgcgctcgcctggctctcctcctttccgggccgattgcatcagaatctcccctcaccaccaacccccactcacactttgctcgccggcctcgcacttacatcgacatgcaccggcgctgagggtcacgaatcggagtcattctcctactgggggacgcgtggcccttccgcaaccatggcttgtgatggtttaacgcggacaggccattcctccccgtcccgcgcgcggtctcctcccctcctgtgcgcccgctctttaaccaaagctgcgtgtcagtgagccgtgccggtcacatggtgtcactgctggcggccg

SEQ ID NO: 150509 - DNA, 377 bp, Homo sapiens
accacgcgtgcgaactaattttgttttagcattaaactgttgaactttttttttgtacttagaaaacctaaatactgcagtcagattttggaaactgccgtatattcactgttttaaaaaccccggaggggctggattaatttgtattgccccatggctgacaaaagcctttgtttttggttccgattattcttgtctagtaaccgtccgggtgaaataggttttcaagccatttttgaaagatgttgaaattcgtagatcacatggacaatccgtcagccttgggatgctgtttttctgagggtaccggattatcacgcgcttataaaacagcctatggacctggaaactgattagatgagacttgcaaactctcg

SEQ ID NO: 150510 - DNA, 493 bp, Homo sapiens
gagatgggggtctcactgtgttgccaggctggagtgcagtggcgtgatctcagctcactggagccttgacgtccccagctaattttggatttttagtagagatggggtttcgccttgttgcccaggctggtctcaaactcctaagctcaagtgatctgcctacctcagccttccaaagtgttgggattacaggcatgagccaccgtgcctggctgcatgttttctaacctaatgtaattcaaggaaaagtttgtaattaagctttcttccagaaaatacctgaagagttcaacctgggttactactgctcagaggagcccgagggtgaaagccaccagtgagcatgtggtaaaggctttattctttgatatgataactttattagctggtgttcttgttcactgctactgtagctccagatttccaccatttcccatcagcactctcaggcgttagcctccactgaacatccacttagaaattaaacaatggg

SEQ ID NO: 150511 - DNA, 1523 bp, Homo sapiens
  misc_feature (1)...(1523): n = a,t,c or g
attgatttaaacaaatgtgatcataccataaacacagatgagttgcaccttgtttttttttacttggtctctttggcatttttccattttttaatgtatctagacaactacatttttaaatgccttacatagtatatttccgttatattaaggaatcataatttaatttgaatcacttataaatggatttttttctataaaattggctgtaagccagagtatatcaggtactataaatacatcactaatttgaaacaaataatgggctcagggcaatcccctgtctgggaatatttccagtgggtgggaatggggttttgctttggggttgcgtgcacgcgcacgcacgtgtgtgtcttcgctttactgtttttctgttctaattttgaggaagaaagattcccagaaataacctgtccagttcagttaaaatatttcattcatgtgagaatgcacacattttagagtgtttagaggtatatctttcaaagtgctttctattatgtttgtgggttaatcgattttaggaatgggttgatttttttgtttgtaattttaaaaaattatttcaaaaacaactacttgtaattaaattattttttcaaaactgtgattttgttaaaatttattttactaatcactagttttaaacgtgatatgactatcttagcttagacatttatttattaaaaggtatgactttttaaacgaaaccttttttgcattagaatttgtgacatttttatatggggttaagtcaggtcacagattaatgtatcttacagttgtctttttctactctttaaaattcatatagtaagaaggtcagttgtaaacaccaatgaaatatatatactttgcaagaagacagttttgagagcataggcagtaaagtggaaggaattccattgtttttgacaatcttgcatatctctcattttcccattgtttaatttctaagtggatgttcagtggaggctaacgcctgagagtgctgatgggaaatggtggaaatctggagctacagtagcagtgaacaagaacaccagctaataaagttatcatatcaaagaataaagcctttaccacatgctcactggtggcctttcaacccctcggggctccctcctgaagcaagtaagtaacccccaggttgaactcttccanggtattttcctgggaaagaaagcttaattacaaacttttcccttgaattacattaggttagaaaacatgcagcccaggcacggtggctcatgccctgtaatcccaacactttggaaggctgaggtaggcagatcacttgagcttaggagtttgagaccagcctgggcaacaaggcgaaaccccatctctactaaaaatccaaaattagctgggggtgctcgtgcacacctatagtccccaggtactccggaggctgaggtgggaggatcacctgagcctggggacgtcaaggctccagtgagctgagatcacgccactgcactccagcctggcaacacagtgagacccccatctca

SEQ ID NO: 150512 - DNA, 448 bp, Homo sapiens
cctccactgctgtcctcttcagctcaagatggtggcctgccgggcgattggcatcctcagccgcttttttgccttcaggttcctccgctcccgaggttatatatgccgcaattttacagggtcttctgctttgctgaccagaacccatattaactatggagtcaaaggggatgtggcaggcgctcgaatgtaactctaccaattcaaaggtaaatacactgattacagagctacaatcacagttctcacaagttatgaatgaaatattgtctagttatcaaatcagaagagccgtccttatctcatcaaagcctggctgttttattgcaagttctgatatcaacattttaaccgcttgcatgactctttaagaagtatcacatcgatcatctgaagcacagattatagtgcagaaacttgaaatgaccacactgtctattgtggctgg

SEQ ID NO: 150513 - DNA, 369 bp, Homo sapiens
  misc_feature (1)...(369): n = a,t,c or g
cttttagaaacccaagacggggggttccccagtcaggagtgtcgagcccacccgggccaccccgcgaaacccccttttttctaaaaaatgccaaattttaacccggcctggtggaagacccccgtaatcccaactacctgggaagcttaagccggaaaaagggggtaaccccaaaagccgaacctgccattaacccaaatcgggcccccgcactccaacccggggggcaaaacgaaaccccgtttccnnnnnnnnnnnnnnnnngttttttgccttcttcattctataagtgtacagtggagtttttcagaagctacatgatatgtattgacaccatggttcccacgatgaaagtagaacgtgtcccta

SEQ ID NO: 150514 - DNA, 547 bp, Homo sapiens
gcgcggcggctgcgaccgggacggcccattttccgccagctcgccgctcgctatggcgtcgctcaccgtgaaggcctaccttctgggcaaggaggacgcgggcgcgcgagattcgccgcttcagcttatgctgcagcactgagcctgaggcgcaagccgaggttgcggcgggtccgggaccctgcgagcggctgctgatccgggtggccgccctgttccccgcggtgcggcctggcggctttccaggcgcactaccgcgatgaggacggggacttggttgccttttccagtgacgaggaattgacaatggccatgtcctacgtgaaggatgacatcttccgaatctacattaaagagacaaatgagtgcctggctgtaccaccgcccacctgatgctcatgagcgcgctcccgtaacatggttcaccttaatgagatctgtgatggctgaaatggtcctgtggccggaaccctttacatgtgtagcttctgcccatattactacttgtgtacaccctttaatgtataggtcttctactctctcctcc

SEQ ID NO: 150515 - DNA, 369 bp, Homo sapiens
ctgtaatgaggaacacaaaacccaaataaatcactctccgtctaataggaaacacgaagtattacatttcacagatcatactgtatatagtttgcatcactagatacaggaccacgttatcacaatctaagatacaaaatccagatgatcaggaatggtaccgacaaacgggattaccgggttatagatgataatctgtaggttgattaaggacaacatcattcttttccagcttcttgtcgattggagtctcttctgtgtatgacctaagattttaggcaagtttcatttaaaggtcccctggattgaaactgaggcactggccccaaagactggtgtttcaggcgctccacggagcaggttgtttgt

SEQ ID NO: 150516 - DNA, 392 bp, Homo sapiens
gcaagttacccagaggatggggttgggaggagggggacaggattggcaaagatgttggtcaaaggacacacaagtttggttagagaggagacataagctcaagagatctattgtccctcatgatgactataattaataacaatatattatatacctgaaaattgccagcctgggcaacatagtgagacctcgtctctataaaaaaaataaaaaaattagctgggtgtggtggcacacacctgtagtcccagctacttggtaggctgaggcgggaggattacttgagcccaggaggtcaaatctgcagtgagccatgatcataccactgcactccagcctgggtaacagggcaagaccctgcctcaaaaaaaaaaaaaaaaaaaaagaaaaga

SEQ ID NO: 150517 - DNA, 359 bp, Homo sapiens
tgaggtcctcagaatggcgggcacaggtttggtggctgtagaggttgtggtggatgctctgccggattttgaggaaggttatgaaggccctggtgggcgggaagcggctgcagcgctggtggaggatgaaactcgcagataccgacctactatgaactacctgagctacctgacatccccggattattctgcctttgaaactgacatcctgaatatatgactctgaaagactggctgctcgacaacccaatttaattgcttactatgaaactatattatctttcatccccttcatgtggtcattactttgtcttactgcatgtctataattgtttatctctttatttcccatctcctac

SEQ ID NO: 150518 - DNA, 473 bp, Homo sapiens
cggcggagcatgccagctccagcgtcatttcggcctcttagttcttctgaaccctgctcctgagctaggtaggaaacatgagcggcaccaacttggatgggaacgatgagtttgatgagcagttgcgaatgctagaattgtacggagacggcaaggatggtgacacccttaccgatgccggcggagaacccgattctcttggtcagtattcgacggacacttcctactgagtgggaacctggacatttaggcttgttttttcatgatttctgaatatttcttgtttacatatttggtccaattcatggcttttttattatattgtggatttatgtttttatgatgtgtttagttacgcattagttttacttgatatgttattgttttatcaatgtttttttattagcattctgttattttatttctggttgatgtgatttaattatattctgttcatgttgtccggcttattt

SEQ ID NO: 150519 - DNA, 2205 bp, Homo sapiens
tttttttttttttttttgcgaatctgttgatttatttacggctcggtgagacgacgctggacgcttggttagggtaagggttagggcaagcattagcaagcaggggcatggcctggggaagcacctggacccccagaacataagacaggagggagagatgccatccattcaagcgggcacttatgccccacgaccagctgaacccagaccagcattccccattcaccaccccttactccctcaagatgcaaatgaagctcaggggctgggcggaagctgtgcagggctgtcccacagggaggaccccccgtgtgtctctcgggctgccccaggtggctctgtcccacccttctgtctgggaggctcctttaaggctggggagggcccagaggaaagggagatcctgaggggctggcagattcaggccctccctgcgagctgaggtttgaagaggagagcagaccacccagagtagtgggagaaagcaccggcagaaaagctggcatatccaccgagggcctctctgcttcttttgacctttttcagagtttcagagttatgaaccaaatcgccttcatgagagatgacgaatcacatgctacatagtgggggaggcggcagctggcctggctcccccacttccccaggacctccgcctggaggaagcctgcccagggccgcagccctgcccccaaagaccccaggacagaccagagctcctgctggagccgggtgtccccatgctgacctggccatgtccccaggtcccaccccagggtcacctcctgtagctccgacttctctagtggctgattgcagttcccagaatgtataacatcccagggtgccagagcccacccaagcagccactcctgtccagttccccaagaatgtaataacatccccagggtgccagagcccgcccaagcagccactcctgtcccagttcccagaatgtataacatcctagggtgacagagcccgcccaagcagccactcctgagtcactcgggcatgtcccagaactcaggtccacacagacagtggcaacagctagccctgggcatctaacccccatgaaggggaccctcggttctgcgagagagatccccgaagtgggaactgggcccccatggtgcccagtgcctctccccctctcctctgccactctgccctgcacccagaggcagcgctggaggccttactctaccactcagggcttctcaaacctctggttccacttttctccttataagctttccattttgtaaactcacctcccccttcccaggcttgggggtccaaggaaccccagctggtgggagaagcgtctgcactgtggtgcagggggtggtgagtgagcgaggaggcactagtgtggggcagctacttcacctccctgtgcctctgtgtcctcctctgtcaaaggggcaagataatggctcccattgccgggctgctatacagtgttcagggccaccagtgcagtggggggacccacgtccaacgccaccttgatgcatacaacccggacaagtttactgctgtgatttctgccggcgctgctgtgccggttccctggtgctgcacagccacgcactccccatgagtgggcctgcccagcattagctgagtgccttccgtgtgctctacgccaggtgccaagggcaggccagccaggctgaaccatgtgtggggctgggacaggtccaggctgctggaaaggtggacagaaggaggcaggaggcaggtgtgagaagctgcccaccccacccctcaacaccacagcacttccagctccagcaggtccttgttctcagctgcccctgagccatgggtggccaggtctcctccccttcaccccactgagactcgagacagggaggacctgatcctggagtccctcccagccctggctgaggaagccacccaacccgacaatgggcttgcgcaagccgcgcaagtgactgctcccagcctctcccaagagacttaggaagcccaaagccgcctccctcccggtgaggcatcccaaggcatcgctgggctgcagctgagagggcctcatttgggcactgccttgaggctggcacttgcaggtgggggcccttgggagctctgggaggcacctggcagcctcccagacaccccgggccggtcctaatatccagagcttaggggctacagccacaacctctgacgaaa

SEQ ID NO: 150520 - DNA, 874 bp, Homo sapiens
  misc_feature (1)...(874): n = a,t,c or g
gggggtagggggggcaattcccctgaggtcaaaggtttagacccccccgggccacaatggggaaatccgttttttattaaaaaaacaaaaataaaccannnnnnnnnnnnnnccccgttaatcccccctccttggggggttaaggcagaaaattttttttaattgggaaggggggggttccattaaaccaaaattaaccccttcccctccagcccgggggcaaggggggggtcccttttccnnnnnnnnnnnccnnnnnnnnnnnncagagtcctaactcttccctgccctgagaaccccctcaaggcagggaggatcagctattcccagcgcctcaggactaagcacacctgcttgtgtcccttctgggtccacaaggaacttgttccatgccccacatgtggggcgggtgtcactgctcctcccggcaagttagaaagctgcagggcccagcaagaaggggccaggtcaggtcaacccagcctgattccggaagccaggagttggcatttaacggtctgtaggcccaaggcagttacctcttgagtgactgcatgctaggaagaatcgggccgggccagtgcccctgccaggcttgggaaaggagggaccaagcctccaaggcccgaaaaggacgcagctggcttcccttttaatggaagggcctcccactcaccccactatacatgatggcaccacagcccagcctgagctgtggccatgcaggggtccccagatgcagagttggggatcagggcctgcagcacacatttgggcccagacaaccccacccaccacatccctcctccagacacaggtctgattctgagtcctcatctctgctccaagcatcagcccacccagggaaggcagg

SEQ ID NO: 150521 - DNA, 319 bp, Homo sapiens
accagtcttttagtgtctcaaaatagattattaatacatccataagtctgtggttcttgggattgtcatctataatccaccactaccaagagagatttctgtgatttaattgatttggatcctatatggtttttattgagattttttttgggatttcttcggctttttttgtttgttgatggcctaagatcgttgtactttaggtactgtaggtgttttttaatattactgcttttgtcgatatttgagttcatctttgttacttagttttatagatctttatgttttttttatttttttatatgtttttgtgtgtttt

SEQ ID NO: 150522 - DNA, 3319 bp, Homo sapiens
ctttttaatccaaagattattatatatctatctataaatcatttattttacctgggagaaaatgcttaatcaagaaaattgcaataaataatgatgggtttaaaacagaaaccactatcattcaccacgttgactgatgcttttcagatctagatctttagacttgtgagaaaatttctgtaatgttcacacttctgtagggagttttaactgtcattcagagagacagttatagaggaatcatttatgaattagagtaataaatacgattagctgaattctgtggcattttttttcaagcattttccatttgcaactcaaatatatggttactcccagaaattccacttttaggtatatacccatgagaattgaaacacaaaaacttgcacacaaatgttcacagcagcattatttataatatcttaaaaagtagaaataagccaaatgcccataattaatgaaaagataaacaaattgtggtatatccatatgacgtgccacacaaaaaataaagtactgatacgtgatacaacatagatgaaccttgaaaacattaagctaaatgaaagaggccagaccaaaaaaaaaaaaaaagccatatattgtttgagtctatttatgtgatatgtccagaacagacaaatccatacagatgaaaagtagatggtagtgttttcaggggctggaggaagggaagaatgggaagtaactgctaatggatttaggatttctttttggggtgatgaaaattattctggaattagaaagtgatgatgattgtaccactttgtaaatatcactaaaaaccactgaattatatattttaagggtaaactttatggccatgtaaattatatctcaataaagtaataaagaatatggctattataacctatttatattggatttctaaaagaatatttcatattctactaaaaggcgataggatccagtatatatatatataatcctgaaaactattttataaccaaaaattttgcttcaaaacatcattctcgctatagttataaaacagaaaacaaaactaaatttttaaaacataaatatatttaaaaaattaaaacacctaagaaatgccaacctatacatgtgaaaaagtaaaatatttatatgccataacaagtagttgcaacattatcccataagcagcagttagtgtttattttcccctatattttggtttaacaccatagtgtagtggtagttcattctttttagggaaattacataaagtacatatagaatattattagtaagttatagaagactgtataactggaaaattaattccaagtaacagcatttcctcttaaaaccccatctattattaaacggaattacgtttaaactagcagagaacaaaatgagcctataatttattaagtacaagatatatagtcaacttgcataaaattacatatgggcattttaaaaagtctattctaaaatatcagtaattcaagcaattgggatttccacaggagagaaattgccattactttcctttttatgaagaaagatctgccttaagaacatcacaacgatgttattaagaaatgctacagcatactttaaaaatcaaaatggtgaaacagatgcatcaggatattcttttacagataccagccctatagcagcatttcagaaggtgatttaaatctaataactgacttgggtttttattctcttctagaaatacatattacatgtatagtttagttaagaattttcatttccattataaatgggaacttttcatactgattatctaaaggtataagaaattaagtaattggatagtctagcacttcattagaaatatatccactgactccacaaaaacaacttttacatataagcaaattactaaaaatatctgaatcagaagaaatgaaataaaattcagtgaatggttttctctttcatctctaactgtaaaaatcccttgggcctatttatttgagccgtctctattcatgcaatttaatgacccctcaaaagaatttgcacatctttatgcagaattcacatctacatcagtaaactaccagtccttctatattctcagtgccttatcaaaatatgtgtaacaaagttcttcattctatgaggcaggaagatgtttcctaagtacttctttggatgaagaagatatagtatctgggaaggacacctcaaattctattagaaggtcaccacgttggtcaggattttttggaaatggcagcccatatccaataattcttctcctcattccgggtttcacaatatcatttactgacataggtatgtttcttccatccagtgttggtacattaattgagcagccacgcaatgcctctcgtaaactaattttagcagtataaattatctttgatccatcccttttaaatgttgaatgataatttgtctttaatgataaaaacaatgtctgctggaatactatttggtgtttcatctccttctcttggaaaagtaattttggtgccttctttccacccttttttaatctcaatggtaagaattttgtcctcagatctgtaactccttccatcagcgtttagcctttttcgagaaatcttcatccgtttggtacaaccactatatatctcttcaagtgatactctaagttcatgaataactggaggatcttgtttgaggcgggatggccccacagaattcctgtctcttggatatccattcatgctgaaaccaaaggcactaaaaggatcaccatctatttccatttcttcagaatctctaccaccacccattcgtcttccaaagaaaatttcaaaggggttggaccctccgaaaaatgcagcaaatgtagcatgaggatcgccatgaaaggtgtaccggaaggtacctccttgtccatcagtacctcctgctcctcctttcaacccttcctccccaaactgatcatatatttctctctttttaggatcactcaatacttcataagcttctgcgacctctttaaatttttcctctgcctgaggagatttgttcttgtccggatgaaatttgagggcttgttttcggtaagcctttttaatatcttcatctgaagctcctttctcaattcccaaaatgcaataatagtctttccccatttcgaatgccttgaaattaacttagatttccctttgtaaaagaaaacagcgtccccagtcttagcaacagattctaagaaaaataaaccaagctgggtattttaaaagttaatcagcaattcagctagctgtcttaaggcagcaagcagacagcgtctcgtattcaatccttcccg

SEQ ID NO: 150523 - DNA, 1312 bp, Homo sapiens
ctcgcacggaaccccgggtcgacccacgcgtccggtggaattcttctcgggaggcagtgctgggtccttttcaccatggtttcctaagaaagcaaagaagagagccgggggtgccgactccaacgtgttctccatgttcgaacaagacccaaatgcaggaatttaaggaggccttctctatcatggaccagaacagggatggcttcattgacaagaaccgatctgagagacacctttgctgcccttggcgaagttgaaccgtgaaaaatgaagaaattgatgaaatgaatcaaggaagcttccgggtccattaaactttactgtgttcctcacaaatgtttggggagaaaatttaagggaagcggaccctgaggcaaaccattctcaaccgcattcaaaagtgtttgacccttaaaggccaaaggggtgcatgaaggctggattacggtttcggggaaaatgctgacccacgcagggcggaggaggttttccaaggaaggaggttgaaccaaatgttcgccggccttccccccctgacgtgactgggcaacttggactacaagaacctgggtgcacatcatcacccacgggagaagagaaggactaggaagggggctcgctgctgcgcccttggcttcgtcttttgcagagtggtccctgccctcatctctctcccccgagtaccgcctctgtccctaccttgtctgttagccatgtggctgccccatttatccacctccatcttctttgcagcctgggtggctatgggtacttcgtggccgcacatcctacagttggaaatccatccagaggccatgttccaataaacaggaggtcgtgtatttggtcgcgacatttctctgacaaacagtgccttgtgtaaggaaggcaaaggcagatgagctagtgacagccttgcagtcattattattgaatcttgctgactctttatgtaaggtagacttttgcagccactcagaactgtttctatcaaggatcacgttttcctggaatgttacctggatgaccaaagccctctcttccaaagagctcaagcatttagagggccttgcttccatgacatctgtcccttgggatgccatcggaatgcctctcctgccagtgacagtgacaagaaggaagcggactgacacatggtaggaacatagctcgttcaccagtaatcacacctgctaatcctaagagggtgacttctagtttcagataaagtagaagttgtctgtacttcttccctagcaaactgagggagtggtactgacttctgtctctgtctggggcccaggcaaaaaaa

SEQ ID NO: 150524 - DNA, 1257 bp, Homo sapiens; identical to SEQ ID NO: 125428

SEQ ID NO: 150525 - DNA, 895 bp, Homo sapiens
  misc_feature (1)...(895): n = a,t,c or g
gggtttgccgccagaacacaggtgtcgtgaaaactacccctaaaagccaaaatgggaaaggaaaagactcatatcaacattgtcgtcattggacacgtagattcgggcaagtccaccactactggccatctgatctataaatgcggtggcatcgacaaaagaaccattgaaaaatttgagaaggaggctgctgagatgggaaagggctccttcaagtatgcctgggtcttggataaactgaaagctgagcgtgaacgtggtatcaccattgatatctccttgtggaaatttgagaccagcaagtactatgtgactatcattgatgccccaggacacagagactttatcaaaaacatgattatcctgaaccatccaggccaaataagcgccggctatgcccctgtattggattgccacacggctcacattgcatgcaagtttgctgagctgaaggaaaagattgatcgccgttctggtaaaaagctggaagatggccctaaattcttgaagtctggtgatgctgccattgttgatatggttcctggcaagcccatgtgtgttgagagcntctcagactatccacctttgggncgctttgctgttcgtgatatgngacagacagttgcngtgggnggcatcaaagcagtggncaaaaaaggctgctggagctggaaaggcaccaaagnctgccanaaagcncagaaggngaaatgatattatccccaaaacctngcnaccccctnttaatcagtggtgganaccgggcncagaactgttngtnanntggcncttnaggttngnggnaaancntggtaatggnncaatngnncgaaaaccctcnaaagngatgggnatgtttttggcnnccttgggntcctttttgcggggggggtta

SEQ ID NO: 150526 - DNA, 1302 bp, Homo sapiens
atgccttcaattaagttgcagagttctggtggagagatatttgaagttgatgtggaaattgtcaaacaatctgtgactatcaagaccatgttggaagatttgggaatgaatgatgaaggagatcatgacccagttcctctaccaaatgttaatgcagcaatattaaaaaaggtcattcagtggtgcacccaccatgaggatgactcacctcctcccaaagtttatgaaaacaaagaaaagcgaacagacgatatccctgtttgggaccaagaatttctgaaagttgaccaaggaacactttttgaactcattctggctgcaaactacttagacatcaaaggtttgcttgatgttacatgcaagactgttgccaatatgaaatttgagaccagtaagtactacgtgagtatcattgatgccccaggacacagagacttcatcaaaaacatgattacagggacatctcaggctgactgtgctgtcctgattgttgctgctggtgttggtgaatttgaagctggtatctccaagaatggacagacccatgagcatgcccttctggcttacacactaggtgtgaaacaactaattgttggtgttaacaaaatggattccactgagcaaccctacagccagaagacatatgaggaaatcgttaaagaagtcaacacttacattatgaaaattggctgcaaccttgacacagcagcatttgtgcttatttctgtcaatgttacaactgaagtaaagtctgttgaaatacaccatgaagctttgagtgaagctcttcctggggacaatgtgggcttcaatgtcaagaacgtgtctgtcaaggatgttcgtcatggcaacaatgctggtgacagcaaaaacgacccaccaatggaagcagctggcttcactgctcaggtgattatcctgaaccatccaggccaaataagtgctggctatgcccttgtactggattgtcacacggctcacactgcatgcaagtttgctgagctgaaggaaaagattgatcgctgttctggtaaaaagctggaagacggccctaaattcttgaagtctggtgatgctgccatcatttatatggttcctggcaagcccatgtgtgtagagagcttctcagactatccacctctgggtcactttgctgttggtcatatgagacagacagttgccatgggtatcatcaaagcagaggacaggaaggctgctggagttggcaaggtcactaagtctgcccagaaagctccaaagcctagtgaatattatcccttgtacctgccaccccagtcttaa

SEQ ID NO: 150527 - DNA, 697 bp, Homo sapiens
gcaagggttttgccgccagaacacaggtgttgtgaaaactacccttaaaagccaaaatgggaaaggaaaagactcatatcaacattgtcgtcattggacacgtagattcgggcaagtccaccactactggccatctgatctataaatgcggtggcatcgacaaaagaaccattgaaaaatttgagaaggaggctgctgagatgggaaagggctccttcaagtatgcctgggtcttggataaactgaaagctgagcgtgaacgtggtatcaccattgatatctccttgtggaaatttgagaccagcaagtactatgtgactatcattgatgccccaggacacagagactttatcaaaaacatgattacagggacatcttcaggctgactgtgctgtcctgattgttgctgctggtgttggtgaatttgaagctggtatctccaagaatgggcagacccgagagcatgcccttctggcttacacactgggtgtgaaacaacttaattgtcggtgttaacaaaatggattccactggcattgccatccttacgggtgactttccatcccttgaaccaaggcatgttagcacttggctccagcatgttgtcaccattccaaccagaaattggcacaaatgctactgtgtcggggttgtagccaattttcttaatgtaagtgctgacttccttaacaatttc

SEQ ID NO: 150528 - DNA, 1841 bp, Homo sapiens
  misc_feature (1)...(1841): n = a,t,c or g
gcttttttttttttttcgcaacgggtttgccgccagaacacaggatgacgtgaaaaactaacccctaaaagccaaaatgggaaaggaaaagactcatattcaacattgtcgtcattggacacagtagattcgggcaagtccaccactacttggccatctgatctataaatgccggtggcatcagacaaaagaaccattgaaaaatttgagaaggaggctgctgagatgggaaagggctccttcaagtatgcctgggtcttggataaactgaaagctgagcgttgaacgtggtatcaccattggatatctccttgtgggaaatttgagacccagcaagtactatgttgactaatcattgattgccccagggacaccaggagacttttattcaaaaacatgatttacaggggacatctcaaggcttgacntggtttggggggccccctttttgggggggttntcccctgattgttgctgcctggtggtgggtgaattttgaagcctggtatctcccaagaatggggcagacccgangaagcatgcccttttgggcttacacactggggtgtggaaacaaactaaattgttcggtgttaacaaaaattggatttccacttgaggccaccctacagcccagaagaagatattgaaggaaattgttaagggaaagtcagcacttacattaaggaaaattggctacaaccccgacacaagtagcattttgtgcccaatttctggttgggaatggtgacaacatgcctggagccaagtgcctaacatgccttggtttcaaggggatggaaaagtcacccgtaaggatggcaatgccagtggaaccacgctgcttgaggctctggactgcatcctaccaccaactcgtccaactgacaagcccttgggcctgcctctccaggatgtctacaaaattggtggtattggtactgttcctgttggccgagtggagactggtgttctcaaacccggtatggtggtcacctttggtccagtcaacgttacaacggaagtaaaatctgtcgaaatgcaccatgaagctttgggtgaagctcttcctggggacaatgtgggcttcaatgtcaagaatgtgtctgtcaaggatgttcgtcgtggcaacgttgctggtgacagcaaaaatgacccaccaatggaagcagctggcttccctgctcaggtgattatcctgaaccatccaggccaaataagcgccggctatgcccctgtattggattgccacacggctcacattgcatgcaagtttgctgagctgaaggaaaagattgatcgccgttctggtaaaaagctggaagatggccctaaattcttgaagtctggtgatgctgccattgttgatatggttcctggcaagcccatgtgtgttgagagcttctcagactatccacctttgggctgctttgctgttcgtgatatgagacagacagttgcggtgggtgtcatcaaagcagtggacaagaaggctgctggagctggcaaggtcaccaagtctgcccagaaagctcagaaggctaaatgaatattatccctaatacctgccacccaactcttaatcagtggtggaagaacggtctcagaactgtttgtttcaattggccatttaagtttagtagtaaaagactggttaatgataacaatgcatcgtaaaaccttcagaaggaaaggagaatgttttgtggaccactttggttttcttttttgcgtgtggcagttttaagttattagtttttaaaatcagtactttttaatggaaacaacttgaccaaaaatttgtcacagaattttgagacccattaaaaaagttaaatgag

SEQ ID NO: 150529 - DNA, 1072 bp, Homo sapiens
atggctccagcccgcccccaggcgagcggcctccttcgcccggagcgcgtcggtccagcccccgcgcacgcgcgcacccccagcctcctaccttcgctcgccttctccgcagccgctgccgccgaggccgaggggccgcaccggtgctgccgcccaccggtcaccctgtcctgtcaccaggtggtgactggcccagtgacccccaagacaacccgccagaaaagaatcatgccaggtgctcacctgctcactgcagagggctctaaatctgcaactcagaaaaatagccatatcagtcgcgaacgccagcaagacgtagcccagcgcgtcggccgccatgccggcgataatggcctgcttctcgccgaaacgtttggtggcgggaccagtgacgaaggcttgagcgagggcgtgcaagattccgaataccgcaagcgacaggccgatcatcgtcgcgctccagcgaaagcggtcctcgccgaaaatgacccagagcgctgccggcacctgtcctacgagttgcatgataaagaagacagtcataagtgcggcgacgatagggagctctttgctcaggccccggtggatcagtttcctggcacagctgtggagagtgtgacggattccagcaggtacttcgtgatccgcatcgaagatggaaatgggcgacgggcgtttattggaattggcttcggggaccgaggtgatgcctttgacttcaatgttgcattgcaggaccatttcaagtgggtgaaacagcagtgtgaatttgcaaaacaagcccagaacccagaccaaggccctaaactggacctgggcttcaaggagggccagaccatcaagctcaacatcgcaaacatgaagaagaaggaaggagcagctgggaatccccgagtccggcctgccagcacaggagggctgagcctgcttccccctcccccaggggggaaaacctccaccctgatccctccccctggggagcagttggctgtggggggatccctcgtccagccagcagttgctcccagttcagatcaacttccagccagacccagccaggcacaggctgggg

SEQ ID NO: 150530 - DNA, 477 bp, Homo sapiens
tatcgtgtcgccggaagttcggtgggctccaggcgtcgcgatggaggagagcgggtacgagtcggtgctctgtgtcaagcctgacgtccacgtctaccgcatccctccgcgggctaccaaccgtggctacagggctgcggagtggcagctggaccagccatcatggagtggccggctgaggatcactgcaaagggacagatggcctacatcaagctggaggacaggacgtcaggggagctctttgctcaggccccggtggatcagtttcctggcacagctgtggagagtgtgacggattccagcaggtactttcgtgatccgcatcgaagatggaaatgggcgacgggcgtttatttgaatttggcttcggggaccgaggtgatgcctttgacttcaatgttgcattgcaggaccatttcaagtgggtgaaacagcagtgtgaatttgcaaaacaagcccagaacccagaccaaggc

SEQ ID NO: 150531 - DNA, 426 bp, Homo sapiens
  misc_feature (1)...(426): n = a,t,c or g
atcgcgctgcaggaattcggacgagangnacaaagagcttgctccctacgatgagaactggttctacacgcgagctgcttccacagcgcggcacctgtaccattcaactcccgataggctattttgtgttgacattgatgaatgcagcataatgaatggtggttgtgaaaccttctgcacaaactctgaaggcagctatgaatgtagctgtcagccgggatttgcactaatgcctgaccagagatcatgcaccgacatcgatgagtgtgaagataatcccaatatctgtgatggtggtcagtgcacaaatatccctggagagtacaggtgcttgtgttatgatggattcatggcatctgaagacatgaagacttgtgtagatgtcaatgagtgtgacctgaatccaaatatctgcctaagtgggaa

SEQ ID NO: 150532 - DNA, 450 bp, Homo sapiens
  misc_feature (1)...(450): n = a,t,c or g
cgggaaaccccgtcgttccctttcccctggctggcagtgcacaggccgggccgcatgatgcctgggagttactgtaaaagacgtgaaccagcaggagttcgtcagagctctggcagcgcttccatcaaaaagtccgggaagctgaaagtccccgaatggttgggataccgtcaagctgctggccaagcacaaagagcttgctccctacggatgagaactggttctactacgcgagctngtgaggaacttagcttccacagcgcggcacctgttacctccggggtgggcgctgggggttggctccattgaccaagatctatgggggggacgttcagaggaaacgggcgttcattgccccagccattttcagccgaggcttccaagagtgtggcccgccgggtcctccaagccctgggaggggctgaaaatggtggaaaaggaccaagatgg

SEQ ID NO: 150533 - DNA, 1809 bp, Homo sapiens
atttccagttgattgtcatatccaggaaaaaatggaacagtgcactcttctccctgttgacccatgtccacctattggttccccaaaatccacattctccctgggcccagatgactttgtctccctgggcccagattctttgtctctcttcaaccttcatctcaaattgtctctaagcactaccttccccagagcttgccaggttgggttttgagattagggtcaggtcatgggtatgtggagaatggtttggaggttgaggacaaccacaggtgtctcattgctgccatttctcctgaggacataatcacttggtcaccttggaccctgtcacttcctaaaattactcgttctgtcatgccatagaggtcagttttcctctctcttggcttctacccacaaacattcaccaatcatttattccgttcatttagcaaatatgcagcctccgcaagatgagctctcctgcagacaagcatggtctgaaacattctttgagcaatatttattgagtgcctactatgtgttaggtactgtgccaggcactggataagccagtggtaaggggaaacacagctctaacctcacctcattctccaggttacaaaggccatgtgcccctttgaatctggcagagaaagtttcctcgttgtaagtatttgcatctacttcaagccagattcttctgcctctttctcctttccagacccctactctgtgcagtgctgaccacagctagagccaccgccccattgctcaaccagtatttatttccctaaacgacccttcctcacattcccttccctccacctctccttaccaagcacccaaaagaggatttagaactagcagggtggacatcatctggttgtttctacttttctctgcctagcacaaaattgggagaaaactggagcctccatccgcagtcacacgtgtacagatctggggatttggatgtaggctctttctaacttctctctcagaagcttctacagaaacccttccatctgtagcctcaagggcccacctccacgggaaggcttaggcaatgatcctgtttctaccaacactgcaccttatcccaggaacctgccctaggacctccagaggaccatattttcttctccctccattttttacccaggacctccaggggctccttctggggaatcatagaacccgtaggaattggaaggaattttagaggttttctagttggagttgtgtccaacagaattcattaacaccagcctgggcttgtttttcctcctccctctggacttttttcatcttttcctccacctcaaaaaatacttacacacagattccttcttgtacaggcatcaaaaccaactcctctgcccctaaggctgtgtcccctgtggtctcccagccacccctaccccagttcactcgccccttcctcatctctggaatttggcccaggcagtccccagaagactctggagtgacctcctttgcctaaaaagcagacagataggcatgccccaggccctgagtgagcagaggaggactgtagggtgagagggaaagaaaatgaaggtgactttcatggaagtttcatttcttttccccgattgtaccaactgcatgttacttttggcctgggcttgcaaggaagcaatattggttttactctcgtatccttaaaaagttacagaactgtgtcttaagagaattatttatagttactataactgaattgacaaatgtcaacttaactgataaattatatttggtaaaataaagaggacgtttatttaaaagaaaaaaaaaaaagtcgac

SEQ ID NO: 150534 - DNA, 1822 bp, Homo sapiens
  misc_feature (1)...(1822): n = a,t,c or g
caccagcagaactagctaaccggctggccgtctgaggtcgccctgggatgccacgtgcctctgctctctggcctgcttctagactgaggcagtccaggtcagcgtcaggtgcacgtccactgtccctgttaagctgcccgcacagtccagccctctggccaccactgccagaagcctcccagggctgccctgaggcctgagctgcccgctcccgtcccccgcctggctcccctaccctgaccagcgccagtctgctgggcctccctttctagctctgcaggccccagggaaggcttgcagacccgctgcttctccaccttctctctctgctcaggtctggctgcagtagcccgcagcaaggagtgtgtggtgcaatgcaagggaattgtcagagcaaggttcatttcacacggtcttttaatcggcttcgtaaagccaaagaaaactgcgtacaagaattcctcagccactgcaaatacaacatcgatggagtatgcgtacgtcttccagtaaaaaaggacaatataaataaacatcttcaagaacctctcagggacgtctgcacgtctactgtggggcgcacagcacagatgggacgcagagggctggggctccaggggcagttgctgccacacccgccggggttcctaccacacttacacttcaggaaacgttcacacgggagttgggaaaaaaaggccacagctttgcttcagctttccggacaaagaggcgggatttcacagttccgtttcgatctttcaggaggaagtgagtgggggggcacccatttttcatggggggggcccaacccccactttaaaaaaaaaaaggggcaacgcaaccaaaaactaaaacaaaaaccaaaaacccacacaacccccgaatttttttgaaaactcatgggctcgtgggtcaaaaaagtaaatgcttttcaaaatgttttgaaaacccctcaaaaaaaaaaacagcacttccttaaaaagaaaagtctattaacgaggccatccccggcgtcagaagcggtcaggctgggtttgacaagatcagaaccagaaatgactacgaaagtgggaatacaaggggggccatttgcctccccatgacggttgagcaaaagctgccccaatctgttaaccacccagccctttgaaaggactttcttgaccagaaagggtttttactcgttggtgtgaagcgaaactgttgtaactgttctttgtaggacccgcccgagctccggtcactgtagccaccactctgactccggctgctatagtagtcttctggagcctccgtagcccccacttcctggacttcgaaccggttccccccatagccntgggtcccctcctccttctagagaacccacgggccccgtccctcgggccccccaagggaaagaaagccccgggcccccgggcaagagccaaccaagggtaccccacgggaatcggtttgtctgaacgacttgccctgccctggtctactcgggatctgccgtcccatcctacagacttccccattcatggccatcatggcatccttagcgtcgtcaatgttctcaaaggtgacaaacccaaatccccgagatctctgggtctccctgtctttcacaaccaccacttcagagatctgtccgtactttgagaagacctgctccagcgactgctcattggtgtcaaaactcagccctccaacaaaaagtttgccttcatctgatgccatggcggccactgagtcgggcaggtccctgacgcaagcaggaagacagcgcaccacaacgaccccgagcctccacgaaatcgtggacccgggaatt

SEQ ID NO: 150535 - DNA, 340 bp, Homo sapiens
  misc_feature (1)...(340): n = a,t,c or g
ntcccaggttcgagagaggctggaactcaatttctgcagaaaatctcccagtttttcctgtttggnnnnnnnnnnnnnnnnnnnnnnnnnnnnnnnnnnnnnnnnnnnnnnnnnnnnnnnnnnnnnnnnnnnnnnnnnnnnnnnnnnnnnnnnnnnnnnnnnnnnnnnnnnnnnnnnnnnnnnnnnnnnnnnnnnggagctcccggtttttaagcactgcacgatactagaagagctgaccttttttctggcctcacagcttatgctgaagctgagtgtgaggaacagagagacctttctgtgacgaccgctggggcagagtggtctatgcgccgagatc

SEQ ID NO: 150536 - DNA, 2178 bp, Homo sapiens
tgggcgcctgcctgtgtgcaggcccaagggctcagctgcttctgtctgttcccagacccctcctcctgtagagagtggtgctgccctctcgggatgtacctgcaggtggagacccgcaccagctcccgcctccatctgaagagggctccaggcatccggtcctgggtccctgctggttggaatcttgtcgattggcctggctgctgcctactacagcggagatagcctgggctggaagctcttctacgtcacaggctgcctgtttgtggctgtgcagaacttggaggactgggaggaagccatcttcgacaagagcacagggaaggttgttttgaagacgttcagcctctacaagaagctgctgactcttttcagagctggccacgaccaggtggtggtcctgctccatgatgtccgtgatgtgagcgtggaggaggagaaggtccggtacttcgggaaaggctacatggtggtgctccggcttgcgacgggcttctcccaccccctcacgcagagtgcagtcatgggccaccgcagtgatgtggaagccatcgccaagctcatcaccagcttcctgggagctgcactgcctcgagagccccacagagctgtctcagagcagcgacagtgaggccggtgaccctgcaagccagagctgacagccccattgtgccttgagcccgtgcaccgcccagagggacccatgggcacatttcccggtgttgcttgagcccgttgcaccgaccacaggacccgtgggcacattcccggtgtgcctgagcccgtgcaccgcccacaggacccgtggcacattcccggtgtgcctgagcccgtgcaccgcccacaggacccgtggcacattcccggtgtgcctgagcccgtgcaccgcccacaggacccgtggcacattcccggtgtgcctgagcccgtgcaccgcccacaggacccgtggcacattcccggtgtgcctgagcccgtgcacgcgcccacaggacccgtggccttggcttcagttggagcctccagccgagatggcctattgcctgctcatgctgcggcttgcacactgcatgaaacagcaggccagaccaggacatccagactttctccatcgtgaggcctgggcctgcctttctgcagccggaggtctcgccagccctggactcctgctttgggccacagcaagacctcgggcgagtggagaggcggggccaggccgggcccttgtgggtgctgatgctgcatgttgtccccgacacagcagcctctccctggtggacatccccagcgagcacgtgcttccccaagggcaggtgaggggtgaacatccagggcctacctggctgtgcacgctgcagccacactgtggaagctgcccctccccgaggacccgcctcccttgcttgatgccaggatctcggcgcatagaccactctgccccagcggtcgtcacagaaaggtctctctgttcctcacactcagcttcagcataagctgtgaggccagaaaaataggttagctcttctagtatcgtgcagtgcttaaaaaccgggagctccagccgggcgcagtggttcatgccagtaatcccaggcacttttcggagggccgaggttgggaggatttgcttgaggccagggagtttcaagaccagcctgggcaacacagcaagatcctgtctttgtaaaaaaactaaccaaacaggaaaaactgggagattttctgcagaaattgagttccagcctctctcgaacctgggaagacctggcaggagggggctgggctctcggctacagactttcccccaccccgtaggagctgaacgccaaccatcctgacccgccagtgctcttggtctcctgagtgtacccagggtcctccccaggtgcggtgtgcaccgaagcgcgcctggtcctgatgccctggtctgggatcgtcggggacctctggctcctgtgtgcccttatgcggacaggcccaggaatggctgggtaggacagggaacacctttgccccacgtctggctgtgacctcggtgaaagccgacaggagagagatgggacccgtcctcctcagtagtggctgccagtccctcgttgcaggacagggtcatcataaccataaataacccttcacgtgtcaaaaaaaaaaaaaaaaaaaaaaaaaaagtcgtatcga

SEQ ID NO: 150537 - DNA, 537 bp, Homo sapiens
cgtcgctgttgctgccgccatacgcgctctccctgtttagctcttctgttagaaatagtatctttgttttcctttgctgttcctcagtcccctgactcttcaccccttgttttcacctattttgcgagaacccatccagatcccccttcccttcttcccctgccggcccagttatggcagagaacgatgtggacaatgaagctcttggactatgaaagatgaatgaggtgggagacagcagctgggggagatggggctgaggcccctgccaagaaggatgtcaagggctcctatgtctcccatcccacagctctggctttcttgacttcctgctcttgctttaggtgctcccctccattgtccactgtgcctttgagcattcgacgcatttccggcatgagtgcatttctcaggccattctgggaaaggatgccctgtttcctgccctgttggacatttttcttaccggagtgttttttttgactattttttccccggtgctgcgggttctgctcaggtgtctgttctgtttatccc

SEQ ID NO: 150538 - DNA, 482 bp, Homo sapiens
gcgggagggggctgctcgcccaagggaaggcctgaagcgaagagcgggcagcgggactgggaactggtggccggggggccgccaggcatcagccggcgagaaggcacttgttgctctaggtttcccagccgcctgtcgcagccgtttcgcagtgcacaacagctccagctggcagcatcacttcccgccaatttatccaacttctgccaaggctctgaaatgccaacaacgtcgaggcctgcacttgatgtcaagggtggcacctcacctgcgaaggaggatgcccgccctgagaagagcacccttggccaatttcaaccctgctggtcatagataaccaagtctcatctaaaactagataacctgacgaatcagcaaatcaatactacgccagcgacactttcattatattatcgcgaacatacaacagatacatcttagtccatctctccaagtaaacatcacacgttcacgacggaccc

SEQ ID NO: 150539 - DNA, 376 bp, Homo sapiens
  misc_feature (1)...(376): n = a,t,c or g
naaaaaagagggaagacaaataactaaaataagaaaatgaggacattattacctacnnnnnnnnnnnnnnnnnnnnnnnnnnnnnnnnnnnnnnnnnnnnnnnnnnnnnnnnnnnnnnnnnnnnnnnnnnnnnnnnnnnnnnnnnnnnnnnnnnnnnnnnnnnnnnnnnnnnnnnnnnnnnnnnnnnnnnnnnnnnnnnnnnnnnnnnnnnnnnnnnnnnnnnnnnnnnnnttcccaacaacgaaaagcctaggatgagatagcttcaccagtgaattctgccaaacatttaaagcagaattaataccaatcctctcagtctcttccaaaaacttgaacagtatgtaacacttccttacccattctatgaggccag

SEQ ID NO: 150540 - DNA, 909 bp, Homo sapiens
attggtggctagagggctgttgttgattaaggtacattaatggatccatttcctccctgtatccaagactctgccatttggctctgcagtgcctcccgctgaagaatcggagtatatttctccagcccctaatgttgggtttagtcatgtgtctagctttggccactggaatattaatctgcatgaccaaaaacttggaaagtatgcattcatttgtgctcactcactcctgctgtcaccatgagaacaagcccaggccagcctgctgcttccagcagaagataagagacaccaagagcaaagtcgagcttcccagacatgctcatgctagattaaccaatcctcagctgacccatagctccatgaaaataaatgactgttgtattaagccactgagatttggagtgacatgttatacagcattttgtgacaataactaactgatacaagggtcaccatcctttatctctgtagatttttgccaatttttaatagctagatggagatcttctagttgcctttatttataatgaatatgactgtagagctagtttggcctgacactaccagtaacctacccagaaattcagaaatactttcttctccaacccgccccaaccaactttttgtttgtttgtttttgggttctccctctttgcctaggctagagtacaaatggtacagtcagagctcactgtagcctcaaaatcctgggctcaagtgatcttccccttcagcctcctatgtagctaagactacagacatgtgccaccatgcctggctaatttttttattcttgcagacagagggtctcactatattgcccaagttggtttcaaactcctggcttcaagcagtcctcctgcctcacccttccaaagtgctaggattataggcatgagccaccat

SEQ ID NO: 150541 - DNA, 359 bp, Homo sapiens
  misc_feature (1)...(359): n = a,t,c or g
attttccttcctagtagaagtgttactgcctgtaactagctcaaaataccaatgcagtttctgcattctgggttttggttttccttttttgttttttttggtttttgaaaatttggttttggcccccaaggtggaagacaagggggaaaacaaaacaaaaggggaaaaattgccccccgggnnnnnnnnnntccccggcccaaacccccaggaaaaccgggaaaaaaagggcccccccaaaaccctaaaaaaatttgggaatttnnnnnnnnnngggggtaaaacaagggggccaaggggggaaaaaaactccgacccaaagggaacccccgggcaaaaccctggaaatnnnnnnnnnn

SEQ ID NO: 150542 - DNA, 1525 bp, Homo sapiens
aagtgcggtgtaattcccctgacagtaggaaggtggtcaaatggaatgtggaagacacctttagctggcttcggaaggaccactcagcctccaaggaggactacatggatcgcctggagcatctgcggaggcagtgtggcccccacgtctcggccgcagccaaggactccgtggaaggcatctgcagtaagatctaccacatctccctggagtacgtcaaacggatccgagagaagcaccttgccatcctcaaggaaaacaacatctcagaggaggtggaggcccctgaggtggagccccgcctagtgtactgctacccagtccggctggctgtgtctgcaccgcccatgcccagcgtggagatgcacatggagaacaacgtggttctgcatccggtataagggagagatggtcaaggtcagccgcaactacttcagcaagctgtggctcctttaccgctacagctgcattgatgactctgcctttgagaggttcctgccccgggtctggtgtcttctccgacggtaccagatgatgttcggcgtgggccttcttacgagggggactggcctgcagggattcgctgcctgttgcatgtctttgaggccctccaccgactctttggcgtcagtttccgagtgcttcgcctcacccctcaactgctacttccgccagtactgttctgccttccccgacacagacggctactttggctcccgcgggccctgcctagactttgctccactgagtggttcatttgaggccaaccctcccttctgcgaggagcttcatggatgccatggtctctcactttgagagactgcttgagagctcaccggagcccctgttccttcatcggtgttcatccctgagtgggcggggaacccccaacaccagcgctcacccgcatggaagcagagccgcttcaaacgccaccagttgatcctgcctgcctttgagcatgagtaccgcagtggctcccagcacatctgcaagaaggaggaaatgcactacaaggccgtccacaacacggctgtgctcttcctacagaacgaccctggctttgccaagtgggcgccgacgcctgactggctgcaggagctgagtgctgcctaccggcagtccaggcccgcagccacagctctggttcttcctcatcgttcctacctcggaggcccaaggaccgggattcggggccgtgagcagggtcctaagccgcgagcctcaccccacttaacatattcttgcggggaagaaggagccccaggggtgcttagtctggacttgctgggactcgggcccctggggcctcagagggaccccggctgccactgacatatgaagattatggttctgccagggctcccctccctgcctgtccccaagtcctcacctcaaactccctccaagtcccatgtatataggtcctgatgccttcccaaccccgcccctcaccctgttgcccaccttgtttcatttgtaaaaggaaatacagaaacccccccaagaaaaaaaaaaaaaaaaa

SEQ ID NO: 150543 - DNA, 328 bp, Homo sapiens
tttttttttttttttttgaccgttaatacttaagcacttactttaaaaaaacacaacaaaactccccccccaaaaacagaaaaggacaccatatcctaaatacttatggtaaggctataaaaggtttgaacagttcaagcaaagcaacaccagtgggtgaagctgggatcgagtgcttgggagaagtgatgagttaactaccctcagttgtacaccatgaggctccatctctcactcagcaagctccgctttcccttcccaaggagagtgctctctgttttcagtctgaaataaaatattccaccagctcagaaggcccggggagtac

SEQ ID NO: 150544 - DNA, 577 bp, Homo sapiens
ccgggtcgacccacgcgtccggtccctggacttgtcttggttccagaacctgacgacccggctgacggcgacgtctcttttgactaaaatgacagtgtccagtgctccagcctaggagcctacggggaccgcctcccgcgccgccaccatgcccaacttctctggcaactggaaaatcatccgatcggaaaactttcaggaattgctcaaagtgctgggggtgaatgtgatgctgaggaagattgctgtggcatgcagcgtccaagccagcagtggagatcaaacaggagggagacactttctacatcaaaacctccaccaccgtgcgcaccacgagaaattaacttcaaggttggggaggagtttgaggagcagactgtggatgggaggccctgtaagagcctggtgaaatgggagagtgagaataaaatggtctgtgagcagaagctcctgaagggagagggccccaagacctcgtggaccagagaactgaccaacgatggggaactgatcctgaccatgacggcggatgacgttgtgtgcaccagggtctacgtccgagagtgagtgccacagg

SEQ ID NO: 150545 - DNA, 546 bp, Homo sapiens
gggctggctattggagggcaggcggttggagggctggcggttggagggctggcggctggagggcaggcggttggagggcaggcggttggctttctggtcttagtcactcccagtctgaagacaaggcagaggcctagtgattcccagattcgatatgtgtcaagaatcaccccagaaggcttggctgttaagaggccagagtgctgcgttccccagagttcccgactaggcctgtctggtgtggggcccaagaatgcatttctgaaacagtcccaggtctgccaagagcctccggtgcaggtcagaggctttctgggtccacctctcttagaagcagtttgaaaaaccgtatccctgcctggtatagtgcctcacgcctgtaatcccagcactttgggaggtcgaggtgggtggatcacgaggtcaggagttcaagaccagcctggccaacatggtgaaacaccatttatactaaaaaaaaaaaaaaaaaagatttgcggccgcaagcttattccctttagtgagggttaattttagcttggcacg

SEQ ID NO: 150546 - DNA, 629 bp, Homo sapiens
taggtagggcaggctaagtgaacagcattgagtattttctgaatccctcatgataatttatagccacatactgcttcctttgacttcaggaatgatcagttttcataatggccactgggcctgcttagattgcagtattcattatctgcatctaatttggtagtttccacaatcgtatttgaatgaaaagaaaacttcaatccccccattaataacctgtgtcctttgcccaagctgccctagcaatacatcaattatgtaatgttaaaagacatatgagcaagaaaaaaagtgatttaaacttacctcatcaagaaatgtgccccctacaggcccgggcgcagtggctcacgcctgtaatccccagcattttgggaggccgaggcaggtggatcacctgaggtcaggagtttgagaccagcctggccaacatggtgaaaccccgtctctactaaaaaatacaaaaattagctgggcatggtggcgtgcacctgtaatcctagctactcaggaggctgaggcaggagaatcgtttgaacctgggaggcggaggttgcagtgagccgagatcacaccattgcactccagcctggacaacagggtgagactccgcctcaaaaaaaaaaaaa

SEQ ID NO: 150547 - DNA, 396 bp, Homo sapiens
  misc_feature (1)...(396): n = a,t,c or g
ggcacgagcggcacgagcggcacgagaactggaagaattaataaagatcnnnnnnnnnnnnnnnnnnnnnngggggcaaattttggctttaatgcccaagggggggggccaggggggcattttaacttacccaaaccctccccttccggggtaaaacaattttccgggcctaacccccccgagaaccgggattaacgggctgggcccccccggccgggtaaattttgggatttttaagaaaaaagggggttttcccccgggggcaaggggggtttaaaaccccggccctcgggggannnnnnnnnntgggtttccaaaggggcggggataaagccccccaccccgggcccctttaaacctttgaaaaggttccccgacctcccaattttccccagg

SEQ ID NO: 150548 - DNA, 777 bp, Homo sapiens
ggcacgagaacgcagatctgagactattatattatcctgtgaaggagggtctgtctgtctgcacagttggtcctaggctggcttctgaggacttgaatttcaagagggttccctaactggtaatcatggtttactgtatctagactatggaaataatgtggcttatcctgctattctttttgtgagtctggaaatttcacacatgctaggcagagtacacatatgtgacccagccgagataaaacctgtgtttcttgggaagtcacataggttgttgtattttcattaagggggaaagaaggtagtctgtgtgatcctcatggaaggcacagcacataaggaagccggtacatggatttttccagactctgtcagtgtcttttgccattgagatctttctactatatatccatactatgttacaggaataaatcttagccattacaaccctaagctgatcccatgagtccttctagcaaatctccaaacatggaggcagtcttgtggatccctgacacaaatatagtgttgtgatctcttaaggtttatccttcctcttaaactataaagagctggctgggcacagtggctcacgcttgtaatgtcagcactttgggaggccgaggcgggtggatcacgaggtcaaaagattgagaccatcctagccaacatggcgaacgccgtctctgctggaactacaaagattagcagggcgtggtggcacacatctgtggtcccagctactcgggaggctgaggcaggagagtcgcttgaacc

SEQ ID NO: 150549 - DNA, 385 bp, Homo sapiens
ggcacgagactggaagaagacattactgaacgagcttgcgacttttccgtcatcacaaccggacccagcagggatcaagacgggcggcgctctgctactgggcccgttaagccagagtagcccaagccctgaagacactgctcatccggaatggaaatcccgccgaccaactacccagcctccagggcggacttggtggcacagaactacatcaactaccagcatgggaccccgcacagggtgtttgaggtgcataatgcctaccgtgtcataatgcaggatactgtcaggatgaggacatcttgtatcaccttcatcacgcttctttctacattcattcgctacctctctattcgaatgatacattcgtcacttggcacttctg

SEQ ID NO: 150550 - DNA, 2180 bp, Homo sapiens
  misc_feature (1)...(2180): n = a,t,c or g
tttcgtcgggagcaagatggcgattccgggcaggcagtatgggcttattttgccaaagaaaacacagcagttgcaccctgttttgcaaaaaccatcagtgtttgggaatgattctgatgatgatgatgagacctctgtgagtgaaagccttcagagggaagctgctaagaagcaggccatgaaacagaccaagctggaaatccagaaggcccttgcagaagatgctactgtgtatgaatatgacagtatttatgatgaaatgcagaaaaaaaaggaggaaaataatcccaaattgcttttggggaaagacagaaagcccaagtatattcacaacttgctaaaagcagttgagatcagaaaaaaggaacaggaaaaaagaatggagaagaaaatacagagagaacgagaaatggaaaagggggagtttgatgataaagaagcatttgtgacatctgcatataagaaaaaactgcaagagagagctgaagaagaagaaagagaaaagagggctgctgcactggaagcatgtttggatgtaaccaagcagaaagatctcagtggattttataggcacctattaaatcaagcagttggtgaagaggaagtacctaaatgcagctttcgtgaagccagatctggtataaaggaagaaaaatcaaggggcttctccaatgaagtaagttcaaaaaaacagaataccacaagagaaatgcattctttcaaactgatgtgaaagtagagggaaaacccagatgcagacagttacttcgatgctaagagcagtccggatgatgaaatagaagaaactagagttaactgcagaagggaaaaggtcatagagacccctgagaatgacttcaagcaccacaggagtcaaaaccactctcggtcacctagtgaagaaagagggcacagtaccaggcaccacacgaaaggatcacgaacgtcgagaggacatgagaaaagggaagatcagcaccagcagaagcaatccagagaccaagagaaccattacactgaccgtgattaccggaaagaaagggattctcataggcacagagaggccagtcatagagattcccattggaagaggcatgaacaggaagataaaccaagggcgagggaccaaagagaaagaagtgacagagtatggaaaagggagaaagatagggagaaatattcccaaagagaacaagaaagagatagacaacaaaatgatcagaaccgacccagtgagaaaggagagaaggaagagaaaagccaagcaaaggaagagagcatatgaaagtaagggagggaaggtattgaaattattgataaatacagagatagagaaaaacgagaggtaggtgttcagtcttcagaaagaaatcaagaccagaaaggaaagcagcccaaatttcaagggcaaaggataaatttcttgaccaatttagatttcatacaaaatggagaaacatggcaaaggacaaaagaaagaaaccaagagaaaccctctaattctgaatcatcactgggagcaaaacacagactcacagaggaagggcaagagaagggtaaagaacaagagagaccacctgaggcagtgagcaagtttgcaaagcggaacaatgaagaaactgtaatgtcagctagagacaggtacttggccaggcagatggcgtcgggttaatgcaaagacctatattgagaaagaagattgattgatggctaccccaagagaaagatttaaggaagcacagaaaacttgtaattcctggaacctgcttgcgtaaaaccattaaagggagtgtgttaccagttagttttggagggccttttttaatttatttttccaaatttttaagtttaaagtccgtccttacagcttggatgttttggatggtggatgttttggctgaatttatatatagtgtgtactcatcaataccacattctttgttgtattcaagaaccgttaagagtgtgctaattccctgtaggtacataatgaggaaaatttgctccactacaaccattaaaaaataattttgggccaggatacggtagctcgtgcctgttaatacccaacattttggggagggccaagggcaggaagggatatttgagggctagggccatttcaaggacccagccttagggcaggggttaattaaggaccnttgttcttcttatttttt

SEQ ID NO: 150551 - DNA, 388 bp, Homo sapiens
ggcacgaggcaactagcgtctggcagcaggaatccaaccagggccctgagttctgaggcagagaggaggacagaagaaacaagaggctggagattgtcaaattcagtatcccagttggctcttgattcttggggaaaccatccctcagctcctagagggagattgctagatcatgaaactaattaccatcctttttctctgatgcaggctgttactaagtttaacccaggaatcacaatccgcggaaattgatctgcttgacaatgatttatttctagctgaggaggcttggtttgtatagatatattatgcaaatccaaacaaatccccgtatttgatcttgatcccctatttgattcctttaatactatttgtttggccctcttct

SEQ ID NO: 150552 - DNA, 351 bp, Homo sapiens
  misc_feature (1)...(351): n = a,t,c or g
ccgtctgctccggaggccgtgacggcagactcgttggtgtcctgtggttcgtctcagtcactacaggaccctggggggctgttgccacctccgccgggggcgaggagtcgcttaagtgcgaggacctcaaagtgggacaatatcctctgtggagaacacccccccatggaggcgagtttcctgttttccagcacccaacataacttgtaaggattccagtggcaatgaaacacattttactgggaacgaagttggttttttcaagcccatatcttgccgaaatgtaaatggctattcctacaaantggcagtcgcattgtctctttttcttggatggttgggagcagatcg

SEQ ID NO: 150553 - DNA, 393 bp, Homo sapiens
  misc_feature (1)...(393): n = a,t,c or g
aagccttaaaactccggaggggggttggcccaatatgtcccccccccaaaataagggtccttttccaaaatccccaggttggttttaatagggccccctaaaaggaaaaaaatatttagttgcctgcccggggtaactttgggccccccaggggttctttaaaacggcccccccnnnnnnnnnnnnnngtgaataagttatacttctatttttcagaaacaaaaatgacaagtggcaacttgcctttgtaaaagattaaagagtatcagagtaataagctatctctcatagagacagaagcccgagaaccactattatacagctttcaaaggaagtcctattaaataaatctcacaataatatactttaactcaacaaaaccggacgcgtggg

SEQ ID NO: 150554 - DNA, 683 bp, Homo sapiens
  misc_feature (1)...(683): n = a,t,c or g
tattatgtaaacatttaggtgggattccagattcagatttgaaacttaaaacctgaaaggcccattgagaaggccagtatctggcattatcattcatgtaatctctctaccattataccagaagtgctccaagaatgagaaaaaaataccatggaggcaaatggaaatggttaaaatgtaccatctgccaataaccctccattgggactcttaaaaaatattgtgttttaacggtattccttctttcctgttttagggatttgagcctccttgattttaatagagaacttctagtgtatggatttaaagatttctctttttcattcatataccattttatgagttctgtataattttttgtggtttttgttttgttgagttaaagtatattattgtgagatttatttaataggacttcctttgaaagctgtataatagtgtttctcgggcttctgtctctatgagagatagcttattactctgatactctttaatcttttacaacaggcaagttgccacttgtcatttttgtttctgaaaaataaaagtataacttattcacnnnnnnnnnnnnnnnnggggcgcccgttttaaaggatccttgggggggcccaagtttacccgggcttgcaaggaaatatttttttccttatagggggccgaattataccctacctggggat

SEQ ID NO: 150555 - DNA, 1373 bp, Homo sapiens
  misc_feature (1)...(1373): n = a,t,c or g
gcaaaactctggaggggaggtggccaatatgtccccccccaaaaaaaaggttctttccaaaaattcccaaggaggcttttattcgcccccccataaagaaaaaaataaaaccttcccagcccgcgttaaattgggcccccccaaggatcccttaaaacggccccccccnnnnnnnnnnnnnnngtgaataagttatacttttatttttcagaaacaaaaatcgacaagtggcaacttgccgtttgtaaaagattaaagagtatcagagtaataagctatctctcatagagacagaagcccgagaaacactattatacagctttcaaaggaagtcctattaaataaatctcacaataatatactttaactcaacaaaacaaaaaccacaaaaaattatacaggaacttcattaaatgggtatatggaatggattagggggaaatcttttaaatccatacactaggaagttctcctattaaaatccaaggaggctccaaatctcgttccttttaaaaaattatttatgggatataattgccgtttttcctaaatggtttccattagtaataccccagtcctggtaagtcctgggttccatagtaatctataatgtaacctaccttccatctgaaggtccaacaatctgcattggaaatcaagaatgaaatcaattaggctcccaattccacaaaaccctacagtgcaaaaactttaacaaaccccaaaccaggggtatccccaaggtaaaaatcgaatctgctccccaacccatcccaagaaaaagagacaaatgccgactgcccactttggtagggaattagcccattttacattttcgggcaagatatggggcttgaaaaaaacccaacttcgttccccagtaaaatgtgtttccattgcccactggaatccttaccaagttatgttgggtgctggaaaacaggaaacatgagctgtgtagtttgtacagttaactggttcttgcgtagcgtcatttatttttggatctttacaaatatattgtcccactttgaggtcctcgcacttaagcgactcctcgcccccggcggaggtggcaacatgccccccagggtcctgtagtgactgcagacgaaccacaggacaccaacgagtctggccgtcacggcctccggagcagacggaccagacggccaggcggccgccatcttggagaccgacactttctcgccacttccgcttccgcctccgcccaggagcgggagggagaagggcaacagggcgaggttcttaaagggacctcgcataggatagaggccagttccgtctcttcgcgtgttcttctgcccgtgagcccgtggaatcacattgggagacccttttaaaatatgcat

SEQ ID NO: 150556 - DNA, 482 bp, Homo sapiens
atttatatgaatctttgctagttttgcatgtttaaaattatttcaacataaaaaaattatatgggtcatgtagttttttgtgcagtttaattctaggcaccatagtttctgttttaatgggtgtattttcttctttcatggaattgggatagtctgttgtattaaaaacctattcatttttgtacattaagattcttctggccaggtgcaatggctcaagcctataatcccagtacttgggaacctgaggcaggcagatcacctgaggtcaggagttcaagaccagcatgtccaacatggtgaaaccccatctctactaaaaatacaaaaaaaattagccaggcatggtggcgcatgcctgtaatcccagctacttgggaggctgaggaggagactcactagaactcaggaagcagaggttgcagtgagccaagactgcgccactgcactctggcctaagcaacagagggagactccatctc

SEQ ID NO: 150557 - DNA, 1778 bp, Homo sapiens
tggcggtaactcaagcttgacacccgcttgtacagccctcgaaaccgccgctcgacccacgcgtccagcacacgtccggtcagaggagttgtatgaccattactagtagataatcgaacacggataccactactggagaggacgccacagatcctgagcactttctaagtacctggcaatacactaagcgcgctcaccttttcctctggcaaaacatgatcgaaagcagaatgttttgatcatgagaaaattgcatttaatttgaatacaatttatttaccacatataggataatgtatatatcaccaccattactggtatttgctggttatgctagatgtcattttaaaaaataacaatctgatatttaaaaattaaatcttattttgaaaatttccaaagtaatacatgccatgcatagaccatttctggaagataccacaagaaacatgtaatgatgattgcctctgaaggtctattttcctcctctgacctgtgtgtgggttttgtttttgttttactgtgggcataaattaatttttcagttaagttttggaagcttaaataactctccaaaagtcataaagccagtaactggttgagcccaaattcaaacccagcctgtctgatacttgtcctcttcttagaaaagattacagtgatgctctcacaaaatcttgccgccttccctcaaacagagagttccaggcaggatgaatctgtgctctgatccctgaggcatttaatatgttcttattattagaagctcagatgcaaagagctctcttagcttttaatgttatgaaaaaaatcaggtcttcattagattccccaatccacctcttgatggggctagtagcctttccttaatgatagggtgtttctagagagatatatctggtcaaggtggcctggtactcctccttctccccacagcctcccagacaaggaggagtagctgccttttagtgatcatgtaccctgaatataagtgtatttaaaagaattttatacacatatatttagtgtcaatctgtatatttagtagcactaacacttctcttcattttcaatgaaaaatatagagtttataatattttcttcccacttccccatggatggtctagtcatgcctctcattttggaaagtactgtttctgaaacattaggcaatatattcccaacctggctagtttacagcaatcacctgtggatgctaattaaaacgcaaatcccactgtcacatgcattactccatttgatcataatggaaagtatgttctgtcccatttgccatagtcctcacctatccctgttgtattttatcgggtccaactcaacccatttaaggtatttgccagctcttgtatgcatttaggttttgtttctttgttttttagctcatgaaattaggtacaaagtcagagaggggtctggcatataaaacctcagcagaaataaagaggttttgttgtttggtaagaacataccttgggttggttgggcacggtggctcgtgcctggtaatcccaacactttgggaggccaaggcagggctgatcacttgaagttgggagttcaagaccagcctggccaacatggtgaaatcccgtctctactgaaaatacaaaaattaaccaggcatggtggtgtgtgcctgtagtcccaggaatcacttgaacccaggaggcggaggttgcagtgagctgagatctcaccactgcacactgcactccagcctgggcaatggaatgagattccatcccaaaaaataaaaa

SEQ ID NO: 150558 - DNA, 369 bp, Homo sapiens
  misc_feature (1)...(369): n = a,t,c or g
caccaggttttcctcttttctccttccccgaggggaatgggccctcaaaaaggcaaaccggtgattaaataaggtgccttttttaagacgggaaagtttgggaatgctccccccccnnnnnnnnnnnnnnnnccaagaaaagaaaaaaggctgtcatttttttgtcccagtgcagacaaagtgcattgttgtagaaggaggtgaagagaccttggttggagatgtctaagtgtagccataagcggtccttcaagcatgtggtggcaatgtttcctgaaaaagatgtctctgtactttgtatgaggcaagctttaaaaccaaggaatccagaagagttgatggttttgtgtgtgtgcgtgtgggcaccag

SEQ ID NO: 150559 - DNA, 618 bp, Homo sapiens
cttgaacacctgacctgaagtgatcctcttgcctcagcctcccatagtgctgcgatcacaggtgtaagtcactgagtttggccattattccatttctgtacacaaaaacctttctcattctgtgctataactagttagcatttaaattgggtggatgtggtataactagtgccttgttgatattgatgcatatttacatggttttgctgttataaacaatggtcccttgctattataaatcacactgcttataagtacccttgcatctaaattacttcaaatgtgtaactatattgggtaggataatttctagaagtggaattgtgaacccaaagttttaggtgcatttgtaattttgatttataaccaatcttttcactgatctacttctctgcctctaatttctactaggtgtttgtttgtttgtttgtttgttttgagacagggtcttgctctgtcacccaggctggaggacagtggtgcaatcacggctcactgcagcctcaacctgccacctcagcctcctgaatagttggggtgtgtggcaggtgtataccaccacttccaggtttttttgttgttgttgtttaatagagatgaggtcttgctatattaaac

SEQ ID NO: 150560 - DNA, 464 bp, Homo sapiens
gtggtctcattcaggtcctttacatgaagctgaaaggtgagaatattgtcagaccaacacatcaagagaaactatttgctggataagccactagtaaagttctgatgatccttcataaactcttttctaccaatccctagaagtaatcatggtgaagaacataaccccagaatgtcgtcacatgttttatgcacgcatttaaaaagggcaaagaggatgtacctcttcacccattactttgtccggagcttttggtctattctcaggtctagtgtgatacacccacatcctgagacagctaccgacgctgcgacatgaacagaaaagcagggaaaactgtctggaagagatgtccttggatagatttcaagctgctaaacctgtcccccactcccacccaccacacgtacaaaccaaccctggcaggacactagaaaatacacgctatgggtttaactcgtgcc

SEQ ID NO: 150561 - DNA, 2612 bp, Homo sapiens
gtttgcatagctccctggacttctgctttgcactgccctgcaggagtgggtggggaaaggaagtggctttgaggcacacagaggggcttgttgaggccaccggaggaagcttctgccaccaatatgggacctgtgcccagcctaccagaagagagcatctgaaaacatgtatcgacatggtaacccctctgcttgaagcctcacatggctccctattgccttggtgctgaacaccctatggctgaccgtggcccagcctctgcaacagctctgcctcctctccagtgccttttcactttgtactcaaagccacatcgcattgaagccacaggtggggcaaggtcatgcatgactgagtctccaaatcccttcaccctgtttggttctgcaacggggattaggggagccccacgatttgttttcaaaggatgtccgggctccaggacaggatgccctgggtcacctgatgacaggtgtggtggttggaaagggccgggtttcagctccgggtacacttcctccttccttctgctgcgtggtgtggcctcttccacgtcctcagaatccagctgttactcgtccgcggcctctcagctctagggccctctgcacactggcccccccagagactctgacccatggatcccctgggcccggccaagccacagtggtcgtggcgctgctgtctgaccacgctgctgtttcagctgctgatggctgtgtgtttcttctcctatctgcgtgtgtctcaagacgatcccactgtgtaccctaatgggtcccgcttcccagacagcacagggacccccgcccactccatccccctgatcctgctgtggacgtggccttttaacaaacccatagctctgccccgctgctcagagatggtgcctggcacggctgactgcaacatcactgccgaccgcaaggtgtatccacaggcagacgcggtcatcgtgcaccaccgagaggtcatgtacaaccccagtgcccagctcccacgctccccgaggcggcaggggcagcgatggatctggttcagcatggagtccccaagccactgctggcagctgaaagccatggacggatacttcaatctcaccatgtcctaccgcagcgactccgacatcttcacgccctacggctggctggagccgtggtccggccagcctgcccacccaccgctcaacctctcggccaagaccgagctggtggcctgggcagtgtccaactgggggccaaactccgccagggtgcgctactaccagagcctgcaggcccatctcaaggtggacgtgtacggacgctcccacaagcccctgccccagggaaccatgatggagacgctgtcccggtacaagttctatctggccttcgagaactccttgcaccccgactacatcaccgagaagctgtggaggaacgccctggaggcctgggccgtgcccgtggtgctgggccccagcagaagcaactacgagaggttcctgccacccgacgccttcatccacgtggacgacttccagagccccaaggacctggcccggtacctgcaggagctggacaaggaccacgcccgctacctgagctactttcgctggcgggagacgctgcggcctcgctccttcagctgggcactcgctttctgcaaggcctgctggaaactgcaggaggaatccaggtaccagacacgcggcatagcggcttggttcacctgagaggctggtgtggggcctgggctgccaggaacctcattttcctggggcctcacctgagtgggggcctcatctacctaaggactcgtttgcctgaagcttcacctgcctgaggactcacctgcctgggacggtcacctgttgcagcttcacctgcctggggattcacctacctgggtcctcactttcctggggcctcacctgctggagtcttcggtggccaggtatgtcccttacctgggatttcacatgctggcttccaggagcgtcccctgcggaagcctggcctgctggggatgtctcctggggactttgcctactggggacctcggctgttggggactttacctgctgggacctgctcccagagaccttccacactgaatctcacctgctaggagcctcacctgctggggacctcaccctggaggcactgggccctgggaactggcacccatgggcccacccatgagtgatggttctggctgatttgtttgtgatgttgttagccgcctgtgaggggtgcagagagataatcaccgcaccgtttccagatgtaatactgcaaagaaaaccaatgatgaggccgggtgcggtggctcacacctgtaatcccagcactttgggaggccgaggcaggcggatcacaaggtcaggagatcgagaccatcctggccaatatggtgaaacccgtctctattaaaaaatacaaaaattagtggggcgtggtctcaggctcctgcagtcccagctacttgggaggctgaggcaggagaatggtgtgaacctgtgaggtggagcttgcagtgagccaagatcgcgccattgcactccaacctggacgacagagcaagactccatctcaaaaaaataaaataaaggccatatgtttaatca

SEQ ID NO: 150562 - DNA, 3127 bp, Homo sapiens
gtttgcatagctccctggacttctgctttgcactgccctgcaggagtgggtggggaaaggaagtggctttgaggcacacagaggggcttgttgaggccaccggaggaagcttctgccaccaatatgggacctgtgcccagcctaccagaagagagcatctgaaaacatgtatcgacatggtaacccctctgcttgaagcctcacatggctccctattgccttggtgctgaacaccctatggctgaccgtggcccagcctctgcaacagctctgcctcctctccagtggtgaagacccagcctgctgagactcctcctgcagttcctcaacatgcctgcatttctgctgccgtcagggcctttgcgaaggttgttccttgtaactggaatgcccttccatccctttttttattcaaaaggctgcaattttaattgaagaaagttcccttccaaggttcatgagttgcctgacttgcccaccggtttcctgcaagatcccttggcctggcacttagtgctcaggaaatatttggtgatgggccaactgagtgagaaggtgggatctggtgggaaggaaaggcggaaggtagaaattctgctcacttcctcattcccacctcccaaggaacccctggtgtccctgtggaacccgctttgggaaccggtggttcaggtcagccttttcactttgtactcaaagccacatcgcattgaagccacaggtggggcaaggtcatgcatgactgagtctccaaatcccttcaccctgtttggttctgcaacggggattaggggagccccacgatttgttttcaaaggatgtccgggctccaggacaggatgccctgggtcacctgatgacaggtgtggtggttggaaagggccgggtttcagctccgggtacacttcctccttccttctgctgcgtggtgtggcctcttccacgtcctcagaatccagctgttactcgtccgcggcctctcagctctagggccctctgcacactggcccccccagtgtcacgggcatccagacgggatccagtgcatcctcttttagaagaaaggcctgtctccaggtccccgagtccctctagcatctcccagaaggtgtcaagacgcagcagtgtccaggagcggcagagactctgacccatggatcccctgggcccggccaagccacagtggtcgtggcgctgctgtctgaccacgctgctgtttcagctgctgatggctgtgtgtttcttctcctatctgcgtgtgtctcaagacgatcccactgtgtaccctaatgggtcccgcttcccagacagcacagggacccccgcccactccatccccctgatcctgctgtggacgtggccttttaacaaacccatagctctgccccgctgctcagagatggtgcctggcacggctgactgcaacatcactgccgaccgcaaggtgtatccacaggcagacgcggtcatcgtgcaccaccgagaggtcatgtacaaccccagtgcccagctcccacgctccccgaggcggcaggggcagcgatggatctggttcagcatggagtccccaagccactgctggcagctgaaagccatggacggatacttcaatctcaccatgtcctaccgcagcgactccgacatcttcacgccctacggctggctggagccgtggtccggccagcctgcccacccaccgctcaacctctcggccaagaccgagctggtggcctgggcagtgtccaactgggggccaaactccgccagggtgcgctactaccagagcctgcaggcccatctcaaggtggacgtgtacggacgctcccacaagcccctgccccagggaaccatgatggagacgctgtcccggtacaagttctatctggccttcgagaactccttgcaccccgactacatcaccgagaagctgtggaggaacgccctggaggcctgggccgtgcccgtggtgctgggccccagcagaagcaactacgagaggttcctgccacccgacgccttcatccacgtggacgacttccagagccccaaggacctggcccggtacctgcaggagctggacaaggaccacgcccgctacctgagctactttcgctggcgggagacgctgcggcctcgctccttcagctgggcactcgctttctgcaaggcctgctggaaactgcaggaggaatccaggtaccagacacgcggcatagcggcttggttcacctgagaggctggtgtggggcctgggctgccaggaacctcattttcctggggcctcacctgagtgggggcctcatctacctaaggactcgtttgcctgaagcttcacctgcctgaggactcacctgcctgggacggtcacctgttgcagcttcacctgcctggggattcacctacctgggtcctcactttcctggggcctcacctgctggagtcttcggtggccaggtatgtcccttacctgggatttcacatgctggcttccaggagcgtcccctgcggaagcctggcctgctggggatgtctcctggggactttgcctactggggacctcggctgttggggactttacctgctgggacctgctcccagagaccttccacactgaatctcacctgctaggagcctcacctgctggggacctcaccctggaggcactgggccctgggaactggcacccatgggcccacccatgagtgatggttctggctgatttgtttgtgatgttgttagccgcctgtgaggggtgcagagagataatcaccgcaccgtttccagatgtaatactgcaaagaaaaccaatgatgaggccgggtgcggtggctcacacctgtaatcccagcactttgggaggccgaggcaggcggatcacaaggtcaggagatcgagaccatcctggccaatatggtgaaacccgtctctattaaaaaatacaaaaattagtggggcgtggtctcaggctcctgcagtcccagctacttgggaggctgaggcaggagaatggtgtgaacctgtgaggtggagcttgcagtgagccaagatcgcgccattgcactccaacctggacgacagagcaagactccatctcaaaaaaataaaataaaggccatatgtttaatca

SEQ ID NO: 150563 - DNA, 3002 bp, Homo sapiens
gtttgcatagctccctggacttctgctttgcactgccctgcaggagtgggtggggaaaggaagtggctttgaggcacacagaggggcttgttgaggccaccggaggaagcttctgccaccaatatgggacctgtgcccagcctaccagaagagagcatctgaaaacatgtatcgacatggtaacccctctgcttgaagcctcacatggctccctattgccttggtgctgaacaccctatggctgaccgtggcccagcctctgcaacagctctgcctcctctccagtggtgaagacccagcctgctgagactcctcctgcagttcctcaacatgcctgcatttctgctgccgtcagggcctttgcgaaggttgttccttgtaactggaatgcccttccatccctttttttattcaaaaggctgcaattttaattgaagaaagttcccttccaaggttcatgagttgcctgacttgcccaccggtttcctgcaagatcccttggcctggcacttagtgctcaggaaatatttggtgatgggccaactgagtgagaaggtgggatctggtgggaaggaaaggcggaaggtagaaattctgctcacttcctcattcccacctcccaaggaacccctggtgtccctgtggaacccgctttgggaaccggtggttcaggtcagccttttcactttgtactcaaagccacatcgcattgaagccacaggtggggcaaggtcatgcatgactgagtctccaaatcccttcaccctgtttggttctgcaacggggattaggggagccccacgatttgttttcaaaggatgtccgggctccaggacaggatgccctgggtcacctgatgacaggtgtggtggttggaaagggccgggtttcagctccgggtacacttcctccttccttctgctgcgtggtgtggcctcttccacgtcctcagaatccagctgttactcgtccgcggcctctcagctctagggccctctgcacactggcccccccagagactctgacccatggatcccctgggcccggccaagccacagtggtcgtggcgctgctgtctgaccacgctgctgtttcagctgctgatggctgtgtgtttcttctcctatctgcgtgtgtctcaagacgatcccactgtgtaccctaatgggtcccgcttcccagacagcacagggacccccgcccactccatccccctgatcctgctgtggacgtggccttttaacaaacccatagctctgccccgctgctcagagatggtgcctggcacggctgactgcaacatcactgccgaccgcaaggtgtatccacaggcagacgcggtcatcgtgcaccaccgagaggtcatgtacaaccccagtgcccagctcccacgctccccgaggcggcaggggcagcgatggatctggttcagcatggagtccccaagccactgctggcagctgaaagccatggacggatacttcaatctcaccatgtcctaccgcagcgactccgacatcttcacgccctacggctggctggagccgtggtccggccagcctgcccacccaccgctcaacctctcggccaagaccgagctggtggcctgggcagtgtccaactgggggccaaactccgccagggtgcgctactaccagagcctgcaggcccatctcaaggtggacgtgtacggacgctcccacaagcccctgccccagggaaccatgatggagacgctgtcccggtacaagttctatctggccttcgagaactccttgcaccccgactacatcaccgagaagctgtggaggaacgccctggaggcctgggccgtgcccgtggtgctgggccccagcagaagcaactacgagaggttcctgccacccgacgccttcatccacgtggacgacttccagagccccaaggacctggcccggtacctgcaggagctggacaaggaccacgcccgctacctgagctactttcgctggcgggagacgctgcggcctcgctccttcagctgggcactcgctttctgcaaggcctgctggaaactgcaggaggaatccaggtaccagacacgcggcatagcggcttggttcacctgagaggctggtgtggggcctgggctgccaggaacctcattttcctggggcctcacctgagtgggggcctcatctacctaaggactcgtttgcctgaagcttcacctgcctgaggactcacctgcctgggacggtcacctgttgcagcttcacctgcctggggattcacctacctgggtcctcactttcctggggcctcacctgctggagtcttcggtggccaggtatgtcccttacctgggatttcacatgctggcttccaggagcgtcccctgcggaagcctggcctgctggggatgtctcctggggactttgcctactggggacctcggctgttggggactttacctgctgggacctgctcccagagaccttccacactgaatctcacctgctaggagcctcacctgctggggacctcaccctggaggcactgggccctgggaactggcacccatgggcccacccatgagtgatggttctggctgatttgtttgtgatgttgttagccgcctgtgaggggtgcagagagataatcaccgcaccgtttccagatgtaatactgcaaagaaaaccaatgatgaggccgggtgcggtggctcacacctgtaatcccagcactttgggaggccgaggcaggcggatcacaaggtcaggagatcgagaccatcctggccaatatggtgaaacccgtctctattaaaaaatacaaaaattagtggggcgtggtctcaggctcctgcagtcccagctacttgggaggctgaggcaggagaatggtgtgaacctgtgaggtggagcttgcagtgagccaagatcgcgccattgcactccaacctggacgacagagcaagactccatctcaaaaaaataaaataaaggccatatgtttaatca

SEQ ID NO: 150564 - DNA, 1482 bp, Homo sapiens
ctagctgtcagacacttcttcctcctcctcctcatcctcgtcatctttcctgtctatttcagaagtgtccgacgactcatggagcaagacgtattctctgctactgaatccaaatttgagtacatccttttcttttagttcatagtatctctgtggctcaatacgtttgttgtttaagaaggttccattgcctgagccaaggtcaatgatgtagggcttcactcttcggccaactgtgccatcagcacgggtatattccacaagccgatattgaaagaccgcatgctgctttgaacaagacgggtgatcaattggaatgtctgcaatgcggcggtgtcgacccagtaggtacgcactctgtcgatgtatgtacatgactggaagcacctcatcatttttaaatgggtagagacgccaccgttttttggggatacgtgcttctgggggctcactatatttaatgactacaccccggaaagtgttggtgtcctcaagaagtgccccagaaagttcaaagcttggtttttctttagcgggcacctctttttctttgttgttgccaccaggccgaggaaccaactcctgagactcactgccgccaccaccaacgtcattcctctggcgatgctcccgtcgcctggcattataaaactcccgctcttcttcctgagcctgcaggttctgagtgtctcgatcccgtccctgaccctgcccactcccaggcctctcgttagacgttctcctttggtgggaatggccccggtgtctgtcccggtcactgttcctagctctcctgtgttcctgttctgatggttccctgtgctgccgatcctcccgtcctctccggggatgatcctcacgctcctcttcactgggccctctgactgtcccaaggcccccgccgccactccagcgccgtgcagccaccgccgcacagccaccgtggccaccaccatgacgactgcgcgtccccctcgcaggtgcgccagaactaccgccatcaaccgccagatcaacgtggagctctatgcctcctacatctacctgtccatgtcttactactttgaccacaatgatgtggctttgaagaactttgccaaatactttcttcaccaatctcatgaggagagggaacatgccaagaaactgatgaagctgcttcactttgactgttgagtggtgaggacttcggtttctcttactgcgaggagacttgcttcttctccctgaggccttgtttttctttttgggtggggaccggctaactcctcgggctcggttcccgcggtggcccgagcgggccggctcgctggtcggcggagacgggctaccaccggagtggtccggacggcggtgggcgggaggtgcgacttctgggctgagacgctcctgcttcaccaccacccccgccggcagcaccacgtccccgtcccggtgtcttcgccggctccctcgctcccgttcgctcttcaccgccttcat

SEQ ID NO: 150565 - DNA, 2770 bp, Homo sapiens
atggggctgaaggccgcccagaagacgctgttcccgctgcgctccatcgacgacgtggtgcgcctgtttgctgccgagctgggccgagaggagccggacctggtgctcctttccttggtgctgggcttcgtggagcattttctggctgtcaaccgcgtcatccctaccaacgttcccgagctcaccttccagcccagccccgcccccgacccgcctggcggcctcacctactttcccgtggccgacctgtctatcatcgccgccctctatgcccgcttcaccgcccagatccgaggcgccgtcgacctgtccctctatcctcgagaagggggtgtctccagccgtgagctggtgaagaaggtctccgatgtcatatggaacagcctcagccgctcctacttcaaggatcgggcccacatccagtccctcttcagcttcatcacaggttggagcccagtaggtgggaatcttatccatgacccacttcttcaaaaccctccatggtttacagaacccttttaagaactgtaagccttgtgaggttcggcaggtgttattttcctctttgcagttgggaaactgaagcccagagaggggaaatgatatgccaaagtcacacacggcatggcagggctggaagtgaagcctgatcacttggctccaaatcatcaacctcacctctgccccctcagcacccccacccttgccactgaacagctacaggagttctaagcatgagacacagagggcggcagcagatttagggggcaagaagatgaaattgggctgcatttgaggcagttaaacaaaataatggctatgaagatttttttttttttttttttttgagacagggtctcactctgtcccccaggctggagtgcagtggtgtgatcatggctcactgcagcctcagtctccctgggctcagagatcctccaacctcagcctcctgagtagctgagagtacaggcatgcaccgtggtgctggttaattttttgtattttttttgtagagatggtgtctcactatgtggcccagactggtcttgaactcttgggctcaagtgatctgcccgcctcagtctcccaaatgctgggattacaggtgtgagccaccgcaactggtggcctatgaaaattttttttttttttcagacggcgtctcactctgtcgcccaggctggagtgcagtggtgcaatctcggctcactgcaagctctgcctcctgctttcatgccattctcctgcctcctgcctcagcctcctgagtagctgggactacaggtgcccgccaccgcgcccggctaaattttttttgtatttttagtagagacggggtttcaccatgttagccaggatggtctcgatctcctgacctcgtgatccacccgcctcggcctcccaaagtgctgggattacaggcgtgagccaccgcgcccggccccctcctccccaatttttcatacagttgcccctatacaatatacacacccttgagggcaggtagaagtccagcccacctgcgccagggacgctgtggggagcatttttctctgagttgctaagagaaccctgatgggcggtgagcagaggaaccacagaacagccagggctcaaggctggcagcggataggccaggagagatcgctaggccccagaaagccccctactttcagtcagggtgggcaagagggtcttcgcagtgaagtgggaggcaggcctggaggagggagccagggagacccctgggagccctgaggttgggggccaggcagggagatggggatagcagctgcctcagtacttggggaccttgctgtagtcttcggaatgcacgtgccggcacaagcagatggacaggaccatccccaggagctcgaccatggccacacccacgcccacgccgaggatgatgcccaggttctcctgcagccacgcctgcaccttctccatgcagccctcctggtacacaggccagtcctcagggtggttgccactctgggtcctgttgccgggggcctcgcagaagcccttcctcacagaaaggctgttgtcctcttcccccttgacttcgcaggaacaggggtaggtgacctcagggcgattcatgagctcagcgttgtctgtccagttgtagaagctgacccagccgcagcacttcacctgagcctgcacgtagtcccaggcatcctgcaggctgtcctcgcgactgctgttgtagtctcgaatgagctcagtcacgatgccacccatctcctgcttcagcttgcccatgttgaagtagaagagggccccggccgtcacctgggcaatgaggatcaggagcaggaaagcaaagtacagccccagcaggcagcggacctcgttgacggcgccgatgcagcccaggaagcccatgagcatagtgactgcccccacgccgatgaagacataggcccccatcctaagcgagctggaggaggtttgcaggacagagatgaaactgctcttgtcggccaggatccacaccccgaagcccaggatcactgcgcccaggataaagaagatcaagttgaagaggaagagaaagtatttggtgactttgatacaggctgagcccatcccgccagtcctggagcttccttccacgaaaccagtgcagctggtcacagggcccacttctgcctgtgcccacgtgtcgtccacacagcagcagggaggactctgcgggttctgctttctgctccgcgctgcaggcccagcgtcacccgctcgtgcctcagtcggc

SEQ ID NO: 150566 - DNA, 1016 bp, Homo sapiens
gtcgtcggggtttcctgcttcaacagtgcttggacggaacccggcgctcgttccccaccccggccggccgcccatagccagccctccgtcacctcttcaccgcaccctcggactgccccaaggcccccgccgccgctccagcgccgcgcagccaccgccgccggccgccgcctctccattagtcgccgccatgaagaccgccgttccacctcgcaaggtgcgccaagaactaccaccaaggactcaagagggccgcccatcaacccgccaggatcaaccctggaagctctacggcctcctacgttttaccctgtcccatgtcttacttacttttgacccgcgatgatggtgggctttgaagaacctttgcccaaatactttctttcaccaattctcaatgaaggaagagggaaaccatgctgagaaaacttgatgaaagcttgcagaacccaacgagggtggccggaatctttccttcaaggatatccaggaacccagactgctgctgactggggagagcggggcttgaatgccaatggagtgtgcattacatttgggaaaaaaatgttgaatcagtcactactggaactgcacaaaactggcccactgacaaaaatgaccccccatttgtgtgaccttcattgagacaacattaccctgaatgagcagggtgaaagccatcaaaagaatttgggtgaccacgtgaccgaacttgcgcatagatgggagcgcccgaatctggctcgcgcggaataatctctttgacaaagcacacccctggggagacagtgataatgaaagctaagcctcggcgctaaattttccccatagccgttgggggtgacttccctggtcaccaaggcagtgcatgcatgtttggggtttcctttaccttttctataagttgtaccaaacaccatccacttaagttctttgatttgtaccattcccttccaataaagaattttggtacccaggtgttgtctttgaggtcttgggatgatccagaatctatt

SEQ ID NO: 150567 - DNA, 1101 bp, Homo sapiens
aacatgggaaaatattttattttattttattttatttttatttttttatttttttgagacggagtctcgctctgtcaccccaggttcggactgcggactgcagtgtgcgcaatctcggctcactgcaagctccgcttcccgggttcacgccattctcctggcctcagcctcccgagtagctgggactacaggcgcccgctatccgcgcccggctaatttttttttgtattttttagtagagacaggggtttcaccttgttagccagggatgggtctcgatctcctgaactcatgatcccaccccgcctcggccttccaaagtgctgggattataggcgtgagccaccgcgcccggtcgagaccttttttttaaaagcagagaatgtaagagtgaactatatctaagaaactgctaaatactgtaattgtataagcccatctagtaaatgagaacaattcttaaaaatgaaaataaaattctttaagttttcctcaccaaattatagaaaataaaagaaaatccaatcaaacaaaccctctatgggactcaatagtatgatctaggaatattacagtttgaaaaagaaagtcaccaaagatgatagttcacaacaatgattggtctctctttccactttcccaggcaagacaaactaaaacctaccgcagcaaaaaaatattatcataaacctactagtgcatagaaaaaaataaattcttagtccatacatattctttataggcttgcttcttagtttttgaaggataactaattatatgttataaaattaagaacatctcaatatattctctctaaatggctaaaagttaattactaaccaaaatcaaaggccatccgatggtaagaacagaattatgagtgtcaaagttttacaggcacttcaaattaacaaggtattaatgaaaacacaaagtggaaacctggttctacagatctataaagttcctttaagacaaatgaaccataataagaatcattcataaaacaataaaaagctcctgtacccacaggcctgattatttaatacattctaattgtttatacacagactatttaaacaagtcaagcggacgcgtggg

SEQ ID NO: 150568 - DNA, 1640 bp, Homo sapiens
cctcactctcctagcccaggactttctgctaccccttccctttatagacctgctggaagaggagggggacgcacatctgctctagggccctgtacagaggcaagggtgtggctaattaccaaggaatggggccaggggtgacgggcacaggcccctcccctctgccaagcccagcctctgatgatacagagaatcccgtgggctcctaggatccagccagggcaggcacgggggtcggggcatccttcaggggagcaacatggcagcagggccaggggcggggctcagcctgctcctgtacacagtgcccgccggccacgtgcctcctcactggggcagacgctcccacctccaggccttggtctttgctgtctcgtctgctgggccattgcttctcggtcctcacagtcccagctgcagctccacctcctccaggaagccttcggaacctcccagggcagggccgcagtgtccttagactagaccgcccctcagatgaccaggttgctctcacttagccggaccacatagcggttctcctcggccttgttctctgctgggggcttcagccactttgtacggcttccgccacttcctagcagggcctgctgctcaggggggaggccaggctgtggggagtcagggagatcaccccacgagggcccagcctccgtgatggtcttcacctcagacaccattgaacttgtccgctgctcaggaattcgagccacgcggaacctgcccacagacaagatggtgatctcgccctgacgccctgccttggccccggccttgggaaccctggtcgggttaggcagaaggctgggaacaggagtagtggcggctacagcctcaggggacagcagcacctcgggccacttcttctggctacagcgggagcagcaggggccagagagcgaggccaggccctgcacggtgtggagatggtggcggtgcgggcagatgtgtggcacgttcgggggcgctggcggcagcttggacacaggcctgtggctcgtctgcaccagctgtttgctgtggtactctttcagcagctcctccagggccgcagcattctctttcttctctgtgatcaagcgcaccaggaccccaatggtgtcctcattggcatcctcagtccggtaggcagggttgattccactgcctccacctccagggccgggcccgacctccttgtgcgccgtgcagtggtagcccttccgcttgaggaggttgcacaccaggatgcccaacagccccatgaggcagaagacagggacgatggcgatgaccgcgtactgggcggctgtctcctctgggccacctgcccgggtgccgttcccaggctgccgtgtctcaccaccgctgctggcccctgctgccacctccacgccacgtcgggcccgccgcccccactcaggtcgggctcctccccaggtgggcactgccaaagggttgttgatgtcagggtggcgagaggccagggcagcagcataaggaagcaggacaggggccggcacagcagacttggcttcatcctcaggcccctggtggtcgccggcccagccacactggatggggaggaggggccccaggggggtagcagagaaggaacttggcttagaggccactcctcccat

SEQ ID NO: 150569 - DNA, 1482 bp, Homo sapiens; identical to SEQ ID NO: 150564

SEQ ID NO: 150570 - DNA, 737 bp, Homo sapiens
gttaagtttcaaggatcaagtttcagttttctattttagaatagaaacattactcttgggttcaatccagtagctcatctgccccccagtctccttaggcactgattccttcatgctgtgctttgagaaaggaagcctaggctgacgagaccatcttgcctccctgtagatcgtcacagctacctgtctctggggatccctagtattaacacattcagtgttcccctttcagtcttactactttgaccgcgatgatgtggctttgaaggactttgccaaatactttcttcaccaatctcatgaggagaggggaacatgcttgagaaacttgatgaagctgcagaacccacgagggtggcctaatctttcttcaggatatcaaggtgaacaaaagatcctaggggtgtcatacttcatcatctggcagtgttcgggtatcagaaatcacttaaactagcaattgcccttataaagtgatgatacactgggcttttgccttttgtgcttttttaggcttaccatctaaactaaattaggcaaatagtaatgtcccttttgccaaaacgtggtggttagagatgatgggcttgctgacttctaggttagttggtagagatgcattaacctattctcattcagaaaccagactgtgatgactgggagagcgggctgaatgcaatggagtgtgcattacatttgggaaaaaatgtgaatcagtcactactggaactgcacaa

SEQ ID NO: 150571 - DNA, 1020 bp, Homo sapiens
gtcgtcggggtttcctgcttcaacagtgcttggacggaacccggcgctcgttccccaccccggccggccgcccatagccagccctccgtcacctcttcaccgcaccctcggactgccccaaggcccccgccgccgctccagcgccgagaagccaccgccgccggccgccgcctctccttagtcgccgccatgacgaccgcgtcccacctcgcagggtgcgccaagaactaccaccaaggactcaagaggccgccaatcaaccgccaagatcaaccctggaagctctacggcctcctacgttttaccctgtcccatgtccttactaactttgacccgcgcatgatgttggcttttgaaagaacttttgccaaatactttcttcaccaattctcaatgaaggaagagggaaaccatgctgaagaaacttgatgaaagctgcagaacccaacgagggtggcccgaattcttccttccaggatatcaaagaaacccagacttgtgatgaactgggaagagcggggcttgaatgccaatggaagtgtgcattacatttgggaaaaaaatgttgaatcaagtcacctactggaactgcacaaaactggccaactggacaaaaatgaccccccattttgtgtgaccttcattgagacaacattaccctgaatgagcagggtgaaaggccatcaaagaatttggggtgaccacgtgaccaacttgccgcaagatgggaagcgccccgaatctggcttgggcgaaatatctctttgatcatagcacatccctgggaagacagtgataatgaaagctaagcctcgggctaatttccccaatagccgtgggggtgacttccctgggtcaaccaaggcagtgcatgcatgttgggggtttctttaaccttttctataagttggaccaaaacatccacttaagttctttgatttgtaccattccttcaaataaagaaatttggtacccaggtgttgtctttgaggtcttgggatgaatcagaaatctatccag

SEQ ID NO: 150572 - DNA, 1511 bp, Homo sapiens
  misc_feature (1)...(1511): n = a,t,c or g
ttttttttttttttcacttttgaattctgtttatatatcaagctataaaaaacctggatcctgttcaacatacatacaaaagcagtactctaaaaaataattattattatattaacaatatcaaacacgctaactcctacacacgtacaaagaccttgggcaatcctttataaccggccacttcctggcccacagtctttgtaaggcaagtacctggggaaaaggggacaagaccccaagagagccggccccaaatcctgactcaggcactgcagaggcattagcccgggctgagtcattgcctgaggatcgaaggggcccccttctcagggctgaggaagggaacttttcagggcccggggagggaggcagagcctttagggggggagcacatgccgaggcaggggaaaacgagcttcacattttccctgggggttaggagccgaggttgnccggcaggacaggggatgaacggagggttgcggtggggcagaaataactgcctcccaaagtatgtccacgtgaacagtccccagagcctggtgactatgttaggttaaacaggccagtgggaaactaaagttgcagatggaacttaaaggtggcttaatccagctgacctgaaaattagaaagacggaccctgggttcttctgggtaggcgcaaatgtgatcattaagcgtcctttaaaagcggtagagcaggccgggtacgagtgactcatgcctataatcccagcacttttaggaggctaaggcttacaagatccccttgagccccaggagttccagacaagcctaggcaacagaatgagaccctgtatccacaaaaaatatgtagctgggcgtgggggattgtctcaggggactgagacaagaggatcacttgaaccaggaggtcccaggctgcagtgagccttgatgccatgaccaggccactgcccttccagcctgggcaacacagcaagaccctgtctcaaaaaaaaaaaaaaaaaagtggtggagggaggcacgaaaggggaagccccaatgaggtgacggggaaaaagattcaactacccacagctggctctgaagatggaggagcctgaagtcaagaattacggtcagcctctaaaaatgaaaaggccagaaatgaattctcccctagagcctccagaaggagtgcaggactgccgacaccccagatttgagccccgggtcagccttctgacccgcagaactggaagacctcgttttgatccacgaagtttgtggaaatctgtcacggcaataggaaacaaatacagaggccaaagggtcaacagtgagaggtcaagcttgccctgcccctgcccagacctcagccagacttatgggtggcaagggcccacggtgcgacccccagggcctcgtccctgccttggggaaaggggagcctgaaaaggacccacgatgtcttgcgcccctgggtaaggacacagagcacgtcgaggaagaaccctctactaagagcgctgtgggatgaagagg

SEQ ID NO: 150573 - DNA, 419 bp, Homo sapiens
atggcggctgggaccctgtacacgtatcctgaaaactggagggccttcaaggctctcatcgctgctcagtacagcggggctcagggccgcgtgctctccgcaccaccccacttccattttggccaaaccaaccgcacccctgaatttctccgcaaatttcctgccggcaaggtcccagcatttgagggtgatgatggattctgtgtgtttgagagcaacgccattgcctactatgtgagcaatgaggagctgcggggaagtactccagaggcagcagcccaggtggtgcagtgggtgagctttgctgattccgatatagtgcccccagccagtacctgggtgttccccaccttgggcatcatgcaccacaacaaacaggttctagagccttctttccgccaggcctttcccaataccaa

SEQ ID NO: 150574 - DNA, 1426 bp, Homo sapiens
cccacgcgtccggaatcaccatggcggctgggaccctgtacacgtttttctgttaactggagggccttcaaggctctcatcgctgctcagtacagcggggctcaggtccgcgtgctctccgcaccaccccacttccattttggccaaaccaacgcgcacccctgaagttctccgcaaatttcctgccggcaagggcccagcatttgagggtgatgatggattctgtgtgtttgagagcaacgccattgcctactatgtgcagcaatgaggagctgcggggaagtactccagaggcagcagcccaggtggtgcagtgggtgagctttgctggattccgatatagtgcccccagccagtacctgggtgttccccaccttgggtcatcatgcaccacaaacaaacaggccacttgagaatgcaaagggaggaagtgagggcgaattctggggctggttgaatgcttacttgaagacggaggacttttgctggggggcgaacgtagagcgattgtctggtatcacagttgtctggcaccctgttgtggctctataagcaggttctaagagccttctttccgccaagcctttcccaataccaacccgctggttcctcacctgcattaaaccagccccagtttccggctgttcttggggggagtgaaacttgtgtgagaagattggccccatttggagcctaaaaagttttgcagagaccccaacctaaaaaaggacacaccacgggaaagaagaagggttcaccgggaagaagaagcagaagccccaggctgagcggaaggaggagaaaaaggcggctgcccctggttcctgagggaggagatggatgaatgtgagcaggcgctggctgctgagcccaaggccaaggaccccttcgctcacctgcccaagagtacctttgtgttggatgaatttaagcgcaagtactccaatgaggacacactctctgtggcactgccatatttctgggagcactttgataaggacggctggtccctgtggtactcagagtatcgcttccctgaagaactcactcagaccttcatgagctgcaatctcatcactggaatgttccagcgactggacaagctgaggaagaatgccttcgccagtgtcatccttttggggaaccaacaatagcagctccatttctggagtctgggtcttccgaggccaggagcttgcctttccgctgagtccagattggcaggtggactacgagtcatacacatggcggaaactggatcctggcagcgaggagacccagacgctggttcgagagtacttttcctgggagggggccttccagcatgtgggcaaagccttcaatcagggcaagatcttcaagtgaacatctcttgccatcacctagctgcctgcacctgcccttcagggagatgggggtcattaaa

SEQ ID NO: 150575 - DNA, 452 bp, Homo sapiens
ccgcagtaccgggtcctggcttcggcctcagccccaccatggtgacgcttgctgaactgctggtgctcctggccgctctcctggccacggtctcgggctattgtcgttagcatcgacgcccatgctgaagagtgcttctttgagcgggtcacctcgggcaccaagatgggcctcatcttcgaggcggaggatggcggcttcctggacatcgacgtggtgattacattaccagatagggtaagattaaacctcgtttactgaagaaaaaggggcagtagacttaccgatcttttatggatgtcacattcaaattatgttataatctccggatgtcctggatgaatccaaacatacggaatcataatcattggcttcttcttacgtcaattaaattcttaattacacaattcaggtcttctctatcatacttgtctagttgtatacagtcagaa

SEQ ID NO: 150576 - DNA, 512 bp, Homo sapiens
ggcgggtgcgcttgctagggaaagaagctaaagcacttccagagcctgtccggagctcagaggttcggaagacttatcgaccatggtgagtgcagggtcttggggtcgaacgcgtgccactcgggagccacaggggttggatggggcctcctagacctctgctctctccccaggagcgcgcgtcctgcttgttgctgctgctgctgccgctggatgcacgtctctgcgaccacgccagaacctcgtgatgctggacgatgaagatttccgctgcgtcttgcaactttctcccgaacctcagcccgactggcccgaagccttacaccgagcgtctgccgttcaagcctagatctccgccggaggctctcacctacagtcctcttttcttatcggccttcgtctcctcaagactgttactgtcctcctttggcctctgttcgttctgatctgtgtttacctgtctgtctatctgccgttccgactttgtctggatactctaagttgtgttgtgt

SEQ ID NO: 150577 - DNA, 440 bp, Homo sapiens
cactagtgcagggccctctgtgacacagggcctgagggaccccattgtctgacgtaaggaccatgctgacagtatccaccagaacagctaaagctaaaaagacgacactaataccaagtgttggtgagcgtggaactgctcctcaacccgtgctcattaggaaacgtacactgacacttttgggcagtattactaacaatgaacatacctcatgactcagcaattccactcctaggtgcgcatcccacataaatgtgggcatatgttcaccaaaacccagggacagtaatgctcacagagacactattcatgatagccacaaactggacactacacaaatgccctcaatagtagaaggaataatgcaacggggctgtcacagaatggagtgctgcacttaaacagaataaactacaactacatgtgaccccacgcgtccg

SEQ ID NO: 150578 - DNA, 957 bp, Homo sapiens
gtgttgcaagggatatattttattagtttcattaatgaaattttaatagcaataaattcaggcttttaaatattacaaagtattttcaaatatctcatggggccttgatgttagcttcaggaagtatctagcaacctaatggctgtttgattagacttctcagactattattatccttgtcacataatagtgctttagtccatgtatcataggatcttcaagtattattcatttgtttccaaagcaaattgagctattccactcaaatgattacagtaaatagaatagaaacttgtggaatcatcttcctctctcgtaaatgaagtaacagcaaaatagcgcagcatctcagctgttccaggttcctcaaataagttttacttttgcaaaaccaacctcaaacttcctatattctctgttctgcattataagcaacatgaccagcagccacgtttgttgtaattttttaaatatgtggaaaaaaagcaagatatcaaccatgtattaccttaaccaagatgccaaattatctaacttgtttctccaggcaagccgcccgaacaacagggacagctcccaggagccagccaaggttgtctgtctgtccatccactcaggacatctgcagaatctgtcactgcgaaggggatgaagagagccccctcatcacaccctgtcgctgcactgggacactgcgctttgtccaccagtcctgcctccaccagtggattaagagctcagatacacgctgctgtgagctctgcaagtatgacttcataatggagaccaagctcaaacccctccggaagtgggagaaactacagatgaccccaagggaaaggaggaaaatattctgctctgtcacatttcaacgaaaccgcggatcacctgtgtggtttggtctttgtatgtattgatagaccgaacaacggaggaaatcaagcaaggcaatgtatt

SEQ ID NO: 150579 - DNA, 846 bp, Homo sapiens
  misc_feature (1)...(846): n = a,t,c or g
tttcgtcggaggcgggcgcgggcgcgtccctgtggccagtcaccggaggagttggtcgcacaattatgaaagatttcgttttttgctgctagcgcctgagctgagttagttctgagaaggtttccctgggcgttccttgtccggcggcctctgctgccgcctccggagacgcttcccgatagatggctacaggccgtggaggaggaggaggtggagttgctgcccttccggagtccgccccgtgaggagaatgtcccacaaatcctggatagaaagcactttgaccaagagggaatgtgtatatattataccaagttccaaggacccttacagatgccttccaggatgtcaaatttgtcagcaactcgtcaggtgtttttgtggtcgtttggtcaagcaacatgcttggtttactgcaagtcctgccatgaaatacttagatgtgaaattgggtgaccattttaatcaggcaatagaagaatggtctgtggaaaagcatacagaacagagcccaacggatgcttatggagtcataaattttcaagggggttctcattcctacagagctaagtatgtgaggctatcatatgacaaccaaccctgtagtcattctgcaacttacggttaaagaatggcaaatggagttacccaaacttgttatctctgtacatgggggcatgcagaaatttgagcttcacccacgaatcaagcagttgctttgaaaaggtcttattaaagctgcagttacaactggagccctgattttaactggagggagaaacacaggtgtgggcaaacatggtggagatgcacctcaaagaacatgcttncagatcatctcgaaag

SEQ ID NO: 150580 - DNA, 1273 bp, Homo sapiens
ctgacgagttgctgacaaatttgacatcctggaaggcatttggatcatttccgataatcaccacagtaacattgcgagtcagttcttgatgaagcctatgcccagaacgaactgcacacccgtcccgagaggacaaatccggaagcctcaaggcaattcgagggtccttcgccgcatggaacgcggctccccacacacttgcctgccaagtctctcctttaccgcccgcaaccccagaaccattccccgcccgggcctgcgtgggtccagtaccattctcctcacggggcggactccggaagggcagcaactccacctcctcctcctccgcggcctgtagccatctatcgggaagcgtctccggaggcggcagcagaggccgccggacaaggaacgcccagggaaaccttctcagaactaactcagctccggcgctagcagcagaagccgagtctttcataattgtgcgaccaactcctccgggtgaccacatacacgcatacaccacaccttctgcaccaaaaactgggttgttcccttgatgtaatatgtacctatccacctttccatttattttgcttttcattatttccaaaaggtccagctgcgagttcaaccatgatactctcaccattctgtcttcatttcgaaacacagcccaaacaacagctactgctatgcacagtccagagagaaaaataagtctcacttccatgtttttgccacgacatgcaatcaattcaactagtccactccagtatccacctaatgccacagtgaacaccgcaattacaaaaataaccaccatagtataatcaaagttaggccacgatggagaatacattttcacagtaatgttatctcctagagtctggttcatatctctaaagtctttgtagcttataaatgcaatcagtattttcacatcaggaaattcagatctgttacctgagggaggaaataggacactgttattgacaactaacattgcttcagcacctcctttctgtgcaattctggctttttcaagaaaatggcagcttccccatggaaccacaactgctttgctctttatgccaacaggaggaatatcagaaaggttgcatagtggtgtggaagtcagattcatcaaactaatggaagttgcattttctagggtacttggaagagctgtccaataagggttataaagcatgcagtagtccttggttgtgccatttccagacgcatgcaagattgcttcctgagcggctgtcaggatattagcctccat

SEQ ID NO: 150581 - DNA, 405 bp, Homo sapiens
agcaagctggctgctgaaatgactgcgaaccggcttgcagagagccttcttgctttgagccaacaggaagaactagcggattttccaaaagactacctcttgagtcagagtcaagatgtagggggacaatgatggagagagaaagcatcataagcttctggaggcaatcagttcccttgatggaaagaataggcggaaattggctgagatgtctgatgttattttgatgatgtaggagtttgtagttgcgtagatattaagctgagtctgttctgagtgtgttgtacatgactataggtgagtagtggttgctgtgggtgctcgtgtattctatgttaataggctatctgaggtggatatagcgtttttattgggagttaaactggtgtgtgagtggctaggctg

SEQ ID NO: 150582 - DNA, 762 bp, Homo sapiens
gtagtgcagacccaaatcagcaaaactgctgatgagctgatttcctactggggaacaagcttcccacctccctttgctgcatccttaaccttgtatgagcttgaatattgtatcaccattgatatctccctgtggaaatttgagaccagcaagtactacgcgactgtcattgatgccccaggacacagagacttcatcaaaaacatgattacagggacatctcaggctgactgtgctgtcctgatttttgctgctggtgttggtgaatttgaagctgtcacctttgctccggtcaatgtcacaactgaagtcaagtctgttgaaatgcaccatgaagttttgagtgaagctcttcctggggacaatgtggacttcgatgtcaagaatgtgtctgtcaaggaggttcatcatggcaacgttgctggccaaatcagtgctggctgtgctcccgtactggattgccacatggctcacattgcatgcaagtttgctaagctgaagaaaaagactggtagcacttctggtaaaaagctggaagatggccctactttcttgaagtctggtgatgctgccatcgttgatatggttcctggcaagcccatgtgtgttgagagcttctcagtctacccacctctgagtcgctttgctgtttgtgatatgagacagacagttgctgtgggtgtcatcgaagcaatggacaagaaggctgctggagctggcaaggtcaccaagtctacccagaaagctcagaaggctaaatga

SEQ ID NO: 150583 - DNA, 924 bp, Homo sapiens; identical to SEQ ID NO: 133213

SEQ ID NO: 150584 - DNA, 424 bp, Homo sapiens
gtagtgcagacccaaatcagcaaaactgctgatgagctgatttcctactggggaacaagcttcccacctccctttgctgcatccttaaccttgtatgagcttgaatattgtatcaccattgatatctccctgtggaaatttgagaccagcaagtactacgcgactgtcattgatgccccaggacacagagacttcatcaaaaacatgattacagggacatctcaggctgactgtgctgtcctgatttttgctgctggtgttggtgaatttgaagctgtcacctttgctccggtcaatgtcacaactgaagtcaagtctgttgaaatgcaccatgaagttttgagtgaagctcttcctggggacaatgtggacttcgatgtcaagaatgtgtctgtcaaggaggttcatcatggcaacgttgctg

SEQ ID NO: 150585 - DNA, 1661 bp, Homo sapiens
atatcaacattgtcgtcattggacacgtagattcgggcaagtccaccactactggccatctgatctataaatgcggtggcatcgacaaaagaaccattgaaaaatttgagaaggaggctgctgagatgggaaagggctccttcaagtatgcctgggtcttggataaactgaaagctgagcgtgaacgtggtatcaccattgatatctccttgtggaaatttgagaccagcaagtactatgtgactatcattgatgccccaggacacagagactttatcaaaaacatgattacagggacatctcaggctgactgtgctgtcctgattgttgctgctggtgttggtgaatttgaagctgggtatctccaagaatgggcagacccgaggagcatgcccttctggcttacacactgggtgtgaaacaactaattgtcggtgttaccaaaatggattccactgagccaccctacagccagaagagatatgaggaaattgttaaggaagtcagcacttacattaagaaaattggctacaaccccgacacagtagcatttgtgccaatttctggttggaatggtgacaacatgctggagccaagtgctaacatgccttggttcaagggatggaaagtcacccgtaaggatggcaatgccagtggaaccacgctgcttgaggctctggactgcatcctaccaccaactcgtccaactgacaagcccttgggcctgcctctccaggatgtctacaaaattggtggtattggtactgttcctgttggccgagtggagactggtgttctcaaacccggtatggtggtcacctttggtccagtcaacgttacaacggaagtaaaatctgtcgaaatgcaccatgaagctttgggtgaagctcttcctggggacaatgtgggcttcaatgtcaagaatgtgtctgtcaaggatgttcgtcgtggcaacgttgctggtgacagcaaaaatgacccaccaatggaagcagctggcttccctgctcaggtgattatcctgaaccatccaggccaaataagcgccggctatgcccctgtattggattgccacacggctcacattgcatgcaagtttgctgagctgaaggaaaagattgatcgccgttctggtaaaaagctggaagatggccctaaattcttgaagtctggtgatgctgccattgttgatatggttcctggcaagcccatgtgtgttgagagcttctcagactatccacctttgggctgctttgctgttcgtgatatgagacagacagttgcggtgggtgtcatcaaagcagtggacaagaaggctgctggagctggcaaggtcaccaagtctgcccagaaagctcagaaggctaaatgaatattatccctaatcctcccaccccactcttaatcagtggtggaagaccggtctcagaactgtttgtttcaattgccatttaagtttagtagtaaaagactggttaatgataacaatgcatcgtaaaacctttcagaaggaaaggagaatgttttgtggacacgttggttttcttttttgcgtgtggcagttttagttattagtttttaaaatcagtactttttaatggaaacaacttgacccccaaatttgtcacagaattttgggacccattaaaaggttaactggg

SEQ ID NO: 150586 - DNA, 332 bp, Homo sapiens
acatctcaccaaagccactgcagcacattcttaactgtgtccaagtggtaataattaaaaacagcttactgtctttatcattatcactcttaacccaccctaaaatttcctaaaggtatcccgttgacctcaggatacattaaagctacttagtggtgactggtttctgcctaccacttcctcccctaccacctaacactcacacatacaaatacttggttctctgtgcccagctagcagttacccatcctttaaaactcatcccctctaagatgtgccctaccacctgcagatttgggttaagtgtctcaataaaatcttaaatgaataaa

SEQ ID NO: 150587 - DNA, 554 bp, Homo sapiens
cggccgctggacatgggaaagcggaaccaccaaaaggagtgatgatcaacgatctcatgataaatctggatgctagttctcatgcctcaggacatcctactgggaacgacacaccagctcctgggatcagactttcatctacttaggacccctctttgcccagactactaaagccagtcttcactagccacgaatggctacccaaaggaaacacttggtgaaagattttaatccttacattacctgctatatctgtaaagggtatctgatcaagccaacaacagtgacggaatgcctccatacattctgtaagacttgtattgttcagcactttgaagatagcaatgattgcccaaggtgtggcaaccaagttcatgagacaaatccattagaaatgttgaggttggacaatacattagaggaaattatatttaagctggtccctggactacgggaacaagaacttgagcgtgaatctgaattttggaaggaaaataagcctcaaggaaatggacaagatgatactttcaaaagcttgacaaaccgaaagtagg

SEQ ID NO: 150588 - DNA, 1106 bp, Homo sapiens
tgagccgagtggccccacagagccggcgcgctcccgcctgcagggggagagcagacggggcgcggggaccggccaggccgcggcgggtgctgtttctgtttcactttccttcactctgaggccggcgcgctggcgggcgaggagcggcggcggtggcggccgctggacatgggaaagcggaaccaccaaaaggagtgatgatcaacgatctcatgataaatctggatgctagttctcatgcctcaggacatcctactgggaacgacacaccagctccttgggatcagactttcatctacttaggacccctctttgcccagactactaaagccagtcttcactagccacgaatggctacccagaggaaacacttggtgatagattttaatgcttacattacctgctatatctgtaaagggtatctgatcaagccaacaacagtgacgggaatgcctccatacatctgcagaatcctactggatggtccacttgggatgtcctggaagccacctggaactcagcatatctacggaatgattcaaatggggatgccaagcacttcagttatccaagcaagaaatatgctccatgcttgactctttaccctcactaacaaaactgggcaaagtcctggctggtctctctccttaatacttctcaaatctgtccctttagtttcatccctctggttactgttctcattcagattcttattacatctccaccaaagccactgcaggcacattcttaactgggtccaagtggtaataattaaaaacagcttactgtgctttatgcattatcactctttaacccaccctaaaatttcctaaaggtatcccgttggacctgcaggatacattaaagctacttagtggtgactggtttctgcctaccacttcctcccctaccacctaacactcacacatacaaatacttggttcaactgtttgctctccttgaaatgaatgcctcctctgtggcccagctagcagttacccatcctttaaaactcatcccctctaagatgtgccctaccacctgcagactttgggttaagtgtctcaataaaatcttaaatgaataaatagaatggctaataagtt

SEQ ID NO: 150589 - DNA, 921 bp, Homo sapiens
gtttatgatcttagcaaatgatggattgaaagggacttacttaattgcataaagagacttaaactacaacaaacaatatgcttaatgatgaaatagtgaacatttctcctaagattataaaaataagacaaggatatctgctgtcaatgattttattcggcattgttcagaaggacctaaccagaaaactaatgcaaggaagagaaacaaaaggcatagagattagaaaagaagtaaaactttaaaaacgaaaaagaatataaatctctatttgcagatgccatgagtaaatttggtaagttccctgcataaaagttatgcaaaaagcattttatgatataccagcaaaaaacatggaaaatgaaattttgaaaaagcaatgccacttcaaagatccctcaagtgcctagagggagaaaatgaggttaatatgctttgaagaactgtatccagaaaataaaattacaaaggaggagagggataggattccaggacaatctcaaaactattgctttttcctaaatttcatttgcaaccttaaaatcctaggcaagtttctttaatgttaaattaacaagctaatttctaggaattcatatgcatatttcaaaagtcgaataattgtcaaggctatcctgtagaatggacagagaggattgaaatttctaaatatcaagacctgttataaagccatagaaataatgaaggtgttaatttggcacaaggatgaaaaaactggactagtggaacagcatacaggtttcaaaagtagacccacgtgtataccatcacctgagttttgagaaaggtgacattgaagtgtagtgggggaaagggtgttctttccagtaaatgtactttgccaataaaattttgtaatttgataaaaagttatttggaggtggattgcagatctgaata

SEQ ID NO: 150590 - DNA, 1381 bp, Homo sapiens
gtggaagagtgacaggaactgacattttttagccagttactatgagaggaaataaaactggacaggaaagaaagagaaaatacattaaaacaaggacaggttgttcgggcattcttcttcaggagatgactgtctggtacatccttttaccaccattatcctcaatcaccaatcactaagcattgccatgtaccaggcccaggggctgggactatgggagctagttcttatagtggctcatgatctacttgggaaggcaagacctaaagaaatgacaagtaagccacaatggcatatgctttgtcgaatgagagggtaccaatcagcgagtgtgccggggacttagaggaaggggtcacaatgccctgggatggctgaggtccccacggagatgttgggccttgagccagaacttgagtgctggataacacttgagtggaaaggaggggcacagagactgtccagattggaatggacaaggcatagcagaaagtacggtggtacactcaaggcactgtgaacagcagtttattattattttttccttcatgctgtcttttggggtccttaggaaatgactctgttgtccttcacaagcccagctaggccctggaacaaatggcctttagagagttcaacagtatgaaactcctactacgagtaaatcaatgttaggtgttggggggtatgtggaaaagtgaaaaaataatagtccctgccttaaaggacaagaaatgattttccctttatcaaatgtccagggaaggaaactgtgggatgacactgtggcagtgaagtctcacatctgataaaaggcagtgggctctgggcagcatggacaagtttaagaaacactggatttgccatctatcaagatgctccatttaggggtgggtccaaaaggtctttcagtaactcagcagttctcttctcagaattagttcccagtctgtgccttccaatcttcccagtatattcctttaccagcacaaaaactcatgtacagccaatgaccagttcagaatagatgccaaagtaatcagactataccagtagctcaccccatgtctggtcaccaagtaagccatcacagactctgcaaataatcctggaaaggaagaggtaccaggacaagaaggaaagaactaaaacaaggatgtgaataacttctaaactggtcagccttggacaaaaggaaatctggaaatctcgacttggcctgagagaaacctcatcctggcccttaaagtgccaattaaggctgagttgaaaaggagctgggcatcatcaaactgcaaacaaacttagcttaggcacccacagtgtgatgatgtgtttatttccatgaaggagcagtctatggagaagtgcaggaactttc

SEQ ID NO: 150591 - DNA, 1116 bp, Homo sapiens
ctctaaatcaatggcaagaacaaactggcaatccagagaggacccacagaccctctgaaggaagtggattgcttctgcaggacccaggagacttctcaaatactttgagtgccccaactgcagaagtggaaaagggagatcctctcccaaagatacccccactggaggaactgaaggaaactcacctaacacataaggactcacataaacttaaaataaagggatggaaaaaggcatttcttgcaaatggacaccaaaagcaaacaggggaagctattcttataccagacaaaacaaaatttaaagcaacagcagttaaaagagacaaagaaggggattatataatggtaaaaggccttgtcccacaggaaaatatcacaatcctaaacacatacgcatctaacactgaagctcccaaatttataaaacaattactaatagacctaagaaatgagatagacagcaacatagtaatagtggggaacttcaatactccagtgacagcaatagacaggtcatcaaaaccaaaagtcaacaaagaaacaatggatttaaactataccctggaacaaatggacttaacggatatatacagaacatttcatccaacaactgcagaatacacattctattcaacagtgcatgaaactatctccaagatagaccatatgataggtcataaaatgagcatcaatacgtttaagaaaattgaaattatgtcaagcactctgacagaccacagtggaataaaactgaaaataaactccgaaaggaaccttcaaaaccatgcaaatacatggaaattaaataacctgctcctgaatgagcattgtgtcaaaaatgaaatcaagatggaaattatacaattatttgaactgaacaacaataatgacacaacttatcaaaacctctgggatacagcaaaggtggtgctaagaggaaagttcatagccctaaatgcctacatcaaaaagactgaaagagcaaaaaagacaatctacagtcacacctcagggatctagaaacaagaacaaaccaaacccaaacccagcagaagaaaggaaataatcaagatcagagcagaactaaatgaaattgaaacaaaaaaaaccatac

SEQ ID NO: 150592 - DNA, 1133 bp, Homo sapiens
gggtcgacccacgcgtgcgacctcttcaaagaataaatagcacaggacctataaaacaaaaatacaccttaaaaagcaaaaacaaagtacgcaggcaacaaagagccggatgaatgcagtggtacctcacatatcaatactgacattgaatgtaaatggcctaaatgttccacttaaaagatacagagtggcataatggataagaatttaccaacaaactatctgctgccttcaggagactcacctaacacctaacacataaggactcacataaactgaaagtaaaggggtggaaaaaaggcatttcatgcaaatggacaccaaaagcaagcaggagtagctattcttacatcggacaaaacaaactttaaagcaacagcagttaaaaaagataaagagggacattatataatggtaaaaggccttgaccaacaggaaaatatcacaatcctaaacatatatgcacctaacactggagctcccaaatttatgaaacaattactaatagatgtaagaaatgagatagacagcaacacaataatagcaggggacttcaatactccactgacagcactagacaggtcatcaattcagaaagtcaacaaagaaacaatggatttaaactataccttggaacaaatggacttaaaggatatatacagaacactccatccaacaactgcagaatacacaatctattcaacagtgcatggaacattctccaagatagactatatgacaggtcacaaaacgagcctcaataaatttaagaaaagtgaaattatatcaagcagtctgtcagaccacagtggaataaaactggaaatcgactccaaaaggaaccatcaaaaccatgcaaatacatggaaattaaataacctgctcctgaatgagcactgggtcaaaaacaaaatcaagatggaaattaaaacattcttgaactgaatgacaataatggcacagcctatcaaaacctctgggatacagcaaaggcggtgctaagaggaaagttcacagccctaaacgcctacatcaaaaagtatgaaagagcacagacagacaatctaaggtcacacctcaaggaactagagaaacaacaaaccaaacccaaatccagcagaagaaaaaaaaaa

SEQ ID NO: 150593 - DNA, 455 bp, Homo sapiens; identical to SEQ ID NO: 144709

SEQ ID NO: 150594 - DNA, 440 bp, Homo sapiens; identical to SEQ ID NO: 144710
  misc_feature (1)...(440): n = a,t,c or g

SEQ ID NO: 150595 - DNA, 415 bp, Homo sapiens; identical to SEQ ID NO: 144711
  misc_feature (1)...(415): n = a,t,c or g

SEQ ID NO: 150596 - DNA, 1369 bp, Homo sapiens; identical to SEQ ID NO: 144712

SEQ ID NO: 150597 - DNA, 3173 bp, Homo sapiens
cgactacgaccagtgaggcggccgccgcagcccaggcgcgggggcgacgacaggttaaaaatctgtaagagcctgattttagaattcaccagctcctcagaagtttggcgaaatatgagttattaagcctacgctcagatcaaggtagcagctagactggtgtgacaacctgtttttaatcagtgactcaaagctgtgatcaccctgatgtcaccgaatggccacagcttgtaaaagagagttacagtggaggtaaaaggagtggcttgcaggatggagaagctgcaccagtgttattggaagtgagccaccatttgaatttgctagctcatgctgcagtattcagattatgccagcaggtttattttttgttttgcaagccagctctgcctccttacagtatgacatctgatgctggagggtcgcactttcaaaaatgagtcagctggtacatggggttatcatcaatttttagctcttctgtctgggagatacaagtttggaagcaatcttggggtacttacccacaaggctggtggagaccagatcaggagaacctcagtctgacgacattgaagctagccgaatgaagcgagcagctgcaaagcatctaatagaacgctactaccaccagttaactgagggctgtggaaatgaagcctgcacgaatgagttttgtgcttcctgtccaacttttcttcgtatggataataatgcagcagctattaaagccctcgagctttataagattaatgcaaaactctgtgatcctcatccctccaagaaaggagcaagctcagcttaccttgagaactcgaaaggtgcccccaacaactcctgctctgagataaaaatgaacaagaaaggcgctagaattgattttaaagatgtgacttacttaacagaagagaaggtatatgaaattcttgaattatgtagagaaagagaggattattcccctttaatccgtgttattggaagagtttctttctagtgctgaggcattggtacagagcttccggaaagttaagcaacacaccaaggaagaactgaaatctcttcaagcaaaagatgaagacaaagatgaagatgaaaaggaaaaagctgcatgttctgctgctgctatggaagaagactcagaagcatcttcctcaaggataggtgatagctcacagggagacaacaatttgcaaaaattaggccctgatgatgtgtctgtggatattgatgccattagaagggtctacaccagattgctctctaatgaaaaaattgaaactgcctttctcaatgcacttgtatatttgtcacctaacgtggaatgtgacttgacgtatcacaatgtatactctcgagatcctaattatctgaatttgttcattatcggaatggagaatagaaatctccacagtcctgaatatctggaaatggctttgccattattttgcaaagcgatgagcaagctaccccttgcagcccaaggaaaactgatcagactgtggtctaaatacaatgcagaccagattcggagaatgatggagacatttcagcaacttattacttataaagtcataagcaatgaatttaacagtcgaaatctagtgaatgaatttaacagtcgaaatctagtgaatgatgatgatgccattgttgctgcttcgaagtgcttgaaaatggtttactatgcaaatgtagtgggaggggaagtggacacaaatcacaatgaagaagatgatgaagagcccatccctgagtccagcgagctgacacttcaggaacttttgggagaagaaagaagaaacaagaaaggtcttcgagtggaccccctggaaactgaacttggtgttaaaaccctggattgtcgaaaaccacttatcccttttgaagagtttattaatgaaccactgaatgaggttctagaaatggataaagattatacttttttcaaagtagaaacagagaacaaattctcttttatgacatgtccctttatattgaatgctgtcacaaagaatttgggattatattatgacaatagaattcgcatgtacagtgaacgaagaatcactgttctctacagcttagttcaaggacagcagttgaatccatatttgagactcaaagttagacgtgaccatatcatagatgatgcacttgtccggctagagatgatcgctatggaaaatcctgcagacttgaagaagcagttgtatgtggaatttgaaggagaacaaggagttgatgagggaggtgtttccaaagaattttttcagctggttgtggaggaaatcttcaatccagatattggtatgttcacatacgatgaatctacaaaattgttttggtttaatccatcttcttttgaaacagagggtcagtttactctgattggcatagtactgggtctggctatttacaataactgtatactggatgtacattttcccatggttgtctacaggaagctaatggggaaaaaaggacttttcgtcgacttgggagactctcacccagttctatatcagagtttaaaagatttattggagtatgttgggaatgtggaagatgacatgatgatcactttccagatatcacagacaaatctttttggtaacccaatgatgtatgatctaaaggaaaatggtgataaaattccaattacaaatgaaaacaggaaggaatttgtcaatctttattctgactacattctcaataaatcagtagaaaaacagttcaaggcttttcggagaggttttcatatggtgaccaatgaatctcccttaaagtacttattcagaccagaagaaattgaattgcttatatgtggaagccgcaatctagatttccaagcactagaagaaactacagaatatgacggtggctataccagggactctgttctgattagggagttctgggaaatcgttcattcatttacagatgaacagaaaagactcttcttgcagtttacaacgggcacagacagagcacctgtgggaggactaggaaaattaaagatgattatagccaaaaatggcccagacacagaaaggttacctacatctcatacttgctttaatgtgcttttacttccggaatactcaagcaaagaaaaacttaaagagagattgttgaaggccatcacgtatgccaaaggatttggcatgctgtaa

SEQ ID NO: 150598 - DNA, 9273 bp, Homo sapiens
  misc_feature (1)...(9273): n = a,t,c or g
atggctgggaaggcttcagaatcatggcgaaaggtgaaagacacttcttgcatggcagtgacaagagaaaatgagaaggatgcaaaagcggaaacccctgataaaaccatcagatctcgtgagacttactaccacaagaacagcatgtgggaaactgcccccatgattcagattatctcccagggggtcactcctacaacacatgagaattatgggagtacaattcaagatgagatttggtgcttgactaacttttgccttgatgatatgttgagctttgtacttgagagctgtactaatcactgtgcttattgtttgaatgtttggtacaggaagcgagcagctgcaaagcatctaatagaacgctactaccaccagttaactgagggctgtggaaatgaagcctgcacgaatgagttttgtgcttcctgtccaacttttcttcgtatggataataatgcagcagctattaaagccctcgagctttataagattaatgcaaaactctgtgatcctcatccctccaagaaaggagcaagctcagcttaccttgagaactcgaaaggtgcccccaacaactcctgctctgagataaaaatgaacaagaaaggcgctagaattgattttaaagatgtgacttacttaacagaagagaaggtatatgaaattcttgaattatgtagagaaagagaggattattcccctttaatccgtgttattggaagagttttttctagtgctgaggcattggtacagagcttccggaaagttaaacaacacaccaaggaagaactgaaatctcttcaagcaaaagatgaagacaaagatgaagatgaaaaggaaaaagctgcatgttctgctgctgctatggaagaagactcagaagcatcttcctcaaggataggtgatagctcacagggagacaacaatttgcaaaaattaggccctgatgatgtgtctgtggatattgatgccattagaagggtctacaccagattgctctctaatgaaaaaattgaaactgcctttctcaatgcacttgtatatttgtcacctaacgtggaatgtgacttgacgtatcacaatgtatactctcgagatcctaattatctgaatttgttcattatcgtaatggagaatagaaatctccacagtcctgaatatctggaaatggctttgccattattttgcaaagcgatgagcaagctaccccttgcagcccaaggaaaactgatcagactgtggtctaaatacaatgcagaccagattcggagaatgatggagacatttcagcaacttattacttataaagtcataagcaatgaatttaacagtcgaaatctagtgaatgatgatgatgccattgttgctgcttcgaagtgcttgaaaatggtttactatgcaaatgtagtgggaggggaagtggacacaaatcacaatgaagaagatgatgaagagcccatccctgagtccagcgagctgacacttcaggaacttttgggagaagaaagaagaaacaagaaaggtcctcgagtggaccccctggaaactgaacttggtgttaaaaccctggattgtcgaaaaccacttatcccttttgaagagtttattaatgaaccactgaatgaggttctagaaatggataaagattatacttttttcaaagtagaaacagagaacaaattctcttttatgacatgtccctttatattgaatgctgtcacaaagaatttgggattatattatgacaatagaattcgcatgtacagtgaacgaagaatcactgttctctacagcttagttcaaggacagcagttgaatccatatttgagactcaaagttagacgtgaccatatcatagatgatgcacttgtccggctagagatgatcgctatggaaaatcctgcagacttgaagaagcagttgtatgtggaatttgaaggagaacaaggagttgatgagggaggtgtttccaaagaattttttcagctggttgtggaggaaatcttcaatccagatattggtatgttcacatacgatgaatctacaaaattgttttggtttaatccatcttcttttgaaactgagggtcagtttactccgattggcatagtactgggtctggctatttacaataactgtatactggatgtacattttccccatgggttgtccacaggaagctaatggggaaaaaaggaacttttcggtgacttgggagactctcacccagtttctatatcagagtttaaaagatttaattggagtatgaagggaatgtgggaagatgacatgatgatccactttccagatatccacagacagatctttttggtaacccaatgaatgtatgatctaaaggaaaatggtgataaaattccaattacaaatgaaaacaggaggggaatttgtcaatctttattctgactaccattctcaataaatcagtagaaaaacagttcaaggctttttcggggaggttttcatatggtgaccaaatgagattctccccctttaaagtcttatttcagccagaagagaattgaattgcttatatgtggaagccgggaatctaggatttcccaagcactagaagaaactacaagaatatgacggtggctatccccagggactctggttctgattagggagttctgggaaatcgtttcattcatttacagatgaacagaaaagactcttcttgcagtttacaacgggcacagacagagcacctgtgggaggactaggaaaattaaagatgattatagccaaaaatggcccagacacagaaaggtgtacctacatctcatacttgctttaatgtgcttttacttccggaatactcaagcaaagaaaaacttaaagagagattgttgaaggcccatcaccgtatgccaaagagatttggcatgctgtaaaacaaaacaaaacaaaataaaacaaaaaaaaggaaggaaaaaaaaagaaaaaatttaaaaaattttaaaaatataacgagggataaatttttggtggtgatagtgtcccagtacaaaaaggctgtaagatagtcaaccacagtagtcacctatgtctgtgcctcccttctttattggggacatgtgggctggaacagcagatttcagctacatatatgaacaaatcctttattattattataattatttttttgcgtgaaagtgttacatattctttcacttgtatgtacagagaggtttttctgaatatttattttaagggttaaatcacttttgcttgtgtttattactgcttgaggttgagccttttgagtatttaaaaaatatataccaacagaactactctcccaaggaaaatattgccaccatttgtagaccacgtaaccttcaagtatgtgctacttttttgtccctgtatctaactcaaatcaggaactgtattttttttaatgatttgcttttgaaacttgaagtcttgaaaacagtgtgatgcaattactgctgttctagcccccaaagagttttctgtgcaaaatcttgagaatcaatcaataaagaaagatggaaggaagggagaaattggaatgttttaactgcagccctcagaactttagtaacagcacaacatatttaattcttattcctactcatgccacagtatgtcgtcttcatgtgtcttgcaatgaactgtttcagtagccaatcctctttcttagtatatgaaaggacggggatttttgttcttgttgttctcgttgttgttttaagtttactggggaaagtgcatttggccaaatgaattggtagtcaaccctattgcaacaaaagttaggaagtttgttgtttgtttattataaaccaaaaggcatgtgaaaagtgccacttaaggataggggtttttattaattacttacttattacctagatttttatatagacaatcccaaagtctcccccttcgtgttgcccatcatcttgttgaatcagccattttatcgaggcacgtgatcagtgttgcaacataatgaaaaagatggctactgtgccttgtgttacttaatcatacagtaagctgacctggaaatgaatgaaactattactcctaagaattacattgtatagccccacagattaaatttaattaattaattcaaaacatgttaaacgttactttcatgtactatggaaaagtacaagtaggtttacattactgatttccagaagtaagtagtttcccctttcctagtcttctgtgtatgtgatgttgttaatttcttttattgcattataaaataaaaggattatgtatttttaactaaggtgagacattgatatatccttttgctacaagctatagctaatgtgctgagcttgtgccttggtgattgattgattgattgactgattgttttaactgattactgtagatcaacctgatgatttgtttgtttgaaattggccgggaaaaaatgcagccttccaaaccatgggggggaagaaaaaaggatgtcccttcaggattattttaaattaatttttttccataattgagacagaactgtttgttatgtacccataatgcctaaataaaactgtggcacttttcaccataatttaatttagtggaaaaagaagacaatgctttccatattgtgataaggtaacatggggtttttctgggccagcctttagaacactgttagggtacatacgctaccttgatgaaagggaccttcgtgcaactgtagtcatcttaaaggcttctcatccactgtgcttcttaatgtgtaattaaaagtgaggagaaattaaatactctgagggcgttttatataataaattcgtgaagaaatgtgtgctcttcagttctcaagttttattattatggtatttattaaagttctacaattgtaataacgtatccatatgacaagttttaaagtggtaattgaaataggttatcagatatagagttgttcacatcaagtagacttttaacagagtcagaatgaacctacccttaaaattttagagaaaaaaaatcgtcggttgcacagaatagctgctctagcttgcttaattatgccgggcatgttgtcactcctcttacttttgctgccttttcattactatttaatggaatgtccctgaacaataaggaagagcaaaacatagacattttgactacagtggatacttcctctaccccaaatgttatgttataaaagtactttttttgcccaggtactctattatatattttggttttctttgaattaaacctcaatctccaggaagctctggagggaaaaaaaggaaccataaactaaagtaactggttttccaaataaatgtaaacttttttaaccttttattattatagaacatttcaaacatacataaaacatgaaaacagcctgcagccaaacttttctggaccttggcagctccagcaaatgagctggtcatcctaaccctggtttcctgagacaactacttttggggatgcttgcttgtatagggagatgatagatagatagatacatatcaaaaagaaacttgaaaaaggcttcgaacagaacttgccgatgttactcatccctcctcggtacagacattctgttagaacagatggttgtaatggggcagcatcactccctattcccattaaaaacatgaccattctgagatttcaggccccttcgaggaatttttctcaagaattccatacaaactgtcagaggaagaaatgtcgtcccaagactagtccctgtgtagtcttgatccctttacctgcttactgtaattttttttctctgactttccgccagtgtctaagggccatctgtacccctcccacccttccatgagccactgtataatccaaaaacacaccttccatttgctccctcacttgtctccttttacctcaacagtgttagtgtgtaaagaattgcctggggagggtagagggttttacaagtacagagtcccaagtcttttctcccctccccgttagtgggttggcatttattaataggcactgcaagattttgatgcaggtgtggggtagatatcactgtgaaaggctactaatgcatggtagtttcaccgaaagtacagtcttcaaggatccttataatctcctcattgccaaaatcagtaacatctataaccttgacaacaccctagcttgggctgttgcttctctggctacttgtttttccatcccagtttacccagattttagatggatactcctccaattctgcttaaagtccttacctgttcttgcccagttccctctagtcaacctcagtcactcccaaagattcttccccaatcccatatcttttgctcagacctctgtctctgggatttctttgttacctcatagtcagtagtcctaaaaacaaaattcttcatcttgcatctctatcgaccgaccattctttgtttctttttaagaaatgtaaccttcaccccaatcatcaaaatctctcattcctcaattgtcacaggttgtcacttctttccccctaaacctctcccatcattccttccttctttatactgcccttacaggtcctgatcctctgactcacccggacattcttagcagctgcctaatttcactccctgactctcatctccctcttccaatccttttcattgtgctagaacactatcttgctaattttaatatcctctgcattcagtgcctccacagattgccccctcactgacctttccaatttggccttgtgttacacactttcctcgctgcattcctacccagcatcttcacttgtcatatttctcaaatactcttcatgaccagatatttaaagtacctcatccatgaagacttcatcaacccccaaagtgcctccaatgcttccgtggtagcacagcataatggggtacatttcttagttgaacagtgaggagtcactgggattcttacagagtgtcttagggtctcctcttgatactctttccacatttcagttaaggaattttcttacatctttttttcttctaataacctttgcctggagtgtaagtaaattcatgatagagactgtcatttttaaaaaaaaaaaacaaaccattttgcctttcacatgttattacctccatctttctgttatcttgtcagtgttgccacctaaatgattgaaaatgaccgagcatgcagtagaatgtagtgaagtttcctatttcatccattttttgcataagtgcattggtatctgtatatccatctgcccaagcaccagttgttgaaaagactattatttccccatgaatggtcctggtacccttgtcaaagaacagttgaccataaatataagactttctggattctcagtcttactccattgccctatatgtctgtcgttataccagcaccgcactgtcttgattgctgtagcttggtagtaagtttagatttgggatgtgcaagtcctccattttttttttttttttccccaaaatcattttgtctgttttgggtcccttgcattgcatatgaatttttatatgatcattgtgtcaattcctgcaaaacagctgggatcttgatagggatttagttgaattggtagataaatttgagaaataactgctattttaatggtgttaggttttctgttccatgactgtgggatgtctttgcatttgcttaggtctttatttcagtgatgttttagagatttcagtgtgcaagtcttgatgtctttaatttttttctaagtattttactgatgccactttaattatatgattattttctaatttttatttttgtattcatcactggtgttagaaataaaattaatttttgtatattgattttgtatattgtagcttttctaaaattctttttttgtcacttagtattttttgcatatgagatcatgcatctgtgaacagaaatacttttacttcttcctttccagtctagattcctattatttcattttcttgccttagtgtgctggctagcacctccagtacaatattggatagaagtgacaagagcagacatctttttcttgttcctgattttaaggggaaagcattcagtctttcaccattgagtatgatgttagctagctgtgggtttgcttcaagttgaggaaattcttttattaaacctagtttactgagtgttttttaatcaaaaaaaaaaaaggaggggctgtgggttttgttaaatgcttcttctgtatcaagattttcatgttgttttgtcctttattaatatgttgtattaatggacttttgtatattgaattaactttgcattcctgggataatctcagttgtccatgctacataaaccttgttctatgctgctggatttggtttgctagtattttgtttagaatgtttgcatctatattcataaggaatattggtctgtagttttcatattatatatctgtccaatttggggatgagagtcatactcctgacagaatgaattgggagctttccctgttcttaaacctactgaggtattttttaagtgaactacttggagaccttcacctgtgatcttcagatgctgggggacacagggatggtacctgactctgaaaaggctctcagggtaagacgtgtctgaactggcctgtggcagttaactaaagagtactcctaccaataatggagtcaagatgtatgtttcccataggccacgctggtcactgaaagagatgggctatgagccatcttgaaaactaccctgcacanatggactgccggcctggagccaggcaccctgcagctgagtgccatataatgttgaagctgttgagggaggagaggttggaagctgccagcttagcgaatctcagctgtcgtttcccagcagggtgtattccccaggaaagaaagtcattcccccacccctggctcaaagtaataattaacagtgactgggtaaggcaggatctttttttcctaattccctcccctccagaaagggcagcaacagctcttgaatgggaaagaaggtggagggaggaaaagaaaaaccaattgccccaacactgctgtctttaagcttcccacccaaagacctcagtaagaggcagaattatgttttcaattaagagagagtttggcctcttggtgtttcaaaagtgtaggctttttaatacctagagaaactgatgatttgttgattaccaaaaagggaccagaaaagctacatagcctgagatttcatccccagaaaaacgaatccagagagcagacttgcaaaaaaaaaaaaaaaaaa

SEQ ID NO: 150599 - DNA, 497 bp, Homo sapiens
tgcaggatgaattttaagcacaattataagagaggacctagatattgagttttaaaaggagaaaatataagtacaaaagaagaatgaagattgttacaacaggggcaagtagaagttagaagaaaatgtgataaagtaaatctacattttagaatagtactggaagttattatcaggtgttacagacaagtttgagacttccgtaagtgacctaaagaaattatggacactgcaagactaaataatcattcatttaggaaggagcttaaatgcactttctcaaggccgggcgaggtggctcacgcctgtaatcccagcactttgggaggccaaggtgggcagatcacgaggttcaggtgatcgagacaatcgtggttaacacggtgaaaccccgtctctactaaaaaatacaaaaaaaaattagccgggcacggtggcgggcgccttagtcgcatctactcgggaggctgaggcaggagaatggcgtgaacccggga

SEQ ID NO: 150600 - DNA, 421 bp, Homo sapiens
cccggcgtggctgagccgttttacctgtgcggccacttatatcaagatgccggaggaataggagacccattaccaacccatggaggaggaggaggctgatacgttcacctatgggctaaaatggccccgctgatgttatagatcatcaatactttctactcgagcaaagagatctctctgagagagctcatttcaaattcatcagatgtaagtgacttattaacccacaatcggattttggtttcagagtgaacttattgggggtgctgaatgcttaaattaatattttttgttaacaggcattggacaaaatccggtatgaaagcttgacagatcccattaaattagactctgggaaagagctgcatattaaccttataccgaacaaacaagatcgaactctcactattgtggatactgg

SEQ ID NO: 150601 - DNA, 387 bp, Homo sapiens; identical to SEQ ID NO: 114901

SEQ ID NO: 150602 - DNA, 430 bp, Homo sapiens; identical to SEQ ID NO: 128855
  misc_feature (1)...(430): n = a,t,c or g

SEQ ID NO: 150603 - DNA, 409 bp, Homo sapiens; identical to SEQ ID NO: 114902

SEQ ID NO: 150604 - DNA, 1990 bp, Homo sapiens; identical to SEQ ID NO: 128857

SEQ ID NO: 150605 - DNA, 711 bp, Homo sapiens
ctagtttgaggcactaagaatgataggacatctgtttgcaaagagtccctatcatggcaaaatcaattctgctaaaattgtagcaaggacaaacatcaaattgatggtgaaagttgtgatgtggaagaatggtgaaatcattgatactttacaaatagtttatggggacaatgccccaaagaaatcagtagcagtttacaaatgcataactagtttaagacgaagcaaagttttagatgaagcctgcagcagcagaccagtcacatcgatttgcaagggtaaaagttaatcttgtttatgccaacatctcaattggttcagcttacacaattttgatggaaaattaaatttgagcaaactttccactcattggatgccacaactgtacacccagatcagctgaagacaagagcaaagctttcaatggaaatttaaacaagtgtgatcaagaccctaaaggatttctttgaaaaattgtaacaagagatagaacatggctttactagtacacttttgaagacaaagcacagtcaaagcaatggctaccaagaggtggaagtggtccagtcaaagcaaaagcaggctggtcaagagcaaaggtcaaggcaaaacaggtttttggaatgctcaaatcgttttgcttgttgactttctggagggccaaagaacgataacatctgcttatgagagtattttgttgaaaaaaaaaaa

SEQ ID NO: 150606 - DNA, 407 bp, Homo sapiens
  misc_feature (1)...(407): n = a,t,c or g
ccgggcgccatggcggttctactggagaccactttaagcgacgtcgtcatcgacttgtacaccgaagaacggccgcgtggtgaggcttgagccccactcacctgtcgccggggcccccgagcttgtctccctactttcccttctctgcgcagnccagggcagagattggctaaagctcgagcttctgggctgctggtgcccgcgactgggctattttattaaccggccttggctagaaaagtttttgtgacgggaattcgtttgagccttggcagcccttctcccgtattttgtgttggccacgccggtggacggtgcttgcggacattaattgcctttggnnnnnnnnnnnnnnnnnnnnnnnnnnnnnnattcaagctgcacatacaatacccatagcttgtgtg

SEQ ID NO: 150607 - DNA, 2088 bp, Homo sapiens; identical to SEQ ID NO: 122033

SEQ ID NO: 150608 - DNA, 492 bp, Homo sapiens
gcggaggaggagcgggcgccatggcggttctactggagaccactttattttacgtcgccatcttttttgtacaccgaaaaacggccgcgtgcctgcgggaatttcttgaaactgtgcagaataaaatattacaattattgccttattcacaatgtacagagggattttatcatacaaactgtcgatactacagggactggccgtggatgagagtctatctttggccaactgtatggtgatcaagcaagcttttttgaggcagaaaaagtcccaagaattaagcacaagaagaaaggcacagtgtccatggtgaataatggcagtgatcaacatggatctcagtttcttatcaccacaggagaaaatctagattatcttgatggtgtccatacggtgtttggtgaggtgacagaaggcatggacataattaagaatattaatgagacctttgttgacaaggactttgtaccatatcaggatatcaggataaat

SEQ ID NO: 150609 - DNA, 1050 bp, Homo sapiens
atggggtttcgccatgttggccaggctggtctcgaactcctgacctcaggtgatctgcccgcttcagcctaccaaagtgctggcattacagatgtgagccactgcgcccagcctgcaagccctctttcttatttcctccaagcactgaagcatgaatttgtggtaagacacctgacacctggacacttggacacccagacacctgacaccaagaaacctggacacccagacacccaaacactagatacccagacacccagccacctgacatccagacacccagacacccagacagctgacacccagacacctgacacccagacacctgacacctggacccccagacacctgacacccagacacctggcacctgacaccagacacccagacacctggacacccaacactcagacacccagacactcagatacccagacacccagaaacctgacacccagacacccggatacccagacacccagaaacctgacacccagacacccagatacccagacacccgacacccagacacccagaaacctgacagccagacacccggatacccagacacccgacacccagacacccggacactcagacacccagacactcagacacccagacatccagacacctgatacccagaaacctgacaccccaccacccggacacccagacatcctgccacctgaacaccctgccactcagtcacttggacacctggatactcagccaccccaccatccagataccctgccactccaatacccagacaccccaacccccagacacccagacactccactacctggacacctggacaacccaccacctggacacctggacacccaaacacccagaccctctgccacccagacaccctgccactcagacacccagacaccccaccacctggacacctggacacccggacacccagacacccggacactcagacacctcaccacccagacaccgagaaacctgacacccagaaacctggacacccggacacccagacacctgacaccaagacacacagacacttga

SEQ ID NO: 150610 - DNA, 792 bp, Homo sapiens; identical to SEQ ID NO: 126056

SEQ ID NO: 150611 - DNA, 478 bp, Homo sapiens
ttttttttttttttttttatgtgacagagtcctgctctgattcccagggtggagtgcagtggtgccatcttggttcactacaacctccacttcccgggttcaagcgattctccctgcctcagcccttcctaagtagcctgggattacaggtgtgcgtcaccacgtctggctaatttttgtacttttaaatttttgtatttttagtagagacaggggtttcacccatgttggccaggctgggctcgaactcctggacctcaagtgatccacccacctcggcctcccaaactgctggaattacaggtgtgagccaccgtgcagggccactcacctgatgttagactttctccacgaagtcacttattaaccttaatctcctccacttgaccggcctctgttttgttccagcagccatttttcagatacctggtacgcacaagcagggcccagcttgggagacgctaggataactaagacc

SEQ ID NO: 150612 - DNA, 1659 bp, Homo sapiens
acaaataaccataattctttttttattttttctgagacagagtctcgctgtgttgctcaggctgaagtgattctcctgtctcagcctccttcacctcccaggttcaagtaattctcctgtctcagcctcccgagtagctgggatacaggcacacaccaccatgcctggctagtttttttgtatttttagtagagacaggggtttcaccatgttggccaggctggtcttgaactcctgacctcaggtgatctacccgcctcggcctcccaaaatgttggcattacaggccaccacacccggcaataactgattcttaatgcacctggttcttaggtttggatttggggtttcaaattcaaatcaaagtctcctggggtataagggcccttggagatcatttgaaccaagctctagctcctttggtcttggggacagctccaattactagaacatgatttaaattgagccacacagtcctttgcctggggattttgcagcctgtacttactggaggcatttccgtgttcgcacagcaggcccttctgatcagctctcaggccttgctgacctcctgggccaacactgagccattagcccctgtcagctatgtcttgctggtggctttagtagggacataggagggcctctcagagggaaggaggggaggagaaatggtcactttgcttgctccttcccagacggctgcccctggctggtgatcgcagattttggctgctgcctggctgatgagagcatcggcctgcagttgcccttcagcagctggtacgtggatcggggcggaaacggctgtctgatggccccagaggtgagtcccgagtgtgtcatgcgccatcggcagcccttcccccacatgtccactgaatgcaggagactcgatgccttgtgataacccaacacctccatcttttctgacccataatttggcacaagttccttccctgccactttgctttcctccggcgttccctcatgttccaggagaatgcaagtcctgtcacataaaccaggtggtctaagcagaccccttctgggtctgagccacagctcactcaagctctgggttccttgggacagagttcagattagcccatggatcaggtgatgtgcaggacatgaaaaggttagatgggcgggcagcgtgatgtctcacccactgcttctgagcaggtgtccacggcccgtcctggccccagggcagtgattgactacagcaaggctgatgcctgggcagtgggagccatcgcctatgaaatcttcgggcttgtcaatcccttctacggccagggcaaggcccaccttgaaagccgcagctaccaagaggctcagctacctgcactgcccgagtcagtgcctccagacgtgagacagttggtgagggcactgctccagcgagaggccagcaagagaccatctgcccgagtagccgcaaatggtgcttcatctaagcctctggggtgaacatattctagccctgaagaatctgaagttagacaagatggttgggttggctcctccaaaaatcgggcgacactttgttggccaaacaggctcacaggaggaagttgttgtgttggaaacaaaaaatgaagatgctctttttggctaacctggagtgtgaaacgcttcttgccaggcaac

SEQ ID NO: 150613 - DNA, 420 bp, Homo sapiens
  misc_feature (1)...(420): n = a,t,c or g
caattttatagttttggccttaaagtggaaaccttcnnnnnnnnnnnnnnnnnaaacggggttttgctttttttccagggttaaatgcaatggcacaattttgggtccctgcaacctttgaatttctgttcaaagtatttttctggtttaaccttccgagtaagtgggatttcaggtttgcccccccccgcccaggtaattttttgtttttttaataaacaaggttttcccccgtttaccaagatggttttgattttctgacctcaatatgccccccccttggccttccaaaattgttagaattcaggggtgcccccccccttccaagtgaannnnnnnnnnccnnnnnnnnnnnnnnnnnnnnnnnnnnnnnnnnnnnnnnnnnnnnnnnnnnnnnnnnnnnnnnnnnnnnnnnnnnnn

SEQ ID NO: 150614 - DNA, 817 bp, Homo sapiens
ccaccctttgcccctgggtactgctagagaacaggtccaccctggctctgggactcgctgccaggggctgccacactcctgaatgccttaacatttcttccatggccccacaccatggcatccgggggtcttcgggaacccgggaaatggaataaagatgtttttggggtctgttcctgcactcacccatggggtgagctggttattttagcaacaatcatcagagtgacgctgatggtttggggcaccagctatacatcagccccagtgccagaccttctattcattaattttaacgccctcagagcaaggccctcagggagggtcatcctcccatgttttgaagaagagactgaggttcagagaggataagaggcgtgacccaaggcccacagagctatgggtgtccagcacccaggatttgaagcccaggtgaatcccgagcccttttccccatatcatctgtttgttctgttgtctaaaagcacactgcaagccgggctcagtggctcatgcctgtagtcccagcactctgtggggccgaggcaggcagatcgcttgaggtcaggagttcgagaccagcctggccaacatggtgaaaccccgtctatactaaaaaattcaaaaattacccggacgtggtggcgcatgcctgtaatcccagctacttgggagcctgaggcgggagaattgcttgaacccgggaggcagaggttgcagtgagccgagatcgcatcactgcagtccagcctggatgacagagtgagactccatctcaaaaaataaataaataaataaaaatgaaattaaaaaaaaa

SEQ ID NO: 150615 - DNA, 1358 bp, Homo sapiens
cttgtgtcgggagttgcagacagccatggcccatgggcctggcgctgacggaccccggagcggtgtctgagggaggtgggcaaagccactggctggcccgagtgcatcctcacttgacagaccatcatccccagaccaaccctagtgttggtacagcagcaagcgacaccaaaaagaagaaaataaataatggcactaaccctgagacaaccacttctggtggttgccactcgcctgaggatgcccaggttcaaaccatacgaatccttacatgtcagaaaactgagcttcagatggcactttactacagccagcatgctgtcaagcagttggaaggagaggccagggatctgatcagccgcctgcatgattcatggaagtttgcaggagagttagagcaggctctctctgctgtcgctacacagaagaagaaggcggataggtacattgaggagttaacaaaggagagggacgccctgagtctggaactgtacaggaacaccataactgatgaggagctgaaggagaaaaatgccaaactacaagaaaaacttcaacttgtagaatctgaaaagtctgagatccagctcaacgtaaaggagctaaaaaggaaactggagagggccaagctcctgctgccacagcagcagctgcaggcggaggctgaccacctgggtaaggagctgcagagtgtgtcagcaaagctccaagcccaggtggaagagaacgagttgtggaaccgcctgaaccagcaacaggaggagaagatgtggaggcaggaggagaagatacaggagcgggaggagaagatacaggagcaggaggagaagatacgggagcaggaggagaagatgcggaggcaggaggagatgatgtgggagaaggaggagaagatgcggaggcaggaggagatgatgtgggagaaggaggagaagatacgggagctggaagagaagatgcacgagcaggagaagatacgggagcaggaagagaagaggcaggaggaggagaagatacgcgagcaggagaagaggcaggagcaggaggcgaagatgtggaggcaggaggagaagatacgggagcaggaagagaagatacgggagcaggagaaaaagatgtggaggcaggaggagaagattcacgagcaggagaagatacgggaggaggagaagaggcaggagcaggaggagatgtggaggcaggaggagaagataagggagcaggaggagatatggaggcaaaaggagaagatgcatgtgagaactgatgaaatatctgtatgtagtatctttcaaggatttatatcggttggatttctgtgtaaatttgcatatccctttgactgctttaccctatag

SEQ ID NO: 150616 - DNA, 475 bp, Homo sapiens
gcctcggaccgcccggaatcccgggcgacccacgcgtccgggaaaagcccagttttcagtgatgaggattctgaccttgactttgatatcagcaaattggaacagcaaagcaaggtgcaaaacacaggacatggaaaaccaagagaaaagtccataatagacgagaaattcttccaactctctgaaatggaggcttatttagaaaacagagaaaaagaagaggaacgaaaagatgataatgatgatgagtcagttaaaagttccagaaatgtgaacaacaaagatttttttgatccagttgaaagtgatgaagacatagcaagtgatcatgatgatgagctgggttcaaacaagatgatgaaattgctgaagaagaagcagaagaaggaagcatttctgaaatatgaatgaaaaaaattacatctttagaaaaagagttattagaaaaaagccttggcagcgtcggggggaaggg

SEQ ID NO: 150617 - DNA, 1995 bp, Homo sapiens
atgtccaaagaaaccagacagagcaaattggccgaggccaaggaacagttgacagaccatcatccccagaccaaccctagtgttggtacagcagcaagcgacaccaaaaagaagaaaataaataatggcactaaccctgagacaaccacttctggtggttgccactcgcctgaggatgaacagaaggcaagccaccaacatcaggaagccctaaggagggagctagaggcccaggttcataccatacgaatccttacatgtcagaaaactgagcttcagatggcactctactacagccagcatgctgtcaagcagttggaaggagaggccagggatctgatcagccgcctgcatgattcatggaagtttgcaggagagttagagcaggctctctctgctgtcgctacacagaagaagaaggcggataggtacattgaggagttaacaaaggagagggacgccctgagtctggaactgtacaggaacaccataactgatgaggagctgaaggagaaaaatgccaaactacaagaaaaacttcaacttgtagaatctgaaaagtctgagatccagctcaacgtaaaggagctaaaaaggaaactggagagggccaagctcctgctgccacagcagcagctgcaggcggaggctgaccacctgggtaaggagctgcagagtgtgtcagcaaagctccaagcccaggtggaagagaacgagttgtggaaccgcctgaaccagcaacaggaggagaagatgtggaggcaggaggagaagatacaggagtgggaggagaagatacaggagcaggaggagaagatacgggagcaggaggagaagatacgggagcaggaggagaagatgcggaggcaggaggagatgatgtgggagaaggaggagaagatgcggaggcaggaggagatgatgtgggagaaggaggagaagatgcggaggctggaggagatgatgtgggagaaggaggagaagatacgggagctggaagagaagatgcacgagcaggagaagatacgggagcaggaagagaagaggcaggaggaggagaagatacgcgagcaggagaagaggcaggagcaggaggcgaagatgtggaggcaggaggagaagatacgggagcaggaagagaagatacgggagcaggagaaaaagatgtggaggcaggaggagaagattcacgagcaggagaagatacgggaggaggagaagaggcaggagcaggaggagatgtggaggcaggaggagaagataagggagcaggaggagatatggaggcaaaaggagaagatgcacgagcaggagaagatacggaagcaggaggagaaggtgtggaggcaggaggagaagatgcacgaccaggaggagaagatacgggagcaggaggagaagatgtggaggcaggaggagaagataagggagcaggaggagaagatacgggagcaggaggagaagatacgggagcaggaggagaagatacgagagcaggaggagatgatgcaggaacaggaagagaagatgggggagcaggaagagaagatgcaagaacaggagaagatgcggaggcaggaggagaagataagggagcaggaggagaagatacgggagcagaaggagaagatacgagagcaggaggagaagatatgggagcaggaggagaagatacgagagcaggaggagatgatgcaggaacaggaagagaagatgtgggagcaggaggagaagatgtgtagcaggaagagaagatgcaagaacaggaggagaaagtatgtctttgcaaggattatccagcgtgtctacctactcaatcatattatcagaaacagaaaaagtgtccagattcttgtcttgtcctgttcagattttttaaattccaagaacagtcaccttctaccagacactctgatgttggaagacaaagcatatttgcaaattgaaagctgccttataccgaatgaggaagaataccaatacttggctgaatga

SEQ ID NO: 150618 - DNA, 1322 bp, Homo sapiens
  misc_feature (1)...(1322): n = a,t,c or g
atgctaagtgaaacaagccaaacacagaaaagaaaaacagtatgtgattccacattatatgaggcacctagaatagtcagattcacagagaaggtagaacagtggttgccaagagctgggtcagaggagaatgggcaggtgttgtgtaatgggtaccgagtttttagttttggtgagatgaaaaagctcaggaaaggggtggtggtgactgttgcacaacaaacgaccttcctggagctcggtattcacctaaggtgttggcggcggcagcctttagcaggcgcgctatctccgctgtgtctctccgcactagccgctgaccgagccaggtgcgcgcttgtgtcgggagttgcggacagccatagccccgcgggcctggcgctgacggaccctggagcggtgtctgacagaggtcggcaaagccaccggctggccccagtgcatcctcacatatgcgcgcagatccctggctccggtgctactggggtcgcacctggacgcgggttgcagacccctggcaaattgtggagctgggggaagagtgaagaacaggagtgtgaagaggatggttcagagacagagactggtggccaggaggacctagaagatttacaggaggaagaggaagtgtcagatatgggtggtgacaatcctgaagtgggcaagaaagctagaaactcaagcaaatttgagctgaggaaaagcccagttttcatgtgatgaggattctgaccttgactttgatatcagcaaattggaacagcagagcaaggtgcaaaacaaaggacagggaaaaccaagagaaaagtccatagtagatgataaattcttcaaactctctgaaatggatctctatttagaaaacatacataaantgttaagaggaacgaaaagatgataatgatgatgagttgagagactctcctccccagaccagccctagtgttggtacaggagcaaccgacaccaaaaagaagaaaataaataatggcactaaccctgagacaaccacttctggtggttgccactcacctgaggatgcccaggttcataccatacgaatccttacatgtcagaaaactgagcttcagacagcactctattacagccagcatgctgccaggcagttggaaggagagtccagggatctggtcagctgcctgcatgattcatggaagtttgcaggagagttagagcgggctctctctgctgtcactacacagaagaagaaggcggacaggaggcaaactggggctgagtcagctgctgtgggtgagttgggggacacgggggacactgtggggagtgagcactggacatag

SEQ ID NO: 150619 - DNA, 1077 bp, Homo sapiens
tctgtaggtcagataatttaataaatatttcaaataaatatataataaaaactgaaataaaatgtcaagaatggggaactaatggtattaagttttatatagaaggacaggagggcagcgtcataacaatatgttcaaggttatgatagaaagggctaggaaggtacttaatgtcctcagaggatacttacagaacatgtgatgtaattaggctgacctttgcaaatagttgaacaaccacaccgtgtattcccataccccctagactgcctgtccaggccaagccttagtaccaacgaagtccaacagtgaagtccaaatcccgggttatctgccataggtaagccccggcacctttccctcttttccctttaggtgccctcccctctaccccacaacctccttatttcatctcaaacacagctattacaaacatgtttttatttcactggaaaaatctgttaaagaacttaaatcttggttcccctttgaagaaaaacattttagcacaagctttaaataaaagtttgagaaggagggtaaagagtgcaattgcccccattctaagctctgtatagacataccttacctctgactctaaggccctgtggcatgaaaagcaggtatccaaaaagaactctgcttggccctactgatacggccttgagagtcagccctggtgcctgctttctggcccacaaaccgctgaaatccctaggagctgcccatgggagttaccaaaaatatgtgaataaactgaatgcagagtctgaggcaggtggatcaactgaggttcaggagtctaagaccagcctggccaacatggtaaaaccccatctctactaaaaatacaaaaattagctgagcgtggtggcgggcacctgtaatcccagctactcaggagactgaggcaggagaatcatttgaacccgggaggcagatgttgccagtgagccgagattgctccactgcactccagcctgggcaatgagagcaaaacttcgtctcaaacaaacaaaaaaattagccaagagtggtggtgtgtgcctatagtcctatagtcccagctactcaggg

SEQ ID NO: 150620 - DNA, 543 bp, Homo sapiens
actactttttttttttttttttgaaatggagtcttgctctgtcaccaggttggagtgcagtggcgtgatctcagctcactgcaaactctgcctcccgggttcaagcgattctcctgcctcagcctcccgagtagctgggactacaggcgcatgcgccacgcctggctaattttttgtactttagtagagatggggtttcaccgtgttgcccaggctggtctcaaactcctgagctcaggcaatctgcccgcctcggcctccaaagtactagaattacaggcgtgacgatgcgagcctggctgcatgcagcactttcttggggctgggactgttgtgggtctgaggccgggccccacagatgaaagtgctgtagccacatctggctcccatcccctcttcaactctaccgagcaccagcactccatccatgtctgtctgctgcctccctcaggactgggtgtggtcctcccaaacatctgcaaagccccccagccagtggagcctcctggaagaaccgggaaggctgagcccatttcctcctga

SEQ ID NO: 150621 - DNA, 447 bp, Homo sapiens
  misc_feature (1)...(447): n = a,t,c or g
aaaggaagaaattataccaattctctgaaatctctttcagaatataaaagcagagggaatacttcgtatctcattcaatgaggctagaattaccctaatactaaaccaaatcagccattacaaggaaaataaaccctatagaccaatctctcatggacagacatgcagaaatccttaacaaaatatcagcaaattgaatccgataacgtatgaaaagaattatacnccatggccaagtgagatttagctaaggtatgtggggttggttcaacattagaaaacaaattaatgtaatccatcacacccatagcctaaagaagaaaaatcacatgatcatatcaataaatgcagaaaaagaatttgacaaaataagaaaacttcttaaacttaggaacatctacaaacggggcatatagttaacgtgataagtgatggtgagaaactcaa

SEQ ID NO: 150622 - DNA, 363 bp, Homo sapiens
agagaaaagagacacagacccaggcctggctcaacatgctactaactaccagctctctgaagtgtcactgggaacaataacaaactccatgcgttttgctacatccccggaagaggtaaggacttgagtccacacatggatgctttcaagtccttgaggcccacagcctggtgtgtttcacgcacagataagggggtgcccatttctttctccctagagatagccagttccaagtcttttcactgttttattttgatttgctttgggtatttaccatactttttttttttcttgaggcggagtatcactttgtcgccaggctggagtgcagtggcttgatctcggctcactgcaacctctgtc

SEQ ID NO: 150623 - DNA, 2163 bp, Homo sapiens
aaccgcatctgcagcgagcaactgagaagccaagactgagccggcggccgcggcgcagcgaacgagcagtgaccgtgctcctacccagctctgcttcacagcgcccacctgtctccgcccctcggcccctcgcccggctttgcctaaccgccacgatgatgttctcgggcttcaacgcagactacgaggcgtcatcctcccgctgcagcagcgcgtccccggccggggatagcctctcttactaccactcacccgcagactccttctccagcatgggctcgcctgtcaacgcgcaggacttctgcacggacctggccgtctccagtgccaacttcattcccacggtcactgccatctcgaccagtccggacctgcagtggctggtgcagcccgccctcgtctcctctgtggccccatcgcagaccagagcccctcaccctttcggagtccccgccccctccgctggggcttactccagggctggcgttgtgaagaccatgacaggaggccgagcgcagagcattggcaggaggggcaaggtggaacagttatctccagaagaagaagagaaaaggagaatccgaagggaaaggaataagatggctgcagccaaatgccgcaaccggaggagggagctgactgatacactccaagcggagacagaccaactagaagatgagaagtctgctttgcagaccgagattgccaacctgctgaaggagaaggaaaaactagagttcatcctggcagctcaccgacctgcctgcaagatccctgatgacctgggcttcccagaagagatgtctgtggcttcccttgatctgactgggggcctgccagaggttgccaccccggagtctgaggaggccttcaccctgcctctcctcaatgaccctgagcccaagccctcagtggaacctgtcaagagcatcagcagcatggagctgaagaccgagccctttgatgacttcctgttcccagcatcatccaggcccagtggctctgagacagcccgctccgtgccagacatggacctatctgggtccttctatgcagcagactgggagcctctgcacagttttttcctttgggatggggcccatgggccacagagctggagcccctgtgcactccggaggtcacctgtactcccagctgcactgcttacacgtcttccttcgtcttcacctaccccgaggctgactccttccccagctgtgcagctgcccaccggaagggcagcagcagcaatgagccttcctctgactcgctcagctcacccacgctgctggccctgtgagggggcagggaaggggaggcagccggccccccccaaggccaccggcccgggctgggtgctttccacagaggagccccccctccttcctagaagggttcctgtagacctagggagggccttatcctgtgcgtgaaacacaccagggctggtgggccttcaaggacttgaaagcatccatgtgtgggacttcaagtccttaacctctttccggagatgtagcaaaacgcatggagttgtgtattgttcccagttgacacttcagaagagctggtagttaataagcctgttgagccaaggctggggttggtgtctcttttctccttctcccttagttcttctcatagcatttaactaatctattcgggttcattaattggaattaacctggtcgctggatattttcaaattgtatctaagtgcagctgattttatacaataactactgtgttgcctgggcaatagtgtgttcctgattaggaaatggaccaatattattactaaggaaaaggatcacggactttatttttcgggagataagaattaaagaggccaatacccaggtaactgtaagttttttctgtcaacagcaatggttcattgtaatgttactgatcatgcattgttgaggtggtctgaaatgttctgacattaacaggttttccatgaaaaccgttttattgtggtttttaatttatttattaaggatgggattctcagatatttatatttttattttattattttctaccttggaggtcttttggacatgtgggaaagtgaatttgaatggaaaaatttaaggcattgtttggcttattgttgccaggacattgtcaataaaagcatttaagttgaatgcgaaa

SEQ ID NO: 150624 - DNA, 1222 bp, Homo sapiens
tgccgctcgagttttttttttttttttttttttttaagagccggagtcttgctctgtcaccaggctggagtgcagtggtgtgatctcagctcactgcaacttccgtctcctgggttcaagaattttcctgcctcagcctcccaagtacatgggactacaggcacgccccaccatgcccagctcatttttgtatttttaagtagaagaacaggggtttccacccatgttggcccccggatggatccttggatctccttgacccctcatggatcccgccccgtccttggccctcccccaaagtgctggggatccacagccgtgagcccacccacaccctggcccctcctatttattcctctttaaagagagagaaaactatgagaggcccaaaattatttaattaaatcctttacccttagcacaagggaaaaaaatggaatttgccctaatatagggtgatgaagcatacacaatgaattagaaacaatcacatttttagtaaaaggcaaaaatttgagacttataaagctatatggtagcttatttttgggtggggaagaaatgagaaaagaatataacatctcttactggcaatgacacattttgataaaaaatcttattgtcctttcctactagaatgatccactgtaaggcaaaaataatatacaagcaaagttttttttttggagacggagtctcacctctgtcaccctaggctggagtgcagtgtggcacaatctcagctcactgcaacctccaccttctgggctcaagcgactctcccacctcaacctcccaaataccgggactacaggccaccatgcccagcaaatctttgttttgttgttgttgttgttgttttgctttttgtgttttggtagagatgggggtttcaccatgttggccaggctgatctcaaactcctgacctcaagtgatccacccacctcagcctcccaaagtgctgagattacaggcatgagcccccgtgcctggccatgggttttgtgtttcatttaacgctttgaaagcccccttttttcaaagattatatgaaaagctttttccagttttttaaatatttgatccaagggtaatgttctttggtataaggagtgaggtatagatccagccttatatttttctttttttttttgagacggagtcttgccttgtcacccaggctggagtgcagtggcgcgatctcggctcactgcaatctc

SEQ ID NO: 150625 - DNA, 869 bp, Homo sapiens
tttttttttttttttttaatttaaagaaattatctttatttttatttgttcatctagacatgccaatggctacttaggccacattttgagcaaaactcacaaggtagttctttttttttttttttttttttttcaaacctcacatgtgtatacaaaatgacacagtttaaaggatttgtttaaaagaacaaagcatgagaaatacagggagatacaagctcataaccaaacctaaataagtaagcagatctgattcaacacgagaaaagattacaaaacaagacctagttttgtaggaagcactatctgaagacaaagttgcaggacacgctgcaagtccctttgcggggagccataagcaggggagaaataacctggtttctacttaccctaacaggggagttatggggtaggtcaagggttttcctaaattaaggtcctgacaattcatcactgttattaaaaggaagagcagatttttcctatcacggcctggcagtgatatgtattctctctctgtcttaatttaatcttaactttaccgtcagcttacgtacacacagtcctttgattcctttcttctcaagcaatgaaagaattaaacctggcaagtcaactattgatggtccatggacaaggagaacaagattgtaaagaaaaaatctgtggatgatccaatagctgtgggattttttgtttgtttgtttgagacggattctagctctgttgccaggctggagtgcagtggtgcgatctcagttcactacaacttccacctcccaggttcaagcgattctcctgattctcgaagcatgccaattgtagatcgccagtgatgattctccagcacagacatattctgatatagg

SEQ ID NO: 150626 - DNA, 408 bp, Homo sapiens
  misc_feature (1)...(408): n = a,t,c or g
attgaaatgcaatggcgcgatcataactattgcattttttnnnnnnnnnnnnnnnnnnnnnnnnnnnnnnnnnnnnnnnnnnnnnnnnnnnnnnnnnnnnnnnnnnnnnnnnnnnnnnnnnnnnnnnnnnnnnnnnnnnnnnnnnnnnnnnnnnnnnnnnnnnnnnnnnnnnnnnnnnnnnnnnnnnnnnnnnnnnnnnnnnnnnnnnnnnnnnnnnnnnnnnnnnnnnnnnnnnnnnnnnnnnnnnnnnnnnnnctcgcaagaccttttatctgaaaaccagccaagctttattcacgacacacttcttcccttcactctcccacttgtgtggtcaactccctgcagaactcccaaactgccgttcttttcgatatctcacgaaggtgtttgagagggcaaacatcg

SEQ ID NO: 150627 - DNA, 412 bp, Homo sapiens
  misc_feature (1)...(412): n = a,t,c or g
gatgattgacactcatacaccatcgtgagctatcgaaaagagcggcagtttgggagttctgcagggagttgaccacagaagtggtagagtgaaggcaagaagtgtgtcgtgaataaagcttggctggttctcagataaaaggtcttgcgagnnnnnnnnnnnnnnnnnnnnnnnnnnnnnnnnnnnnnnnnnnnnnnnnnnnnnnnnnnnnnnnnnnnnnnnnnnnnnnnnnnnnnnnnnnnnnnnnnnnnnnnnnnnnnnnnnnnnnnnnnnnnnnnnnnnnnnnnnnnnnnnnnnnnnnnnnnnnnnnnnnnnnnnnnnnnnnnnnnnnnnnnnnnnnnnnnnnnnnnnnnnnnnnnnnnnnnnnnnnnnnnnnnnnnnnnnnnnnnnnnnnnnnnnnnnnnnnntcccg

SEQ ID NO: 150628 - DNA, 888 bp, Homo sapiens; identical to SEQ ID NO: 148946

SEQ ID NO: 150629 - DNA, 598 bp, Homo sapiens
tttttttttaacaggaggaaaaaaaaatttaataatatatgtttgcacaggagttccacgaaatatgagactccaagaagggtcagatgattgacactcatacaccatcgtgagctatcgaaaagaacggcagtttgggagttctgcagggagttgaccacagaagtgggagagtgaagggaagaagtgtgtcgtgaataaagcttggctggttttcagataaaaggtcttgcgagtggccaggtgtggtggctcactcctgtcacgtcccagcactttgggaggccaaggcgggcggctcatgaggtcaggagttcgagaccagcctggccaacatagtgaaaccccgtctctactaaaaatgcaaaaaattagctgggcatggtggcaggcactgtaatcccagctacttgggaggctgagacaggagaatcacttgaatccgggaggcagaggttgcagtgagctgagatcgcgccattgcattccaatcccgggtgactgtgtgagactccatctcaaaaaaaaaacggaggaaaaaggtcttgtgagtaataaatgttgtctggagcagacctcaggagaagaggtgagagtc

SEQ ID NO: 150630 - DNA, 367 bp, Homo sapiens
cagggtgtcttgacccatggccgtgtccgcctgctactgagtaaggggcattcctgttacagaccaaggagaactggagaaagaaagagaacccaagattcagcgtcttgttactccacgtgtcctgcagcacaaacggcggcgtattgctctgaagaagcagcgtaccaagaaaaataaagaagaggctgcagaatatgctaaacttttggccaagagaatgaaggaggctaaggagaagcgccaggaacaaattgcgaagagacgcagactttcctctctgcgagcttctacttctaagtctgaatccagtcagaaataagattttttgagtaacaaataaataagatcagactctgaaaaaaaa

SEQ ID NO: 150631 - DNA, 558 bp, Homo sapiens
cctgggaggtgttcagctgttttcagatgaaggtggaacctttccctttcccgcacttgtctgccagaaacttctttgagttggaccgttaaccccaaactccgtacttcctagaggaagcgtatgcccacagaagttggcctggacgctctgggtgaaggattgaagggtttatgtggtccgaatccagtggtggaaacgacaaaccaaggtttccccatgaagcagggtgtcttgacccatggccgtgtccgttaagaaacctaggaccaaagcacccaagattcagcgtcttgttactccacgtgtcctgcagcacaaacggcggcgtattgctctgaagaagcagcgtaccaagaaaaataaagaagaggctgcagaatatgctaaacttttggccaagagaatgaaggaggctaaggagaagcgccaggaacaaattgcgaagagacgcagactttcctctctgcgagcttctacttctaagtctgaatccagtcagaaataagattttttgagtaacaaataaataagatcagactctgaaaaaaaaaaaaa

SEQ ID NO: 150632 - DNA, 589 bp, Homo sapiens
atgagaaagcgtatgcccccaaaagttgctgctgacgcctttggtgaagaatggaagggtaagtgggtccgaatcaatggtggaacgcccaaccaaggtttccccataagcaaggtgtcctgaccccatggccgtgccgcctgctactaagtaaggggccatccctgtccagacccaaggagactgagcctcgccgcctgggccccaaaagagctagcagagtccgcaaacttttcaatctctctaaagaagatgatgtccgccagtatgttgtaagaaagcccttaaataaagaaggtaagaaacctaggaccaaagcacccaagattcagcgtcttgttactccacgtgtcctgcagcacaaacggcggcgtattgctctgaagaagcagcgtaccaagaaaaataaagaagaggctgcagaatatgctaaacttttggccaagagaatgaaggaggctaaggagaagcgccaggaacaaattgcgaagagacgcagactttcctctctgcgagcttctacttctaagtctgaatccagtcagaaataagattttttgagtaacaaataaataagatcagactctga

SEQ ID NO: 150633 - DNA, 492 bp, Homo sapiens
  misc_feature (1)...(492): n = a,t,c or g
tctggggtgaagaatggaaggggttatgtggtcggaatcagtggtggaacgacaaacaaggtttccccatgaagcagggtgtcttgacccatggccgtgtccgcgtgctactgagtaaggggcattctgttacagaccaaggagaactggagaaagaaagagaaaatcagttcgtggttgcattgtggatgcaaatctgagcgttctcggctgngttattgtaaaaaaaggagagaaggatattcctggactgactgatactacagtggcggcgtattgctctgaagaagcagcgtaccaagaaaaataaagaagaggctgcagaatatgctaaacttttggccaagagaatgaaggaggctaaggagaagcgccaggaacaaattgcgaagagacgcagactttcctctctgcgagcttctacttctaagtctgaatccagtcagaaataagattttttgagtaacaaataaataagatcagactctgaaa

SEQ ID NO: 150634 - DNA, 687 bp, Homo sapiens
gaagggttatggggtcggatcaggggtgggacgacaaacaaggtttccccatgaagcagggtgtcttgacccatggccgtgtccagggtgtcttaccccatggccgtgtccgcctgctcttgagtaacgggcattcttgttccagaccaagcagaactggagaaagaaagagaaaatcagttcgtggttgcattgtggatgcaaatctgagcgttctcaacttggttattgtaaaaaaaggagagaaggatattcctggactgactgatactacagtgcctcgccgcctgggccccaaaagagctagcagaatccgcaaacttttcaatctctctaaagaagatgatgtccgccagtatgttgtaagaaagcccttaaataaagaaggtaagaaacctaggaccaaagcacccaagattcagcgtcttgttactccacgtgtcctgcagcacaaacggcggcgtattgctctgaagaagcagcgtaccaagaaaaataaagaagaggctgcagaatatgctaaacttttggccaagagaatgaaggaggctaaggagaagcgccaggaacaaattgcgaagagacgcagactttcctctctgcgagcttctacttctaagtctgaatccagtcagaaataagattttttgagtaacaaataaataagatcagactctgaaaaaaaaa

SEQ ID NO: 150635 - DNA, 595 bp, Homo sapiens
  misc_feature (1)...(595): n = a,t,c or g
gaagggttagtgggtccgatcaggggtggaacgccaancaaggtttccccatgaagcgggagaactggagaaagaaagagaaaatcagttcgtggttgcattgtggatgcaaatctgagcgttctcaacttggttattgtaaaaaaaggagagaaggatattcctggactgactgatactacagtgcctcgccgcctgggccccaaaagagctagcagaatccgcaaacttttcaatctctctaaagaagatgatgtccgccagtatgttgtaagaaagcccttaaataaagaaggtaagaaacctaggaccaaagcacccaagattcagcgtcttgttactccacgtgtcctgcagcacaaacggcggcgtattgctctgaagaagcagcgtaccaagaaaaataaagaagaggctgcagaatatgctaaacttttggccaagagaatgaaggaggctaaggagaagcgccaggaacaaattgcgaagagacgcagactttcctctctgcgagcttctacttctaagtctgaatccagtcagaaataagattttttgagtaacaaataaataagatcagactctgaaaaaaaaa

SEQ ID NO: 150636 - DNA, 575 bp, Homo sapiens
cgaatcagtggtggacgccaacaaagtttccccatgaagcagggtgtcttgacccatgcccggtgtccgcctgctactgagtaaggggcattcctgttacagaccatggttattgtaaaaaaaggagagaaggatattcctggactgactgatactacagtgcctcgccgcctgggccccaaaagagctagcagaatccgcaaacttttcaatctctctaaagaagatgatgtccgccagtatgttgtaagaaagcccttaaataaagaaggtaagaaacctaggaccaaagcacccaagattcagcgtcttgttactccacgtgtcctgcagcacaaacggcggcgtattgctctgaagaagcagcgtaccaaagaaaaataaagaagaggctgcagaatatgctaaacttttggccaagagaatgaaggaggctaaggagaagcgccaggaacaaattgcgaagagacgcagactttcctctctgcgagcttctacttttaagtctgaatccagtcagaaataagattttttgagtaacaaataaataagatcagactctgaaaaaaaaaaaa

SEQ ID NO: 150637 - DNA, 798 bp, Homo sapiens
gcccttttttttttttttttcagagtctgatcttatttatttgttactcaaaaaatcttatttctgactggattcagacttagaagtagaagctcgcagagaggaaagtctgcgtctcttcgcaatttgttcctggcgcttctccttagcctccttcattctcttggccaaaagtttagcatattctgcagcctcttctttatttttcttggtacgctgcttcttcagagcaatacgccgccgtttgtgctgcaggacacgtggagtaacaagacgctgaatcttgggtgctttggtcctaggtttcttaccttctttatttaagggctttcttacaacatactggcggacatcatcttctttagagagattgaaaagtttgcggattctgctagctcttttggggcccaggcggcgaggcactgtagtatcagtcagtccaggaatatccttctctcctttttttacgctttggtcctaggtttcttaccttctttatttaagggctttcttacaacatactggcggacatcatcttctttagagagattgaaaagtttgcggattctgctagctcttttggggcccaggcggcgaggcactgtagtatcagtcagtccaggaatatccttctctcctttttttacaatagccaagttgagaacgctcagatttgcatccacatgccaccacgaactgattttctctttcattctcagttctcttggtctgtaacaggatgcgcttactcagtagcaggcgaaacggcatgggtcaaacaccctgcttcatgtggaa

SEQ ID NO: 150638 - DNA, 2031 bp, Homo sapiens
agtgcttacctctgtgagaatgatggtacgggtccgatcagtgtggacgacaacatggttcctcatgagcaggtgctgacccatggccgtgtccgcctgctactgagtaaggggcattcctgttacagaccaaggagaactggagaaagaaagagaaaatcagttcgtggttgcattgtggatgcaaatctgagcgttctcaacttggttatcgtaaaaaaaggagagaaggatattcctggactgactgatactacagtgcctcgccgcctgggccccaaaagagctagcagaatccgcaaacttttcaatctctctaaagaagatgatgtccgccagtatgttgtaagaaagcccttaaataaagaaggtaagaaacctaggaccaaagcacccaagattaaatcagttcgtggttgcattgtggatgcaaatctgagcgttctccaacttggttattgtaaaaaaagggagagaaggattattcctggactgacttgatactaacagtgccttcgccgcctgggccccaaaaggagctagccagaatccggccaaacttttccaatctctctaaagaagatgatgtccgccagtatgttgtaagaaagccccttaaataaaggaggttaagaaacctagggaccaaaagcacccaagattcagcgtcttgttactcccacgtgttcctcaagcccaaacggcgggcgtattgctctgaagaagcagcgtaccaaagaaaaataaagaagaggctgcagaatatgctaaacttttggccaagagaatgaaggaggctaaggagaagcgccaggaacaaattgcgaagagacgcagactttcctctctgcgagcttctacttttaagtttgaatccagtcagaaataagattttttgagtaacagtccgcctgctactgagaaaggggcatccctgttacagaccaaggagacctggagaaagaaagagaaaatcagttcgtggttgcattgtggatgcaaatctgagcgttctcaacttggttattgtaaaaaaaggagagaaggatattcctggactgactgatactacagtgcctcgccgcctgggccccaaaagagctagcagaatccgcaaacttttcaatctctctaaagaagatgatgtccgccagtatgttgtaagaaagcccttaaataaagaaggtaagaaacctagggcccaaggacccaagattcaagcgtcttgttactccacgtgtcctgcagcacaaacggcggcgtattgctctgaagaagcagcgtaccaagaaaaataaagaagaggctgcagaatatgctaaacttttggccaagagaatgaaggaggctaaggagaagcgccaggaacaaattgcgaagagacgcagactttcctctctgcgagcttctacttctatggccgtgtccgcctgctactgagtaaggggcattcctgttacagaccaaggagaactggagaaagaaagagaaaatcagtccgtggttgcattgtgaatgcaaatctgagcgttctcaacttggttattgtaaaaaaaggagagaaggatattcctggactgactgatactacagtgcctcgccgcctgggccccaaaagagctagcagaatccgcaaacttttcaatctctctaaagactctaaagaagatgatgtccgccagtatgttgtaagaaagcccttaaataaagaaggtaagaaacctaggaccaaagcacccaagattcaaggtctgggttactccacgtgtcctgcagcacaaacggcggcgtattgctctgaagaagcagcgtaccaagaaaaataaagaagaggctgcagaatatgctaaacttttggccaagagaatgaaggaggctaaggagaagcgccaggaacaaattgcgaagagacgcagactttcctctctgcgagcttctacttctaagtctgaatccagtcagaaataagattttttgagtaacaaataaataagatcagactctgaaaaaaaaaaaaaaagggcggccgct

SEQ ID NO: 150639 - DNA, 904 bp, Homo sapiens
gaacgatgcttataaaccaggcggcgcgttcccggtggcggcgccctggactcccgggcccgcgcatccccgccagccttccttaaggcggatgggtggcccccgagaccccgtcggacccatggtttccagtgcagcgcggagtgggcgatgccagcgtgccaggtattgggaagaatgtggtttgcgagaaggcagcaacatcggtggatgccttccggatggtgacagcctcgcgctactacccgcagctcatgagcctggtagggaacgtgctgcgcttcctgcctgccttcgtgcgcatgaaacagctgatttcggaacactatgtgggagcggtgatgatctgtgatgcccgcatctactcaggcagcctgctgagccccagctatggctggttctgtgaatgagctcatgggcggcgggggcttgcacaccatggggacctacattttggacctgctgacccacctgaccggccgtagagccgagaaggtgcacgggctgctcaagacattcgtgaggcagaacgctgccatccgtggcatccggcacgtcactagcgatgacttctgtttcttccagatgctcatgggtgggggtgtgtgtagcacagtgacactcaacttcaacatgccaggcgcctttgtgcatgaagtcatggtggatgtcccgctgctgtacctgaagggcatggtctacatggtgcaggccttgcgccagtccttccaggggcagggcgaccgccgcacctgggaccgcacccctgtctccatggccgcctccttcgaggatgggctgtacatgcagagcgtggtggatgccatcaagaggtcgagccgatccggggagtgggaggctgtggaggtgctgacggaggagcccgacaccaaccagaacctgt

SEQ ID NO: 150640 - DNA, 624 bp, Homo sapiens
  misc_feature (1)...(624): n = a,t,c or g
ccttagaaaccaggcggcgcgttcccggtggcggcgccatggactcccgggcccgcgcatccccgccagccttccttaaggcggatgggtggcccccgagaccccgtcggacccatggtttccagtgcagcgcggaggtgggcgatgccagcgtgccaggagccatgtctgaccaggacgtttggaagatcatatccatgccagaggctcttgtgaggagatgagttggtaaagagagaggctgggatgaagatgctgccaggagtgggcgtgtttgggactggcagctccngcccgaagttctggtcccactgctgagggcagaagggttcacttgttgaggccctgtgggggaagacttgaggaggaaggcgaaaagctttgctgaaggagatgaacatcgcctttctacaccagccggacttatgacatcttgctgcatcaagatgtggatctggtgtgcatcagcatcccccctccactcacccggcagatatccgtgaaagctctaggtattgggaagaatgtggtttgcgagaaggcagcaacatcggtggatgccttccggatggtgacagcctcgcgctactacccgcagctcatgagcctggtagggaacgtgct

SEQ ID NO: 150641 - DNA, 992 bp, Homo sapiens
gtcgactttacgagtataatagtttattacctaacttacaggtacaaagtgcaaatgacttgacgcctctctttccccaatcccttgaactctctggatctcaaactttctttaggaaagcaaaggttaaaagcagacagtaactaaattccaaataaagacaagatttcaaacatgaatattatcttgataggcaaaaggtacagtaaaaccaaaatttcattactccacagtttacctttccatttaaaacttgggatagtataacacttgaggactgaggagatttgggtttcagggcattaaccaggatttaattgtttttgggcagggtaaggtacagggctctgggcaggggtttaccaactattctggtcaacaaaagtaaagacaagtggatacttatttttagtggagctttaaaaacctgtgagaagctcacattgactttttggccctcccagtcccacaaaataatacttcatttgataagcctaaagtaaagagccaattttatgggattaactctctcaaagtgaagcacatgaaaaatggggcctaaagtcacaatatattaatccaggatataaaaaattaaattttcacagaggttttcagggatgtttgtttgttaacaatgacctatatgtaataatgttatttgttaataaattcacacaacacaaagcagtaattaactaatgaattttcatttttctttccccaatattaaaaagggataattatactatcattataatttgataatgtctatatctgctaattagggcacataatatcctgcaaactactactataaaatgtgggaaatcctagaactataattaatactgtaattaaaatccccccaaaggccaggcatggtggctcatgcctgtaatcacagcactttgggagcccgaggcgggtggatcacccctgaggtcaggagttcaagaccagcctggccaacatggcaaaattccatctct

SEQ ID NO: 150642 - DNA, 876 bp, Homo sapiens
tttcgtgcctggacgagaagcagaagcgagaggaggaggagaagaaagcggagttcgagcggcagcgaaaaattcgacagcaagaaatagaagaaaaactcatcgaggaagaaacagcacgaagagtagaagaattggtagcaaaaagggtggaggaagaactggagaaaaggaaggatgaaattgaacgagaagttctccgaagggttggaggaagccaaacgcatcatggaaaagcagttgctcgaagaactcgagcgacagagacaagctgagcttgccgcacaaaaagctagagaggtaacgcttcggtccgttttggaaagtagagacagtccatggcaaaactttccagtgttgggttctgcctcctgctcaatttcagaaagagatggaatacagactatctaattcctttctcgtctaaacttaacattgctgcgaaagttaattttttagcctattcagaagtgctgactgataacttaaaagttggaagcttttataaaacatattcaaggatactttttgatttaatggaactggctatttgagaagtgtttgaaacttttgccatggctgcaggacttacattcttttttgggaggacggtggggagacagggagtggtaaagggaaaaggttaaaaatccacctgtggttgtatattcttctattctgtcactctgttacctagactgtgagaggcttttgccttcagtcagattaaaaagagcagggcctaacattgagtgatagcacctgctttgataaataggttttctcactcttctttttttccttcttttatccccttcacttcctcccctaaaccctgcttcagcacaatgggactaattctagcattctgatcat

SEQ ID NO: 150643 - DNA, 943 bp, Homo sapiens
cattacgccaagcttggcacgaggggcgctacgggtttctcgttggaggcggccttcgtggcagttgtatacgccgggaaaaggcataaagtccgttggccgacacctttctttcctccggcctcggtagaaccgccagcccgcgtccgaaggcggaggcgaggggaactggccgcgtgaggggcctgaggcgagcggttagagcgtctcccggaaggatgggccggtctcggagccggagctcgtcccgctccaagcacaccaagagcagcaagcacaacaagaagcgcagccggtcccggtcgcgatcccgggacaaggagcgcgtgcggaagcgttccaaatctcgggaaaagtaaacggaaccggcggcgggagtcgcggtcccgttcgcgctccaccaacactggccgtgtcccggcgcgagcgggaccgggagcgcgcctcgtccccgcccgaccgcatcgacatcttcgggcgcacggagagcaagcgcaggcagcctggacgagaagcagaaagcgagaggaggaggagaagaaagcggagttccgagcggcagcgaaaaattcgacagcaagaaatagaagaaaaactcatcgaggaagaaacagcacgaagagtagaagaattggtagcaaaaaagggtggaggaagaactggagaaaaggaaggatgaaattgaacgagaagttctccgaagggtggaggaagccaaacgcatcatggaaaagcagttgctcgaagaactcgagcgacagagacaagctgagcttgccgcacaaaaagctagagaggaggaagaacgtgcaaaacgtgaggagctagagcgaatactggaagagaataaccgaaaaattgcagaagcacaagccaaactggccgaagaacagttgagaattgttgaagaacaaagaaagattcatgaggaaaggatgaaact

SEQ ID NO: 150644 - DNA, 869 bp, Homo sapiens
aatgtgatctgctcttcctcagaccactaatatagaatccaaacaggtgaaaaatacgtcactccttagaatacaacaatgatctgataaggatttgacttaagtggaagggaaaaaaaaaaaaaaaagggaattgcagagcatagcccctattagaacaagctaactttccagatttttccaatttaaaaagccaaaacaaaaacaaaaaaccacttcaaacatgaagctaccatacaaagttttcccatttttctttgtaaaaaagttccagagtttgcaatttaatcctgggtttttaatgagaaggacagttttggcctggacttccccttgcccaggataattttttgttcttctttttgttgaccgttgtcggttcttgttctagtttcatcctttcctcatgaatctttctttgttctttcaacaattctcaactgttcttcgggccagtttggcttgtgcttctgcaatttttcgggttattctcttccagtattcgctctagctcctcacggttttgcacggttcttcctcctaaaggggaggatatgttaagatattaggaaaaacaaaatgtttatttttattgataaatatttactaatcttcctctggaacttttttggatatggacttacagggggaggctttataggctaccttctggtctgacaaaatggataaactgtgcaggtcacctaaaaattgggtttctaggcacctaaattttaaatcatccctcccagtccaaacagcaaccaactaaaccctccctaatgatagtttcctggcaattattactaatactttaatatcacacaaatcaacaaggacaactacaaaactgaataaaatttaccaaa

SEQ ID NO: 150645 - DNA, 425 bp, Homo sapiens
tttctaccactataatacagaggcatattactctgaacatcgacctcatacatcactcaataagttagccacaaagagcctctccacttagattttcatcaagcatcttacattttaatgtccttacttttttacagaagaggccataatttccacctaatgagtctatatgtgatgcagcaataattgatcacatgctttcacatgtgaataggaacaatgaaacagcatgaagtaatttgatacttgaattatatcataatttgcttttcaaaaattttatatatatacatatttttaaaagcatactttgggctgggtgcagtggctcatggctgcaatcccagcactctgggaggccaaggtgggcagatcacttgagatgaagagtttgagaccaccctggacaaaatggtgaaatccca

SEQ ID NO: 150646 - DNA, 861 bp, Homo sapiens
tttcgttacccgacccgacgccggcgtgatgaggcttccgctggtgctgctcctggctgtgctgctgctggccgtcctctgcaaagtttacttgggactattctctggcagctccccgaatcctttctccgaagatgtcaaacggcccccagcgcccctggtaactgacaaggaggccaggaagaaggttctcaaacaagctttttcagccaaccaagtgccggagaagctggatgtggtggtaattggcagtggctttgggggcctggctgcagctgcaattctagctaaagctggcaagcgagtcctggtgctggaacaacataccaaggcagggggctgctgtcatacctttggaaagaatggccttgaatttgacacaggaatccattacattgggcgtatggaagagggcagcattggccggtttatcttggaccagatcactgaagggcagctggactgggctcccctgtcctctcctttttgacatcatggtactggaagggcccaatggccgaaaggagtaccccatgtacagtggagagaaagcctacattcagggcctcaaggagaagtttccacaggaggaagctatcattgacaagtatataaagctggttaaggtggtatccagtggagcccctcatgccatcctgttgaaattcctcccattgcccgtggttcagctcctcgacaggtgtgggctgctgactcgtttctctccattccttcaagcatccacccagagcctggctgaggtcctgcagcagctgggggcctcctctgagctccaggcagtactcagctacatcttccccacttacggtgtcacccccaaccacagtgccttttccatgc

SEQ ID NO: 150647 - DNA, 414 bp, Homo sapiens
aaatttttttggtttaatgttcatacaatatttcaaaggaatccatttgtaattgtcaagattattcagtgcttctgtaaagggcattgtgttatgtattgtataaagccactaataaaaaatctcctgtctctgtgtgtgtatgtgtgagagagagagagagagagtgtgtgtgtgtgcatgtgtgtgagagtgtgtgtttgtgtgtgcctgagagagagagagagacagagacagagagacaagagattgtgtggagaaatgagaaaaatccaatatgtaaataaattgcattatattttaaatacttatatatatataaatatgtaattttacaaacatgaacatttatacatatatacatttatttgtacaaataaatatgtatacatacacaaatgtatgctgtgtatg

SEQ ID NO: 150648 - DNA, 602 bp, Homo sapiens
tgacacggagtttcactcttgttccctaggctggaatgcaatggcaccatctcggctcaccacaacctccgcctcctgagttaaagtgattctcctgcctcagcctcccaagtagctgggattacaggcatgcaccaccacgcccggctaattttgtatttttagtagagatggggtttctccatgttggtcaggctggtcttgaactcccgacctcaggtgatcccaccctgccttggccctccccaaagtgctgggattataggcgtgagcccacctcgcccggcccccagacctacattattacccaatctaaatcttccccatgaaagtaggtgataatctcacctttccgcagatgagacaaaaacttttagcctaataattttagcaataagtttagtagtcaagacccaattctaaaatttatattacctacacatttctatcaaaggccaaaagctaattagttaacaaatacattaatcatagttttaaatttgtttaattaccaagtagctgtaaaaggctcagctttaattaaagctactagtaaactgaactattccacagctatgtctgaatggtgttacattttacat

SEQ ID NO: 150649 - DNA, 826 bp, Homo sapiens
  misc_feature (1)...(826): n = a,t,c or g
aatgtatttgattttgtacacatannnnnnnnnnnnnnnnnnnnnnnnnnnnnnnnnnnncgtcatacttaggggtgcttatatataagtggaatgacagcaatgatacatgggataggaaagagaaattaggattattttgttactataaggtacactgcccaagaagcagtatattattatttgaaagaggggttgcattatttgtaaatctatactgcaaacacaagggcaaccacaagaaaaccacgctagaagagagaataataaaatgccaaattaacaccatcaaaggcacaagacgaatggaagacaaaaataggaataaagaacaaggttaacaaatagaaaacagtaacattatggtagatgtttatccaaatatataaatactttgaatgtcaagggtgtaaatgtacccaatttaaaagatagatttattcatatggaaaaactgggccagtttaaaaaagaaaaaattgtcaaagcaggatcaaagaacaaaacccaattatatgttggttacaagcaacccacttgaaatgtaaagagacatacaaattaaagagagaaaaatatgccaggctaacactaaccaaaatgaagaaataggtatattatagaatagcagactatacagcaagaattactatcagggataatgatgaaaggggtccattctccaagaagacatgactatccttaacatgtatgcacccaagaacagaggatcaggatacatgaggcaaaaactgatagaactgcagggagaatgatatagtttggaagttgacccctctaactctcttgttgaattgtaatttcc

SEQ ID NO: 150650 - DNA, 337 bp, Homo sapiens
  misc_feature (1)...(337): n = a,t,c or g
gnnnnnnnnnnnnnnnnnnnnnnnnnnnnnnnnnnnnnnnnnnnnnnnnnnnnnnnnnnnnnnnnnnnnnnnnnnnnnnnnnnnnnnnnnnnnnnnnnnnnnnnnnnnnnnnnnnnnnnnnnnnnnnnnnnnnnnnnnnnnnnnnnnnnnnnnnnnnnnnnnnnnnnnnnnnnnnnnnnnnnnnnnnnnnnnnnnnnnnnnnnnnnnnnnctttttaatattgaactgtaatagtttttaaaaaatatatcctaaatacaagtctcttatcagataatatgatttgcagatattttctgtcattctatgtactggcttttcacattcttgatgatag

SEQ ID NO: 150651 - DNA, 1573 bp, Homo sapiens
tttttgagacagggtcttgttctgtcacccaggctggagtgcagtggtgattatagatcactgcaaccttgaactcctaggctcaagcgatcctcttgcctcagctttccaagtagttggaactctaggcacacatcaccatttctggctaattttttatttttcatggagacaaggtcttgctatgttgctcaggctggttttgaacttctggcctcaagtgatcctcccacctaggcctccaaaagtgctgggattacaagagtaaaccactgagcctggccctgaaatgctttttttttttttttttttttttttaatgaaaatacaaggcatggagatgtggaaggacacctggctttattactgttattattagttccatagtataattcatatatcacaaaaatcaccatttttaagcatatttttcaaggggcttttaccatattccaaaagttctgcaaccatcaccactacctaattccagaatattttcataatgccaaaaagcatgcctgtacctatgggcagtcactctccaattccccacttcttacagtctctgacaaccactagtctactttctcctatatataggatgtacttgttctggggcacttaattcaacaaatgggtccggggggacaacttaaatatccacatggtaaaagggattcaaggttaggactcccctccctcgcacataaaaatttaactccaaaatgggatcagagaccctaaagggtagggtgggtaaacttagtaaaatcacttagaaatagtaaatctttgtaatgtggggataagccaaagttttccacaaatatgactgaaagcacaagcaacaaaagaaaaaataaattgtattcccatcaagttaaaaacatttgggctgaaaagtatatcatcaagaatgtgaaaagacagtacatagaatgacagaaaatatctgcaaatcatattatctgataagagacttgtatttaggatatattttttaaaaactattacagttcaatattaaaaagataaaccaattataaagtaggtaaaggatctgaacagacattctccaaagaagatacataatgactaataagtatatgaaaagatgttgaaaatcatcaaccatcagggaaatgtaaatcaaaaccacaatgagataaacacttccacattacagatggaatataataaaaaagacagacaataacaactgttgatgaggatgtggataaactggaattcctcatacactgcctggttggaatgtaaaataatgtaccccacttcagaacagtctgacagttccctgaaaaggttaaacagcattacccatctgacgcagcaattctgctcctaggtatatatccaagaaatatgaagataaatgtctaccaaaaaattatacaagaatgttcataacagaattattgataatactcaaaaagtagaagcaactcaaatgtcaatcaactgatgatggataaataaaatgataaaatgtggtaaatccatatgataaaatattattcagccataaaaaggcacagagtactgataaatgctc

SEQ ID NO: 150652 - DNA, 427 bp, Homo sapiens
  misc_feature (1)...(427): n = a,t,c or g
naaaannnnnnnnnnnnnnnnnnnnnnnnnnnnnnnnnnnnnnnnnnnnnnnnnnnnnnnnnnnnnnnnnnnnnnnnnnnnnnnnagccctcagatcagaaagcaagaaataagcatcctctattgacagatggcacaattttgtatatagaaaatcctaaagaatctcctcccccaaaattattaaaagtaatcaagttcaacaaggctacaagattcaagattaatatgcaaaaatcagttgtatttctacaccctagaaataatttgaaaatgaatttaagaaaatactttcatttggaacagaatnnnnnnnnnngaatacttaggaataaatataacaaaagaagtgtgaaacctgaacactaaaaacgacattgttgaaaaaatgaaagaactgctaagtaaatggaaagactccccatgc

SEQ ID NO: 150653 - DNA, 420 bp, Homo sapiens
  misc_feature (1)...(420): n = a,t,c or g
natttaaataactcttacatatatgttcagttgatttttgacagggacacagtggggaaaagcagtccttttaacacatggtgctaagaccactgaatatccataggaatttagatctttacctcataccatatataaaaattaatttaaaacagctcacaggcccaaatttaagagctaaaactataaaacttccagaacaaaacataggagaaaatctttgtgacctttagttaagcagagagagatacagtactaaaagcataactcgtataaggaaactaatacattaggcttcattaaaattaaaaacaagtgcatttcaaaagacaccattaggaaaagataagccacagactgggagaaaatatttgcaaatcatgtcttaaaaggacnnnnnnnnnnnnnnnnnnnnnnnnn

SEQ ID NO: 150654 - DNA, 1051 bp, Homo sapiens
gtcaggcacagtaaatgaaggggagaggaaccatcagctaccatatgaatactaaggtttaggaaaacgttttaaatgttatctatactcatttctccccagcacacaaatccaaggtttatttttggagtgacagtaagaaaagaagaacctcccaaacagtcctgtcctgacctcaggttcactgctgcgcttctgtctgttaacattttcacaggtatttgttagccaatgtagaaagctgtgcccaatggcccctaaagcatcaagaaggcaggtctaaattaccagggacagaatgaataacaactatacagactgaaactcctagctgccataagcaaaatgatgagactgcggtttaggtataacaaagctacaaaaatgggaaaactgccctgaatgtggttagcccacaaaacccctgctggcatccagcccaacactgatgagaaaaggaaaaccagcccttgcaagatgccctcaaatggctcagacacctgagccacgtggtccctgtgcaatcacagtaaatccatccaggcaaaacatcagagatcttacaatgtgaacaggaatgaaatgtaaagtttccacaagacattctgggaagagaattaaactttaaatgtggtattgcactactaggtaagatcagaaaagaaaaccaacaaaaaccccaaccctatctgtggacttgacaaattgaacagtgtcatatagggctggcctgagaccggcacttgtgggtgctgagctgcatggcagtggtttcccaaagacataccctggatggacctacccactctgtgccacaaacatcagccttgacttttatggtggtttagactgagaagctctccatgtggtacccagcagggcccatggcacctggtatgtgtttacgggtacgctggatgggtgggcagggccaccttggcacacctgcccctgggacccttcccattgtcctgggacagaatgatgcccatggtgtgtctggttctgctttttttgcaacacgtatcttctagttcccaattaagctgaa

SEQ ID NO: 150655 - DNA, 1016 bp, Homo sapiens
gctgatacccctgcggtaccggcctgatttccctgggagacccacgcgtccgcccacgcgtccgagacactttaacaacctaccagcagcacagagtattcccagttttaccattttccatttagctatagtgtccttttaaggattctaggcaacagtgaaccttatttaaaaagcaaaattgtgctataacaagtgcaaaaggaaagtttgtgttcctaccgtgctttaaagtattgatggtagcaagagaaagcgcaggggtgtttttgctcatagaaattctggaaattaggtgcctgaagtcttacactcattttttaaaagtatagcatctgcttccagttttcagtgactccattgatgatgcatgcggtttggccgtatcatactgagctttaaacacaagatttataaacatggtatgtagtgcatcttttgcaaacaggttggcagcggtactgtgtgacttggtcttttgtggcttttttgagaaaaatgaaccactttgccatgtatagtttttttctccccaactacttgtgagtagttcctggtttataaaacgtttatgaaaggtagcacataacccttttcctagaatgaaagaggcttttgagctacccagtgtaaggggataggtagcaaatagagatgaaaggcactaaagatgtcctactctttaagagcattgaacgccagttgtgccaatttattcaaagtcatctttgaacttatgttaaaatggggtaaaaacaggtaactacttcaggccggggctcatgcttgtaatcccagtggctttggggaggccaaggcaggtggttccactgacctgaggtcaggagaccagcctgggcaacatggcgaaaccccatctctactaaaagtacaaaaagtagcctagcgtggtggcgcacccctgtaatcccagctactcggggaggtggaggttgcagtgagccgagatcacatgactgaattccagcctggatgacagagggagactctgtctc

SEQ ID NO: 150656 - DNA, 1542 bp, Homo sapiens
  misc_feature (1)...(1542): n = a,t,c or g
caagccagagctttcttcagctctcttctaaactgcctttnagacccacggggcaaatgaaccttctttccctccctccacagggacccccctcaagcttttccttctctgccccctaccaggctggccacccccagggaaggcccctgagacctcccagccccatgccccctgcccctcacctggaccagacccagtgggcttgtctgaagttccacttactgctctcctagatactcagtcaaaaacaattggttcagggccagctggatcagtttaaaggaaaatgaacctcccagactctggttttgtgttggggggagggggtacaggtccgggtgcaccatgtagctatgttgcaagctttgacaagtctttacccattctggcctgtttttcaggattagggatgagcaattttgccaataatgtctattccacactgttttttagtagtggaaaagtaggaaataaatgaaccatctgagactcagggattggagagcagtctgtgtggtatgggcccgttcctatagtctatcttcagggtggctgtgagtggggtcagggtcggtctgtggggctgcctacagggtctggtctgagggagccactgaggtgctcacagcagcgatcggggactggcatgtccttcattcttctgtgttttcgattttcttgtaaaggggattcattgcttttacaacatcaaaaaccaataaacacagaaagcaaggaaaaatctagagactcaccaaacgcccggaaaccttccccaggaggcatcccaaattgccaacactcaaaacgccagtggcaggagctactcctctttcacccagtcatcccgactggccagttttcaacccaatccccctgacaaaccgcacgtagccgcctcttcagcttcagctgcggcagccttcccgcagctgtccggagaccacacagggccctgcaatcagctccgaggcagaactgcccgtgcgctcacctcccccaccgtttcgcctcttccccacccctgagctgggctaagcagacagtggccataagaggtggaagggacttcaaggacaccttttttcaaggcggaagggcaaaagggggaaaagttaaggaagggaagacggagggcccttgctccccgtcaagaagaacccgtatccttcccccatactcacgcctggagtcagggccagtgcactggggtgaacaggggccaaacaggaaatcgtggccgcctccaaatctacctgatcagggtttttgacaggagagggaggaggcaatgggccacattccatctccaccagggataaggcagaggcaccggacttcagtccaggagtgaggctccgagattaaacccaaataatgcccggagccggggaaggctttcaaccctaggccctgggggctgggtttgaccagagaccccttcctcttcactcacagaagtctcgccaggacagctagaacacaggctagggcatgaaggggaggagatgttcactccagaccccagcatccccaagattc

SEQ ID NO: 150657 - DNA, 640 bp, Homo sapiens
  misc_feature (1)...(640): n = a,t,c or g
cttcttcttttttttttgagacagagtccgnctctgtcacccaggctggagtgcagtggagcgatctaggctcactgcaacctccggccacccgggttcaagcagttctcctgcctcagcctctcggagtagctggggattacaggcatgcgccacccacgccccagctaatttggttttggtattttaagtagagaccggggtttcaacttgtattggtccaggctggtcttgaacttcctgaccttgtgaatcccgcctgcctcggcctcccaaaagtgcctgggattaccaggtgtgagncccccacggccggccctatacaaagtttcttattgagaaaagtggttcccaatcatgttttttgccccctttagctggctatctcttggaacagaaaagtttgttaggaaggtaaaagttgctggactagggaccttacccacagggtgggcactctgttccttgtggaaatattaaatggcaagttaaaacaggttttgaacttcttaacttccagaagataggaggatgggacctgtgatactgtgcttgctggtgggaggaccctttccacatcaacatttgtgtgtatccttgcaataaacttccattgtgaatttaaaaaaaaaaaaaaaaa

SEQ ID NO: 150658 - DNA, 361 bp, Homo sapiens
  misc_feature (1)...(361): n = a,t,c or g
gctaatttttatactaataatgaataaaagggtaaaataccatggttatgtgggatttagccccaaaatgaaaagctaatgtaacattcaaaatcacttgctacagttttctgtatttacagaataattagaaaaataaaaggatcatctcaattaatgcagaaaaagcaattgaccaaatccaacacacatttatgaattttttaaaaaatttcataaaactgtcagaaaactgaaaatggatggaagcatcctcaatattataaaagaaatttgtgaaagacctgtaactaatatgtaggatggtgaactattagatgattttcctaagattggagatgaagcccagaggcccccttcn

SEQ ID NO: 150659 - DNA, 2017 bp, Homo sapiens
gcgtgtgcagactgcgctctgttagtcttctgcctgtcagcctcagcccagtctgtcttgcttaagggtgcgcctccccagggctggatgatgctgtgctcaagcctgcgggtaggagggctccagcttgcagatcccatgcctggattgccatatatagatggttgaaaccagcatcagaggaaggaaggtgaccttacagccactgccgagaccaacgtgtgccctggcccagtcacagctggaaatcccagggctggtctacacccgactctggtttggttttaattaggtcccttacgtgttggtgttgtccccaggcaagttggcatggcatcagcactgagggtgtgagaccctgaggactcagcctcccgtcctgccagtagactgcctgcagccccaccctctttccctcaaaaaagaaggaagccaggcaagagagcagaggcccagggcgggggagtgaaagggccaaatttaaatgagaaactacaaaactgagactgggccacgattcacagtgacaggaggccaatgcagtggcagttgcgagaccaggaaggacagtggcaggatacagtggtccaggtgagcaagttcacaaaccattcagggaaataaagacagggcgaggctgttgtccacccaaggcagttctaccacttgtggctgctccttcctcgtccctagcccagtgtgcctgcaggagcaggttgtgagcaggcacagcaacatgcctgtcagctggggtgagggggcccggcactttacagggaaggaaaatccatgggagaaggtttttgcacattccaagcgcacccacaagggggaccctcttggccatctttttgcccattggggattacaccagccaccaggcagaggtcaatccccacacgcagttagggacacagggcagacgggaaggggctaggctcaggggctccttccggccccagcaaataacagggttccacaagaggcatggcctgaaaagggggtctgcacactgactcaaagggacaagttcgttcttagctcccagggtctgaatcattcaccccaggtaacagtgtcctctctacctgaacaccaggcaagctctcgggcactgggaacagggtaattagacatcctggggcttctatacctgagaagttctgagggccagagttggcagttttacttccagccaccatgccccacctctagcaccccagaggcgcaaagtacccagaaacaaacccaggctttgtgaccctgtcctacgtgggcccacctgactccagacaacttacccattctcggcccagcaggtcagaaaacgcctgtggccacaggcctggggaactaaactggctaaactgctctggctgcttgttggtccccagggggaaaagagtctggactgaaacctgtaaccttgtttggaaaacagaggcatcaggacccccaccaggagaccccctccccagcttatcttccccgatcacacacacccaagcaagaccaacaacacacaagctcattgcccagccccctgcccaccccactgacccttggccttaaatccccaacagaatttttgcccagaagagtcagcggctcaggtagggcagggtgaagaggacaggacttctaggggatggtggcacggctcccagccccaagtgggagcgggaaagtgaccactgagcacaggcagcaaagcacagggggccagactgacaggcgggggagtcccgagtcccaggctccgttaggagcaggcgcttgtacggtgtagatgtaggctttgcaggctggggtcatgtgtgcgttcacattccttgaagttcattgatgaggcaggtgaggctccttcagctgctggcctggatggacagggaacaggcagggctccgggagctccagaagcccggtgcccgaggccggccgaaagcggagaggggcccgggtccggacaggcgccggcagaacaagaccctcagccccgcgcggctttgcgcgcaca

SEQ ID NO: 150660 - DNA, 405 bp, Homo sapiens
atgagatggagtttcgcttgtcaccccaggctggagtacagtggtgcgatctcggctcactgcaaactccgcctccccaggttcaagtgattctcctgcctcagcatcccgagtagctgggattacaggcatgtgccaccacccccagctaattctgtatttttagtaaagacgggttttcaccatgttggccaagctggtcttgaactcctgacctcaggtgatctgcccacctcggcctcccaaaatgctgggattacaggtgtgagccactgtgcctgggccaaggattaaaaatttaagtgtgtgtctgtagggaggaggggggggccgggggaggcggtgcatcagaatagcaacaggctttcttattggtgggaggatggagggaaaactggatgagtt

SEQ ID NO: 150661 - DNA, 525 bp, Homo sapiens
ctctaaattggaaaagagtaagtcaaattgtctctttctgtagatagcatgatcttatatatagacaacctaaagactttaccaagaaaaacccttacaactgataaattcagtaaaatatcagaatataatattagtagtattttgatgcatcaatgatgaaaaagctgaaaaagaaatcaggaagacaatcccatttacaataattaaaagataaaatacctcggatctaaccaaaaaggtgaaaggtctctacaagggaaactacaaaacactaatgaaagaaataaacaaatggaaagacattccatgtgcatgaatcagaagaattaatatcattaaaattgtttacccaaagtaaacttgattcaaagcaatctctatcaaaatactattgtcatttgtcacagaaattgaaaacaaaaataccaaagttcatatgaaatcaaaaaagaatcagaatagccaaagcaaccctgagctgctggaacctattccctatgaattcatggcataataggtgtt

SEQ ID NO: 150662 - DNA, 476 bp, Homo sapiens
  misc_feature (1)...(476): n = a,t,c or g
nggatggccaatagacnatagtgccgcgctgcatcttttctcagctccctgcagcatgggtgctgggccctccttgctgctcgcctgcgacagtgtggacctacctgtagcagctagcaaaggcctctagcagctacagtcccttctggagtctttatttgcatgcaaaatgcaaaggagtcctggtgacctacctccaaggcagctgccctcctgaacactcccttggaaaacagtaaacatcattttggaatgtgaacaaccagagactacacaggagaaaggaaaaaaaaattctgaagatgcaaaatcttgggtggcttcaccgttcagttttttaataaaaggaacaatatacnnnnnnnnnnnnnnnnnnnnncctnnnnnnnnnnccgggcccccaatcccccttaaagggagcggaattacaatcaatggcccgcggtttaacaaggcggggaggggtggaaannnnt

SEQ ID NO: 150663 - DNA, 496 bp, Homo sapiens
  misc_feature (1)...(496): n = a,t,c or g
gggggacattgcancgcctgcaggattgcggcacgagcctatcttgacctgctgcgcacctgggtcttccaggtgggctccagcggttcccagcgcgatgtcaactgctcggttatgggaccacaagaaaaaaaagtagtggtgtaccttcagaagctggatacagcatatgatgaccttggcaattctggccatttcaccatcatttacaaccaaggctttgagattgtgttgaatgactacaagtggtttgccttttttaaggatgtcactgattttatcagtcatttgttcatgcagctgggaactgtggggatatatgatttgccacatctgaggaacaaactggccatgaacagacgttggggctaagagacagagcagcctgcgacagtgtggacctacctgtagcagctagcaaaggcctctagcagctacagtcccttctggagtctttatttgcatgcaaaatgcacaggagtcctggtgacctacc

SEQ ID NO: 150664 - DNA, 1128 bp, Homo sapiens
atggcttccagaggtgttcatgcagaagactggatgcaggacccttggtggcaccagtgtgcagatgagcagatagtgactgattgccactgggtaattaaaggcacccacaggtctgagccctcatctatgaaggttaaacgtatcattcctatcagcactaattggttttataggatacagacctctagtttgctgaataaactttggaaggattcagattatgaggttctaaactgtagagcctttgaggagaaaggaccacaagaaaaaaaagtagtggtgtaccttcagaagctggatacagcatatgatgaccttggcaattctggccatttcaccatcatttacaaccaaggctttgagattgtgttgaatgactacaagtggtttgccttttttaagtataaagaagagggcagcaaggtgaccacttactgcaacgagacaatgactgggtgggtgcatgatgtgttgggccggaactgggcttgtttcaccggaaagaaggtgggaactgcctctgagaatgtgtatgtcaacatagcacaccttaagaattctcaggaaaagtattctaataggctctacaagtatgatcacaactttgtgaaagctatcaatgccattcagaagtcttggactgcaactacatacatggaatatgagactcttaccctgggagatatgattaggagaagtggtggccacagtcgaaaaatcccaagcaaatactacaaacacctctatgcaaagaaactagaaaatctagaagaaatggataaattcctggatgcatacacactcccaagactgaatcaggaagaagttggatccctgaatagatcaataacaagttatgaaagtgaggcagtaataaatagcctactaatgaaaaaaagtccaggaccagatggatttacagttgaattctaccagaggtacaaagaggagctgataccctttcttctgaaactattccaaacaattgaaaaggagggactcctccctaactcattttatgaggccagcatcatcctgataccaaaacctggcagagatacgacaacaaaaagaaaacttcagtccaatatccctgatgaacttcgacgcaaaaaatctcaatga

SEQ ID NO: 150665 - DNA, 2586 bp, Homo sapiens
ttaggttataaggacatgatctaaacctaacaaggcctgtctgttcagattcttcttggtgtctctgtgcagtgttccttctgctatggtatggggcagaatactctctggtatgagggtcttagaacccataatcagattagagttcttaaaaaaggcaaaccacttgtagtcattcaacacaatctcaaagccttggttgtaaatgatggtgaaatggccagaattgccaaggtcatcatatgctgtatccagcttctgaaggtacaccactacttttttttcttgtggtcctttctcctcaaaggctctacagtttagaacctcataatctgaatccttccaaagtttattcagcaaactagaggtctgtatcctataaaaccaattagtgctgataggaatgatacgtttaaccttcatagatgagggctcagacccataaccgagcagttgacatcgcgctgggaaccgctggagcccacctggaagacccaggtgcccagcagggtcaagataggtgcagttggcaggtgtgtcgcagcgcacggcgccgtcgccggagagaagcagcaggagggcggcgagcagcaaggagggcccagcacccatgctgcagggagcccagtggcaatcagtcactatctgctcatctgcacactggtgccaccaagggtcctgcatccagtcttctgcatgaacacctctggaagccgatagcccgcagcgctcggcttcctggtaattcttcacctcttttctcagctccctgcagcatgggtgctgggccctccttgctgctcgccgccctcctgctgcttctctccggcgacggcgccgtgcgctgcgacacacctgccaactgcacctatcttgacctgctgggcacctgggtcttccaggtgggctccagcggttcccagcgcgatgtcaactgctcggttatgggaccacaagaaaaaaaagtagtggtgtaccttcagaagctggatacagcatatggatgaccttggcaatttttggccatttcaccatcatttacaaccaaggctttgagattgtgttgaatgactacaaagtggtttgccttttttaagtataaagaagagggcagcaaggtgaccacttactgcaacgagacaatgactgggtgggtgcatggatgtgttgggccggaacttgggtttttttcaccggaaagaaggtgggaactgcctctgagaatgtgtatgtcaacacagcacaccttaagaattctcaggaaaagtattctaataggctctacaagtatgatcacaactttgtgaaagctatcaatgccattcagaagtcttggactgcaactacatacatggaatatgagactcttaccctgggagatatgattaggagaagtggtggccacagtcgaaaaatcccaaggcccaaacctgcaccactgactgctgaaatacagcaaaagattttgcatttgccaacatcttgggactggagaaatgttcatggtatcaattttgtcagtcctgttcgaaaccaagcatcctgtggcagctgctactcatttgcttctatgggtatgctagaagcgagaatccgtatactaaccaacaattctcagaccccaatcctaagccctcaggaggttgtgtcttgtagccagtatgctcaaggctgtgaaggcggcttcccataccttattgcaggaaagtacgcccaagattttgggctggtggaagaagcttgcttcccctacacaggcactgattctccatgcaaaatgaaggaagactgctttcgttattactcctctgagtaccactatgtaggaggtttctatggaggctgcaatgaagccctgatgaagcttgagttggtccatcatgggcccatggcagttgcttttgaagtatatgatgacttcctccactacaaaaaggggatctaccaccacactggtctaagagaccctttcaacccctttgagctgactaatcatgctgttctgcttgtgggctatggcactgactcagcctctgggatggattactggattgttaaaaacagctggggcaccggctggggtgagaatggctacttccggatccgcagaggaactgatgagtgtgcaattgagagcatagcagtggcagccacaccaattcctaaattgtagggtatgccttccagtatttcataatgatctgcatcagttgtaaaggggaattggtatattcacagactgtagactttcagcagcaatctcagaagcttacaaatagatttccatgaagatatttgtcttcagaattaaaactgcccttaattttaatatacctttcaatcggccactggccatttttttctaagtattcaattaagtgggaattttctggaagatggtcagctatgaagtaatagagtttgcttaatcatttgtaattcaaacatgctatattttttaaaatcaatgtgaaaacatagacttatttttaaattgtaccaatcacaagaaaataatggcaataattatcaaaacttttaaaatagatgctcatatttttaaaataaagttttaaaaataactgc

SEQ ID NO: 150666 - DNA, 847 bp, Homo sapiens
  misc_feature (1)...(847): n = a,t,c or g
ctggcacgagatttcttcactcttttctaagctccctcaagcatgggtgtgggccctccttgctgctcgccgccctcctgctgctctctcccggcgacggcgccggtgcgttgcgacacacctgccaactggcacctatcttgacctgctgggcacctgggtcttccagggtgggctccagcnggttcccagcgcgatgtcaactgctcggttatgggacccacaaagaaagaaaaagtaggtggtgtaccttcagaaagctggatacagcaatatgatgaccttgggcaattctggccatttcaaccatcatttacaaaccaaggctttgagattgtgttgaatgactacaagtggtttgccttttttaaggatgtcactgattttatcagtcatttgttcatgcagctgggaactgtggggatatatgatttgccacatctgaggaacaaagctggttattaaatagagcatctgttgagggactcttttaaaaccacagccatgaacagacgttggggctaagagacagagcagcctgcggccagtgtggacctacctgtagcagcatagcaaaggcctttaacaggttccagtcccttctggagtctttatttgcatgcaaaaatgcaaaggagtcctggtgacctacctctcaaggcagctgccctcctgaacactcccttggaaaacagtaaacatcattttggaatgtgaacaaccagagactacacaggagaaaggaaaaaaaaaattctgaagatgcgaaaatcttgggtggcttcaccggttcagtttttttaataaaaggaacaatatacaaaaaaaaaaaaaaagggcggccgct

SEQ ID NO: 150667 - DNA, 397 bp, Homo sapiens
tttttttttgagacagagtttcgctcttgtcacccaggctggaatgcaatagtgcaatcccagctcactgcaacccctgtctcccaggttcaagcaattctcctgcctcagcctcccaagtagctggggttagagatgcctgccaccacgcctggctaattttttgtattattagtagaaatagggtttcaccatgttggccaggctggtctcaaactcctgacctcatgtgatccacccacctcggcctcccaaagtgctgggattacaggcatgagccacagtgcctgacctgtaactcacctctttctaaggatacagatatgaagacagttttgactttctgccaaaagttccaatctaaaaataaaaaacaaaacaaaacaaattttgatag

SEQ ID NO: 150668 - DNA, 153 bp, Homo sapiens; identical to SEQ ID NO: 133559

SEQ ID NO: 150669 - DNA, 423 bp, Homo sapiens
ccgggtcgacccacgcgtccgcgaggatggccgtcatggcgccccgaaccctccttctgctactctcgggggccctggccctgacccagacctgggcgggctcccactccatgaggtatttctacacctccgggtcccggcccggccggggggagccccgcttcatcgccgtgggctacgtggacgacacgcagttcgtgcggttcgacagcgacgccgacgagccaaaggatggagccgcgggcgccgtggatagagcaggaggggccggagtattgggaccaggagacacggaatgtgaaggcccagtcacagactgaccgagtggacctggggaccctgcgcggctactacaaccagagcgaggacggttctcacaccatccaaataatgtatggctgcgacgtggggccggacgggcgc

SEQ ID NO: 150670 - DNA, 540 bp, Homo sapiens
atgccagttaataaacataaaaggcatgatactattgcggaatcacttataactcctaatgtaacaacagattcagtgaaggactgtatcaaggagttggggaacaggttattcttatggactcaaggctgttcaagtcacgtggcgactgtggccccgcccacagctcccagaggcctgcgcgtgcggtctgcagttcggccgcttcctcttggcgggtgggctgcagctatggagggcgagcctccacctgtggaggagcggcggcggctgcaggaggagctgaacgagttcgtggagagcggctgccggacgttggaggaggtgaccgcgtccctgggctgggacctagatagtctggatcccggggaagaggaggcggcggagttgcaccagattcggtgtcaggagagctgggagtttgccagttcgcctttctgtgccttaaaattggacacttctgactgggacagcaccaattctaggattattaaaggttgtcaccaagaggtggtaactggcaactcctgtggacattag

SEQ ID NO: 150671 - DNA, 574 bp, Homo sapiens
atgccagttaataaacataaaaggcatgatactattgcggaatcacttataactcctaatgtaacaacagattcagtgaaggactgtatcaaggagttggggaacaggttattcttatggactcaaggctgttcaagtcacgtggcgactgtggccccgcccacagctcccagaggcctgcgcgtgcggtctgcagttcggccgcttcctcttggcgggtgggctgcagctatggagggcgagcctccacctgtggaggagcggcggcggctgcaggaggagctgaacgagttcgtggagagcggctgccggacgttggaggaggtgaccgcgtccctgggctgggacctagatagtctggatcccggggaagaggaggcggcggaggtgaggagcgcggccgcggggccctttcggggactatcggcccggggtcttctctggaagaagggagatccgcactggcagccgcggagggaagggcgaggagtcctcgtccataaggactcacaattccagataattaaacaagctagaactgcagttgggaaagacagtgattgttataatcaaa

SEQ ID NO: 150672 - DNA, 1394 bp, Homo sapiens
taaatattgacttaaagaattttgagatacatatattagcaaaacgaacaaaacaacatcagttataggaagcaaatcatctaataaaatataaggaaaacaaagttgtagggcctaatagtgtactcatggtttgaagcatatttactggaaaataataagccctaaacagatcataaaaaaaataataagccctaaacagatcataaaaacattctcctatgcaaaggaattccaattaatatatctgtatattggttatcatggcgtaagcataattaatataggtacgagtacttcatttatattttttgctttcttcttttatgactatggtgtctttccccatccctctctttccttcttctcgactcacagtttttatccttatctttgtttctttttcttttatgtgggcttctactcctatcccttctatgtcgtgaacactcagcatccaaatagcttccaccagactgccgtgaatctactgaagctgatcgcctttcttcattcttttcggcatcatcctctgccttctcttgctcttcttgccaatgattgctgagttcttccatgtgcacatttatcacatctcgaatcacctcagtatatgatttcttggttatgtgaacattcttggctctataggactggcgtcttcttttataatctcgtacttctgccaggatttcaaggtaggattttggactttttcgactattgtcttgattgattttggcagccaagtctacaaagagatcgctgtcattttcaataatttgagaatcagagcgctttttctttgtctcctcaactacgaaatcatagagggcaagacgatcagcttgagttagatcacaaacaaaccgtttgtgattcaaaggaacttcaacaggcaatgaagaataaattctttgattataacaatcactgtctttcccaactgcagttctagcttgtttaattatctggaattgtgagtccttattcaaagtaatcgaaggtatcttcacattttcatagaaaaactcaggattagacatttcatcctcttcttctttggtatagcccattttcctcaatctacaagatgccatgtgctttgccaaaaatgatttaggcatgtgatgattggaatcgtatggacaaatcacatcttcatcctccgccgcctccttttccccgggatccagactatgtaggtcccagcccagggacgcggtcacctcctccaacgtccggcagccgctctccacgaaatcgttcagctcctcctgcaccccccgccgctcctccacaggtgcaggctcgccctccatagcacaagcccacccgacaagaggaagcggccgaactgccggacgcgtgggtcgcccccgtggttccgttcg

SEQ ID NO: 150673 - DNA, 512 bp, Homo sapiens
  misc_feature (1)...(512): n = a,t,c or g
cgacgccatatttgagcctcttacggaaactgctcgcangnncnnaccangcgnncgcaggtccatgtctaaactaatcagcaaaattcattccattggtttcagngattattttgtgggtgtgcacatgaaccaatttggatcaatgagaacctgaccctgacttttagtgtactgttggggtgaggtgtactgtctttcctacagaacacaaacttccagctgtagaaagtcatctcatagtgtcaagaagtgagtctgtcatcaacaaaatataggcaaaccaaatctgggaacatataaaaagataatacatcatgaagaagtgggatttattctaggaatgcaaggttggctcaacataagaaaagcaccaactgaaatataccatattaatagaataaggacaaaaaccacatgatcatcttaactgttaggaaaaagcatttgacaaaatctaacattatttcatattaaaaacactcgacaaactaggaatataagggaacttt

SEQ ID NO: 150674 - DNA, 499 bp, Homo sapiens
tttttgagatggagtctcgctctgtcacccagtctggagtgcagtggtgcgatctcagctcaccgcaaccttgcctcccgggttcaacaaatctccctgccctcaacctcccgagtagctagcactgtagggatggccactgcgcctggcctaaacttttgtattttcagtagggaagggtgagtcaagcatgttggcccaggctgtcttgaactccctgacctcaagtgatccactccccttggtctccccaaagttaagggattacaggcctgagccactgtgcctggcctaaaatttttcatttttcatgtaaattaaagctaataagggccagttttattctctaaccaagaccttttaagttaaattgatctttaactacacacacacacccctggcccaaggggtacagttctactttctactagtagtaactctccttttccactttaattttgaggaaaattatttacacagctgacccttgaacacaggt

SEQ ID NO: 150675 - DNA, 743 bp, Homo sapiens
aggtttttttttttttttttttttttttttttttttttttttttttttttttttttttttttttttttttttttttttttggaaacagagagacatttaatgcttcaaaaactggggtaaggaatggaaagagtactgtgggaaaaacaaaacaaacaaaaggaaatcattgaaaatgcaaactttacctggagcaattataattttctctaccagtaataagaataagaacatcatgattctcaactggaacccattccttttatcatgtttgcccttctttcaggccggcgactgagcaagggcaggtctatacataggaaacaccactacagcagtgagatcaatggcaccttctgagtctttggagtgaccaaagtaatagaattaaattccctgacctcttagcctttatctattggactagagtttttggattaatgtagaccataatctgctgcttaacttaatcatgctgttcaggaaatgatagtcaagatagaattaacacagcatatgtacatcaacttccatggaataaaactagaaatcaataagggaaagaaatttgggaaactcatacatttgtggaagttaaacaatacagttttaagtgaccagtgagtcaaagcagaaattcaaaagggcaacaaggaaattgttttgaggtggaacaaaaaggaaggcatgatgtaccaaaacacaggatgtagccaaaccagtgctcagagcggacgcgtggg

SEQ ID NO: 150676 - DNA, 981 bp, Homo sapiens
atggttgagaagaatgtaggaaactgctgcgggcaaagtctcccagctctgtacagccgcaggccacctagaagtggcctcggggaggaagcagccggctttgtgcttccagagtacggtgtacccacaaggcagaagggagttggactagatctctctaaaatctcttccagctctgtcatgctgcaattctcagcaagtccagagctcaaattacgcatttgccgaagaccttccgttaaattccagtcggggagctgtatcccctccttgaagacggcattgctgctttcattgagtggaaccctacccatgaagcgctttgggagcctcaggagcaacaagaaacacaaggaccaaaatcgaagcacggagaggcgccagtcggagcctcatggccttttcgccgtggatttggtgaggcccgcccgccaccccctgtccgccccactctcatccatgcctggaaaagctcataacccatctgcctgttctccctacgtcactgtcaccaagcgctgcctggtggaaccctggacaagtggcccagctctcccagaggtgctgctccccgaggactcccggagtcactcagcaggccaggcggctgtcacctcacagggtggcagggtagcaaagcagctctggtgcgtgtccttggatgtcacggtcaagtgcccctttcccttttctgaccccatcccagtcacccagagctgctgctctaagtcaggaagactaaatccccaggaacaggtgagcatcgcctgtggacggggctgggcgctggtggggtgtcagcgaggcccgtggtcaaacactctgctgggcctggagggatccacggaggacgggcccccggagctgagcagcgcagtggcctctggaaagcaggctgctgggggagtgtccgggcgtccgccccagggccctgaggctaagagcatgactgcaggaggaggaaggggatacagggcctga

SEQ ID NO: 150677 - DNA, 413 bp, Homo sapiens
ctataaagcaattacacaactgagatcacaaagcaagtagcgagcaacactgtgacaggaacaaaaccctcaaatatcaatattaaccttgaacagaaatggcctaatgctacacttaaaagatatagattgttaaaccagataaaaatttttgtaaaaaagaccaaaccatgtgctgcctacaagagacctacctaacatgtaaagacacccacaggcccaaagtaaagggatagaaaaatatataggcaactatatatttttacctctctgagccccaattttctcatccctacatgagaaaatccctttctcatatggtcttccagtgagatgacccttaattaattaagcaggtaaataataaagagatagagtttctagagatgaatccaacttgacagctgcaattg

SEQ ID NO: 150678 - DNA, 438 bp, Homo sapiens
  misc_feature (1)...(438): n = a,t,c or g
cgggcccttgcagtatccatgctgggggcctggcctggtccctgggctctggactggggtccatacagtatgaccgctaggcacggcaccttctctctgtaggctccttacccagacccctgccctgcagggcctcccccagccccaagacagcaggggaaggcgccctcaggctgtgggggccggagcatctgctcaggccgcctcccctctgttgtttggcctctgatgcctgcatggcaaaggccctcctgagaggcggtctccactcagctccaaatgcaaggaaggcacaagcctatccaggttgtctgccattttaccttccttctgcctgggctcctgagcgggtggagtgctggcttcctttgctaggatacagacaaatatccaaatacgtgaactcaagttgcaaccttccaaatctctccaagctcn

SEQ ID NO: 150679 - DNA, 682 bp, Homo sapiens
ttttttttttgaaacggatcctcactccggtcaccaaggctcaggtgaagtagaacaatccctcaatcctcctgagtagctgggattacaggtgcccaccaccatgcccggctaatttttttttttttttttttttttgagacggagtcttgccgtgtctcccaggctggagtacagtggcgcgatcttggctcactgcaagctctgcttcccgggttcacaccattctcttgcctcaccctccagagtagctgggactacaggcacccaccaccacgcccggctaattttttgtatttttagtagagacggggtttcaccgtgttagccaggatggtcttgatctcctgatttcgtgatccacccgcctcggcctcccaaagtgctgggattataggcgtgagccaccgcgcccggcctagaggaaggttattagccccatcttatatttgcagaaacagagggttagagggttgaggttactcagctaaaaaaatgatggagccaggtttccaacatccagagcctgtgttcttattttttatttttattgaaaagataatacagtacaaaagagtacatattaaaaggtaaggctctgttctactccagactcctagctgtttcccttctcagaggacatcattcatatgaagacattttctaagtgtttacaagcaca

SEQ ID NO: 150680 - DNA, 1401 bp, Homo sapiens
cccgagcactagaagctgcataagttacacaggatgtgcttctgcagcctacagatgcagaaccagaatgagggggacaattccacccactcgagggctgccccctcttccttagcagacgaaccagtaatgggggcaaggctggggcatcccagcccacacaccctggatgcccagcaaggccacagaaagagcctgatgtccatgatccaggtggctctgagaagcttggcctggacacctgagcctgcggccggtactcctgccttctccccatctatccccaaggcctctgcctctcagcctcttccatggtcggtttaggctgctgagttttctgtgcttccccaagaaccagtgggatcaatgccggcggcctctgtgatggttgctgactaatccgggatttcatgagtcagaggcaccacccctcaccccagctgcctgctgcttctgacggatcttggtgctcaggctgcctgggctctccgagtgaggacgcagcctccatatttgggtgcactcaggcatggctggggacaagccagcttgccccagggttcttcccctggtgattctcgcctgctttctcatctcaggggaggcagtggcacctccctctccctgctgacatgaagagagctatgatatgccactgctgccaactcatcctctgcccccacctcgaaacccacagtccccagtggagggccactactcatccccattggtttcccaggggaggggtgttgtctggaagggcaggttcagatgcagccttccagatttagaggcactgggaggacagtggctgagtggaggcgcccagacctgggcaggcagcaggctcaggcccacaccttgtgatttttgaaaccaaagcccagaagatgatgtttacttctctctccctggctctccccttcttactgcaaaccatgctgtgccttagggcccttctcatagctgttcctcatggccatgactggaacagggatgcaacctctttctacacaagcacagttagttgggtgaagtctttttttttgtttgttttagacggagtttcactcttgttgcccaggctggagtgaagtggggtgaccttggctcactgccaaactccccagcagcctcagcctccctagtagctgggactacaggcacccactaccacgcctggctaattctttgtatttttagtaaagatggggtttgaccgtgttagccaggatggtctcgatctcctgacctcgtgatccacccacctcggcctcccaaagtgctgggattataggtgtgagcccccgcgccgggccggttgctggcatcttaatgttctgtaggtggaatatttccaataaacccaagggtgccgtaattgaaaaaaaaaaaaaaaaa

SEQ ID NO: 150681 - DNA, 551 bp, Homo sapiens
cggacgcgtgggcggacccttggacagactcgtgggggcataagagacaccggctgccttcggaaagtacggcctccctcctggctgactggtcccaccaccctgacttatccagggacagagcaggatatgcctggcactcctcaatgcccaaggaaaccaaactgtgcttccccacccccaccaccatgccccaggctcactggctcatttcttgggagggcttaaagatggataatataacttcccttgcaccctgctgggccaaatataccaattctctctcccagcgtccaacctagcaagaaggtattaagtcctgcaaatcagatgagaattctggtctggcccctggccaacatggtgaaaccccatctctactaaaagtatacaaaattagctggatatggtggagcgtgcccataatcccagctactcaggaggctgaggcaggagaattgcttgaaccgggacctgggaggcggaggttgcagtgagccaagatcctgccactgcactccagcctggactacagagcaagactctgtctc

SEQ ID NO: 150682 - DNA, 401 bp, Homo sapiens
aaagcaccttcggcttccaaggtacaggctgggaaacaaggtgggggcccacatagcctggtgtctcagcatggagcttggtgccaagtcctgtgctagagacacctgatctggagagagggaagagggcacacttgggagtggccacagcaggagggcctgctggcccctacaggctcagtccccacaccctgagttccaggaaagaaggcaaaggggaagcggccagcaagggcacagaggcagaactcatgactataggaattgaaaacagcacctgtcaaagctgcctatccccttccttctctcactacttctggtcccccagaggggctggtcccaaggctatgtggttggttggtgacagaaaaggggcaacaaagaatgacaagagaggctat

SEQ ID NO: 150683 - DNA, 2126 bp, Homo sapiens
  misc_feature (1)...(2126): n = a,t,c or g
ttctggctgtcaggagcaaagcctgaagacttggagctgcaggactggaagaacagtggagccccgcgggtctcaccctttattgatgctgaggcctagagatgggaagtgacttgctcaaggtcacacaattggatagtgacatagctagagcgcagagttcctgattccaagtcacctgtgctttctgggaccaaagaatgggcacctgctggagtccgggcagagctttctcagttgtattgctactccagacctcaccataggttggggtcccagtaggaaggctcagggtctgtgccagccctggtcggtgctgcttataccttcatagcctctcttgtcattctttgttgcgcccttttctgtcaccagccaaccacatagcctttgggaccagccctctctggggggaccagaaagtagtgagagaaggaaggggataggcagctttgacaggtgctgctttcaattcctctggcaactcctcccccgttttatttccccaattttaaacaaagattctgccaactgtggaaacttcagtccctcaggctggcagccatgccagtagcctgcctggggggtggggggtgcctgggcagccatggaaggcagggctgaaaggcagaggggctccaggtcctgtttccagctcccctcactgcacatggagaagctcgctccctccctccctcccttcccgcttttcccagagctaatacacaggtgctattattcagaaaaaaactggtcagctctagccaacagtgaggtttcttttcttctgccctaactattgtgtagcctcttatgctgaaatcggcttctgctggcttngccgggctttcagagccctgaaacaaagagaaacaggatctgtccctacccagcacagcaaaatggttgtagtaattgccaaagccctcataaagccctccggcttgaggagagagtgtatagtcatgggttctgcctctgtgcccttgctggccgcattctcctctgccttctttccgtggaactcagggtgtggggactgagcctgtaggggacagcatgccgtcttgctgtggccaactcccaaagtgtgccctcttccctctttacacatcaggtgtctctggcacaggactttggcactaaagctccatgcttgagacaccaggcttatgtggggcccccacctttggtttcccagcctggcaactttagaagccgaaggtgctttcatcagaaccctaaaatggtcgttgaaggcgcctgggccgcagcccagcagtagttggagaggcaaggcagagggcagtggttctcccaaataggagaccttggggcatggccacgcccagggttttgggccttaatggctttgacgtaaattaccccccatcctccttgccccggaaaagggagagcttagagccactcactgttcattcttgctctgacccttgaaggggggcggtgttgggccttggcttcttggaatggactgagtccatcgtggaaagggctgggggcatgaggattgtggggaggggcacttgccttgcggaaggtaggattagatcataagctcagtgacttcctagggttttcaatgtgctatgttctcatcctacagttggtttggtaatgatctgccaagtcccggagagcaacagcgacagctctgcctgacgctctcattaaaatctatgcaagccaagctcggcactttgtaagcagccggccttgcgaagcctcctcagctctggggggccggggacccagtgagccggaggagcgctctgggctccactttaatgcaccannnnnnnnnnnnnnnngaaaaaagaaaaaaaagggggttttttaaaacaaaaccccttttaaaatgcccgggcccctggggggaatcccgtttttggggacccccgaagggaaaaagccaagtttaaggaatatttaaatggggcctaaccttggggaaaggtggaaaaagggcccaaaaagacccaaaaagcccaaaaccaaggggccccccccttttggggttcacccccccaaaagaaaccgcccccatttagggggcccgggggcccaactttaaaaaagggaaaaaacaatttggggttttgtgg

SEQ ID NO: 150684 - DNA, 385 bp, Homo sapiens
  misc_feature (1)...(385): n = a,t,c or g
caccatccannnnnnnnnnnnnnnnnnnnnnnnnnnnnnnnnnnnnnnnnnnnnnnnnnnnnnnnnnaatattcaaataacccaaaagacaggaaaggggaaacagggattaatgagaaaacaaataataaaatggtagatttaagttcttacacatcagtaattacgttgaatttttaaatgctgtaaacaaatcaattaaaagtttgtcaagagtccatagaaaaaacccactttatgctgtctattggaaacttactttaaatatggtataggtgggttaaaagtgaaaagatggagaaagatatagcatgcgcacactattggaaagaaaaccctagtggctatattaataacaaagcacacttcagagctaagctaatac

SEQ ID NO: 150685 - DNA, 353 bp, Homo sapiens
agggtcaccagagttgctggggcctaccgcaggtctcctgacccctggtgcagttttaccttcaattacaaccaccaaaatagctacagtcaaaaattcccaaagttcctacaccatcaacctccaccccacttccgtccaaagtccacttagaggctctcagttttggaccttagaaacacttagggagctttttaaaaagatcgattctgtatttttagtagagatggggtttcacccagctactcaggaggctgaggcaggagaatcacttgaaccggggagttggaggttgcagtgagccgagattatgtcactccagcctgggcaacagagtgagactccgtcttagg

SEQ ID NO: 150686 - DNA, 512 bp, Homo sapiens
  misc_feature (1)...(512): n = a,t,c or g
cttgaagacaggaagaaagagtgtttttcccatttagannnnnnnnnnnnnnnnnnnnnnnnnnnnnnnnnnnnnnnnnnnnnnnnnnnnnnnnnnnnnnnnnnnnnnnnnnnnnnnnnnnnnnnnnnnnnnnnnnnnnnnnnnnnnnnnnnnnnnnnnnnnnnnnnnnnnnnnnnnnnnnnnnnnnnnnnnnnnnnnnnnnnnnnnnnnnnnnnnnnnnnnnnnnnnnnnnnnnnncatatgtatgtacccaacctcagaacatctaaatatatgaagcgaacattgatagaactgaagggagaaatagatagcaacacaatantggtaggagatttcaataccacactttcgacaatgggtagaacgttcagataggacatcagtaaggaaacagaggacttgcacaacactgtagacccaatggacctaacagatatgcagagctttctacccaacagcagcagaatacactttcctctcaagcacatggaatattctccaggacagag

SEQ ID NO: 150687 - DNA, 408 bp, Homo sapiens
acgacaaggacttcataattgaaaaatatatagaaaacaatccttacttctttttacaaaaacaaaatcatgggaattattcttttctatatatttagttataaatctttctctgggccgggcgtggtggctcacgccagtaatcccagcactttggcgaggctgagacaggcgaatcacgaggtcaggagttcgagaccagcctggccaacatggtgaaaccccgtctctactgaaaatagaaaaaattagctggacacggtgtcaggcgcctgtgtgtggcgggcgcagctatctcaggaggctgaggcaggagaatcgcttgaacccaggaggcagaggttgcagtgagccaagattgcgccactgcactccagcctaggtgacagtgcgagactctgtctcaaa

SEQ ID NO: 150688 - DNA, 1200 bp, Homo sapiens
  misc_feature (1)...(1200): n = a,t,c or g
cagagccaggctgctgtttttcctttgctgatgccagggagactggacggcttggtcccaagaggtattccccacagcgcagcatactggctgtggcagatcatggccagactgcctctttaggctgaccctcacccatccctcctcactgggtggggcatccctgcaggaactccagcaactcaagccagggaattagggagagaactctgatctctctaagtctgagtccctatcaggaggggtggctggctgttgtctccacaaaccagaagacttattctttccccctgctcactctgaggaatccaggcagcccagatggagtgggaattttccccggtacagcataccccctttcccaaagggacaaatcaaaagtgctttcattaagcaaagtcctggatcctgtgcctctcaactgggtgaaacaccccaggtgggtcaccagacaccttatacagggagcatttctactggcatcaggtgggtgcccctcaaggacagaagatcccagaggaaggagtggggtccccatctttgctgttctcccagcaccctctggtgacctccttcaggtgtgggagggaccccagataaatagggcttgaagtgaatcccccagcaaacccacagcagcccctacagaagagggtnccctgactgtcggaaagaaaaacagaaagcaacaacaacatcaaccaaaaagtccccacggaaaacctcatcttaaaggtcagcagccttcaaaggttcaaattgaggacaaattccttggaagatgaggaaaggaattgaaaaaccccttcacaactcaaaagggccagagtggctttgtttactccaaattgattcacaacacctcttacaggcaggggcacagtcctgggtggaggttgagatggatgaattgacagaagtaggcttcagaaggtgggtagtagcaaacttcactgagctaaaggagtacgctctaacccaacatattggaacgaatcccagaacttaaagattggttctctaaaataagacagacaaaaataaaaaagaataaaacggaaggaagaaaacctccaataagtatggggttatatatagaggccaattctacaaatcactggcatccctgaaaggagggtggagatatcaatgcattgggttagagcatgctcatttagctctgtcaaatttgttataccc

SEQ ID NO: 150689 - DNA, 680 bp, Homo sapiens
gagcagtgccggagccccgccagagcccgacttcagccccagccagatcccgcgtcaacggaggcggaacggcggaccccgtaccctggcagcatcggagcaccggcgggtgaaggcaaggtccctggactggtcatatacctcttgtggccctggcagaatcaagatgaggccctgtcatgcctccccagtgaggcctacagtctgagcagacagcatggcctgccactggcagtgaacaccatgtctgcaggaggtggccgggcctttgcttggcaagtgttcccccccatgcccacttgccgggtctatggcacagtggcacaccaagatgggcacctgctggtgttggggggttgtggccgggctggactgcccctggacactgctgagacactggacatggcctcgcacacatgggtggcactggcacccctgcccactgcccgggctggtgcagctgcggtagttctgggcaagcaggtgctagtggtgggtggtgtggatgaggtccaaagcccggtagctgctgtagaggccttcctgatggatgagggccgctgggagcgtcgggccaccctccctcaagcagccatgggggttgcaactgtggagagagatggtatggtgtatgctctggagggaatgggccctgacacggccccccaggcccaggtacg

SEQ ID NO: 150690 - DNA, 405 bp, Homo sapiens
cggacgcgtgggcagctaaaccgtggggtatacggccctaggcggagcttgtcagttccgtccactttagccggggcgcccctcgccgggcgtctcgacgaaacctccggagaggaacagaccctcactctctgtggcggaaaaatgtctggtccaactcagccacctgctgaagggacagaagggactgccccatgtgggggtgcccctgtccctcctcctaacatgaccagcaacagacgactacagcaaaccaaggcccaagtggaggaggaggtggacatcatacctgtgaacggggacaacgtcctggggagggaccataagctgagagagctggatgaccgatcatgatgccttgcaggcacgagcatgaccatttgagagcagcgctgcaagctaaaa

SEQ ID NO: 150691 - DNA, 393 bp, Homo sapiens
ggcacgagacaaggataagtttccttcttgcacactaaccattacaatcttgacacagttttgaaaaatgagctattcagttcagtgtgtatatctgtgttcctgggatttgtatatcacctgacagagagagaaaaagagacaggggcaaagatggagggaggcacagaacgaggtggaggcagggtgagtaaaaaggagaggtaggcagagaaagaaggagggggagagaaaggagacagacagagggacagagacagaatatacagccctgattagatttctgctgtgactaaaatgaactgaagcctggaattagtccatactcttgctcacgcaaacagaagacagtatgagagtaaggaaatagaaatgggattcactcaagctgct

SEQ ID NO: 150692 - DNA, 396 bp, Homo sapiens
  misc_feature (1)...(396): n = a,t,c or g
ggcacgannnnnnnnnnnnnnnnnnnnnnnnnnnnnnnnnnnnnnnnnnnnnnnnnnnnnnnnnnnnnnnnnnnnnnnnnnnnnnnnnnnnnnnnnnnnnnnnnnnnnnnnnnnnnnnnnnnnnnnnnnnnnnnnnnnnnnnnnnnnnnnnnnnnnnnnnnnnnnccccaaattcctccccccccggggatcccaaggaaaagagaaaacctttcccgggaacccggagggcaaacccttgggggggttaggcctaatttccccttcttgaaaaatttttagggaaaaaaaatttggggcctcccccagggggggggcccacccctttccccccctttaatcccaaccttttgggagggccaaaagggggggatcaaaaggccggaaaaaaacctt

SEQ ID NO: 150693 - DNA, 421 bp, Homo sapiens
cgtcttcctatcgctggccttcctttcccatcctaaaaacttgccgaggccctatggctccctccctttctttcccaggcagcttcttatctgggctgtctgtaccccttcctttgcaccacccaccatgccccacgtagctgaaagctgcttatcccaattgtcaactctggcctttcttagcctctgtagcaccagacactgcacctcctgaatgtccttcttgcttcttcttgcttcagagggcccaggctcgccatttcttcttgacctcttcccatatgactgctaaggactctgctgcacctgacctcaccagcctcggggaaatccacttacccccaggcaaggcctgtggcttggcttaaaaacccactgcatgggcacaaaagccgggcctgggatccccagataacaaggg

SEQ ID NO: 150694 - DNA, 1460 bp, Homo sapiens
  misc_feature (1)...(1460): n = a,t,c or g
gaccttacagaaggatggatggtaaaggcagtccatcatcagcacaatctgacttacatttcattgagtaannnnnnnnnnnnnnaaaattctggagggcagcactttcagttgcccttgggggccggccacagccgcacaagtgggcttggggttaatcccccgctataagggaaagctggaaaaacttcaactccataggtctaaaggaaacattgttttaggttatttttgtccacccctgggcgatactattaattgacccaaccaaaaaagcttggggacactgagtcaaaagggggacatgggattgaaacctggccactgctgctgcatgagctgtgtgtcctggggtgtgccggcctttctgtgaagggggttggtggcagtgcccacctcactagatgcctctgacccagcctcccctgggggagtgggtggccacagaccctccctgccagagctcctggaaggctcctgcaggcctgacccatctattcctgtagacctggtttaggatgaagtctcggtgcgatttttgcagagttgggtttatcttttaactatagacccttctggctgttctcagccatatcatgtgactctgaatagttggatgaggaattggaaagaaagcaaggatgagagccgggcatgtggcagtctccgcccagcatcggctgtccgcacagaggcacagggcaggcctcctgtgcactccccacctagcactggcctgtcctgaatccccgccttccctggttggaggccagctgtggcatttgcaccctcttctcacctcaccatgcacatgctaactttaaagccttggggtctttcctgtaccccctcctcaaccctggtccaccccctctcaggatcttgacaacgatatttttcctgtcccgccttcctatcgctggccttcctttcccatcctaaaaacttgccgaggccctatggctccctccctttctttcccaggcagcttcttatctgggctgtctgtaccccttcctttgcaccacccaccatgccccacgtagctgaaagctgcttatcccaattgtcaactctggccttcttcagcctctgtagcaccagacactgcacctcctgaatgtcctctgcttctctgcttcagaggcccaggctcgccaattcttttgacctctcccatatgtctgcttaggactctgctgcagctgtcctcaccagcctccggggaatcccactacccacagggcagggctgtgggctgggctgaaaaaccatctgcatggtccacaagaagcctggcactgggtttccccatgaataacaatgaaaattaatggatgcacaaccttcctggaacgtggaatttctctgggagattccatgcagaggccactggggaaggtggcaggcatgcattgttgactgtaggtggctgcagtgttggaaggctcccagcagaa

SEQ ID NO: 150695 - DNA, 966 bp, Homo sapiens
tttttgtgagtgagaagcaccaggtttaatattaaaatctttcccttaaaaaaaagtacacagatagaaaaacttaacagcatacaaaatagcatttctgctgtataaatgtgagttaacgtgagtcctaaaaatatttgtaaacctaggtgattatatctttggtaccgtattgagaacccactctccctccttggaccaactctggggatcccagggaagtaaggtgccaacctgcaatgcagggttggtgcccagaggggttgagcttcctgcacccccttcccaaccctccccgtgcgggggcgtcttggctacaaccctgactcccctggcacctccaatgcccactgggctggggacaatgagatgtcactggtaggtctgggcccagtgacaaaaccatacccccatggagcgctgcctcagggatggggcagctggtgggtgagggggctttccaggacaccggctgtcactctaagtcaaggcctgtgcagctgtgttcttgagacttgctgggggcctggggaaggggcatggttcctgagtccccagagtgtgatgtgtgatctggaatctcccaggagcccagctgacccccaggatggaagtttaggggtatatggccttgcttcatcttggaccaatgtgcaaccaacctggaatacctctagaattggtagtgcttgccaggcacctcagagtttaataagtcccacttattcatttttttggagggggaaacttgaggcccacaaaagggtggaggggttcctccaaagcctcattacaaggccccaatgcaaagcccgggccctatactgtggacacaaccgcgggcccctcccactggggccatttacttttttttacaaatgggggggcccccctggcgtttttcactttttggggtgggtggataataaggggggggaaaaaaaaaaccccacaacgtggggcccg

SEQ ID NO: 150696 - DNA, 2206 bp, Homo sapiens
gtgagtgagaagcaccaggtttaatattaaaatctttcccttaaaaaaaagtacacagatagaaaaacttaacagcatacaaaatagcatttctgctgtataaatgtgagttaacgtgagtcctaaaaatatttgtaaacctaggtgattatatctttggtaccgtattgagaacccactctccctccttggaccaactctggggatcccagggaagtaaggtgccaacctgcaatgcagggttggtgcccagaggggttgagcttcctgcacccccttcccaaccctccccgtgcgggggcgtcttggctacaaccctgactcccctggcacctccaatgcccactgggctggggacaatgagatgtcactgctaggtctgggcagtgacaaaaccatacccccatggagcgctgcctcagggatggggcagctggtgggtgaggggcaaacctccaaagcgcccacctctcacatccttcttggggtaccatctgaagcttcttgtcttttacaagacataactgtcctcactgtccattctgtcttcgacgcagacctcggcacaggtgctggagtggtgggctgcaggaggtgatctcatttgccctctttgtcccttttgcccaggatacccccggaggtcatcgtgggtagtgaaagaggtcccgtggtcttcccatgtccctggggcagctgctgggggctttccaggacaccggctgtcactctaagtcaaggcctgtgcagctgtgttcttgagacttgctgggggcctggggaaggggcatggttcctgagtccccagagtgtgatgtgtgatctggaatctcccaggagcccagctgacccccaggatggaagtttagggtatatggccttgcttcatctggacaaatgtgcaaccacctggaatactctagaatgttagtgctggcaaggcactcagagttaataagtccgacttattcattttttgaaggggaaactgaggcccagagagggtgagggattcctccaaagcctcatagcaggtccaatgcagagccagggccatatactggcacacacacgtggccactccacactggcacatttacattctcatcacagatgcggggcccgtctggccttctagactctggtggatggattaagactgagggtgataaagaaaaagccccaggactgatgggcctgaaggacagggacacaggcacttgctatggctgcgtgtgctccaagtgccctgggcaagggctgcaggctgggggtgtcctgtacttggctcagcctccagcattaattaggctgcctaatggccccagaccagctcgggccagggaacgcagggactggcatcatagggaggagactggctttcttctggatgaggcaacactgctcaaggctaggccctagctcagccagcagccagggaggctagggtctcttccctagctcctgggtggataaaagtgcgaggagagagctatgattccttgaggggtagctggctgaacagaaaaaagttaatttaccacctcagtaactccaagaatcttcccagggagggattcggtctccccacctgtcagccagggagagaatcctagattctgggtcatcaagcctaactttcccatcttacatatgggaaaactgagttccctgggggaaccctggctcagagtcagttggcctccctggaggcagagggctggtcacggcccctgcagttttcttgcctcctaagccagccccagggtttggggcacaacacgtcaggagcagaaagcttccagaaggggacagctgataagggcagcctggctgacaggaagcccggtcaggccaggccaggagatgctgggtgctggcagggggggagcttcaggcagggcagggtaggggccagccccctacaggaagctatcctctgcttccgcccgaggcgcagggcaccccgaatccggcaactgttccagctctggctccggctccacctggagctcaagctggggctctggctctggttcgtcctggggctccagggggctgtcacaggagatggttgaggaggtgttgacttcattcagggtggagatctcgtcggaggcatgggcaggctgggccatgcggtaaccccgtttgatggcattgtagaactgctcgttcatgggcagctctgggtaaggggtgccac

SEQ ID NO: 150697 - DNA, 5687 bp, Homo sapiens
agcggccgccctttttttttttttttgagaagcaccaggtttaatattaaaattctttcccttaaaaaaaaagtacacagatagaaaaagttaagcagcatacgaaatagcatttctgctgtataaatgtgagttaacgtgaggcctaaaaaatatttgtaaacctaggtgattatatctttcggtaccgtattgaggaacccactctcccttccttgggaccaactctgggggatcccagggaaggtaaggtggcaaacctgcattggcagggtttggtgccccagaggggtttgaagcttccctgcaccccctttcccaaaccccttcccgtgcggggggcggtcttgggcttacaacccttgactccccctggcaccctcccaaatcccactgggttgcggggtacaatgaggatgtcactggctaaggtctggggcagttgacaaaaccataacccccatggaggcgctgcctcagggatggggcaagctggtgggtgagggggcaaacctccaaagcgcccaccgtttcacatccttactgggggtaccatactgaaggcttcctgtctttaacaagacataactgtcctcaactgtccaattctgtcttcgaacgaaaaacctcggcacaggtggctggagtgggtgggctgcaggaggtgatctcatttgcccctctttgtcccttttgccccaggattacccccggaggtcatccgtgggtagtgaaagaggtcccgtggtcttcccatgtccctggggccagctgctgggggctttccaaggacaccggctgtcactctaagtcaaggccctgtgcagctgtgttcttgaaaacttgctgggggccctggggaaaggggcatggttccctgaatcccccagagtgtgatgtgtgatctggaatctccccaggagcccagctgaccccccaggatggaagtttagggtatatggccttgacttcatctggacaaatgtgaaaccacctggaatactactagaatgttagtgctggcaaggcactcagagttaataagtccgtacttagtcattttttgaaggggaaactgaggcccagagagggtgagggattcctccaaagcctcatagcaggtccaatgcagagccagggccatatactggcacacacacgtggccactccacactggcacatttacattctcatcacagatgcagggcccgtctggccttctagactttggtggatggattaagactgagggtgataaagaaaaagccccaggactgatgggcgtgaaggacagggacacaggcacttgctatggctgcgtgtgctccaagtgccctgggcaagggctgcaggctgggggtgtcctgtacttggctcagcctccagcattaattaggctgcctaatggccccagaccagctcgggccagggaacgcagggactggcatcatagggaggagactggctttcttctggatgaggcaacactgctcaaggctaggccctagctcagccagcagccagggaggctagggtctcttccctagctcctgggtggataaaaagtgcgaggagagagctatgattccttgaggggtagctggctgaacagaaaaaagttaatttaccacctcagtaactccaagaatcttcccagggagggattcggtctccccacctgtcagccagggagagaatcctagattctgggtcatcaagcctaactttcccatcttacatatgggaaaactgagttccctgggggaaccctggctcagagtcagttggcctccctggaggcagagggctggtcacggcccctgcagttttcttgcctcctaagccagccccagggtttggggcacaacacgtcaggagcagaaagcttccagaaggggacagctgataagggcagcctggctgacaggaagcccggtcaggccaggccaggagatgctgggtgctggcagggggggagcttcaggcagggcagggtaggggccagccccctacaggaagctatcctctgcttccgcccgaggcgcagggcaccccgaatccggcaactgttccagctctggctccggctccacctggagctcaagctggggctctggctctggttcgtcctggggctccagggggctgtcacaggagatggttgaggaggtgttgacttcattcagggtggagctggctaggctgggggaaccctccagtgggccctcgtcagcaacctcgggtttggggtcaggcagggggatgatatagtcgttgtcaccctcattgggctgcacggcagtatagaggacggagctggtgtccaggggagatcggaggccatggaacccaggcaagcgggcctgggaccgaaggatggctgggtggtcactcctcagaaactcctcatccacctgctggtacttctttttgtaaccttcgcccaacagtctctcgagaagcagcaccagctgggagaaggggggccgaatctcaaacttctcttcccagcacttctgcatgatctcatagatctcgtcggaggcatgggcaggctgggccatgcggtaaccccgtttgatggcattgtagaactgctcgttcatgggcagctctgggtaaggggtgccacccaaggtgaagatctcccagagcaggatcccgaaggaccacacgtcgctcagggtggtgtagaggctgttgaagatgctctccggagccatccactttaaaggcaaaaaggtgctgcctttggagatgtaattcgagtcccgcatgatgtctcgagccaggccaaagtcacagatcttgaccagcttgccttcacagatgagcacgttcctagccgccaggtctctgtggacgcagttcttggaggccagaaactccatgccattggccacctggtagctgaagcccacgaggtccatgtagcttagcactggagactcgttgatcaaagttgctcggcaggtcctctcaggggcagagggaacgtagttatcgtaaggggccatgtagttggaggactcgatgtctgcatatttgacgtctcctttcatgtccagcatgggcacatagtccaccgactcgtccttgctcatgtccatgtagccaccgtcgctctccccggtcaaggacacatggctgggcagggggagcccaacgggcagagcattgctgtagagctccgcgctgggcgggcggcgcttgtcggagtggtgctgcaggaaggtgtgtttgttgcggtgcaggtagtccaccaggtctccgtagcggcagtactcagtgatgatatagatgggtcctcctttggtgcaggcccccaacaggttgaccacgttcaggtggggcccaaggtgactcatgatcttcagctccgacataagggcttgcttctcactgctgcgggctgtggatttaagcatcttgacggccactttcatcgtggcctgagaatggctcaggccatgagccgtggcctccaccacctgcccaaaggccccagagccgagggtgcgtcccagcacaagctggtcccgcggcagctcccacgtggagtcatagggcagctgcatggggtccacgtagatgtactcatggccgtcagagctcacagactcaatcaccttccatcggatctcgtaacgtggcttcttctgccaaagcatgatgaggatgataagggagatgatggtgagcaccaccagggccaggatggctgagatcaccaccaccttaaagggcaaggagtgtggcaccacgatgacctcctgcgtgtcctggcccacagcgttgcgcagcgtgcagcgcaccgacagtggccgatccacgtgctgcagacgcagtgtgctcaccacctcaaactcctgctcctcctcccagtacgtcacgttagtctccagctggctctcctcttcggaactgttccccagcagcgtgggcggcagctcacgtggacaccttttgaggtctctgcaggcagaccagatgatgttcggctggggcatgccccggccacgacagcggactgtctgttccccactgtcagggtggctctcacttagctccagcactcggacagggacattgatctgtagctggaaggagagctggacctcagcatcctcatggaaggcccgcatggtgtagtggccagcctctgccaccttcacgcgaaccagtgtcagctctgacacataccgggtctccgacacgttgcgcgtggacagggcgatttcgccagcgctggagtcgcccagggtgcggttgtctttgaaccacaggacagtgggcggtgggtaggcctcgaacactacctgcagtgtccggctccgatgcagctcagcaaattgtagtgtgcccacctctcccaggagccgcacgtagccgctctcaaccacggtgatgttgatggccttttcatcctgatggtcattcacactctccgtcacattgcaggtgtaggtccccgagtcttctaactcggcactggggatgtgcaggatggagcggatgtggtaaggcatatccaagaggaagtcagtcaccggctccaccagccgcccactttctttgcgggggtatgtccactcgaagttgaccacctcattcccgatcacaatgcacatgagggtgatgttctcaccctggcggaccacagtctgcactgcgttcacagagacgttgatggatgacacctggagtctgtagacatagtaggcatcagaatccacctccctgtccccaatggtggttttgcagatgtagcttctgtcctcaaagataccagaaaagccacgttggtgatcataggggacaggcagtgcaacgtcccctttcttctcgtgcagtgtcaccaccagctgtgggtctgttactcggcatggaatggtgatctcagttatttccgtgagaaagatgaatagttcctcggcatcattagggaggaagcccacggtgggatctggcacaaagatgtagagccgtttccgctcatcggtctccagtccacgggagtcattgtgggtgcaaaagtattctcccgtgtctagcccagtgaggttggtcagtgtgagcacgctggagaaggtgccatcctgggccttggccatttcctgtgggggctcctgggacatccgttcccacaccaccggagctgaacccgagcaggtcagaacgaaggtgctggagacattgaggacaagctctggccccgggggtgtgacgaccaggccctgagagatctgtggttccagaagtaacaggagagacagcaacagcagctcgcctttgagggccagagctggcatcgcacccggaagccgcatggtgtccttgctgctgatggcttctggtgtgggcacagttccaggctctggacagtcaccccctccaggaagtcctccttactgccctctcccagttatcagaaagactgctggtcccagagtgggtaacagctgagtagaaggacaggcaggactggtgcaggctcctgaaggctcaggagaacagagggatggaggaagggggctgctgtaggggagaggagcgcccagcttcgcctcactccccaagcatccttcgggaggagcagagccgccagaggggccgccctgggtctggctgtctgcgttgggcagggcgagcacaggctcgtgctgggcagcagggctgaggggcc

SEQ ID NO: 150698 - DNA, 1101 bp, Homo sapiens
atggggtttcaccatgttggccaggctggtcttgaactcctgatctcaagtgatccacccgccttggcttcccaaggtgctgggattacaggctcttggaagtggatccttgcaccggtcattctttatatctgtgaaaggatcctccggttttaccgctcccagcagaaggttgtgattaccaaggtaaagaatatgcactttcctcttgctgtgataagagttatcttctaccggactacagaactaaatttttatgttgtcaccctgaaagaggaacttggaaactgggcacagtgggtggttgttatgcacccatccaaagttttggaattgcagatgaacaagcgtggcttcagcatggaagtggggcagtatatctttgttaattgcccctcaatctctctcctggaatggcatccttttactttgacctctgctccagaggaagatttcttctccattcatatccgagcagcaggggactggacagaaaatctcataagggctttcgaacaacaatattcaccaattcccaggattgaagtggatggtccctttggcacagccagtgaggatgttttccagtatgaagtggctgtgctggttggagcaggaattggggtcaccccctttgcttctatcttgaaatccatctggtacaaattccagtgtgcagaccacaacctcaaaacaaaaaagatctatttctactggatctgcagggagacaggtgccttttcctggttcaacaacctgttgacttccctggaacaggagatggaggaattaggcaaagtgggttttctaaactaccgtctcttcctcaccggatgggacagcaatattgttggtcatgcagcattaaactttgacaaggccactgacatcgtgacaggtctgaaacagaaaacctcctttgggagaccaatgtgggacaatgagttttctacaatagctacctcccaccccaagtctgtagtgggagttttcttatgtggccctcggactttggcaaagagcctgcgcaaatgctgtcaccgatattccagtctggatcctagaaaggttcaattctacttcaacaaagaaaatttttga

SEQ ID NO: 150699 - DNA, 1181 bp, Homo sapiens
tttttttgagacggagtccgcgtctgtcacccaggctggagtacagtgaccaccatgcttggctaatttttgtatttgtattagagacggggtttcgccatgttggccaggctggtctcgaactcctgacctcaggtgatccgcccccccttggcctcccaaagtgctgggattacaggcatagccactgtgcctggctgacttctagagtttcaataacagagatgtggttcaagaagaaaagggagacatgttttgtagatggcaggagcttcatgaaaagaagccaatgaagggcaggacgtgtagctgtctacctacaggaaaccagccaaggagccctccccacagggacttcagcacagatggccgggaaaatctgcattcacctgagctccggacctaagagaggacaaggccttgaccatttctacagactcacaagatgcaatctctgtggtccatgcccgtggtgtgatctgggaagcagggggccttctaaatgccaacaacaaggaaatcaaatgtgcaacaaacagaaataacggcattgacgtgggcccatggagaggcctaaacagatgactgcagttcactgccaaggtcatcaaaggggtgactctgaaataagaaatttcagatgccacggcccaaatagctgcacgaggtggggaagtcctccacatgcctctgcttccttcagtacctgtttatgaaataagccgaagtacttcccctggggaatttcctttctttctttctttctttcgagacggagtcttgctctgtcgcccaggctagagtgcagtggtgcaatctcggctcactgcaacctctccctcctcggttttagcaattctcctgcatcagacttctgagtagctgagattacaggtgcatgccaccatgcccagctaatatttgtagttttagtagagacagggtttcaccatctaggccaggctggtcttgaactcctgacctcgtgatccacccgtcttggcctcccaaagtgctgggattacaggtgtgagccatcaagcccggactttttttttattttttgagacgacgtttcactcttgttgcccacgctggagtgcaatggcacgatctcagctcactgccacctcctcctcccaggttcaagcgattatcctgcctcagcctctcgagtagct

SEQ ID NO: 150700 - DNA, 599 bp, Homo sapiens
ggtagattgagtcatttccacatcttgcgagtccttccgaacgagtctcctttccttggggctcgtaaccacccaatgatcgattcaggagaaaagaagcctgggcggagagcagagcccgacctttctaaaagagctgcaggaagggacttcttggctactgatggcaaagctctacgaggcagtgaccttcaaggatgtggctgtgatcttcactgaggaggagctggggctgctggaccctgcccagaggaagctgtaccgagatgtgatgcttgagaacttcaggaacctgctcttcagtggggcatcaaccatgccatggagatactttccacttcctaagggaaggaaaagctttgggtgatggggacatcaagccaatgagaaaggaatttgggaggcaagatccaaactgagatggagactggttccagaagcaggaacacatgaagaattttcctgcaagcaaatttgggaacaaattgcaagtgacttaaccaggtctcaagataccaccataagtaactctcagttatttgaacaagatgacaacccctcccagattaaagcaagactatctacagttcacacaagag

SEQ ID NO: 150701 - DNA, 1913 bp, Homo sapiens
gacgatttcggcacgaggtgatttcaattttttctgggctggagctccctgatggaggggcaggccaccatctttgctgtttttgcaacttagccacttcaaccttcagtctttggagtgtccaaggagaccagggggtgatgtggaccctcagcattagcacagctgctctataaaaatgaggcccagactgcttttttaagcactttcccaatgccattcctcctcactgggcaaaacctccaaactggggtctccagccacctcctacaggtgtgtttgggccagcaacaagttcattcatacctccctagggcaaagcttccaaagggagcggtaggctgccatctttgctgtttcacaggcttcactgatgataactccaggtactggaaaatctgaggctactagagactggagcgggccctgggcatactgcagcagccctatggaaaagtggccagactgttacctgggttcccattcctgtatcttctcactaggcaagtcttgcaggcctgggcctctacctaaccccccctaccagaactgttgagccagtagcaactcagccactccctggagagagcctccaggggcaactgaaagcctctctgccactgcttctgcagtggaactgtccttgctaccctcagactgatgaaggagctaacacccttatctacaccttcaacaagctttaattgaccaaagcccatctctcatgggttctacacactccccactgctcatgacagggaacccctggattggcccccacagcacgaattctccatcctgattgctgattgcagtaaacagttgctgacctgtattctccgggggtagaaccctgaggagacaaacaaaagacccttggctacaaccactactaatgtcccttcctcttcttccccaaagttagggaagaaatataaacactcgagattgccccagagctgcagtgggcagcctcaggagtgccaagccatgatctacagccagcactcaaggaggagagaagcacattttcagatcattgagagtgaacatggctgcaactgtgaggaaacataggggagccacatgaccaagcaagactctaccaactgaccagtaagcccaagtgccacctactggatcacatcccaaagcttcagcaccaaaaataccttactaatatactcccctctgaaaccagaaatgagaagtcagcttcaaataaagaacctgcacaaagcctcagcctggtgaaaacatctgaaaataagtctatctgactgtactcaatctacactgcaattaaaggaaaacccataggtggaaatgagaagaaaccaatgcaagaactccagtaactcaaatggcctctgtgtcatatgtccttctaacaaccacaccagttctccaacaagagttcttaacctggatgaactgtctggaattacataaatataatgtttgaatatggataggaaaaaaaatcatctaaactcaggagaatggcaaaacccaatccgaggaaaataagaataacattaaagtgttacaggagctgaaggataaagtagctggtataataaaaaagaacctaaccgatctgaatgcgccgaagaacacattacttgaattccacaatgcattcacgagtattaacagccgaaaaataaatctgatgaacgaatctcagaacttgaggattgggtctctaacataagatggacgaaagtaaattagaatgaacaaatccttcacggaggatgggatgatataatgaggccaattctacaaatcactggcatctctgaaagggaggtggagaaatcaaataacttggaaaacgtagttcaggatatcatctttgaaagcttccctaaccttgctagaaaggccaacagtcaaattcaggaaat

SEQ ID NO: 150702 - DNA, 496 bp, Homo sapiens
  misc_feature (1)...(496): n = a,t,c or g
gttttctgatgcaaccaaaatgcttcagggctcgtcttatctggaggtttgatggctacagacgtgaggggcttccaggtagagctcagacctgagacttctggtcccctgtctggacatctgtatgaagacggagaagcaccagccaacctctccacaaccctcaccaagttctcatggaacatcctctgatggtccctctcggtgctgggttctggcaggagaaagagaagtcagggaacagaagagctgctctgccaaagtcatacccttcttggagacacagggaactccatctctcattctcactagcaatttgctgtggcaactcaaatgtttttccaagatggaacataagcagacgtgatgtgtttgccttccaggtctaacccatgcaaagcctcctgggaacacacctcacgctattttatattccatcaggtggatatggatgatgattaggaactagggtgaggtggagccagaanacacaagg

SEQ ID NO: 150703 - DNA, 1102 bp, Homo sapiens
atgcttgcattaaaagacagaagctctcaacccaacaccctgactatatctaaagtaggaaaagaagatactgaccccaaagttagcagaggaaggcctcttgcctactgccatgtaagacgtgactttgctcctcattcgccttttgccatgattgtgaggcctccccagccatgtggaactgttttgggggaacaggtggtgtttgggtgcatagaacccagcaccgagagggaccatcagaggatgttccatgagaacttggtgagggttgtggagaggttggctggtgcttctccgtcttcatacagatgtccagacaggggaccagaagtctcaggtctgagctctacctggaagcccctcacgtctgtagccatcaaacctccagataagacgagccctgaagcattttggttgcatcagaaaacagatggaaggccagtcttcacagatgcatatacttcatcctggcttccacccacagaggttgcatctgtgcagaaattcatcccagagcaccaggcaggtagccactgtgtctttatctccctccagagaagcaacgcgctccagactctgatgcactggaggcaggagacagctgcaggtggtggtgtgctctggaagagtagaaacagagacccctcatagataccctgtcttcagaatagacctaggctcttcaccccaccacccctgccaccacccccacccaagccactgcagtgtcttgcccagacaaggggcatagccaactaactgatccctcagatcttgccctggtccccctaagataactctttatatggcagctttctccatcttagcactttgggaggccgagacaggtggactgcctgagctcaggagttcaagaccagcctgggcaacatggtgaagtccagtctgtattaaaactataaaaaattagctgggcatggtggcgcacacctctaatcccaactactgtggaggctgaggcatgagaatcacttgaacctgggaggcagaggatgcagtgagccgagatggtgccacttcactccagcctggacaacagagcaagactctgtctaaaacaacaacaacaacaacaaaa

SEQ ID NO: 150704 - DNA, 456 bp, Homo sapiens
  misc_feature (1)...(456): n = a,t,c or g
cgggggannctgagaacctgagagcctctgcagngtcgtggaatttctgcaggcgctggtcacggaattccaggagacccatagccaagacgccattgagcatgttctcgccaacctcgccaacttcgcttatgaccccagcaactaccagtatctgcggcagctgcaggtcctgcatttatttctcgattcgctgtcggaggagaatgagaccctggtggagtttgctattggaggcctgtgcaacctgtgcccagacagggccaacaaggagcacatcctgcacgcaggaggtgtcccactcatcatcaactgcctatccagccccaatgaggagacggtgctgtctgtcatcaccacgctcatgcacctgagcccgccgggccgcagctttctcccatagctgaccgccacgcccgcggtgcagtgcatgcttcgcttctccctctcgggcag

SEQ ID NO: 150705 - DNA, 2555 bp, Homo sapiens
  misc_feature (1)...(2555): n = a,t,c or g
ttttttttttttttctagtcttctaggaccctttatttgggaacataaagggacaggctccctgagcgggtgctgatgagcccttccctcccctctgagtccagtggtcccctaatctgccccatttccatgcccacgtgggtaccatttttgtagcacctgccattcctgggccatctaaggggtcagccttgagggggtacacgagaggcaagggacccccattttccctgaggctccacctttccatcggatcccacgctccttatgttgaccaggggggcaccatgggacatgggagccacatcctttacgttgccgtcttcttcctgactcccttgaggcaacactcactgcggtccctgaatggcccttcgtggggataacaattttgggggtagggctccccattattgagttgacacccaaaaaagggcccaaaccttttaacccggggccatggggtggcaaggggagaagatgcagttaccagggctggtgcctctattcagacgtatcatcacctgcatggccttgtgcttgatgcccgatggccacattaagtccctgggctgtcactcaagggcagggaccacatcttcatcttggagtcatggtgcctaacagcaaggctgggtggacagtcaatgctgggccacaggttatccaggttggcatcccccaggcccaaatgcccagcttggagagcccctgggggaggcatccatcctccagagccctggagggggcaccacatcttccccagggtgagatcctttcaccacgaggcatctcattcctatacctgaaaactactccagacacttctgttaagggataatccctgatttcctgcagcgaaggcagctctcctaaagcctcaggcccaagctcctgagaacactgtcctgcaaagcctctgggtccaggcacttggccgcttcttacaccagggcctgagtctggtggtggtggcacctgatgtaggattgagagtgccagcctatgaacgcagctccagtttgatcttctccgtgtctctgaaatctggcttcctaactcccagtggcgtttcatcagtgtaaatgcctgtcctgctgaaagaacccgcctttcagatggctgaaaaggcacccaatggggcagtatgtgctccccgttccctgcgtccacatcaggactgtggtctccagcagtaggggtgccacggtctcgcagtctccatggatcagcgctgccgtggggccacgctcctcggcagtgggatacccagggcagagtgcgcctgccggctgcgggcctcggccacctggcggggggagcagaagtcctccaggaagatctgtgccaggttccggagcctggcgctggccgagagggagaagcgaagcatgcactgcaccacgggcgtggcggtcagctctgggagaaagctgcggcccggcgggctcaggtgcatgagcgtggtgatggcagacagcaccgtctcctcattggggctggataggcagttgatgatgagtgggacacctcctgcgtgcaggatgtgctccttgttggccctgtctgggcacaggttgcacaggcctcccttccagaagtgggcacaaatccctttccctctcagttcagcaagttcaatggctgatacgctttttttttcccctttcttaaatgtaaaaacccgcggcatgtctcccgagctgacgggagcggccttcctgtgcacactggactgcgggtggggtgatgggatttctctctgtgtaaagtgtgataagatgaagcctgagtcactgcctggcagctgagtcatcaccacacccaggtgcgcctgggcagggcactgccacccagattggtggtgggggttcccgatatgtacaaaggggttagaaccatcggccttgccgttcatgaccgattcagaggccttgtggacaggctggttcaggtgggcgtgtggcgagcacatggtgtgcacaatagcaaactccaccagggtctcattctcctccgacagcgaatcgagaaataaatccaggacctgcagctgccgcagatactcgtagttgctggggtcataagcgaagttggcgaggttggcgaggacttgctccttggcgtcttggctttgggtctccctggaattcccgtgaccagggccctgcaggtatcccagccgcccgacgtgggggtnccaccttcggctttctggccnatggcccgcgatgacggaggacccccagggacgggcgggagggtgggaaaggtgcaggggcaaagccgagcgagaccctcacccgctctccacctgtctggagagggaagagggggtcggcaaatgggtttctttcctgggttcagattctgcagtattttgcagctggaaatggcatatgggagatgggacggggtctcagaatcctgtaggagttgcgtgtgaaaatcgaaattggggcgcgggaaacagggagccgtttactgtgttggggctcgcggagggggcactggcgcaccgtccccggctcctgggctcggttccgcctcgtgcc

SEQ ID NO: 150706 - DNA, 4237 bp, Homo sapiens
cagctcggtcgcccccaccggccccatggcagcccccggcgccccagctgagtacggctacatccggaccgtcctgggccagcagatcctgggacaactggacagctccagcctggcgctgccctccgaggccaagctgaagctggcggggagcagcggccgcggcggccagacagtcaagagcctgcggatccaggagcaggtgcagcagaccctcgcccggaagggccgcagctccgtgggcaacggaaatcttcaccgaaccagcagtgttcctgagtatgtctacaacctacacttggttgaaaatgattttgttggaggccgttcccctgttcctaaaacctatgacatgctaaaggctggcacaactgccacttatgaaggtcgctggggaagaggaacagcacagtacagctcccagaagtccgtggaagaaaggtccttgaggcatcctctgaggagactggagatttctcctgacagcagcccggagagggctcactacacgcacagcgattaccagtacagccagagaagccaggctgggcacaccctgcaccaccaagaaagcaggcgggccgccctcctagtgccaccgagatatgctcgttccgagatcgtgggggtcagccgtgctggcaccacaagcaggcagcgccactttgacacataccacagacagtaccagcatggctctgttagcgacaccgtttttgacagcatccctgccaacccggccctgctcacgtaccccaggccagggaccagccgcagcatgggcaacctcttggagaaggagaactacctgacggcagggctcactgtcgggcaggtcaggccgctggtgcccctgcagcccgtcactcagaacagggcttccaggtcctcctggcatcagagctccttccacagcacccgcacgctgagggaagctgggcccagtgtcgccgtggattccagcgggaggagagcgcacttgactgtcggccaggcggccgcagggggaagtgggaatctgctcactgagagaagcactttcactgactcccagctggggaatgcagacatggagatgactctggagcgagcagtgagtatgctcgaggcagaccacatgccgccatccaggatttctgctgcagctactttcatacagcacgagtgcttccagaaatctgaagctcggaagagggttaaccagcttcgtggcatcctcaagcttctgcagctcctaaaagttcagaatgaagacgttcagcgagctgtgtgtggggccttgagaaacttagtatttgaagacaatgacaacaaattggaggtggctgaactaaatggggtacctcggctgctccaggtgctgaagcaaaccagagacttggagactaaaaaacaaataacagaccatacagtcaatttaagaagtaggaatggctggccgggcgcggtggctcacgcctgtaatcccagcactttgggaggccaaggcgggcggatcacgaggtcaggagttcgagaccagcctgaccaacatggtttgctgtggaatttgtcatctaatgacaaactcaagaatctcatgataacagaagcattgcttacgctgacggagaatatcatcatccccttttctgggtggcctgaaggagactacccaaaagcaaatggtttgctcgattttgacatattctacaacgtcactggatgcctaagaaacatgagttctgctggcgctgatgggagaaaagcgatgagaagatgtgacggactcattgactcactggtccattatgtcagaggaaccattgcagattaccagccagatgacaaggccacggagaattgtgtgtgcattcttcataacctctcctaccagctggaggcagagctcccagagaaatattcccagaatatctatattcaaaaccggaatatccagactgacaacaacaaaagtattggatgttttggcagtcgaagcaggaaagtaaaagagcaataccaggacgtgccgatgccggaggaaaagagcaaccccaagggcgtggagtggctgtggcattccattgttataaggatgtatctgtccttgatcgccaaaagtgtccgcaactacacacaagaagcatccttaggagctctgcagaacctcacggccggaagtggaccaatgccgacatcagtggctcagacagttgtccagaaggaaagtggcctgcagcacacccgaaagatgctgcatgttggtgacccaagtgtgaaaaagacagccatctcgctgctgaggaatctgtcccggaatctttctctgcagaatgaaattgccaaagaaactctccctgatttggtttccatcattcctgacacagtcccgagtactgaccttctcattgaaactacagcctctgcctgttacacattgaacaacataatccaaaacagttaccagaatgcacgcgaccttctaaacaccgggggcatccagaaaattatggccattagtgcaggcgatgcctatgcctccaacaaagcaagtaaagctgcttccgtccttctgtattctctgtgggcacacacggaactgcatcatgcctacaagaaggctcagtttaagaagacagattttgtcaacagccggactgccaaagcctaccactcccttaaagactgaggaaaatgacaaagtattctcggctgcaaaaatccccaaaggaaaacacctatttttctactacccagcccaagaaacctcaaaagcatgccttgtttctatctttctctatttccgtggtcccctgaatccagaaaacaaatagaacataattttatgagtcttccagaagacctttgcaagtttgccaccagtagataccggccacaggctcgacaaatagtggtctttgttattagggcttatggtagatggcttcctggaatcaaaatgtgaattcatgtggaagggacattaatccaataaataaggaaagaagctgttgcattactgggattttaaaagtttgatttacatttatattccttttctggttcccatgttttgtcactcatgtgcacattgcttcgccattgggcctccagtgtattgttctgcagtgttgaaacagaatggaaatgacaagaaatatctgcagttatccaggagaaagtataatggcaaaattattggtttctttctttactttgtgcttgtttttatccccttggttgtttttctctgatttttaaataaacttaagaaatttagattacagagtatgcatgactgtaagaaaaagaaattgagaggaagtgatcatagcaaattaaagaagtcttttcctcccagaacttaaagtaaaataaaaaataaataaataaataaaatcttttccacagagaaaggcaactgtgatgataaaatttaagctcccccaacactgagtcaatgagatttttctcaggagatactttacctataacaacgccgttaaatccaaatctcttctaaacgatggcattctatgtaatgcctttcctggacttttttggccactgcctggactagtgaaagaatggactctatctttatctgcaagaggaactaaggccttctatcagactgcctggccagcctggggcactgaaaatacggctcatgttaatgagttacattatcagccagcccagccttgcccaccatttaagaaatatcacagagccactagatctcatatgatcttcttcaagccattattttaactcaagaaaactctagagaagaaaagtgaagaagtcatgttgaagaagatgtaagaatgtgtcaagaccatccagaaatgatatgagaaatactgatattttaaatggttgacatcatccagcgaaatgaatctacattaaatgttgttttaactgcgctatgattaaaaccattcatatagagttagtctttacaactactattctgttatttttttttttaatctgacaacatttgtcctaagtaagataagcaaaaaaattcttcaactccttttggcaagaaaactgtaacagaaaataaattttgaatgtgtacttaagtctttattatatttgaagcaattttttttcaattttaaaagctgaatgaagacaacttaggttgctaacctagttcaaaatgaaattatttagataccaatttttaaaatactggagagaatttatatgtctttttccagagttctgatgataagca

SEQ ID NO: 150707 - DNA, 2182 bp, Homo sapiens
tttttttttttttttttcattaaaaaattctttatttagtatattctgtcactcagagagtaagcttgataaaccatagggttggttttaaaaatattaatagtaatggttttattgataggtaatttggtttagtaggagttataaataccaaaaagggaaaggttaccagaaataagacattatttctaacaaatcttcaaagaaaaccttgaataattaaagtccctttttctctcacaagtgttgcatatacaggttttggctcttcagagccctctaccaataaggcacctgcaatagtagataatttgctaccgcagccttagagagcagtttttagaggtctgctggtgcttctcttgacaaagcacactttttttttgtttcccccgagacagagtcttgctctgttgcccagagtcggagtgcaatgggcatgatctccggctcactggcaacctctggcctcctggggttcaagcaattctcctggcctcagcatcccaagtagctgggattacaggtacccaccaccacgcccagctaatttttgtattttcagtagagacaggggtttcaccatgttggccaggctggtctcgaactcctgacctcaggtgatccgcccgccttggcctcccaaagtgctgggattacagggtctactgacattcagggatgtggccatagaattctctcaggaggagtggaaatgcctggaccctgctcagaggactctatacagagacgtgatgctggagaattataggaacctggtctccctggatacctcttccaaatgcatgatgaagatgttctcatcaacaggacaaggcaatacagaagtggtccacacagggacattgcaaatacatgcaagtcatcacattggagatacttgcttccaggaaattgagaaagatattcatgactttgtgtttcagtggcaagaaaatgaaacaaatggccatgaagcactcatgacaaaaaccaaaaagttgatgagtagtacagagcgacatgatcaaaggcatgctggaaacaaacctattaaaaatgagcttggatcaagctttcattcgcatctgcctgaagtgcacatatttcaccccgaagggaaaattggtaatcaagttgagaaggctatcaacgatgctttctcagtttcagcatcccaacgaatttcctgtaggccaaaaactcgtatttctaataagtataggaataatttcctccagtcttcattactcacacaaaaacgggaagtacacacaagagaaaaatctttccaacgtaatgagagtggcaaagcctttaatggtagctcactcttaaaaaaacatcagataatccatttaggagacaaacagtataaatgtgatgtatgcggcaaggactttcatcagaagcgataccttgcatgccatagatgtcacactggtgagaatccttacacgtgtaatgagtgtggcaagacattcagtcacaattcagccctgttagttcacaaggcaattcatactggagagaaaccttacaagtgtaatgaatgtggcaaggtttttaatcaacaatcaaaccttgcacgtcatcatagagttcatactggagagaaaccttacaaatgtgaagaatgtgacaaagttttcagtcgcaaatcacaccttggaaagacataggagaattcatactggagagaaaccgtacaaatgtaaggtttgtgacaaggctttcagaccgtgattcacacctggcacaacatattgtaattcacactggagagaaaccttacaagtgtaatgagtgtggcaagacctttgttccaaattcatctccttgtaatgcataaggtcctttcatactggagagaaacgttacaagtgtaatgaatgtggcaaggtttttaatcacaaatcaaaccttgcatgtcatccatagacctccatacctggaagagaaacctttaccagtggtaatggaatgtggccaaggtttttaatcgaaaatcaaaccttgaacgtcatcatagacttcatactggaaagaaatcttagaagtgtaaatttgcaaggtttttaggcaacagtcaaaccttgcatgtcatcatagactttatactggagagaaaccttacaaatgtgaagaatgtgacaaaagttttcaatttcaaatcactcct

SEQ ID NO: 150708 - DNA, 933 bp, Homo sapiens
tttacatgtaattttgtattttatttacttatttattttttacttagctcccagcatcggggaatattttaaattacattttacaaaaatcaccactaagatgaagcaggttcttctatcttgagtatatttctctttcatgaactgtgtcctcagcccattcgtctaccatagtttccgtgttcttgttgtctatttttacagctcactgtatcctgaagacacagttccttaataccactcccccaacggggaacagaaagactgcatgccttacctggcttcttgccaccataaaagtgagtgtattcagcacaggtaatgtacttggctttaggcaagcaaggcagccccaggtgccagggggtgatgaggtcaccacggagaccatggtggtggtagcagcagaggtggcagcagggttggtggcaggcatggggaggtcaaccggtcccacaagaggttgggttctggtttcttctgtcttggcttctttctcgtcttcttggtgtccccgcccagggcccagcacggggagaggttgatcctcgccccgggagtagaggtgcacgcggtggatgctctgcttcagctgctccacctgctcgtgcatctccagggcgcccatgctgttggaatggttcacgtccgcctgcacaacacagaagaacttcgcctgcaacaagagtaggagaggcagggcagggggaggtccgtggcgtgagacgcctgcccgctccactcctccaggctgtgcagcctcggctttctgatagatcctaccctgcagccccagctaggccgacggcgacctctccaccccacccccatccccggcccccaaagctccaatcgtcggagctctttcctaggggacggcggacccgggtagtgacagttacccgcccagccggtcccatgccccgcggccgc

SEQ ID NO: 150709 - DNA, 372 bp, Homo sapiens
cccaacctggccaaggtgtgcgcactgctacggggctacctgctgcctggcgcgcccgccgacctccgcgaggagctgggcacacagctgcgcacctgtaccacgctgagcgggctggccagccaggtggaggcccatcactcgctggtgctcagccacctcaagactctgctctggaagaagatctccaacaccaagtactcttgatggggcagtgaggggcctggccacccttcctggagctggccaggtgccagggtccaaccctccctcaaggagagtcctccaagggggtttgttactctgaagaacgtaatgtcaataaacagcttttatgtaatgcccagggctgagcaccctgagcccccatca

SEQ ID NO: 150710 - DNA, 738 bp, Homo sapiens
gctggcctctaggggtctgaagggatagtgggaaggtggagggtgccttcaccaggagcagccttcatgagtgagttttaagaacctgtgaggatcggtcaggtctggtgtgcgctggatcatgccgtacaccatgtcaggatcacgcaggacaggactggggaagggtttgctggcgtctcagttaatagcagtaacggcagccgcttgtgttcttgattctttgccaagcattcttgttatttaacacgggaaggaggtgacttcgcctgtgatggacttccagtgtgagcactggccagagtgaccaggctgaccagcaccagccctgatccagatgcagaggccaggatgtgggcccagccctgtgccaggaggctggctggaataaagggatgggcaggctggcatgggggcagccgctgcccctgcctgggtgttgctgtgtattcctgccggccaggggccactgccaggaccacgcctcccttttcatatcccgattcttaagttctgctattgtggtattctggtggagaaaaaagaaccgcgtggctgtttttgaactgcctggaacctaagaccctgaattcttttcccccccaaggggaaaatctatatggaaaacatttattttaaaatacaggatgaagtgaattaaaagatttaaatgcacatttctttaaggataatatttctgtgttggcaaaatttgagagtaaattggtcttgaatgga

SEQ ID NO: 150711 - DNA, 2353 bp, Homo sapiens
  misc_feature (1)...(2353): n = a,t,c or g
gcggccgcccttccacccctggttgcgcccactgctgccgcctgccctgcagggtgctctccagcagtggctggggcctgcgtggccttggcgggccaagatcgccagcggcctgctggagttcgtggaggagctcttccacggctcttacgggactttctacatgtgtgagaccacactggccaacgtgggctacacagccacctacgacttcaagatggccgacctgcagcaggtggcaccccgaggccaccgtgcgccgcttcctgcagggccgccgctgcgagcacagcaccgactgcacctacgggcgcgactgcagggccccgtgtgacaggctcatgaggcagtgcaagggcgacctcatccagcccaacctggccaaggtgtgcgcactgctacggggctacctgctgcctggcgcgcccgccgacctccgcgaggagctgggcaacaacaagtgcgcaccttgtaccacgctgagcgggctggccagcccaggtggaggcccaatcactcgctggtgctcagccacctcaagactctgctctggaagaagatctccaacacccaagtacttcttgatggggcagtgaggggcctggccacccttccctggagctggcccaggtgcccagggtccaaccctccctcaaggaatcctgtcagaagatgtgaaatgcaactgtgttgcaaaatcactcccctaccgtcagggctctggattccagcaccacagacattgagaccccagctcggagcaaaggcggacatggacatcccggcaggagagtcctccaagggggtttgttactctgaagaacgtaatgtcaataaacagcttttatgtaatgcccagggctgagcaccctgagcccccatcgatgctgtgtgtgggacccttcgccccgctgtggatccacccagcccaggcactcaggctggggttgagcccctgaatccttcctggcgaggcagccctcaggtgttagtccaaggtgaggtctattgcagagctgcctgcccttcaacccacacacacctctgaagccgccagggcagttccccaaacacagcggcttctgaaacagtcaatgaccagtaccccccaaacctgggctgtgcacaacagaccaagaaaaaggtgttccagtaagaaaacagatatatgcggtattttaaaaactgattttacaaaatccagccatgagatgtacaactcattccctaggaaacagcccaggaatggccatcttctccagccccgtacgctctccccagtagcccagggcacccagcaaccatcccctaggagaacaggcaaggaccctcgtgggaagatcccaccacagcaacacctttcttcaaggcgggctctgctccgcaatgtgtgagtcaagacaatccattccattcaagaccaatttactctcaaattttgccaacacagaaatattatccttaaagaaatgtgcatttaaatcttttaattcacttcatcctgtattttaaaataaatgttttccatatagattttccccttgggggggaaaagaattcaggggtcttagggttccaggcagttcaaaaacagccacgcggttctttttttctccaccagaataccacaatagcagaacttaagaatcgggatatgaaaagggaggcgtggtcctggcagtggcccctggccggcaggagatacacagcaacacccaagcaaggggaaggggttgcccccattgccagcctgcccatccctgtaatgacagcagggcaggagatgcagctgtggccctgggggaaggttgggctcttgaggctgcaaacaccctgagtgccagtggtcccaaaggggggtgaggcctctatctgtacctttattccagccagcctcctggcacaggggctgggcccacatcctgggcctctgcatctggatcaggggcgggtgcttgtcagcctgggtcactctgggcagtgttcacactggaagtccatcacaggcgaagtcacctccttcccgtgttaaataacaagaatgccaacaccccacgcacgtgtcatctccagtgagcagacgtccaggcttcccgaagcttcctggctggaaaccgcgcagggccggcagcgccctctccaccaagggacacaccagcggcgcctcctccgcggcccgggcccccatcccncggctcgctcgnccaggacgccccaggtcggagcctgcccccaccccgcacccggaggccagcagcccagtcccctaggccgcgcagcgccagcgagagcgaggctgcacggcgaggcccggtgaggcgctcgagaactggccgggaggagaagtcaggcg

SEQ ID NO: 150712 - DNA, 385 bp, Homo sapiens
gaacgattgggctgagcagaggacgacatgttgcttttcgtggagatgacaaatccgagccccagaggttaaagtaactttacttagtaaaagtaaagtagtttaactgggatttagatccaggtcatgctgatgtcaaatcatggacggtatgttagcaattcaggcctggccgactccccagcaggtagcatctaatggaactggtttaaatcctaatgccaaagtatggcaagaaattgctcctggaaatactgatgccaccccagtaactcatggaactgaaagctcttggcatgaaatagcagctacatcaggtgctcatcctgagggtaatgcagagctctcagaagatatatgtaaagaatatgaagtaatgtattct

SEQ ID NO: 150713 - DNA, 1325 bp, Homo sapiens
  misc_feature (1)...(1325): n = a,t,c or g
tttcgtggaggggcaaggcgagtgtgtgtccttatcctatcaattggggcgcgggcctgtgagccagttggagttgcggcggcgggaacgattgggctgagcagaggacgacatgttgcttttcgtggagcaggtagcatctaaaggaactggtttaaatcctaatgccaaagtatggcaagaaattgctcctggaaatactgatgccaccccagtaacttcaattggaactgaaagcttcttggcatgaaatagctagctcatcaggtgctcatctctgagggtaatggcagagctctcataagatatatgtaaagaatatgaagtaatgtattcttcatcttgtgaaaccacaagaaatactacaggcattgaagaatcaactgatgggatgattttacgaccagaagatctgagttaccaaatatatgatgtttccggagaaagcaattcagcagtttctacagaagacctaaaagaatgtctgaagaaacaattagaattctgtttttcacgagaaaagttgtcaaaggatctttacttgatatctcaaagggatagtgatcagttcatcccaatttggacagctgccaacatggaagaaataaaaaagttgactacagaccctgatctaattcttgaagcgttaagatcttctcccatggtacaagttgatgagaagggtgagaaagtgagaccaactcataagcgttgtattgtaattcttagagagattcctgaaacaacaccaatagaggaagtgaaaggtttgttcaaaagtgaatactgccccaaagtgatcagctgtgagtttgcacacaatagcgactggtatatcactttccagtcagacacagatgcacaacaggcttttaaatacttaagaaaagaaagttaaacaatttaaggccaggccaatattggcagggataaaagccatcaatacatttttttgctaagaatggtcatcgaataatgggattttagaatctatagtccaccccatttaaactcaagcacagtatgcctccccagtctttatgcagcctgtatataatcctcaccaacagtactcggtctatagtattgtgcctcagtcttgggtctccaaatcctacaccttactttgaaacaccactgggtaagtgaggatccttacaataaaatataataatatttttaatttgaggctggaaatttggaggaaatcagttgggagtggggagctcatttatgttgacattgatggactttttgggcctttattttattttatttttngtatttttcgtggaggtggnattttgccaggttgcccggggtgg

SEQ ID NO: 150714 - DNA, 1403 bp, Homo sapiens
  misc_feature (1)...(1403): n = a,t,c or g
ggaaaaatttttctaaaaccaaccccaggaagcaaaacttccaacccccaagcatatgcgagttgttttaccccctttaccctttaaaattttttattttccctaaagcctttaaattctggagggaggttgtcccaatatttcccccccccaaaaaaaaggttccttcccaaaaattcccaagtaggttttaatacgcccccccataaggaaaaaaatttttccttgccagcccccgttaaatttggcccccccaaggattctttaaaacggcccccccnnnnnnnnnnnnnngaaaaaggagtttaaaaggtcctgctctatcgttctgtgtctggctctgcaaactgctggtatgtaaaagaccctctttccagacaggccacgaactccccgaaggccgggctggcctcttctctgcctctgtcccaacctccctgacacaccctccatccacgttaataaaacagggaacacaccagagggctcagtagagaaaaacacatcataatgactgatttataatttttatagctttaaaataataaatttatttttttccattaaagtattataacacgattacaaaaagcctatgaaaaacagaggagggaaaatatctgagctgctgccaccccacccaaacaatcctagtgaagcctgttgagctttctcttcatctcttccaggcatatagttgcaatgaaagtaaacaaaccagcagtttcaagagggatgagtgctggagctagatgcccaactcctgccttctaaggcagaaacacggacccaagagctgcttctctcctggcacagctgatggagcactttcccttgggacagccgtctgtgcctgcctcacctgtccttgcactcacagtgttccccacttccttccctcagcagcactgccatccccaggcaaggattgaagccagaggcttggcaaaaagagcaaccctctgatactccaagttcaaactgcttcctagctgatagtgagaggccacgtctattctgattttatcaagacaaagacccaaaatacctagaccttcacacaagacagtgcaggctctcttgttgttcattcaccaatgactagcatctggaagacagctgagtctgtggaccaagggcatttccctattattattttgattttatttgtttatttgctttttgagacagggtctcactctgtcactcacgctacaatgcagtggtgtgatcacagctcactgcaacctcaaactccctgggctcaggtgatcctcccaccttagcctgctgagtacctgggattataggcatgtgccaccacacctggctgatttttacaccttttgcagaaacagggtctcaccatgttccgaggctggtctcaaattcccctcttgccg

SEQ ID NO: 150715 - DNA, 506 bp, Homo sapiens
  misc_feature (1)...(506): n = a,t,c or g
aggatcaccctgcacgtcttctgggagctcaactatgacttcctgcccaactactgctacaacggctctaccaaccggtttgttcggacagtgttaccattttctcaggaatttcaaagagataagcagcctaatgcacagcctcagtatctgcatggatccaaggctttgaacttggcctactccagcatttacggcagctaccggaacttcgtgggacctccacactttcaagtcatctgccggcttctcggctaaccagggtatcgccgtggtcatggaggagctgctgaaggtcgtcaagagcctgctgcaaggcacaatcctgcagtacgtgaagacgctgatggaggtgatgcccaagatctgccgcctgccccggcacgagtacggctnctcctgggacttgaggctcagagacaggcccaccgagatggtgcaaggcctgcccctgcccccaggccgtcccatccatctgcaggtccagctgcagggccctcaggcag

SEQ ID NO: 150716 - DNA, 2268 bp, Homo sapiens
tttcgtcgtagcccgagccccgccgccgtgtcgctcggcctgggcgtggccgtcgtgtcgagcctggtgaacgggtccacgttcgtgctacagaagaagggcatcgtgcgtgccaagcggcgaggtacttcctatttaacagacattgtgtggtgggctggcacaatcgcaatggctgttggccagattggaaacttcctggcttacacggcggtccccacggtcctggtaacccccctgggcgcccttggagtaccgttcgggtccattttagcttcctatctcctgaaggaaaagctcaacatcttgggcaaggtggggtgcctgctaagctgtgcaggctccgtcgtgctgattatccactccccaaagtctgagagtgtgacaactcacgctgagctggaggaaaagcttgaccaatccagagttggggggctaccctgtgcatccttactggtcatgctggctgctgctcatcttctggatccgtgccggcccatgggcccaccaacatcatggtctacatcagcatctgctccttgctgggcagatacaccgtgccttccaccaagggcatcgggctggcggcccaagacatcttgcataacaacccgtccagtcagagagccctctgcctgtgcctggtactcctggccgtgctcggctgcagcatcatcgtccagttcaggtacacgcaacaaggcgctggagtgcttcgactcctcggtgttcggggccatctactacgtcgtgtttaccacgctggtcctgctggcctcagccatcctcttccgggagtggagcaacgtgggcctggtggacttcttggggatggcctgtggattcacgaccgtctccgtggggattgtccttatgcgggtgttcaaagagttcaatttcaaccttggggagatgaacaagtctagagacacctggcgacaaagctctcccctcattgtggcaccccgggaccactttcatcttgaaagaggagtccagtttcagaacatgaattcagtcatgggaagccacctggtgatggttgctctctctcccggggtggattttattccccagccagacgatcctgcagccttgctggttaccgagctctttgctaacagacttgtttcagggtatgcgccggccacaggcctgcaaggcacaatcctgcagtacgggaacacgctgatggaggtgatgcccaagatctgccgcctgccccggcacgagtgcggctctcctggtcccgcctggatcctgcgccccgcccccgtccccacactctacgcgccccgccctccgcgctcagccgactggggccttgtaaaggaaccggaacccggcgggagagagccccgggggcggggtgagcagaggctgcgggaccaggagaaggaggtgtgggggcgggagcagcaaatgcaggagcaggagcagcagatgcgggagcaggaggagcagatgcgggagcaggaggggcaggtgcgggagcaggaggggcaggtgcgggagcaggaggggcaggtgcgggagcaggaggggcaggtgcgggagcagggggggcgggtgcgggagcaggaggggcaggtgcgggagcaggaggggcaggtgcgggagcaggaggggcaggtgcgggagcaggaggggcaggtgcgggagcaggaggggcaggtgcgggagcaggaggggcaggtgcgggagcaggaggggcaggtgcgggagcaggaggggcaggtgcgggagcaggaggggcaggtgcgggagcaggaggggcaggtgcgggagcaggaggggcaggtgcgggagcaggaggggcaggtgcgggagcaggaggggcaggtgctggagcaggaggggcaggtgcgggagcaggaagggcaggtgcgggagcaggaggggcaggtgcgggagcaggaggggcatgtgcgggagcaggaggggcaggtgcgggagcaggaggggcaggtgcgggagcaggagggccagttgcgggagcaggaggggcagtttgttctcagactatattcacaaggtcacatggcggcttacacttgtggaggccttgttgaccgttctttttacatattgatgatcttgatgttcggcttgtctcctcggaagaagaatgggatgcaagaggtgctgcctaaccctgggcgctcctgggcgctcttcacttccgggggaaggtggctgatctgccgtacagtcgggggggaaaagcgaaaaaccgttgccgcctcttctcctttggctccagcctga

SEQ ID NO: 150717 - DNA, 390 bp, Homo sapiens
attacgctcggtccagactctatcataggaatatggagtggcaatcagcacaagcaagatccatatatagcatctatggaacaccatactgattgggtaaacgacattgtactctgttgtaatgggaaaacattaatatctgcttcttctgacacgacagtaaaagtatggaatgcacacaagggattttgcatgtcaacattaaggacacataagcttcttctttaagtggaaacaaagattccatttatagcctggccatgaatcaactgggaacaatcattgtatcagggtccactgaaaaggtgttacgggtatgggatccaagaacatgtgcaaaactaatgaagcttatagggcacacggataatgtgaaggcattgctattat

SEQ ID NO: 150718 - DNA, 1050 bp, Homo sapiens
tttcgtgtcaacatgcaagatggcggcccatcaccggcagaacacagcaaggcggaggaaagtgcaggtatggaagcccggttcctcggtcttccggacgcggccggcagctccgggcccactccagctagaaggtgcccggcgccacgaccagctggggtttcctatgttattcgagatgaagtggagaagtacaaccgaaatggagtcaatgctctgcagctggatccagcactaaatagacttttcacagcccggcgagactctatcataagaatatggagggtcaatcagcacaagcaagatccatatatagcatctatggaacaccatactgattgggtaaacgacattgtactctgttgtaatgggaaaacattaatatctgcttcttctgacacgacagtaaaagtatggaatgcacacaagggattttgcatgtcaacattaaggacacataaggattacgtaaaggccttagcatatgccaagggataaagaactagtagcatcagctgggttggacagacaaatattcctttgggatgtgaatactctaacagcattgactgcctcaaataacactgtcacaacttcttctttaagtggaaacaaagattccatttatagcctggccatgaatcaactgggaacaatcattgtatcagggtccactgaaaaggtgttaagggtatgggatccaagaacatgtgcaaaactaatgaagcttaaagggcacacggataatgtgaaggcattgctattaaacagagatggcacgcaatgcctgtcaggcagttctgatgggacaattcgcctttggtcccttggccagcagagatgtatagcaacataccgagtccatgatgaaggtgtttgggcgctgcaagtcaatgatgccttcacacatgtgtattctggtggaagggacaggaagatttattgtacagacctaagaaaccctgacattcgggtgctaatttgtgaagaaaaagcaccagttctcaagatggagcttgatagatcagctgatcctcctcctgcaattag

SEQ ID NO: 150719 - DNA, 384 bp, Homo sapiens
tttcccaactcctcaagactcatttggcctgagtgcaacagaataaaagaggaaagtttagtatcagcttcaccgggttcattttgcaaacctcacttagatttagcattaggtttagggctagagtagggcttatggtagagttaggattgaagctagggctgtttttaggattaggatttgatttaggggtagggttagggataggactagagttaagttagggttaagtgatggctacggctaggattcaggctaggtttagggttatgagcaggattagtcttagggttagggataagggtagggctaaaaccagggctaggattagagatatttgtaggcttaattttgtgtatatgtatatagatagatagatagata

SEQ ID NO: 150720 - DNA, 418 bp, Homo sapiens
tattcatttcaataaggcaagaaaagaattcaccaaacacaaaattaattcatgataaaccctcctaaccaagtgggaagatatagaaatatcattaatctgacaactaatatctaccaaaaacctctagcacctgtcatattactggtgaaatattcaagatatttcttactggaattggagttacacaaagatatccattatcaccacttccattcaaagtcttcttggcagccctagacagaaaataaagggaaggggctggggaggaagtcaatggaattgaaaacaaaagaataaaactgtcatttgtaagtgacatgattgtgtatgtagaaaattcaaaagaaaaaaatggccaactattagaattaatgagaggaatttgcaaaactgctacaaaattacagaaattaat

SEQ ID NO: 150721 - DNA, 377 bp, Homo sapiens
ctaattcatgataaaccctcctaaccaagtgggaagatatagaaatatcattaatctgacaactaatatctcccaaaaacctctagcgcctgtcatattactggtgaaatattcaagatatttcttactggaattggagttacccaaagatatccattatccccacttccattcaaagtcttcttggcagccctagacagaaaataaagggaaggggctggggaggaagtcaatggaattgaaaacaaaagaataaaactgtcatttgtaagtgacatgattgtgtatgtagaaaattcaaaagaaaaaaatggccccctattagaattaatgagaggattaagcaaaaatgctacaaaattacagaaattaatcgt

SEQ ID NO: 150722 - DNA, 489 bp, Homo sapiens
tttcaaagtacacaaatgtcaacttcattaaggatgtctggcatagctgagttcagtcatgtaacatacaaagtcagcttgatcaaaaggttgcaggctgcccactgctaaaatggaggagaaaaggaaaccatgggcttccctgaagtgtgaatgagtgcataggccactgccgacgtgtgtatttatactgaagacatgctgggctgacaagggagattaggaaacataaatccccaccactacactgctctatcttcacctttgaacctctggagcagcactttctctctttcctatttcttctgttgtgcccagtgaaggagttactatatagctttatagcaactgcaagccatggctatttttgaatatttaaaaaaaacatttttgcggccaggcactgtgcctcactcttgtaatcccagcactttaaggaggtcgaggcgggtggatcacctgaggtcaggagctcgaggccagccctgc

SEQ ID NO: 150723 - DNA, 172 bp, Homo sapiens
  misc_feature (1)...(172): n = a,t,c or g
ccaacctcaatccccgcaaactaaagcaaagctaattgcaaatagtattaggctcactggaaaatntggctggnaagantgtttcancctctgggggtagaacagaaccaagtgctggaccccaggtagcctcttggagatgaccgttgcnttgaggacaaatggggacttt

SEQ ID NO: 150724 - DNA, 2495 bp, Homo sapiens
ctagaatgacaattttctattaaaaggggggacaagagtggctgttatagacccaaagcgattttaataaccagacacggaacaatttgtgcttacaatgagagattttgatcacagatgctctcctcccgggtcgttttccccaaacgagtcttgtttacacaagcagatcttaaacaggaggtgccatttaattttgtcgtttaaaccttgctccacggggggcagctggctgctacagtctcttggcaaagatgtctcttgatacttttcaggtgtagtcattaagaaaaagaacagctctctcccttctcctctcactcccgcctccgcccccattatgaaggcgttcagcccactctcaaccttaaaagccaaaataaaacaaaacccctaagtgcgaataacatatccagatttaaaaggggggaaaaaggtcctcattaaatgaggcttcccaatggctcaaagatggctctgttcttatgctggggaagcacgactttcccatggcagccatttgtgctgtgctcaccttatatgcttggacaataaagaacttagaaaaacgaacgtttaaattgctccaaccgtgtgaatggtaccagaaagctccaaaggactccagagagcgggggtgagtaaccatttcctggcacgagaatgtgtaatgctgtcgttttttcaccggacaggaccgaggtgtttgaagatttctttcttttcagaataccgggtccgcatgcaaccgcccccacccccaccccaggtccctagcttcattccctcccacccctcccccaggactcttacgttttctgtccacgcaatgactggaacgggattctctaaaaagcaagcacatgctctgggcagaggcggggtgcttccggggaggtcaggtgggggtggcattctggggccatgcgttttcttccccatgcgtggtaacacaaggaaatgtactaactgttaaggaaaactcgaaggcgggtcacacagggaaggccagattggccttactttccccagtgctttgcaaggatggggtggggaggggagacagcagagactagggccttgagaaatatcaaaaggtttattgaaacatactcagctcagacgtactggcttatgaagcggtcagtcctcccccggcccccaaacactaacctttttcatttttctttaaaggttaaaggcttatgggtagttttatagaaaaagcaatgtagtgattagagtatctgcagaaggacccaccctcatttatacattccatggccgtcaggttaaaaactctggctttgaatcgatgttcagaggttatggctgggccaaacagtgcagaggaacatggggggctttgaatgggccgagatgttcggaaatgcttaaataaccaaaaggaattgacttggcttcagggaccagatggaaaacccattgacaggaaaccaatggggcttgggaaaaagggcctgttttcatggaacctgccagaaaaacccaaaaacaaaaatatcccccacaccctccaaaagcaacaaagaaaccctcatgtgatccattcccatcccaggaattttcacccatagcaacggaaaggacccgaggtgtcactgcttgtgaggcagcgagaggtcatctctgcatcctagtgggaacccctgaagccctgctaggtgacatcatcgcgggaaaaaccttgcccgtggtggcctgccttcccaaccctgcccttcccggagggggcttttcaagcttgagacccccattggagcttttgaaaatgaataagggaattaaatttgggaagaggatttgggagatacacccttaagtgtaggaacagggcgagatgatcaagggaagaagggactgctgccccaagccagaatatttctatggctctacaagggaagcggcggggcctgtgttctcaccatagacactagagcaagagccccatagaaggaacagtggttgatcactttccaaatgtgatggtcacttcatcgacccagagggcctcttctttggcacatgcccagggtccctccacctcttactggcttataaagctcaccccacgattcagttgggcctcaaccttggaaatccccacccacaacctcctttaactctcctgacccccctgaaaatgtgcaaaaccacccaggcaaaccggtggcaaagtccccatttgtccctcaacgcaacggtcatctcccaagaggctacctggggttccagcacttgctggggagaggtgataagaagtgggagccccccacctccaaccaacaccagtctggcccaccagctgtgaatttggttctgttctacccccagaggatgaaacagtcttcccagccacattttccagtgagcctaatactatttgcaattagctttgctttagtttgcggggattgaggttggtctggtattacgtgtctgtgtgtgtggcaggggaggggcgggcagtcggt

SEQ ID NO: 150725 - DNA, 512 bp, Homo sapiens
aaatcttgtcttagggcttgtgaggaatcagaactaacccaggactcagtcctgcttcttttgcctcgagtgattttcctctgtttttcactaaataagcaaatgaaaactctctccattaccttctgctttctctttgtccacttacgcagtaggtgactggcatgtgccacagagcaggccctgcctcactgtctgctggtcagtttattcacatatttttggtaactcccatggcagctcctaggatttcagcggtctgtgggccagaaagcaggcaccagggctgacctcaaggccgtatcagagggccaagcagagttcttttggatacctgcttttcatcccacagggccttagagtcagaggtaaggtagcaacagagctagaatggggcaatgcactcttaccctccttctcaacttttatttaagctgtgctaaatgttttcttcaagggaaccagatttagttctttacagaattttccagtgaaataaaacatgttgtaat

SEQ ID NO: 150726 - DNA, 1095 bp, Homo sapiens
  misc_feature (1)...(1095): n = a,t,c or g
cattcctcccttggacaaataatatttattaagagctctctttttgacaagctttgtgttaggtctagtttttttccgtaggtcagataatttaataaatctttcaaataaatatataattaaaaactgaaaataaaaatgtccaaggaatggggaactaatggtattaagttttatatagaagggcatgagggaagtgtattaaaatttgttcaaatttatgactgagagggctaagaaggtacttaatttcctcagatgatactttgcggaacatgtgggtctatttgggttgacctttgcaaatagttgaacaaccacaccgtgtattccccataccccctaggactgcctgtccagggncaagccttaggtaccaacgaagtcccacaggtgaaggtccactcccaggttaatctgccatagggtaggccccggcacctttccctcttttccctttagggtgccctcccctctaccccacaacctccttatttcattctcaaacacagctattacaaacatgttttaatttcactggaaaaatctgttaaagaacttaaatcttggttcccctttgaagaaaaacattttagcacaagctttaaataaaagtttgagaaggagggtaaagagtgcaattgcccccattctaagctctgtatagacataccttacctctgactctaaaggccctgtgggatgaaaaagcaggtatcccaaaagaactctgcttggccctctgaatacggccttgaggtcagcccctggtgcctgctttctggcccacagaccgctgaaatccctaggagctgcccatgggagttaccaaaaatatgtgaataaactgaatgcagaggctgaggcaggtggatcaactgaggttcaggagtctaagaccagcctgggncaacatggtaaacccccatctctactataattacaaaatttagctgagcgtggtggcgggcacctgtaatcccagctactcaggagactgaggcaggagaatcatttgaacccgggaggcagatgttgccagtgagctgagatcacgtcattgcactccagcctgggcgacaagagcaaaactca

SEQ ID NO: 150727 - DNA, 515 bp, Homo sapiens
  misc_feature (1)...(515): n = a,t,c or g
ggggaatgccggnnnctcggnnnnnncctaggggnnnccagtttagcccgnagnnncnncnggnnnnggaattnnngggtcgacgtatttcgtgctatgcccagcccgccttcctccggtgcgtccaccgatggcccaagaaagaagccgcagacgcctcgtcatcncccaagaaatgcggcggaggagcatgaagctcaagcgtggagccggctcatgtaagaaacccggttcaagtggctggggnccggcagtaggagagttccacagtgtacagaacatctgcgcgcggagagaatatcagcgacaggactacatggatgccatggctgagaagcaaaaattggatgcagagtttcagaaaagactggaaaagaataaaattgctgcagaggagcagaccgcaaagcgccggaagaagcgccagaagttaaaagagaagaaattactggcaaagaagatgaaacttgaacagaagaaacaagaaggacccggtcagcccaaggagcaggggg

SEQ ID NO: 150728 - DNA, 478 bp, Homo sapiens
atctggaaggctgccatggctagcccagccgcctcctcggtgcgaccaccgaggcccaagaaagagccgcagacgctcgtcatccccaagaatgcggcgtgaggagcagaagctcaagctggagcggctcatgaagaacccggacaaagcagtgcctattccagagaaaatgagtgaatgggcacctcgacctcccccagaatttgtccgagatgtcatgggttcaagtgctggggccggcagtggagagttccacgtgtacagacatctgcgccggagagaatatcagcgacaggactacatggatgccatggctgagaagcaaaaattggatgcagagtttcagaaaagactggaaaagaataaaattgctgcagaggagcagaccgcaaagcgccggaagaagccccccaaagttaatagaagaagaatttactggctaagaagatgaaacttgaacagaagaaacaagaaggac

SEQ ID NO: 150729 - DNA, 409 bp, Homo sapiens
aaaatgaaatatgactgcatacccactataattgcaaacattaaaaaacaagaaaatgccaattatcgtaagtatgtagtgaaacaggatttattttatactgcaggaatgatgtaaatgggatgcccctattctagaaaccgtttggttttttgtacgtagttgaacgtatggacatgaactgtactccagccattccatttctatttatatacccattagaaatgtatggccatgcatactaaatgacatgtacaagaatttttatggcagcattatttataatagccaccaaaccagaaatcacctaagtgttccatcaatagtattcatgcaacaaaatactatatagcaatgaaattgatccaactatacccatatgtagcaacatggataaataaggtttttt

SEQ ID NO: 150730 - DNA, 836 bp, Homo sapiens
gtcttcttctaacctgaaagtttggactctggctgtaagcaattactggcctcagctttatctttttctttttctttttttttttttttgagacagagtcttgtctctgttgcccaggctggagtgcagtggctcaatcttggctcactgcaacgtctgcctcccaggttcaagcgattctccgtgcctcagcctccccagtagctgggactacaggcacacaccaccatgcccgggtaacttgtatttttagtagagatggggtttcgccattttagtcaggctaagtctcgaactcttcaggtgatccacctgcttcggcctcccagaagtgctggaattacaggcgtgacaacttgtgcctggctggcctcagctttaaataaagtgataaacctgctgaagtcagagataccatcctttttcctggttcaactctctgggttttctaggactctgctactacaagggtttttaaatttcaattaccatacattagtctattctaataatcttccaataatgcaaacttttactcaggattttggcagaatatcaggaaaaccatttcctggtataatgattctctgtaatagagaaatcctatacatcatgtagggtgaagggtagtttttatgtaatagttcactttgagctgtctagcagctgtctagaagctttcatagacacagacaggtagagagaaagacagggtagatgtcttaaccattatccttgttctagggttttcagtcaactctatctcaaaggactgcttctagaggccagcaagagaatagacatttgttttctgtcttgtagaacagaaacaggat

SEQ ID NO: 150731 - DNA, 619 bp, Homo sapiens
  misc_feature (1)...(619): n = a,t,c or g
aatttccggganaaccaaggcttggggaatgacaaagttttgcttgttttcctcatactggggcttggggggtaacaaaagactgatgccagtagaggtgcaacagcccagccccttctgctttctgggtgggagccccccaggggtgcccccttcgtactccaaggcccccttgccccccaacaagcgaatcaaggccaaaggcgatggatctttgaaagccacacttgcgtggctttncttccaatccaagcctgagttccctttcttgatcttggtaagtttctctgagaacacttcacccgcaagaaactacttgccccagaatccccctctcagatttcgcttctagggaactcaaactaggagacccggtgtcgggggcacccaccccgtgatcgagagccgcctccttcctagcctggcattcagtcttctcctggcgtccctcaagccgcccttccaacaaggcctatccccggcttcccatcaggcctcagccacctgggctgtccttccgttgccacccctccaaggcccagcccgagagcctccttgtccaccacatattggcaggcacgtacagcccaccaagacctctgctgtcagtattctctct

SEQ ID NO: 150732 - DNA, 519 bp, Homo sapiens
gtttcctctttttctttttcttcttctccttcttgcttttcctgtggctctcacaactacaaggaggatacaaggtgtgcctcagaccctagtcttgcaagccaagagagtgaacacaagcaggccccatccagatgaagccaccacccacaagtgcgtcttttaatcagttaaatccaactacaaattccactcctcagttacgtagtcacgtggccagtggctacgtgggttagaaacagatgcaatatccccatctccacagcacgcccctgccccaccccagccgtgcccttggcaggttgacaccttcctacctgcacccaccaggccacttttagggtcaggcccaggctcaccatccaggagaagccctggaggtgccacccccggcaggaaaaggccccgccccaggtcctgagtgccctcccacggcacagcgcccgaccactgccagtacttaggacctctcttcaagggtgacccgagaaactcccctagagaaaaacctaggagtaa

SEQ ID NO: 150733 - DNA, 963 bp, Homo sapiens
tttaatttttaatgcaccagatttatttaccatttcaaaagaatcacggataataggccagatacccttaaaaaattcctctgggggcaaaccaaatccagtatatattaggatgtaacagggactgcaagccaagacaggcatgagttcctaggttataaatatcatctttataaaaagtgggtattttataggacatcccaagtaacaccgacttataaaagcaaaacactgtacttaaaatgttggcccacatatgaaagaatagctgaaggctttaggggattgaagaatggataaacttaacccaacttaaaacacattactcatccctcagaaccaaaatacaggaaaaaagaagaaatacaacaggttcgcacaacatccagaaaagttccgggactatgaaagtgtttcttggcacccagttctcgctgttttaaaatccgtcccttcgttgttggctaggcctctctccagggaaactagccggggcaagaggcaggggaactgtacatgtgggaggtcctgagggcccttgcacccactcgacctccaccaagcggatggccaagcgccacccggaagtgtccactggtgggggcgggaaggcaccgtagtccaaggtatccgcgggcagggagcgggccagggcgtgcgcgaggtcgggggtagctgggaacggaggaggaggggcccgctcgaggctccgcctctcaccggctgcggcctcggctacagccagggcccagagggctccgagtcccgggagcggaggccggagtcgggttcctgtagaggctgctcctccttgtccccgctcggacgtggtccccgctgctcgaggtgcagctgcagcagggcccggcggtacatggcttccagcttctcaagtcgggccctcagggccctggggctgaacggctcgtcctctcggccgctgtctctagccctccggttcgt

SEQ ID NO: 150734 - DNA, 935 bp, Homo sapiens
ttctcttgaatttcctggctttgttgatttcgaaccacaaggttaacattaaaacacaaagactcacatttaaatatttcttttgaaatcagaagaacaatagctctttgaaatgacgctggaacgcgcacaatagattctactgggtcaatgtattatgttatatactcatctgaactttcaaaagaagttaaatgggagatattctcaacaggcaaaaataagatattccaatctattgttcaagtttatggctccgatataaataatgggctataaacccgtatctggaaaacagttgcgcagtgcgtgcttaatggccagccaatgaaaaccaacgtctcattctactccgtctttcagcacgtcaagggacatcccactccgccttttttttttttttctttttaaagaggccaaccgctggggaccacctggttttggcacctttatgaggcctcccagcagcacgggagcttctaaggggcacgctctgcagttgagcttatttgcagagctccatgatcgctcaaagccgagcaacgcgcacgggtttggctacttggcaccagcacaaggctttagacaggcacttcccacggctgagttctaggcatcccctttttgaaacgtgttcttctccaccctgcaagcggtggggtgagaaatctcactttcgaagggcttgcaaggaaggaagagagtcggcgccttgcggaattccccggccgcgcttcaaggttcacacgccgcgtgggaagcttcggatgcagcccggttccgaggcggttcggcggttcgagactggggcctcgaagccgaagaaagcgaagaacaaagcagccgcgttagcccgccgccccgagggacagcccgggcgcgcccgccgctccgcccacaccccgcccctcggccgcgcgaaatggcggcggccg

SEQ ID NO: 150735 - DNA, 387 bp, Homo sapiens
  misc_feature (1)...(387): n = a,t,c or g
annnnnnnnnnnnnnnnnnnnnnnnnnnnnnnnnnnnnnnnnnnnnnnnnnnnnnnnnnnnnnnnnnnnnnnnnnnnnnnnnnnnnnnnnnnnnnnnnnnnnnnnnnnnnnnnnnnnnnnnnngggggccccccctgnnnnnnnnnnnnnnnnnnnnnnnngatcagacaaaaaaaagctatatttgtcattgtcgctttcaaaagacgaggtttgaggaaaactgattttattactatgctagggggggttaatttgttaaaaataaatacaggggctttattattgaactgggcacaacatgcggaaaatacttcttattttgcacactggctatcattgatccaagcgactctaacatcattataagcatgccagaacagactg

SEQ ID NO: 150736 - DNA, 457 bp, Homo sapiens
ccaatatttgtgaaaggaaaagctaattggcaatatcacatatgggattaagagttctcttgttgctaggtttgtccctgacatgtctcaaaaacccctccctcaaagacccacggccttggggccttgactctgggctgcccgcgctgcagttcttacctctcttctgcccactgggtcaccttctgctgcgctgtctggctgctgtaggccaggcggtcagggccgctactctgtggctgcctgtcgggggagagctgctggcggagttgctccagttcccgctcatacatgagccgctgctcctctagggcacttctcttttcttctaggtattgtttctccagcacctgagccacattttgaactgggtcattactattcagggttgtcatgataacatccatctgtgcatatatctgtgatatggtctggaggttcggggacttccaccaca

SEQ ID NO: 150737 - DNA, 1347 bp, Homo sapiens
cttgagctagatacagagtgcccattggtgtatttacaatcgcctgagctagacataaaggttctccaaggccccaccagactcaggagcccagctggcttcacccagtggatctcgcacgggggctgcaggtggagctgcctggcagtcccgcgccctgcgcctgcactcctcagcccttgggtggtcgatgggactgggtgccgtggagcaaggggtggcgctcgtggaggaggctcgggggcacaggagcccacggaggggttgggaggctcaggcatggcgggctgcaggtcccgagccctgccccacgggaaggcagctaaggcccagcgagaaatccagcgcagtgccggtgggctggcactgctgggggacccagtacactctccgcagctgctggcccgggtgctaagcccctcatgcccggggcggcagggctggccaggccggctggctgctctgagtgcagggcccgccaagcccacgaccacctggaactctagctggcccgcaagcacggcacacagccctggttcctgctcgggcctctccctccacacctccctgcaagctgaggggtgggctccggccttgaccagcccagaaaggggctcccacagtgcagcatgggctgaagggctcctcaagtgccactaaagtgggagcccaggcagagaggcgccaagagccagtgagcactgtgaggactgccagcacgctgtcactctcaatcccccctctttcactctccccctcagttccgatccagatgttggggctgagtgacggtaaaagctccctttccacgcaagccttccttctctccatctcctgggattcattaaagtgacccattaggatggtaacaggatcactccttgatttgacttttgccaacctgcttatcgtaagaatcacttggtgagttggcttaatattcaacccagctcccaaaaggaatttgttatccatcactcccctacattcttcagacagctctggtttttcaagtagaactttcttcagtctatccaagttgggctgatattgccaaatgaagaagagtaagccaaaaaccatcttgagcttcaggtcctcaggtgtcaatgttaacttggactttgtgtcctgaatcctcaaaatattccagtattctcttttccctgttgttccaaggtaggattgcagacgtgggttaattagtacaaatatcctaggtttttcttgtgtggtcctgtatttctgccttagggttttgtgtttttgtcggtaaactttttcctggtaactgtagatcctgtaaatattcttaatgtcagctcctctgacacttctctctctcat

SEQ ID NO: 150738 - DNA, 633 bp, Homo sapiens
atgaagccatggaccttcacagtgagtgttacagttcttaaagatggtgtgtccggagtttgttacttcagatgttcagatgtgtctggagtttcttacttctggtgggttcgtggtcttgctgacttcaggagcgaagccatggacttggtggcgagtgttacagctcttaatggtggtgtggacccaaagaggacaggctttggagacaaatttaaaccagtgataggcacttgggattgtgatacctgtttagtgcaaaataaacctgaagcaataaaatgtgtagcctgtgaaacaccgaaacctggaacttgtgtgaagcgagcccttacattgacagtggtttcggaaagtgctgagactatgactgcttcatcttccagctgcactgtaaccactggtaccttaggatttggagataaattcaaaaggcccattggatcttgggagtgttcagtatgctgtgtttctaataatgcagaagacaataagtgtgtgtcctgtatgtctgagaaaccagatgattttttcgggggagttgagcacctggcccaaggatggccatgttctatgacttggtctgatacaaaaggcttcccccaaacacaaggtgattcgttgagatggtga

SEQ ID NO: 150739 - DNA, 801 bp, Homo sapiens; identical to SEQ ID NO: 120330

SEQ ID NO: 150740 - DNA, 922 bp, Homo sapiens
atgcctgatctcccttgggttaatgtagaggaagggattcaaagacttagggagattgtgatggtggagtggattagtcactttaggcctactcatcccagcttggagaatctagaagatatagccttgaccaatgtcttgcaaaatagatttgtgagggcagaacctgcatctttgaagagccctgtaattgctcttctctgtatgtcagatctaacggtgggaaccacagtcactcaactacaacatttaaatacaatgggagtaattggatcccaagatggcagggaccaagtggcagcactcaaccatcaaaagcaaggagacctgtggccttttcccagggtaactgtgctatggagaaagggaattgatcagacattttggggactactgaacactggctctgagctgacattgattccaggggacccaaaatgtcgttgcagtcctccagttaaagtagaggctcatggatgtcaggtaattaatggagttttagctcagatccaacttacagtgggtctggtgggtccgcgcccagtcccatccaccacccaaggtgctgaggagtgcgggcgcacggcaccgggactggcaggcagctccacctgcagccccggtgtgggatccactaggtgaagccagctgggctcctgagtctggtggggacgtggagagtctttatatctggctcagggattgtaaatacaccaatcagcaccctgtgtttagctcaaggtttgtgagtgcaccaatggacactctgtatctagctgctctggtggggacgtggaggacctttatgtctagctcagggattgtaaatacaccaatcggcactctgtatctagctcaagttttatacttccctgacacatcctgtgataagcctcgtagtagagactctagtctggtggtg

SEQ ID NO: 150741 - DNA, 634 bp, Homo sapiens
  misc_feature (1)...(634): n = a,t,c or g
cattacaggagctctctctgttgttctgacattgtgttatgggttactttgggcatgcctgtgttttaagacttgttcacatgattatagaaggtctaatcataaaccccagaggaaattggcattgtggtcatggttattaacaagtgaggtcaggcttgccctgtgaatttgctgcaccaggcatgtggagctaacatctgcagagtggccaccgcctttttggcatcggttctgctgaaaagtcacatggcctcttggatttgacaatgttatgggctctgctcggattgtctggggatagaaacaaaatactcatagatcctcctgctttcccacggggacttaacggaacccttcgttttatggggctnggtatgcttttccctaaacaaataacgcctcaatctatttgagtggaaactaatgcgaaaaacgtttagggtggagatattgcgtcttttatgggatccacccatgcactgtttgaattccctgattcccaccactcagcgtaaacagctccttttttcatgaactgaaggttccaaaaagcagttggcaagtcgtcttttcctatgctgagaaaagggactgttgtgtttaaaaaatagaagtgaacaaagcaaaaaca

SEQ ID NO: 150742 - DNA, 975 bp, Homo sapiens
ttacttgttaatgttgctgccttctttcagtcgctctcctgcagctcctgttttagatactctttcgctacccgccaggtctaccaagctgaccttactgactttctccccggaattcccagactgcaggtcataaagtgtctgtgtgattatgatgttgaacacagcatgggagcggctgctttcttcgttcatgttggtagcagctaccgttcgagacttatttccctcagacatcaatgactcaatatcctcaaaactagtgacagctagttgagataaaccatctacatatggtcccaaaactttatgttctcgaactttaagagactgtctactccctttggggtctaaaagatcccgaactttctcattataaatttccatataggacacttcaactttaaaggtctgtgactcattttgctccaaagagatccttttaaataaagcacagcagagccttggaataaggcccagctgctcagcatggcccatcatggaaaaggattttcccgaacctgtctgtccatatgcaaaaatacacgcattatacccctgaaaggctttttcaagaattccttccccaaggcacttgaaaaccacttcttgaccagcccataaacgaaggttcgttaagtcccgtgggaagcaggaggatctatgagtatttgtttctatcccagacaatccgagcagagccataacattgtcaaatccaagaggcctgtgacttttcagcagaaccgatgccaaaaaggcggtggccactctgcagatgttagctccacatgccaatgctttcagtgctctcatagggagcagggcttcgctaaacctcagttttcttatctgtaaaatgggggcagtaatagtttctacctgactgggtgctttgacaatcttatcaccagcgtattttgtagtgttagattcatccatggaccaaaagcaataatcaaaggcaaataccat

SEQ ID NO: 150743 - DNA, 791 bp, Homo sapiens
tggccaaaggctctgagatgagggaaggagaagctgtcacattctaaggcctgggctccaaaatcccagaacagcaattcctctgcttcatcttggtccaaccagtcacaggcccagcctagattcaaaggggaagacataagtcccatctcttgatgggcagagaggccttgagctagatacagagtgccgattggtgtatttacaatccttgagctagacataaaggttctccacggcctcaccagagcagctagatacagagtgtcgattggtgcactcacaaaccttgagctaaacacagggtcctgattggtgtgtttacaaaccttgggcggggctgcaggtggagctgcctgccagtcccgcgccgggcgctcgcattcctcagcccttgggtggttgatgggactgggtgctgtggagcagggggtggtgcttgtcggggaggctcgggccgcacaggagcccatggagtgggtgggaggctcaggcatggcgggctgcaggtcccgagccctgccccgtgggaaggcagctaaggcctgaagtttgcatcttcggtagatagcttgccattgcaggggcttaaaatggacttggtctattttgctattattacttgtgattggattacgaaattgttgtagtgtgttctccagctctatcaggtcagttatgttcttttctataatggctattttgcctgtcaactcttgcattgttgtattatgaatcttagctttggcttcctgagatggagtttcatcattctcctgaatgatcttcat

SEQ ID NO: 150744 - DNA, 635 bp, Homo sapiens
tgcgaccgccacccccttccccgctgccagcactcaccctctctccgctcctgctcgcaacctcgcggttcctggggtgcttgtgcccactgtgtggacagcgcgggcggacttttgggccggggcgtggcgtgcgggggaggctctctaaggcctccgcctctgcctctcccgcccccttacccgccccggagacgacagcgtcggaggctccgccatggcctcgggagccggaggagtcggagggggcgggggggggcaagatccggaacgcggcgttgccaccaggggccaattaagccttaccagcaggggcgacaacagcatcaggtatgggaccccgacgccgcggtggcctggcgggtggggaaactcggctggaggggacgggcggttcgaggccccggcgccccacgtggagcagacaggagggcctgaggaaaggcccgagtgaggctccgggggagctcaggccgttgggggtggcgacgggaagtgggctgagacaggcccagccttgcggcgcacacgtgtggtttgggccgcctttcccccaactctctgggtcaggggctttcccaggcaggctctggacgggaaaagaaattgtaggcccatgatgcgcgccggcattc

SEQ ID NO: 150745 - DNA, 609 bp, Homo sapiens
gcggccgcgctcgaggggcgcgcggctgcagcggcggcggcgccgcgcgtgaggggccgcctaaggccgagcggtgcgcggcgagcggccgggcgagcgcagccaacatgtcggataccaaggtaaaagttgccgtccgggtccggcccatgaaccgacgagaactggaactgaacaccaagtgcgtggtggagatggaagggaatcaaacggtcctgcaccctcctccttctaacaccaaacagggagaaaggaaacctcccaaggtatttgcctttgattattgcttttggtccatggatgaatctaacactacaaaatacgctggtcaagaagtggttttcaagtgccttggggaaggaattcttgaaaaagcctttcaggggtataatgcgtgtatttttgcatatggacagacaggttcgggaaaatccttttccatgatgggccatgctgagcagctgggccttattccaaggctctgctgtgctttatttaaaaggatctctttggagcaaaatgagtcacagacctttaaagttgaagtgtcctatatggaaatttataatgagaaagttcgggatcttttagaccccacagggagtagac

SEQ ID NO: 150746 - DNA, 1308 bp, Homo sapiens
atgggctcctgtgccgcccgagcctccctgacaagcaccaccccctgctccacggcgcccagtcccatcaaccacccaaaggctgaggaatgcgaacgcaccacggcgcaggactggcaggcagctccacctgcagccccagtgcgagatccactaggtgaacccagctgggctcctgagtctggtggggacgtggagagtctttatatctacctcagggattgtaaatacaccaatcagcaccctgtgtttagctcaaggtttgtgaatccaccaatcgacactctgtatctagctgctctggtggggccttggaaaacctttatgtctagctcagggattgtaaatacaccaatcggcactctgtatctagctcaagtaacggtcccaccgcccctgcatactcggtttttcgccctttccccgcgccagccccgttcctttaaaaatggactcttgttccaaactggaaccaccctcaaccccctctcgggctattcttctgattataaggggtttggccgatttcggaaccaccctcaaacaggattttcgcctgctggggcaaaccagcgtggaccgcttgttgcaactctctcagggccaggcggtgaagggcaatcagctgttgcccgtctcactggtgaaaagaaaaaccaccctggcgcccaatacgcaaaccgcctctccccgcgcgttggccgattcattaatgcagctggcacgacaggtttccccgactggaaagcgggcagtgagcgcgactgcaattaatctcaaggtttgtaaacacaccagtcagcaccctgtgtttagctcaaggtttgtgagtgcaccaatcgacactctgtatctagctgctctggtgaggacgtggagagtctttatgtctagctcagggattgtaaatacaccaatcggcactctgtatctagctcaaggtttgtaaacacaccaatcagcaccctgtgtttagctcaaggtttgtgagtgcaccaatcaacactctgtatctagctgctctggtggggccttggagaacctgtgtgtcgaaactctgtatctaactaatctgatggggactgtggagaacttttgtatctagctcagggattgtaaacgcaccaatcacggccctgtcaaaacaggccactcggctctaccaataagcaggatgtgggtggggccagataagagaataaaagcaggctgcccgagccagcattggcaactcgctcgggtccccttccacgctgtgggagctttgttctttgcaataaatcttgctactgctcaaaaaaaaaaaaa

SEQ ID NO: 150747 - DNA, 4428 bp, Homo sapiens
atggcctcaggagccggaggagtcggagggggcggtggcggcaagatccggacgcggcgttgccaccaggggccaattaagccttaccagcaggggcgacaacagcatcagggcattcttagcagggttacagaatctgttaagaatattgtgccagggtggttacaaagatacttcaacaagaatgaagatgtatgcagctgttcaacagacacaagcgaggttccacgctggccagaaaataaagaggaccatctggtatatgccgatgaggagagctctaatattactgatgggagaatcacacctgagccagcagtcagtaatacagaagaaccttcaacaactagtactgcttcaaattatccagatgtgttaacaaggccttctcttcatcggagccatctgaatttttccatgttggaatcccctgcattacactgtcagccatctacatcctcggcattcccaattggcagttcgggattttcccttgtaaaggaaattaaagattctacctctcagcatgatgatgataacatctcaactaccagtggtttttcttcaagagcttctgataaagatataactgtttcaaagaacacttcattgccacctctgtggtccccagaagctgaacgttctcactcactctcacagcacactgccaccagctcaaaaaaaccagcattcaacttgtctgcctttggaacactttccccttcacttgggaattcttcaatccttaaaaccagtcagcttggagattctcctttttatcctggaaaaacaacatacggtggggcagcagctgctgtaagacagtctaaactacgaaatacaccttatcaggcaccagttagaagacaaatgaaagctaagcaactcagtgcacaatcttacggtgtgaccagttcaacagctcggcgaatattgcagtctttagagaagatgtcaagccctttagcggatgcaaaaagaattccatccattgtttcttctcctctgaattctcctcttgataggagtgggatagatatcacagattttcaggccaaaagagaaaaggtggattctcaatatcctcctgttcagagacttatgaccccaaagccagtttccatagcaacaaatcgaagtgtttattttaaaccatctctgactccttctggtgaattcaggaagactaatcaaagaatagataacaagtgcagtactggatatgaaaaaaatatgacacccggacaaaatagagaacaacgagaaagtggcttttcatatccaaatttcagtttgcctgcagccaatggtttatcttctggagtaggtggtggaggtggcaagatgagacgagaaagacacgcctttgttgcttctaaacctctggaggaggaggaaatggaagttccagtattaccgaaaatctctctaccgatcaccagttcttcactgcctacctttaattttagttcccctgagatcacaacttcctctccatcacccatcaattcgtctcaagcattaacaaacaaggtacaaatgacctctccgagcagcactggcagtcccatgtttaaattttcatctccaatcgtaaaatctactgaggcaaatgtactacctccatcatctattggatttacatttagtgtgcctgttgcaaaaacagcagaactttctggttctagtagtactttagaaccaattataagtagttcagctcatcatgtcactacagtgaacagtacaaattgtaagaagacaccacctgaagattgtgagggtccttttagacctgcagaaatcctgaaagaaggaagtgttctagatattctgaaaagccctggtttcgcatcgccgaagatagattctgttgctgctcagcccaccgcaacaagcccagtagtttatacaagaccagcaataagtagcttttcttctagtggaattgggtttggggagagtttaaaagctgggtcatcatggcagtgtgatacatgtctactccagaacaaagttacagacaacaaatgcatagcctgtcaagcagcaaaattgtcacccagagatactgctaaacagactggaattgaaacaccaaataaaagtggcaaaacaactctttctgcatcagggacaggctttggagacaaatttaaaccagtgataggcacttgggattgtgatacctgtttagtgcaaaataaacctgaagcaataaaatgtgtagcctgtgaaacaccgaaacctggaacttgtgtgaagcgagcccttacattgacagtggtttcggaaagtgctgagactatgactgcttcatcttccagctgcactgtaaccactggtaccttaggatttggagataaattcaaaaggcccattggatcttgggagtgttcagtatgctgtgtttctaataatgcagaagacaataagtgtgtgtcctgtatgtctgagaaaccaggaagttcagtacctgcttcaagtagcagcactgtacctgtctctctgccttctggaggctctctaggattggaaaagttcaagaaacccgagggaagctgggactgtgaattgtgcctagtgcagaataaggcagactctaccaaatgtttggcatgtgaaagtgcaaagccaggcacaaaatctgggtttaaaggctttgacacatcttcctcatcttcgaactcagcagcctcctcatccttcaaatttggtgtctcatcatcctcttctgggccttctcagactttaacaagcactggaaattttaaatttggagatcagggaggattcaaaataggtgtgtcatctgattctgggtctataaaccccatgagtgaaggctttaaattttctaaaccaataggagattttaaatttggagtttcatctgaatctaagcccgaagaagttaaaaaagatagtaagaatgataattttaagtttggactttcttctggtttaagcaacccagtttctttaactccatttcaatttggggtatctaatcttggacaggaagaaaagaaagaggaactgcccaaatcttcctctgcaggttttagctttggtacaggtgttattaactccacccctgctcctgctaacaccatagtgacctctgagaacaagagcagcttcaaccttggaaccatagaaaccaagagtgcttcagtggctcctttcacatgtaagacatcagaagctaaaaaagaagaaatgcctgccaccaaaggaggattctcttttggcaacgtggagcctgcctctctgccatctgcctcagtgtttgttttgggaaggacagaagagaaacagcaagagcctgtcacttctacttccctagtttttgggaagaaagctgacaatgaagagccaaagtgtcaaccagtgttttcctttgggaattcagagcaaaccaaagatgagaattcttcaaagtccacatttagttttagtatgacaaaaccatctgagaaggaatctgaacagccagcaaaagccacttttgcctttggagctcaaactagtactacagctgatcaaggtgcagcaaagccagtttttagtttcttgaacaacagttcctctagttcaagtacaccagccacttctgctggtggtggcatatttggtagttccacctcttcctccaatccacctgtggctacctttgtgtttggacagtccagcaatcctgtgagcagctctgcctttggtaacactgctgaatccagcacctctcagtctttgctattttctcaagatagcaaactagcaaccacatccagcacaggtacagctgtcaccccatttgtctttggtccaggagccagcagtaataatactaccacctctggtttcggctttggagccacaaccacatctagctctgcaggatcctcctttgtatttggaactggaccctcagcaccatctgccagtccagcatttggtgctaaccagaccccaacatttggacaaagtcaaggtgccagccagcccaatcccccaggctttggatctatatcatcttccacagcattatttcccactggttctcagcctgcaccacctacttttgggacagtgtcaagcagtagccagccccctgtgtttggacagcaacctagtcagtctgcatttggctctggaacaactcctaattctagttcggctttccagtttggcagcagcactacaaatttcaacttcacaaacaacagtccatcaggagtgttcacatttggtgcaaattctagcacacctgcagcctcagcccagccttcaggctcggggggctttccatttaaccagtctccagcagcatttacagtggggtcaaatgggaaaaatgtgttctcttcttctggaacttcattctctggtcgcaagataaagactgctgttagacgcaggaaataa

SEQ ID NO: 150748 - DNA, 799 bp, Homo sapiens
  misc_feature (1)...(799): n = a,t,c or g
atgaaatagtatccaatataccaaaggcaactgaggagatagaggaccgggaaacgctggctctcctggcagcaaggagtgaaaacgaaggcacatcatatggggagacgtacattgagaagtacactcgaggcgtgctgcaggtggaaaacattctgagtcttgaacggctccggcaggccgtcacagtcaaagaagcactttccaccaaagcccggcacattcggaggagcctcagtacaccaaatgttcataatgtctcttccagccgaccggacctttctggctttgatgaagatgacaagggttggccagagaaccagttggacatgtctgactatagctccagttaccaagatgtagcatgttatggaactttacccagggattctcctcgaaggaataaagaaggttgtacatcaaagactcctcatgccttaaccgtcagcccttttaaaggcattttctcctcagccaccaaagtttttcaagcccctaatgcctgtaaaagaggagcataaggaaaaggatagccctgggaaggcaaggcctcttctaagccagggagggacttcttgagggagggaaggaaaatgagctggaagctatttaacaggaagctaataagttcacagccttatgtacctgtgggagtttgcttgacttcagtgtttacaattgccagcttgggagaacagggaatggtttttcctcttaaagtagatctgttcaaactcacgggtnttgggagaaagaagtgtccccgtaggccctaccaccagcagtatttaaccagtgg

SEQ ID NO: 150749 - DNA, 5066 bp, Homo sapiens
  misc_feature (1)...(5066): n = a,t,c or g
atgtttgagaaaggaatttatttaaacctcatccaagctgggcattcttcaccccttcaggcatgtggagctaacatctgcagagtggccaccgcctttttggcatcggttctgctgaaaagtcacaggcctcttggatttgacaatgttatggctctgctcggattgtctgggatagaaacaaatactcatagatcctcctgcttcccacgggacttaacgaaccttcgtttatgggctggtcaagaagtggttttcaagtgccttggggaaggaattcttgaaaaagcctttcaggggtataatgcgtgtatttttgcatatggacagacaggttcgggaaaatccttttccatgatgggccatgctgagcagctgggccttattccaaggctctgctgtgctttatttaaaaggatctctttggagcaaaatgagtcacagacctttaaagttgaagtgtcctatatggaaatttataatgagaaagttcgggatcttttagaccccaaagggggctgtgtgctggacagcccagagctggagccaggggcaagggcagctgagcctcataagtaccagtgcaaggcaagtgggaaaagctataagcagagtttgccaggcaattgtcctgcagaaagtttcctggaggacagaccattattgacatcagtggtgagtgaggccaggacagaagtctatgaccaaaaattctatgagaaaacttctcctcaaccagggtcagcagaaactagcagaagacgacagactacagacccagttcaaaatgtggttcaggtcctggagaaacaatacctagaagaaaagagaagtgccctagaggagcagcggctcatgtatgagcgggaactggagcaactccgccagcagctctcccccgacaggcagccacagagtagcggccctgaccgcctggcctacagcagccagacagcgcagcagaaggtgacccagtgggcagaagagaggaaatgcttacatcatagaaaaataatgaactcaaagcacctaaatctctactcctcactcgtcaccttagaaatgacagaagacgcatgctgtgcggatgctaaggactctgaggaggaagaaaatgagctggaagctattaacaggaagctaataagttcacagccttatgtacctgtggagtttgctgacttcagtgtttacaatgccagcttggagaacagggaatggttttcctctaaagtagatctgtcaaactcacgggtcttggagaaagaagtgtcccgtagccctaccaccagcagtattaccagtggctacttttcccacagtgcctccaatgccaccctgtctgacatggtggtcccttctagtgacagctcagaccagctggccattcagacgaaggatgcagactccaccgagcactccacaccatcgcttgtgcatgatttcaggccgtcctcaaacaaagagttgacagaagtcgaaaaaggcttggtaaaggacaagataattgtggtgccactcaaggaaaacagtgccttagccaaagggagcccatcatcccagagcatccctgagaaaaactccaaatcactgtgcaggactggctcatgttcagaactagatgcctgccccagcaaaattagccagccagccaggggattctgccccagggaggtgacggtagaacacaccaccaacatccttgaagaccattctttcacagaatttatgggagtgtcagaaaggaaaagatttttgattggtttgacagattcttctggcnggagagctttccagtaggaggagtctagccaaataaaacaggcggcaagactgtctccgatgggctccaccaccccagccagctgcattccaagttagagaatgaccagggcttttacaatgtggattccagcactggattccataataaaaccaatcctgtgggtcccttcaggaagagcccctttcttgtgatgggtgtggactgggctgagactcgtcgcagcatgatgatgcaaatgcgtcgggcgccgatgagtgacgacattttggctcgcgaccgcggcagccgccttagcaggggtaataggcgcaacggcggcggaggctgcagggacgacgacgacgacggcggcggggcgggcgctgtgcgcacaggggagggggcgacggaagaactcccaccagtcggcggtcgagttaggcctcagcaccgcggggaactgttcgtgctgtcctctgcgggagatctccatagagaccgtgacacacacagaggcggggcgggaagcggcggaggctccgccatggcctcgggagccggaggagtcggagggggcggtggcggcaagatccggacgcggcgttgccaccaggggccaattaagccttaccagcaggggcgacaacagcatcaggtctcttccagccgaccggacctttctggctttgatgaagatgacaagggttggccagagaaccagttggacatgtctgactatagctccagttaccaagatgtagcatgttatggaactttacccagggattctcctcgaaggaataaagaaggtagtggttgtacatcagagactcctcatgccttaaccgtcagcccttttaaagcattctctcctcagccaccaaagtttttcaagcccctaatgcctgtaaaagaggagcataagaaaaggatagccctggaagcaaggcctcttctaagccaggagagcatgcctccacctcaggcacataaccctggctgcattgtaccctcaggaagcaatggcagcagcatgccagtagaacacaatagcaaacgtgagaagaagattgactctgaggaggaagaaaatgagctggaagctattaacaggaagctaataagttcacagccttatgtacctgtggagtttgctgacttcagtgtttacaatgccagcttggagaacagggaatggttttcctctaaagtagatctgtcaaactcacgggtcttggagaaagaagtgtcccgtagccctaccaccagcagtattaccagtggctacttttcccacagtgcctccaatgccaccctgtctgacatggtggtcccttgtagtgacagctcagaccagctggccattcagacgaaggatgcagactccaccgagcactccacaccatcgcttgtgcatgatttcaggccgtcctcaaacaaagagttgacagaagtcgaaaaaggcttggtaaaggacaagataattgtggtgccactcaaggaaaacagtgccttagccaaagggagcccatcatcacagagcatccctgagaaaaactccaaatcactgtgcaggactggctcatgttcagaactagatgcctgcccccgcaaaattagccagccagccaagggattctgccccagggagctcaaggtttgtaaacacaccaatcagcaccctgtgtctagctcgaggtttgtgaatccaccaatcgacactctgtatctagctgctctggtggggccttggagaaccttcatgtctagctcagggattgtaaatacaccaatcggcactctgtatctagcccaaggaagcaatggcagcagcatgccagtagaacacaatagcaaacgtgagaagaagattgtaagttccggaaccatttctgtcatattgcctggtggacctcaactggcttcaccaagtggatctcatactggagctacaggtggacttgcttgccagtctcccgcagtgcgccggcacttctcagcccttgggcagtccacgggaccaggcgccgcgcagcagggggcggcgcttgtcggggaggctcgggccgcgcaggagccggcggtggtggcggcggggggcattcttagcagggttacagaatctgttaagaatattgtgccagggtggctacaaagatacttcaacaagaatgaagatgtatgcagctgttcaacagacacaagcgaggttccacgctggccagaaaataaagaggaccatctggtatatgccgatgaggagagctctaatattactgatgggagaatcacacctgagccagcagtcagtaatacagaaggaggacacaatgagaatgctgcagctggtccccatgactcccactcctgtgctagcggacgcagttcgagccgtagccccaaagcacctactctcagcccagtccacacccatcacaagaaaggggctcttcctgaagggacccacaggattggttttattatggaatccagtgctggaatccacattgtaaaagccctgaggccctcctgtctgctccacgtggggcgcagagacctcgatccgcccgtcccctccagccgagtttcaccacccgccaggccacggaggcgttggggtcccatacctgatgctgttgtcgcccgtgctggtttcgcatcgccgaagatagattctgttgctgctcagcccaccgcaacaagcccagtagtttatacaagaccagcaataagtagcttttcttctagtggaattgggtttggggagagtttaaaagctgggtcatcatggcagtgtgatacatgtctactccagaacaaagttacagacaacaaatgcatagcctgtcaagcagcaaaattgtcacccagagatactgctaaacagactggaattgaaacaccaaataaaagtggcaaaacaactctttctgcatcagggacaggctttggagacaaatttaaaccagtgataggcacttgggattgtgatacctgtttagtgcaaaataaacctgaagcaataaaatgtgtagcctgtgaaacaccgaaacctggaacttgtgtgaagcgagcccttacattgacagtggtttcggaaagtgctgagactatgactgcttcatcttccagctgcactgtaaccactggtaccttaggatttggagataaattcaaaaggcccattggatcttgggagtgttcagtatgctgtgtttctaataatgcagaagacaataagtgtgtgtcctgtatgtctgagaaaccagaacttcaggtattcagtggcagcaactcatga

SEQ ID NO: 150750 - DNA, 1242 bp, Homo sapiens
ttttttttttttttttttatccttcagcaagcctcttttaatgatttaaaaaaagaactaactgaacttttacaaataattgtgttccagagacagactttcaatctaaagaaaagatccaaggacctagctctcgtggcagaatgcagaaacagaagcctccagattgatctctgcagatgctaactgtggccccactttgtcctcatattcagcctgatccttaaagcccttaccaactaagccaaatacctgcttggattcttcttgacaacttggcaaaagatgtccacgttccacttcttaatcctcaccacctcttaaccacaaatttgggccccaagtggcttttcaaaaagggggaaaaaatttgtgcgaagtttgagactggtttatgtatttcatggactaaaaacccaaatctggaggttctttgggaactcttagctgggccctgggggcatggcgaagccgcctggtgcaatccctttggtccacctgggaggcccgtgaagaccttcagtggaaggaagagtgggtcagatgagacgtgtccatttcatcagtcagccatcggtgacaggctgaattcagagacccaggccagagtgtaccagctacaaaatttatccaaggattccaattatgctttaaaaaattctaccagaagaagtaaaaaacgatgtttatatgttaagaaatgtaacagagtagctctcatttgataatataaaatagctctgcctctattcaaaacagttgattttaaaagtaggtatatagtcgctatacttattattatttttagattgctttaaaaagcatatgcgtccctatctctttggcaagcacccagcggtgagtcacgccctgcacccgcagcagccgatctgagaggctcctcagggagcctccgtgaacttttccaaaccctccatgcgggccgcacacaggatgcccgtgccgggtcgtttcccatcagcttccagccacgctgcttgcttgtagctaaaagcaagccagggatgcccgtgtcagatgaagctgcttacgagtctccatggaaaggcggcgctggtgctccggcacttggtttgctcggtgcactctcttcagaggtcgccgaccgagccctccaggcggctccagcttgggcgcctcgggatgcgggccggggagacctcccggggcaggaccggcctcaggggccagcgggcgcgtcgttggggcccagcaggagct

SEQ ID NO: 150751 - DNA, 373 bp, Homo sapiens
  misc_feature (1)...(373): n = a,t,c or g
cccacgcgtccgggtgcgggttgaccttgtaagtggctggggcgggaaaatggtggatctgttcgtgctcgtaactgtcaagagggtacatcgactacgccgtgaagatcctagtgaagcctgactggaccggtgtggtctcggatggggtgaagcactctttgaaccccttctgtgatatagcggtggatgaggctgtgctgctcaaggaaaaaaaactggtgaaggagggaattgccgtctgctgtgggcctgcacagtgccaggagacgaatcgaaccgccctgggcatgggtgcacaccgaggtatccacgtggaggtgtccccataataagcccaacgcttgtgtcccctgcaagtggctcggggccn

SEQ ID NO: 150752 - DNA, 395 bp, Homo sapiens; identical to SEQ ID NO: 117040

SEQ ID NO: 150753 - DNA, 425 bp, Homo sapiens
ggctggtgaacagtaacaaactttggtgaaatttcaggaaccatagccattgaagtggatgagggaacctatatacatgcactcaacaatggtctttttaccctgggagctccacacaaagaagaatcgccctgaaacctggctatggaaaataccttagtataaattcagatgaacttgttgttggcgttcagatgcaattggaccaagagaacaatgggaaccagtctttcaaaatcaagaggtcagaaatggtgggccagctgagatgggagaagaaaagagaaatggcacaaagtggagagaagacaccgaccatacctcctttcctctctttcccagcacaggtggacagcccaaagcacactccaactggaggaaggtttgccattaaagataagctgctgatgatgatcttcaagcag

SEQ ID NO: 150754 - DNA, 343 bp, Homo sapiens
cggcacgaggcttatgtgaagtctaccaagcttgtgcataagggaaccaaggcgaagagatttgcctgaggttgactatacatacaaatattgagcatttcctcctggtctccgtgataaacaaaggttttgatattgttcggcgagatggaaagaaaatatcaaggagtgagctgaagccactgcccttgagaaccctctcgaggagtctggcctcatgaagatgccagaataaacggcagatatatcctgaatgaatgtgagatttttaccctgtgaatttcctgtgaggagtgtaagaagaaaaagaggaaagataagaagagaaaaaaaaaaaaaaaaa

SEQ ID NO: 150755 - DNA, 859 bp, Homo sapiens
cccgtgtcgacccacgcgctccgggaaatctcgggcattcaccgtttgggtgaagacggaggcgggttctggacagacgtaggctgtcagggagtgtttacttcgcctccacttctgttcctccctgccctggtgctgctccaggtcacatactcgtcctgagccggcttcagcctgtccgcgcagaagtctcccggagccatggcctagtactcttatgtgaagtctagcaagctcgtgctcaagggaaccgagtaagaagaaaaagagcaaagataagaagagaaaaagagaagatgaagaaacccagcttgatacgttggaatctggtgaacagtaacaaactttggtgaaatttcaggaaccatagccattggaatggatgagggaacctatatacatgcactcgacaatggtctttttaccctgggagctccacacaaagaagaatcgccctgaaatctggctatggaaaatatcttggtataaattcagatgaacttgttgggcattcagatgcaattggaccaagagaacaatgggaacactgaaaggttttgaccagaccattaatttgattttggatgaaagccatgaacgagtattcagctcttcacagggggtagaacaagtggtactaggattatacattgtaagaggtgacaacgttgcagtcattggagaaatcgatgaagaaacagattctgcgcttgatttggggaatattcggagcagaacctttaaattctgtagcacactgaggaaaaactacatacttggacatctgtaaacctttgtacaggaactggattattcctgaggatgatatatggagtgtttatgagtgtgtcactggatt

SEQ ID NO: 150756 - DNA, 818 bp, Homo sapiens
cttcgcctccacttctgttcctccccgccctggtgctgctccaggtcacatactcttcctgagccggcttcagcctctccgcgcagaagtctcccggagccatggcctagtattcttatgtgaagtctaccaagcttgtgctcaagggaaccgagatttgcctgagggtgactgtacatgcaaatattgagcatttcctcctggcctccgtgataaacagaagttttgatattgttaggcgagatggaaagaaagtatcaaggagtgagctgaagccactgcccttgagaaccctctcgaggagtctggcctcatgaagatgccagaataaatggcagtaagaagaaaaagagcaaagataagaagagaaaaagagaagaagatgaagaaacccagtttgatatgttggaatctggtgaacagtaacaaactttgatgaaatttcaggaaccatagccattgaaatggatgagggaacctatatacatgcactcgacaatggtctttttaccctgggagctccacacaaagaagaatcgccctgaaacctggctatggaaaatatcttagtataaattcagatgaacttgttgttggcgttcagatgcaattggaccaagagaacaatgggaaccagtctttcaaaatggtgcctgtgcagcagtattcactgtgataggaagtgagaagcagtctgagtgttcattgctgagggaatcaagggcaaaatatcatggatgcactcatggacaaataagcagcagtttgaagcaacaccctagatggatgtacagccatcaagaggatcttaaagtgtg

SEQ ID NO: 150757 - DNA, 905 bp, Homo sapiens
gggtcgacccacgcgtccgctcgtcctgagccggcttcagcctctccgcgcagaagtctcccggagccgacttctgagagtcgagtactcctatgtgaagactaccaagctcgtgttcaagggaaccaaggcgaagagagctaagaagtgacagaatcaggatttaaaatctggaagtgtggctctacaatctgctttgaactttaacataatatgtacaaagcctgaagcaaattctcagcgctgtatttaagagagcatagcaattaagaagaaaaagaacaaagataagaaaagaaaaagagaagaagatgaagaaacccagcttgatattgttggaatctggtggacagtaacaaactttggtgaaatttcaggaaccatagccattgaaatggataagggaacctatatacatgcactcgacaatggtctttttaccctgggagctccacacaaagaagttgatgagggccctagtcctccagagcagtttacggcctgtcaaattatctgattccagaatcgccctgaagtctggctatggaaaatatcttggtataaattcagatggacttgttgttgggcgttcagatgcaattggaccaagagaacaatgggaaccagtctttaaaattggggaaaatggctttgtcgacctcaaatagctgctttattaggatacagtgaagcagaggacatagaagcaaaaagtaaaacagcaggagaagaagaaatgatcaaggctctcctaatctctgtcagaccttcacctttatgaccttgccttatctaccagaacacagatccctcttactaaagattagatcctgtgctgaaagagaaaccaagaaaaaagatgacattccagaagaagacaaaggaaatataaaacaatgtgaaat

SEQ ID NO: 150758 - DNA, 480 bp, Homo sapiens
ggacctcatctgagatgcctatcatgtcctgccctgactgactgtagttcatgtgtgcagctgtctgcctgtgctgtgaattccaagaggacaggcttcatctgggtgctgagcagggcttggagaggatgagggtatgggaggcggagtgttaaagtgcgtgcatgggccaggtgcactggtttttcccccaaaaccccaaacccctgggtaaattcccaacactttgggaggctgaggtgggcagatcacctgaggtcaggagttcgagaccagcctggccaacatggtgaaactctgtctctactaaaaatacaaaaactacctgggtgtggtggcaggtgcctgtaattccagctatttgggaggctgaggcaagagaattgaattgcttgaacccaggaggcggaggttgcagtgagctgagatcgcaccactgcactccagcctgggtgacagagcaagactctgtctcaaaaa

SEQ ID NO: 150759 - DNA, 220 bp, Homo sapiens
aattggtgggttcttggtctcactgacttcaagaatgaagccgcagaccctcacggagtgaagctgcagaccttcacggtgagtgttacagctcttaaggtagcacgtctggagttgtttgttcctcccggtgggctcgtggtcttgctgggctcaggagtgaagctgcagatcttcgcagtgagtattacagctcataaaagcagcgtggacccaaaga

SEQ ID NO: 150760 - DNA, 809 bp, Homo sapiens
gagtgaagctgcagaccttcgtggtgagtgttacagctcttaaggcggcacgtctggagttgttcattcctcctggtgggttcgtggtctcgctggcttcaggagtgaagctgcagacctttgcggtgagtgttacagctcataaaggcagtgtggacccaaagactagacataaaggttctccaagtccccaccagactcaggagcccagctggctgcacccagtggatcccgcaccggggctgcaggtggagctgcctgccagtcccgcgccgtgcgcccgcactcctcagcccttgggtggtcaatgggactgggtgccatggagcagggggcggtgctcgtcggggaggcttgggccacgcagcagcccacggtggggggcaggctcaggcatggcgggctgcaggtcccgagccctgccccacggggaggcagctaaggcccagcgaaaagtcacagcagctgctggcccaggtgctaagcacctcactgcctggggctggcagggccagctggccactccgagtgtggggcctgccgagcccacacacacccagaactcgcactggcccgcaagcgccgtgtgcagccccagttcccgcctgcgcctctccctccacacctacccgcaagctgagggagccggctccggccttggccagcccaggaaggggctcccacagtgcagcagcaggctgaagggctcctcaagtgctgccaaagtgggagcccaggcagaggaggtgccgagagcgagcgaggcctgcgagggctgccagcacgctgtcacctctcataagtattaa

SEQ ID NO: 150761 - DNA, 504 bp, Homo sapiens
cagcgctgcgctcgatttctcgccgggccttagctgccttcccgccgggcatggctcgggacctgcagcccgccatgcctgagcctcccacccactccatgggctcctgtgcggccggagcctccctgaggagcaccaccccctgctccatggcgcccagtcccatcgaccacccaagggctgaggagtgcgagcgcacagcgtgggactggcaggcagctccacctgcagcccgggtgtgggatccactaggtgaagccagccgggcttctgagttgcgaagacctacagcttcactcctgaagccagcgagaccacgagcccccctgggaggaacgaacaactccagacgtgctgcattaagagctttaacactcagggcgaaggtctgcagcttctctcctgaagccagtgagagcacgagcccaccaggaggaatgaacaagtccagacgtgctgccttaagagctgtaacactcactgtgaaggtctgcagcttcactc

SEQ ID NO: 150762 - DNA, 3411 bp, Homo sapiens; identical to SEQ ID NO: 128472

SEQ ID NO: 150763 - DNA, 804 bp, Homo sapiens
tcagctttcagggaggtttggagggagaggcgtgggcgggaaccggggctgcgcccggtgcttgcgggccagcgcgagttccgggtgggcgtaggctccgcggaccccgcactcgcccggccggccccaccggccccgggcagtgaggggcttagcacctgggccagcagctgctgtgctcaatttctcaccgggccttagctgccttcccgcagcagggctcgggaccgcgaaggtctgcagcttcactcctgaagccagcgagaccacgagcccaccgggaggaacgaacaactccagacgcgccgccttaagagctgtaacactcaccgcgaaggtctgcagcttcactctgtccccaggctccagaagtatcaccacaaggctctcaggtgccagctctctcagggaattcccctcagcggctgctgcttccaacgtagggacatagagccttggatcccagatcacaactctcaagggctgtgctagcccagagctctggggtgagtgggagtaggctgagtccttggcggatgcactgcagctggtctcatcacatgggtactggccaggagcttcctccagggtattctcactagaagctggcttccccaggaatccaacctcctctggaaagccctccttaatgcccctgatgaaatcatcatctctttttggttgtactccattccttgcgcttatcttcccattgtctgactgtactgtgactgacttctgtgaatcctcctggcccacaggactgagagttcctcgagagtaggaatggattgtagcagacat

SEQ ID NO: 150764 - DNA, 644 bp, Homo sapiens
cccgtgcggtggaattcgaggagggaaggagatgaacgagattaagacccaattcaccacccgggaaggtctgtacaagctgctgccgcactcggagtacagccggcccaaccgggtgcccttcaactcgcagggatccaaccctgtccgcgtctccttcgtaaacctcaacgaccagtctggcaacggcgaccgcctctgcttcaatgtgggccgggagctgtacttctatatctacaagggggtccgcaagggctcattgtcatcctcaagccaggccagttctccaggtgaaactgtagtgtagcgacctcactgctgcgcagcacagtctcccgggacttggactcgagggagtgacgaggaggagctccgagctgcgcctgagccgtgccagccggcggacctcaggcggtggacgtcggcgatagccgtgtggacggtgaccggctcactctgcggcgccgtgctcccgctgctcacccaaagaagttgtttccattttaaaccggtcttttggggctgcagtaaaaaataagaaatggagttttcttgctttttactctaaaattcaatgtaattaaatttcatatatatataatatatacatatatacatagtgtaaaataaaatgtttcttggac

SEQ ID NO: 150765 - DNA, 1050 bp, Homo sapiens; identical to SEQ ID NO: 128504

SEQ ID NO: 150766 - DNA, 2069 bp, Homo sapiens
gactggtgctggagttttgagtccacagataaaatgtgtctccttcgtctctactagagaggaaaaagaactggaattggaagaacagggagactgaagggtagcaagagaggctggagaagagagtgaaaagaccgcttacctgatttgaaattgtctgcagcccctctttcctggagtaaatgaactggaccaaatctcaaaaatccacgatgtcatcggcacacccgctcagaagatcctcaccaagttcaaacagtcgagagctatgaattttgattttccttttaaaaagggatcaggaatacctctactaacaaccaatttgtccccacaatgcctctccctcctgcacgcaatggtggcctatgatcccgatgagagaatcgccgcccaccaggccctgcagcacccctacttccaagaacagagaacccagaacggaagcgaggatgaaggcctcagccgtcctcctccccattcaaacacgttcatccctcaaccctctgctgagcacctgcatgctgcccggccgcagtgtcacccttcttgtgtgagcctaccctcatccacccacctcaccctcctgaccttaaagaagacaccgggcagaagcacaggggagcccagtcacaccccacactggcgggggcaggccttgcagggagaagcagtaagcagccatctccatcagccatttccatctggcactcagacgtgcacgtcttcgtgtgacaggcggcagcagtgcgaccgtgacctcccatctgctctgctgtccccacacctgcggtgcagccagcctgccacaaggcagctagagtccagctagacccacccctggcacggccgacctcttcctggcttcttctgggcctaatccccgtgcattctccaacgccagaagtgtaagaaagtgcaaggcaacaagtgagaagagcaaacccaaatcgtaccagggaagctagtctttccagggcacctgagtgagggcatgaccagccttgacgctgcctcgctaccatctgcccagggcctgctgaatgcttgagtccatggtgacagtggtgggaacagttacgaggcagttagattttggaagtcatgttggcccacttggctacagagcagtcttaggaacagcaccataaaaataaagacttattcctgacacacatgcatctagagtaaactggggcgtatctgacagcgttagtacagtgatggccaaatgcaaactgcattccagaaccagcgaagggtgacagactgggctgaggcagagctaggactaaccatctcgagtgatgccatctcggggccaacaaaagttttggacacggctggatcatctgaccaaactgctcaaatctttacacaattattgtcctggtattaaactttcacctgccacttccaacaaacaggagacagaataaggagatgaccaggaagatggctggattaagaattctagacttggccgggtgcggtggctcacacctgtaatcctagcatcttgggaggctgaggcaggaggatcgcttgagcccagagtttgagaccagcctaggcaacataaggagaccccatctctacaaaatatcaaaaaattacccaggtatggtggcacacacgtgtgattccagctactcgggaggctgagatgggaggatcacttgaacccaggaggttggggctacaatgagctatgatcgcaccacttcattccagcctggatgacagaagactcactccatagttcatggccccgtgatccagagtccctgctggcgccttcgagtggggcaggctgagaactcaagctgtaactaatgtctcctccgaagaaaactaaaccgagggctgagctgatgtgaagttttccgtggctgcattcatacaaatggtgaaaatgtagcatacctcccctcaaaagcctgaaagtaaagacatgcccccaatttaatgtgatgaattagagaaataggtttcagacacttcatggtttaaagtctcacaaaaataaagctttagaaggaaaaaaaaaaacacaacaaaaaaaaaaa

SEQ ID NO: 150767 - DNA, 456 bp, Homo sapiens
atgaagctgcggaccctcgcggtgagtgctacagctcttaaggtggcgcgtctggagtttgttccttttgatgttcggatgtgttcggagtttctttcttccggagtgaagctgcagaccttcgcggtgagtgttacagctcttaatgcactgcgtctggagttgttcgttcctcccggtgggctcatggtctcgctggcttcaggagtgaagctgcagatcttcacggtgagtgttacagctcataaaagcagtgtggacccaaagacccttgggtggtcgatgggactgggcgccgtggagcagggggcggcgctcatcggggaggcttgggccgcacaggagcccatggagggggtgggaggctcaggcatggcgggctgcaggtctcgagccctgccccgcggaaaggcagctaaggcccggcgagaaatcgagcgcagcgccgggcactga

SEQ ID NO: 150768 - DNA, 1762 bp, Homo sapiens
  misc_feature (1)...(1762): n = a,t,c or g
atggcgcctgaactgagtagtaaggaacaacctgggtcagagtggaagaaggcatgccagatggaggggaccgtgtgtgcaaaggcacaaagagacttgttggatggctttgaccaaaatgccgatgatgatatggacaatgaaatccaggccgaaatggtctcagatggagatgaggaacttgttgggaactggagcaaagaacccaccaccctgggcgctgccacaatggggctgggcacagagaagcagttgggcatggggtgggcaggcagaaaggggcccattgaggacctggagcccctgccccaggctgcctgcaagctccatgcagtggctcatactacatgggaggaggcagtgcagtgtgggagtctgcccaggagaaacagtaacttgctgctggagcagggtgtcctagaggagaccaggaatttgttacaagaacatggtggagaaattgatcttgaaaagaagaggtggctgggcacggtggctcacacttgtaatgccagcactttgggaggccgaggagtgaagctgcagaccttcacggtgagtattacagctcctaaggcagcacgtctggagttgttcgttcctcccggtgggctcgtggtcttgctggcttcaggagtgaagctgcaaatcttcgcggtgagtgttacagctcataaaagcagtgtggacccaaagacccttgggtggtcgatgggactgggcgccgtggagcaggaggtggtgctcgtcggggaggctccggccgcacaggaaccaatggagtgggtgggaggctcaggcatgggggctgcaggtcccggagccctgccccgcgggaaggcagctaaggcccggcgagaaatcgagcacagcgccggtctgtacaagctgctgccgcactcggagtacagccggcccaaccgggtgcccttcaactcgcagggatccaaccctgtccgcgtctccttcgtaaacctcaacgaccagtctggcaacggcgaccgcctctgcttcaatgtgggccgggagctgtacttctatatctacaagggggtccgcaagacaatcccatgaggttggtagaacagagattctcatctccgttttaactgaggctgctgacttgagtaaaccaatagataaaaggatatacaaaggaacacagcctacttgtcatgacttcaaccacctaacagccacagcagaaagtgtctctctcctagtgggcttttccgcaggccaagtccagcttatagacccaatcaaaaaagaaactagcaaactttttaatgaggaagcttttgaggggaggtatgctacatttttcaccatttgtatgaatgcagccacggaaaacttcacatcagctcagccctcggtttagttttcttcggaggagacattagttacagcttgagttctcagcctgccccactcgaaggcgccagcagggactctggatcacggggccatgaactatggagtgagtcttctagaaagagaaataataaaagacactaagacttgctgttctaaatgaaagaatcagaatggatgaattagacacatgcagagtgacctctgtattaaaataagatattagcatgttttaggtactttggtatttctgtcatcttaaagtgttgattgctaggtgctgtcagttatacaggaagccaaacccaggagggcccaaaacagctacaggaattccaccgcntgtccgagtgatctcaggggtttcaattnncngganaccccc

SEQ ID NO: 150769 - DNA, 1851 bp, Homo sapiens
atggagtccgtactccggacccatcggcccacctggcaagactgccaacagctccttttaactctctttacctctgaggagagggagcgtatccgaaaagaggccagaaagcacttccttgcatcagccggtaggcctgaggaggaaggtagagacctccttgaggaggcctttccctctacccggcctaactgggacccaaattcctcaagtggaaggacagctttggacaattttcaccggtatctcctcatgggtattaagggagcctctcggaaacccataaacttgtctaaggcgactgaagtcgtccaggttcccgaagagtcactaggagcgtttttagagtgcctccaggaggcttaccggatttacaccccttttgacccagcgtcccctgaaaatagccgtgctcttaatttggcatttgtggctcaggcagccccagatgtgaggagaaaactccaaaaactggagggatttgctgggataaatatcagagtgaaactgcagaccttcgcggtgagtgttacagctcttaaggcagcgcgtctggagttgttcattgcgcgcctggagttgttcgttcctcccagtgggcttgtggtctcgctggcttcaggagtgaagctgcagacctttgcggtgagtgttatagctcataaaagcagtgtggacccaaagagtgaacagtagcaagatttattgcaaagagtgaaagaacaaagcttccacagtgtggaaggggaccccactagatacaaaggttctccacgtccccaccagactcaggagcccagctggcttcacctagtggatcccgcaccagagctgcaggtggagctgcctgccagtcctggtgccgtgcgcctgcactcctcagcccttgggtggtcgatgggactgggcgccgtggagcagggggtggcggtcgtcggggaggctctggccgcacaggagctcatggagtgggtgggaggctcaggcatggcgggctgcaggtcccgagccctgccccgcgggaaggcagctaaggcccggccaacaccctttggtcacatgaataaaagtcaagccctttctttgctcattgctcagcctctgggtattaatctgctgagctggtggccacctaaatacaatcgtcctgttcccctcattggtctctccggtctcctgattccagccacattttgcctgggggagacccgtgactccaggcatgctatcaggacaacttcaacccgaggggagatcagctctcccgcaacctggtgccgctctctgacagcacaacagaacctaaggggctacaggatgattcaaggaacagtgtgctacaggacctcgggtatacctagtaatatgacccaggatgcaagagtggctcgcaaatttggaagaaacctacaccccaaccaacccaggacacaaaagtggcttgctaagtcagttaagaaacgaaaccgggagtggggagagtggtcctctttcagtattggatggccggccgaaggaactatagatggggaaataattggctgtgtatttaaggtggtgactgaggtcggaggacagcctggacttccaggccaatttccttatattgactcacggctgaatataattcaaactcgacctgtatggctagagccctgcctggcagcttattgcagaacactggtagctcgagctgagccaaaagtgaaagagaattcagctttactgtcagctacaaacagaaaggaaaaaccacaagaaaaaccagttttgcaggaaccaccagcggaaatagaaacccctctcccctatgcaccaatctatccacctttaccaagcctggcccaatag

SEQ ID NO: 150770 - DNA, 1097 bp, Homo sapiens
aaatattttaaatatttctgaactttttgttgagatgtatggtcttatcttggtactgaattagaaataaagtttggaagtaaattttgtcagtacctagttcccaaacaaagctaaatacttgcacagatgaatatccccccccatgaaataccagagagaacccaaaatttacttttgctagtaaatcaattaaattgatttttatttaatgacgaaaccattcattggcagattaatgaggaccagacgcttgtccaatttagttgacacatttgcttttttattttttagaatatagtctacatctggattaaaaaaagttttaaataaatttaagacatacaacaacagtggaaaccccttccatccattcctatgttacaacacgaatagaatgtccagttggttcccatttcggttaagtcccactttcctcataataatgttattattttcactgagtggcaagctacgtaacaaactggcgaaatgccagcttataccacactggggtgggggtgggcaccggagtggcaccgaaagggatggggtgggggtgccataggactactatacagtgtaacagaaaatcattaataaagtagtaccgattaccggcagacagtgctgttttgtgcgcttatcaccattggaatcgctgaagtttcagagcaaggaggagattcgaaatacttcacacagggccaatgttacaaaaagaaatagtgcaaacaggaaaactgatgcaatcctagcaacgcctgggcctccaccggcccaaccgcatggtgcgcgggaggatacgcgccccgccttccccagcacccagctccgggctgctttcccaagtgtggcaacccagcgccgcggccctggtatggccccttctcgggccctctcctccgaaaagaacagaaaagaaaccccaggaaaggcacaggctgaatgcagggcgtcagcccagtcccattcccaccaacatagaatgcaggccccctcccaggaggttccttgggccctcccatctccggccaccattttcttgtctctcacacgtggccccctcctccacgcagccccaccgcgcctcctgc

SEQ ID NO: 150771 - DNA, 1238 bp, Homo sapiens
tttttttttttttttttttgacactattaaaggtaatgctaaggtgcatggaaggttggcattgcttatatttgtaattctgctcccaataagctccaggtttcttacctggacaatataaaacagtaaataccatgctgactgcccagttcaatacactgggctttaaacaaaaggaaaaaataaatcaggagctgtgagtcctcattctgtctgctgctttttagctgtgattcaggcaagtgactagacgcctctggatcagcctcctgtcctctacaaccagatcttttctacacagttctaaactactgcaccaccaggatttgcagagtggccaatgacagttcacaaaggcggaggtgccgtgtctgctaagcttctaagccacatggaagtgcttcagccaacaaatccatgaacattactgtggtccactttcaacacagaaaaatgactagagcttttatgaaacaaaaaagctgcttatctcaggttcagaaacccttgattccaaagaccaatacagaattaacaagtacaatcattatttccaaactttacattatactatacacctcaaattctcatcgggtctttcatctgctacacaataaaagctctcttggtctaaaggaaatggctgaggagagcggcctgtatctccaccgcccctgatggcaccatcagggcagctgcttgcaattcacgtgtggtctgaggtaaaaagcgtttcctcatgctttttatcatgccagcaaggccacgtcctaacctcgcccggttcttctttcccccagtgccaacctgcccaatgctatttaattccatgctcttcagaaaagtatacaaatggctggcaggcccaattccaccttcgctgggaatccagtcctcacaagcccaggttcctaatctgggcctatttccagctccaaatacagcggtgatgcacaagtctgtttttccagccctaacttgttcccaagcttcagaccagtcactgggtgtatccagtcacctcccaacatctccccaggggccgagaagggctgtggccttcagcccatccctgtacactctttccttaccccttccacattttctcctgtctcccccatctagaggagtcacaggagcacccacccggaaacccactccatgtcccactcctctcagtcaagtccccaagcgccatcagcgctgcctcctagcatctcactcccactctctccttt

SEQ ID NO: 150772 - DNA, 407 bp, Homo sapiens
gctgcgagaagacgacagaagggggcacagagttgggagtgactccagagcctcctgcaagatgctgttgattctgctgtcagtggccttgctggccctgagctcagctcagaacttaaatgaagatgtcagccaggaagaatctccctccctaatagcaggaaatccacaaggaccatccccacaaggaggcaacaagccccaaggccccccacctcctccaggaaagccacaaggaccacccccacaaggaggcaacaaacctcaaggtcccccacctccaggaaagccacaaggaccacccccacaaggggacaagtcccgaagtccccgatctcctccaggaaaaccacaaggacctccacaggggcagtctcctcagtaatctaggattcaatgacaggaag

SEQ ID NO: 150773 - DNA, 763 bp, Homo sapiens
gagtgactccagagcctcctgcaagatgctgttgattctgctgtcagtggccttgctggccctgagctcagctcagaacttaaatgaagatgtcagccaggaagaatctccctccctaatagcaggaaatccacaaggaccatccccacaaggaggcaacaagccccaaggccccccacctcctccaggaaagccacaaggaccacccccacaaggaggcaacaaacctcaaggtcccccacctccaggaaagccacaaggaccacccccacaaggggacaagtcccgaagtccccgatctcctccaggaaaaccacaaggaccacccccacagaggaggatagctccaaggaccacccccacgcggaggtatcaaacctcaaggtcccccacctccaggaaagccacaaggaccacccgcacaaggaggcagcaagtcccaaagtgcccgagctcctccaggaaagccacaaggaccaccccaacaagaaggcaacaatcctcaaggtcccccacctccagcaggaggcaatccccagcagcctcaggcacctcctgctggacagccccagggaccaccacgccctcctcaagggggcagaccttccagacctccccagtgacagcctccccagtcatctaggattcaatgacaggaagtgaataagaagatgagagtgattcaaatgattcaaattccatgacattggaaaaaggtcatcatagctctaacttcaatataccaataaaataatcagcttgc

SEQ ID NO: 150774 - DNA, 479 bp, Homo sapiens; identical to SEQ ID NO: 135378
  misc_feature (1)...(479): n = a,t,c or g

SEQ ID NO: 150775 - DNA, 711 bp, Homo sapiens
atgagtgttaggtgtccccactgctggatgaacacgtccactgttcgagcactgccacagacctattacacgggcaggaagatcctagtacctccccctctccggggacccgagcagccagccagccacctaactcctcagatttttgcctggtgtcttgatttgccaggatgcataggttcctggctgatgaacgtgatcaatacccctgccctgtttgcttcttccaacagcccaggcccagtcatggaacttgaggcacagggtgccatggtggaggctgggaaggggaaggcaaccagagtgggcaaaacgagggccctggagcagacacggcagcaaggggagcctgcagcgctcccagcggactccgccacgtcctgctggtggagcaaaggcgggctgccatgttatgacttcaaggggaacgtgtaccaccacccctctgtttggaaacttttcaaagaagtagtccacgagaactaccttgaaagagcaaaaccagccaggatgaagcctgctgggagcgtgaatgacatggccctggatgccttcgacttggaccggatgaagcaggagatcctagaggaggtggtgagagagctccacaaggtgaaggaggagatcatcgacgaggacagccagaagcccagccagccccagactccagtgcaccagagcacgcacaggagcctgggcgcgctgctgtga

SEQ ID NO: 150776 - DNA, 449 bp, Homo sapiens
gtcatctgtccgtgcggtggaattcccagaagacgcatctggaggctccagtcccagtgggacctcaaagtccgatgccaaccgggcaagcagcgggggtggcggaggaggcctcatggaggaaatgaacaaactgctggccaagaggagaaaagcagcctcccagtcagacaagccagccgagaagaaggaagatgaaagccaaatggaagatcctagtacctccccctctccggggacccgagcagccagccagccacctaactcctcagaggctggccggaagccctgggagcggagcaactcggtggagaagcctgtgtcctcgattctgtccaggatgaagcctgctgggagcgtgaatgacatggccctggatgccttcgacttggaccggatgaagcaggagatcctagaggaggtggtgagagagctccacaaggtgaagg

SEQ ID NO: 150777 - DNA, 2358 bp, Homo sapiens
atggtgcgatcttggctcactgcaacctccgcctcccaggttcaagcaattctcctgcctcagcctcccaagacacagctgaacttcacagtagccattgacttcacggcttccaatggtgagacacggatgagtgaaaaagtcggagggaatcctctgcagcctacctccctgcactacatgagtccctaccagctcagcgcctatgccatggccctcaaggcagtgggagagatcatccaggactatgacagtgataagctcttcccagcttatggctttggggccaagctgcccccagagggacggatctcccaccagttccccctgaacaacaatgatgaggaccccaactgtgcgggcatcgagggtgtgctggagagctatttccagagcctgcgcacagtgcagctctatgggcccacctactttgctcctgtcatcaaccaagtggccagcaattcctggagctctgtgactctaggtactgactcagagcctgctgtggaggtgcctcaatatgtgggcatccggctcctggtagagggcttcaccatcaagaagcccatggcgatgtgtcatcggcggatgggggtccgcccagcagtccctctgctgacccagcgaggctctggggaaggcaaggactcggggacccctacccacagcctccacaccaaggcccagctgccttctccccatgtactccgacaccagggccaggtcctcagacgacagcacagcaagctggtgggcactaaggccctgtcgaccacaggcaaggccttgaggactctacccacggctaaggtcttcatttccctcccaccgaaccttgatttcaaggtggcacccagcatcctgaagccaagaaagtcaattcgggaggatcgaaacggcagatcgcaaaaaacagtacatacagaaggagacatgaacatgaacatcaaaaaaattgtaaaacaagccacagttctgacttttacgactgcacttctggcaggaggagcgactcaagccttcgcgaaagaaaataaccaaaaagcatacaaagaaacgtacggcgtctctcatattacacgccatgatatgctgcagatccctaaacagcagcaaaacgaaaaataccaagtgcctcaattcgatcaatcaacgattaaaaatattgagtctgcaaaaggacttgatgtgtgggacagctggccgctgcaaaacgctgacggaacagtagctgaatacaacggctatcacgttgtgtttgctcttgcgggaagcccgaaagacgctgatgacacatcaatctacatgttttatcaaaaggtcggcgacaactcaatcgacagctggaaaaacgcgggccgtgtctttaaagacagcgataagttcgacgccaacgatccgatcctgaaagatcagacgcaagaatggtccggttctgcaacctttacatctgacggaaaaatccgtttattctacactgactattccggtaaacattacggcaaacaaagcctgacaacagcgcaggtaaatgtgtcaaaatctgatgacacactcaaaatcaacggagtggaagatcacaaaacgatttttgacggagacggaaaaacatatcagaacgttcagcagtttatcgatgaaggcaattatacatccggcgacaaccatacgctgagagaccctcactacgttgaagacaaaggccataaataccttgtattcgaagccaacacgggaacagaaaacggataccaaggcgaagaatctttatttaacaaagcgtactacggcggcggcacgaacttcttccgtaaagaaagccagaagcttcagcagagcgctaaaaaacgcgatgctgagttagcgaacggcgccctcggtatcatagagttaaataatgattacacattgaaaaaagtaatgaagccgctgatcacttcaaacacggtaactgatgaaatcgagcgcgcgaatgttttcaaaatgaacggcaaatggtacttgttcactgattcacgcggttcaaaaatgacgatcgatggtattaactcaaacgatatttacatgcttggttatgtatcaaactctttaaccggcccttacaagccgctgaacaaaacagggcttgtgctgcaaatgggtcttgatccaaacgatgtgacattcacttactctcacttcgcagtgccgcaagccaaaggcaacaatgtggttatcacaagctacatgacaaacagaggcttcttcgaggataaaaaggcaacatttgcgccaagcttcttaatgaacatcaaaggcaataaaacatccgttgtcaaaaacagcatcctggagccaggacagttggcagtcaactaa

SEQ ID NO: 150778 - DNA, 1821 bp, Homo sapiens
  misc_feature (1)...(1821): n = a,t,c or g
tttttttttttttttttggggacagtaaaccgttttattactagtagtcggacacaagacacccgtggtgcatgacagacagtttcaacacccatgagcgctggggacggagctgtgcctggaccagctctgcggtagtgtggtggcgccacgcttgggccggctgtcaccgcccagctgaggcccttaacagcgtccacctggggagaaaaccttggaaaccgtcttaattgaagcaggtgacttaggggcgtctcttagaaacccaaacgaaatgtaccttaaataagcaaatataaaacacaaataaagacgagcagaccctggtgttccggtgtcaaggcaaaattttaaaaaaaacccaggaagttgcaacttgggtttccttcaactgtcaatgtgtgaatcaacaaggttcaaggaacgtttcaacaagcagcgggccccaaggctcctgtgcgtggctctgggtgcactgggagtcttggggcttggctggggcttctggctgtccttctgtcgccgggatgggcctcgacgaatcagcgcagccgcggcccggcccccntacgtggtgctgatcccactcagctcctgcctgatggcgttcgatgatctcctccttcaccttgtggagctctctcaccacctcctctaggatctcctgcttcattcgggtccaagtcgaaggcaatcccagggcccatgtcattcacgctccccagcaggcttcatcctgggagagaaagggcctgtgggtgccctggctggagacaggtgtgggggaaagctggctgtgcagaagccccgctcaggctgggcccacctgctcccctcgctccatagaggctgcttgcttcagactctggccacctcagactgcctgagaagggtttaacgcccgtctccacctcaagaggtctccatggataccgtgactgtatttccccaacccaaaagccaaggctggctggggtcacaaaaaaacttgctttctgatcagagagcttttatgcagaggtggcaacttaagtgcaaacatcgcaacccacccgttgcctcccctggaaagaaacacagtattgaacagcctcctcctcagggtgggagctcatgctcccaggttgagcttggggctcggggaagcagcagcggcggcaggaggcacaatgtgaagttgcagagttcacaccggcctggaggcgcgctcctgacacaccagcgcccctggtgctggagcctgctcgggcatagcacacctcccccaagaaacatcctcccatgtggtgtcgctttttttttttcagacagagttttgctcttgttccccagattggagtgcaatggcgcaatcttggctcactgcaacctctgcctcccaggttcaaagcaattctcctaccctcagcctccccccagtagctggcattaccaggcatgtgcccatttttgtattttcagctaacttttgtattttcaacaaaagatggggtttcaaccatgttggccaagcttggtcttgaactcctgacctcacgagatccacccacctgggccttcccagagtgctgggattatgggcgtgagccactgcacctggctggttttgctctttcaaggtagttctcgtggactacttctttgaaaagtttccaaactaaggtaaccgatttgaattttatttttacttatttgagacagggtctcactctgtcaaccaggctggagtacagaggcgtatcatgcctcactgcagcctcaacctccccaggctcaagtgagcctcccgagtagctgggactacagacatgtgcccttttt

SEQ ID NO: 150779 - DNA, 608 bp, Homo sapiens
  misc_feature (1)...(608): n = a,t,c or g
gcgctcagaaatagggcttgaggctcaagcagaaactgaagctctcattcaaatgaagatgctctctctaccgcacgatcggcagtgagaaaaggaggatgaaaatccttctcatcacaaagagcttgaaggaacccacgtccccagattagcaaccctagagttcatctgctcaggccgggaaaatgtgtaagcttcccttggatcagctcccaggcctcacagcacgggagcagtgacccagtaaggaaacgtccactgctgtgcctttcctgttggaaattgttccgaaaaatacagtgaaactggcccaggccccagtagctcatgccctgtaatcccaggcactttgaaaggctgaggcaggcagatcatttgaggtcaggagttcccagaccagccctggtccaacatggtgaaaccctgtctgtactaaaaatacaaaaattaggcgggcatggtagcacgtgtctgtaatcccagctcctcaggaggctgaggcagaagaatctcttgagcctgggaggcagaggttgcagtaagctgagatcacatcattgcactccagcctgggtgacagagncaagactctgtctcaaaaaaaaaaa

SEQ ID NO: 150780 - DNA, 218 bp, Homo sapiens
tccggggatcgggtcgaggggagaagaaaaaggggtgctcgggagcagcccccggctacctcccctggaggcacagagggcgggggccttggcgaatggctttcttgctggccacttgcggaggtttggattcaggatttgttcctagtgtccaagattttgataagaaacttacagaagctgatgcttacctacaaatcttgattgaacaattaaag

SEQ ID NO: 150781 - DNA, 1979 bp, Homo sapiens
atggagctaagcgtatctcctcctcccctcactccatcaacccccacgcgacacaactttccggaagtaagcaaaatccgttatcaaggtgaaactccggggaccaggctccacagctgccataaactggatggcacgttagaagccgtccggggatcgggtcgaggggagaagaaaaaggggtgctcgggagcagcccccggctacctcccctggaggcacagagggcgggggccttggcgaatggctttcttgctggccacttgcggagtgagtagaccccgagggtctgggagaggggccggcccctacccctgagtccccggggtcccggccgccaggccggagcgcgaatgtcgtgctcaccctgcctccttcccgccgccccctgggggtttggattcaggatttgttcctagtgtccaagattttgataagaaacttacagaagctgatgcttacctacaaatcttgattgaacaattaaagcttttttgatgacaagcttcaaaactgcaaagaagatgaacagagaaagaaaattgaaactctcaaagagacaacaaatagcatggtagaatcaattaaacactgcattgtgttgctgcagattgccaaagaccagagtaatgcggagaagcacgcagatggaatgataagtactattaaatcctgtagatgcaatataccagcctagtcccttggaacctgtgatcaggcacaatgccttcccagactgccttacctccagaacccgctcagttgtgtaagtcagagcagcgtccatctttcctaacaagttggacctgtgttaagctaccttgggacatcatcagactccaacacccaaatagtaccaggcagtgggaacttcaccaacctagcagcaagtctgactccttcccaagccatgtcaactttgtctccaaatacagtcccagagttctcttactccaggcagtgaaggatgaattttatgatgctgatggaattccatcaaagtgggctcatccccaaagcgcttaatagattcttctggatctgcctcagtcctgacacacagcagctcgggaaatagtctaaaacgcccagataccacagaatcacttaattcttccttgtccaatggaacaagtgatgctgacctgtttgattcacatgatgacagagatgatgatgcggaggcagggtctgtggaggagcacaagagcgttatcatgcatctcttgtcgcaggttagacttggaatggatcttactaaggtagttcttccaacgtttattcttgaaagaagatctcttttagaaatgtatgcagacttttttgcacatccggacctgtttgtgagcattagtgaccagaaggatcccaaggatcgaatggttcaggttgtgaaatggtacctctcagcctttcatgcgggaaggaaaggatcagttgccaaaaagccatacaatcccattttgggcgagatttttcagtgtcattggacattaccaaatgatactgaagagaacacaggaactagtttcagaaggaccagttcccggggtttccaaaaacagtgtaacatttgtgggctgagcaggtttcccatcatccacccattttcagcctttttatgctggagtgttttaacaagaagatacaattcaatgctcatatctgggaccaaatcaaaattccttgggatgtcaattggggtgcacaacatagggcagggctgtgtctcatgtctagactatgatgaacattacattctcacattccccaatggctatggaaggtctatcctcacagtgccctgggtggaattaggaggagaatgcaatattaattgttccaaaacaggctatagtgcaaatatcatcttccacactaaacccttctatgggggcaagaagcacagaattactgccgagatattttctccaaatgacaagaagtctttttgctcaattgaaggggaatggaatggt

SEQ ID NO: 150782 - DNA, 749 bp, Homo sapiens
  misc_feature (1)...(749): n = a,t,c or g
atccctcaccctgaaaatgcatgccnagcacgtgttgtttccaggagctggtaaccctttgaggatgtaagctgtgtaccttccatcccggaaggaagtgggaaanccgtttgggaacccctgcctcagagggacccctcctatagagttgtgatgctgggagaattacggggaattgtgttcctcactgggatcgtgagccccaggactgaaaatgatcaagaaatttctgaagacacaagatcacatggggtccctactgggaagatttcaaaaggatatttctcagggtctcaagtttaaagaagcctatgaacgagaagtcagtctgaaaaggccgctggggaactcccctggagaaagactgaacaggaaaatgccagattttggtcaagtgacagttgaggagaagctaacccccaggggagagagaagcgagaaatataatgattttgggaacagcttcactgtgaattccaaccttatctcacatcagagactccccgtgggagaacaagaccccataagtgtgatgaatgtagcaagagctttaatcgaacttcagaccttattcaacatcagagaatccacactggggaaaagccctatgaatgtaatgaagtgtgggaaggccttcagccagagctcacaccttattcagcatcagagaatccacactggggaaaaaccttatgaatgtagtgattgggggaaaaccttcagctgtagctctgacctcattctgcatc

SEQ ID NO: 150783 - DNA, 384 bp, Homo sapiens
  misc_feature (1)...(384): n = a,t,c or g
ataagggatatttgacctatatctaattatataataagaaaaatgtattttcnnnnnnnnnnnnnnggaaagggggttcacttttgggggccccccgggtggaagggcccaattttggtttaataaaannnnnnnnnnnntaagaaaagggaattccctgccctaccccccccgggaggggggaataacgggctgggcccccctgcccgggaaaatttggttttttaaaaaaaaagggggttcccccttgggggcaaaaggggcttgaacccccgaccccaggggaannnnnnnnnntaacctcccaaagggggtggaataacggggggggccccccgccccggcaaaaaaaggtctttttctctacaaaaaatcttataaaaa

SEQ ID NO: 150784 - DNA, 4174 bp, Homo sapiens
gcggccgccctttttttttttttttttttttttttttacaaagatagggtcatttattcacgttatattatttaattttaaagtgttaaaatacagtgtctgttttgaacaccaagatcagacacagccccctagcacaatgggtaaatacacacatttgcatacaacaggaaatcaaaaatacacagcacaacaggtctctggggacatgaaagccggtcatcctgggctatgcagagccccccgcccctgggcagttcagcagaggaccctgtccagggctgaaggccaggcacagcatctcctttacttgtccttgtgccacctctgcccttctctgatctattcccaaagggccagattcacacaggggtcaccagcatggtacccccaaaacccccagcaaaccagaaaagggcacggcacatggacaactttcgcggtacataactccccaggaaaaggaaattgctcccctgaaccccccagccctgaaatcccccagtaaggaaaacagggacccgcgggatctcacgggaccagggcaaacatcccgggccctaactgttgcccctggctgtgcccttgggccccaggtggagcccatgaaagcactacgtcggcaaatggggggagcagtatttccccttggttcctaagaatgaacccacatacttgacatgaatgagaaggtaaccaaaaaaaaaaaaaaaaaacaaaaaaaaacaacaagaaaaggtagagtttggttttaagagtaaaataacacagaagttaccactcagggcatttgtctgatttcttttaaggcactttggaaaagtcaggatctgcgggacagaaagagaggctttcattcttcttatttcccacaactccctctcaatgcagtcatttctagttttaataatatccttggtatagagtggggaactgacagagaaaatactttttgcatgagtcacagctgctctctgcaatagaaaataatttttaaccaatacaaagccttctggaaaaagaaccaagttagcatctgagatgcgcaaagcagtaaaggcacagataagactggggccaggcaccagctcagcctccacactgagggctggtacccaggagggcagtggtttggggtccgccacgagcacaaggctcaaccctgggattaggcagctgagtcttggaacctgagcccaggctggcacctggacaaaggcgctcagtggtaggagtgtcttgtgtcatctcatcccaggtggctcaatagctcccaacagaggtgggtttgtgacagacagacctgtgtgtgagcctcaactgtggtgtgagcacctgtgaaaacctgaggtggaacaggaggctttaggaccgaagttcttgggagggagttggggtgtgggtgcggctgaacttctttctagatcactaattaaaaggcacattcatgctggggaatggatagtctgtttgaccctgagtgccacagtcaagttttaggggacaggcaagaggcaaaggaacaaaaagggagacgaaggaaggaatgagaaaggcaggggaaaagaggaaggaggaagaactggtaacaaagggtgggccacggagtgtggctagcagagcctctgagggaggtggcccccaccagaacagaggctccctctgcctggggaggtgcaaagggctggtaaacaacctgactgctgttatttacaaccccccagcctaggggcctgaggggtcagtctaaggaggctgaggctccctccgccctgcccacctggggagggttggggaagtggagagttctgcacagtaggtgcagaggcttctgtctcccaggtatcctccccgaggtctggcaggataatgctgaccgggaggccttacctgccaaggggccagagggtgattttgctcttgagaaaacctggcctgccagctaaatcataggcctatttgtggccactacagcatatatttatttttctccctaaaaaatgctcaatacccctccccatatttaaaacaccagaataaaaatacttaggaaattcaagtttacatagcatgccaagaaaaataaattgtcatgacttaacattaaacagctatgcaaatttggatcaacacaaaatcaagctagatcataattagaactcgatctgttctttctttaaaatactacaaacctactatttaaaaaaaaacacaacaactttacattcagaaatcagacaatctggagataggccactgaatgcgagaaacccaaggcttttgctctgatgctagagttgccctggaatccacacacataggcaaaaggtccagggctcaagttttaaatccttttgctaagaaaagacatatgacacattgattgcagtggttgcataccactgaaagaagggggtggggggaggacgtaacattaagaatggttgaaattttgtgtttttctgttaaattacaactaccaaaaagatgacaccaatccaattttagcagcactctccgaattttcgcgaataagaaaaccataatttaaagaaaaattctaacctatttcacgacaatttagcaattctatcaccgggaatgtgttccacggccaccaaattttgggatgtctacagttctgactcttgggtgacactgcgaacacatcaagaaacccgcaaaggcataaacaccttgcagagctaagaattcacatgccgagccaagttgggggcaaaatatcccacctgtcctggtcatctggaaagccatctgaatgatgagccaaggggagctgtcactcagactggtaaaaatgagagggaccagcccagcagattggcagagacacacagcagaggtccctggctaatttcaggtctcttatccgtgtaccaaaacgctagctcggtgtcccgatgtccactgtgatttgggtatacaatgggtatctctgtacatccagcacctggtaggtgagtgagttcaaaccatcagagagcattgtctcctttgtgtgtgcaattcggtcaaacctctgaggattgggttcatttttcttgtctcttgagtggcggatcatgcgacacgtcccgaccacagcatttgggcgagatatagacatgcctctaaaaactaatctgttaaaaatgtcatcatcttctcctccccagccccaataattattaggaaatccattgatggttagaaactgttgtttacttgaagcagagacacctccaaaatactgaacataaggtaggctgaatccaaacttatccattgcaacggaaatgtgccgtggctgtgaaaaacacctgtacgcattatgatcattcattggaatgaggtccacgtcactaaacacaaagcaggtgtagtcatagtccttcaaggcttcttgaaagccaacattgaggagcttagcacgattgaatatagtgtctcccgcctggttgataacatagatgccatagtccagctgctggcgctgcaggactgggtgcaaataatatagccagtacttgaggtgctcctgccggttgcggaatggaatgatgatggccaccttgtgaggagagacgcagtccctgggggcatagcggccgcccatcttcacatttgggttctgctttgccacgagctccaggtccacaggcatgttaaactcaatcagcatggggcccacaagcagcggggactcctcagggcaggcgggcagcgacagtgcggtggtgtggggcactgggaccgaggtcaagttgctagcggggccagggccagaatccacgactgggctggagtcgccacccgggcgcggctgggaggaggcgcctagaggaggcggcggccgggcccctccggtccggaggtccccggaggactgcccgatggcggcggcactgttcgacccgccctgcagcggtgtggagactccgaccagttggggcaggcggctcaggtcgcggccagccaggtagtaaacgagggtgacgccaaggtgcagagcgcagacggccacgagcaggcggcaggcccgctgtagggacgcgcctggcatcgcggcgctccggctcaggagcggctcccgaagcctcatcttcccgccgccgctttaagaagggtgtgggctacaggaggggaggcgacccgcccgcggcgccgcaggcgc

SEQ ID NO: 150785 - DNA, 1137 bp, Homo sapiens
aaataacagaatttcagaacaaaagattagagggcagaaatgctgtatgtgctgatagagtcagagagggcccggatcaagaaactgcaggaagagaaaactagaaacctagaatcgtctagaaaactagaacctacaatcgtctcagaacacaaaggaggcttgaggactgagcagactgacatagatgtacttggacaacacctcaccaaggagcatgtctcttcccactcacaatccccaatacgagattcacagtggttcacgctgagtccacaggaaaaattggcctggggtacatcatctaaagatcctaggattgctgcaggtcagcagtctccactggaaaaaaagatcttgaatctaggtggtgtgcatacaacagcagcaagacagttgataatgcagaaatatcaggaggagtgtgaaatactctgtagggagcaagctgtttctcttgactactggcttgccaaagcagagtcttattataataaaataatagtggaaatgatgaaagaagagacaggcaatgaaatctagaaaaaaatggaggagaaaacaacccagagcgtagaaggactaaaacagtactgtttggtacctgagagagagatgaaacacatagaaaggcacatacatcaaacaggaaaggctggagaatttaagaacaaaccatttagacaagtactacaaccccccaatgaaacaaaattaccaaaaattatgccagaagggcatggcatccagaacgcacagagaagaaagcaggtaaatgagagggaacagatgcagactaaggatcaccaggaacgcatgattcgagggagagaacttgcagaacaaagactcaaggagagaatcttgagaagaagccagagccagctacttacatatgagaagcatgagagagtaaaagagataaaggagtttgaaagagttattgcgtatcttcttttccaaccatgcagtagaagtcggattaaagtgagtattcttatggataagtctcagaatggagagaaggtgaatacaattgtgaaaccatatcaaagaaaattcttggcaatgccaccctttttaagaagtcaaataggaaaaataagagattaaagtttcaatgctgttatgataaaa

SEQ ID NO: 150786 - DNA, 555 bp, Homo sapiens
atgctgtatgtgctgatagagtcagagagggcccggatcaagaaactgcaggaagagaaaactagaaacctagaatcgtctagaaaactagaacctacaatcgtctcagaacacaaaggaggcttgaggactgagcagactgacatagatgtacttggacaacacctcaccaaggagcatgtctcttcccactcacaatccccaatacgagattcacagtggttcacgctgagtccacaggaaaagtatgcttgttcatatgaaaggaaagatcctcttattaaaagagcattcattattttctaccataggaatgcagtggtttcccatgggggaaatggccctgctgtagtcctccctattagcagatttgttctgacacctcctacatttgaatctaccttgccttttttatcttccagattggcctggggtacatcatctaaagatcctaggattgctgcaggtcagcagtctccactggaaaaaaagatcttggtaagtaaattatcttcacatcatacagtttggaactacacagagaaggaatcttag

SEQ ID NO: 150787 - DNA, 5052 bp, Homo sapiens
atggaggagaaaacaacccagagcgtagaaggactaaaacagtactgtttggtacctgagagagagatgaaacacatagaaaggcacatacatcaaacaggaaaggctggagaatttaagaacaaaccatttagacaagtactacaaccccccaatgaaacaaaattaccaaaaattatgccagaagggcatggcatccagaacgcacagagaagaaagcaggtaaatgagagggaacagatgcagactaaggatcaccaggaacgcatgattcgagggagagaacttgcagaacaaagactcaaggagagaatcttgagaagaagccagagccagctacttacatatgagaagcatgagagagtaaaagagataaaggagtttgaaagagttattgcgtatcttcttttccaaccatgcagtagaagtcggattaaagtgagtattcttatggataagtctcagaatggagagaaggtgaatacaattgtgaaaccatatcaaagaaaattcttggcaatgccaccctttttaagaagtcaaataggaaaaataagagattaaagtttcaatgctgttatgataaaatcatatctcttaagtgaacccttttttttttcaaatgctcgttctctccagggttcagtgaatattcccatttgtatcagatacagatagatagttctgcacttgaaaattagcttaacttttttagttgacttgcatttgttcaagttgcatatcctttctagtgttcagtgtcctcatctttaaaatggcaataatatttgatggcatttatggaaggactgttttttttgtgaagtgtaggtatgtattagttgtttcataaatgttagtttccccacttggaaagaccggggttgggcaatggtggtgaataaagaattgttctaatctacttctcttattctccctgttcccagccctccaaggttattttgatgagattgctatagtttagtatatggtctttaatatcataccttcatcagataactactagccagcccctaaaagtgtaacttgctctgtacaatttatttgaatgagaaacttaattttgagagcctcctacatgctaggcattatgttagttactgaaggtgaataaagagaagtctctgcccttgaataattttcaactaatggcatagatcactctataaacagataatgtagtaaataaaggttacaatagaaaggtacagggtgctttacaaaggacggattctaacctggcccaggtgagcagggtgaaaaggaggaaggttagggaagggagtattatagtctgtcatgtttcttccagctttttttgtcacttcctatcacccacttaagcaagaccttcctaatgcttggatccactcagggataatcaaactcagcctttctcaaactcatgtttttggcactcattgataaatcagaaagcaaatttataaatttagtgagaattacagttgtcaagcagaatgaaatttgtgttttctagtcagtttattttcttcccagataccagaaagttgggaaagcaggggttcagagttggtaagcagagaagcaaataaatggaaatagatgccctcaggaatattatgcttaagttgtgataattctgatgcccaccttgctttactagcagaacaccctttaccctggatactgctaggtcagccactgatacaaatgttctgtgtctgtgctcctcagtacagtagcccttgctacacgtggctgttgaggcatttaaaatgtggctggtgcagctgtggaatggaatgtttaattgaatttcatttaaatttaaattgccacatgtggcaagtgactaccctgttgcacagtgtagcactggataaacataacttctgtgttctagattccagtcccaccattagctttctgtttttgacagtgtttgctggtatgataggtcactgttcattttacattactatcagtttagtttcctttgcatttcagaggctccctaatcccttaaagagatttaaaaatcaatgtagaccacttctgtgtgaaaataagatgactgaatttgctttgattggaattaggaactgacctctctttgctagttctggaatttggccaggatgcacatcaaaatctcattcctaccctcctgatttgcctcatggaaacttcgttgctgtgtctgttctctggtcctctattgctatgtctcagctttagattctatgttttgcatagaaatggatcatcagaatgcaacaggcagaagacttagaagtgcaaatcagtagggtaatgacaagccctttgagctgagtgggactgaaaagtaacctaacatataacctattagtaattgtttaccatgaaggttttcagtgctggacacataaattgctgagttcaactgccctctttcccctccaaatctagcataaaagcaactggtgctctcagggcaatttcacacctaatacggctaagaataaaagtctatgtttcaggaactcagtttgtccaaacctgcatccatcatctacctcaaattatatccaccttttcatttctttgcactgtgtctgcttaaatcttgagtcacacttaatgttttttttttggtcttttttctttttaatgtgaaatagaatatacaatacacaaatgaaaatgtatatttagaagaacaataataaatgtccaggtgcctgttgctcagactgagaaatggaacattactacatcccaggagcctcgtatgctctcattcatatctctctcccctgcagccagaggcaaccactatcctgaattttgtataactgtcacctagcttttatagattttactgtctgtgtatccctaacagttgcttatttatagcctttatataaatagaattatactgtatatgactgactacttttgctcattattatttttggattcatccatgttgatgtgtgacactgtagttcatttccatgacatgaatatgccacaacttaattatatattctgttgatgtcatttagttgtttccagtttttgttttatttttcttttaaaaatgatacttagataaacattaacatgtttaatcttatgttctggtgactgtgtactagatatatgtatgatatataaattgtggtacatttatttgacaggcctgatcttgaagcctgttagatttctgttcctttgtggcattatgcctgtaagcctgttctgtagagtctggcacatgttagcctcttaatagatatttgttgaaagaaaggacatttgttaactgctggagacaggcccaaaatacataaatagctgataacagaccactttagctttttactcatcttgtccaggtacaatcatagtcaacctctgtttatgcttatatttcagttgaggtactaaaatatttgtttacttagttggttttcagtgagcttccagtacaggatttgtttctctttctgtcacttttcccaaaactttcactccactgccttctagaaaagatcacccacatgtcatctcctcaaggcacctgcagcacgaaagttttatttctgaacaaaagggtccccagagaaggagacaaggagtctcctttcagtacgaggttgctggagtccctagagggtcaaaggctgtgtaataacagttccttcttgtctgctggacaaaagcttctgagccctcaagcaccctgtgacttagttctgatagagtactgagtttggaaatggcagagtggggacccaaaacaaatcttccaattccaaattcagttttatccaccttttcaaataagattaaaaaatgttaatgtctgttgatttgtgtgtgttgaaccactcttgtatccctgggatgaatcccaattaattgtggtatatttttgatatgttgttggattcagtttgctaaaattttgttcaggatttttgtgtatattttcactaggaagattggcctgtaattttctttttttttgtattcttctctgcttttggtatcagggcaatgcaggcttcataaaatgagttaagaataattccttcctcttcagttttttttaaatattttgagaagtattggtattaatttttctttgtatgtatggtagaatttgacaggaaagccatctggtcctgggcttttctttattgagacacttttaattactgattcagtcttattactcattgttggtctgttcaagttttctatttgttcctggtgaaatgtctacaaaaataacaaaaattagctgggtgtggtggcatgtgcatgtagtcccagctacttagggggctgaggcaggaggatcgcttgaacctcaggaggttaaggctgcagtgagctggtattgcgccactgtgttgcagcctgggtgacaaagtgagaccctatctcaaaaataaaaaaaattcatatggaaccacaaaagagccccatccaatagttaagctatagtaatagctttgtaactgttatagtagaaaccaaatcatcatggtaccggcctaaaacagacacatagaccaatggaaagaatagagaacccagaaataatttcatatacttacagccaactgactttcaacaaaggcaccaagaaaggacacccttttcaataaatggtgctgggaaaactggatatccatatgcagaagattgcagctaggctcatatctcttaccatattaaaaaatcaaccaaaaatggattaaaggcttaaatgatagatccgaaactatgaaactactaaaagagaatataggggaaatgctcaagaacattggtctaggcaaagattttatggttaagacatcaaaagcataggcaacaacaacaaaaaataggcaggtgggactatattaaactaaaaatctgcacagcaaagaaaacaacagagtgaagagaccaactgtagatgggaacaatattttcaaattatccaacaggggactaatatccagagtgtacaaggaacacaattcaacagtaaaaaaaaaaaaaaaa

SEQ ID NO: 150788 - DNA, 366 bp, Homo sapiens
aagaaacaaatctttctggaactaataagcatctatagcagagttgcaggatacaaaacatacacaaaagtcagttgctttcctatataacagcaataaacaattgaatttataaattaaaacacaatgccatttatattagcttgcaaaaatagaaacatttacctttaaacttgacaaaataggtacaagagatatatgagggaaactatgacacatttatgaaataaatcgaagatataaacaaagaaatatttcaagttcatgagtaaaaacgctttattaagatgccaattcttcccaatttgatctatagatacaatgcattcccagtcaaaatctcagaaagttacttggtggatatca

SEQ ID NO: 150789 - DNA, 875 bp, Homo sapiens
gtaaacaaaactttccaacagccagcatatggaggtagttttaccccctttaccccttaaaaattttttttttccctaaagcctttaatttttgtagggaggttggcccaatatgtcccccccccaaaagaaaggtcctttcccaaaattcccaagtaggtttttatacggccccccataaggaaaaaaattttaccttgccagcccgggttaaatttggcccccccaagggttctttaaaacggccccccctttttttttttttttgagatggagttttcgctcttgttgcccaggctggagtgcaatggcgcaatctcagctcaccgcaacctccgcctcccgggctcaagcgattctcccgcctcagcaggaggattactgtaatcccaggtagctgggattacacgcctgcgccaccacgactagctaattttgtacttttggtagagatgcgatttcaccgtgttggctaggctggtctcgaactcctgacctcaggtgatccaccctcctcagcctcccaaggtgctgggattacaggcatgagccacagtgccggacattatgggaaaattttttgagggactaaactaatctccacaagtagcaatgcatttaggaaatatatttaaaggggaaaaaaagactcatagtttcactcagtcatgttcataatttttagtatttgggttttttagcatgtaatttgtgtacatagttttggtttttgtaaacttgcataggggttttctggtacaaactggaaaacctgctagacaaattctgaaacatctgtaatgcttgtaggtagttgttgtaacactatgcccacacataatcactttccatattgctgcatagtctttgtaacc

SEQ ID NO: 150790 - DNA, 942 bp, Homo sapiens
  misc_feature (1)...(942): n = a,t,c or g
tttttggattaaacaaccatttattatggggcaaactgcaagcaagcactttgaacacatggatttttcggaagaaaggtgacaagaaaatcagagaaaacatcattgcatttttagggggaaaactacaaatttctaatttagctgcagaaaatataattagagaacacaaataaaatgtactagtgaatatatgcttctctagacccaaacaaaaactatttgcaacgtaattaaaacaggttaagtgctgtgaaaaatagaaacatggtgacatagaagagcctgacgggggaacctaaccgagtcctgagagtgtaagccagcttccccaaggaagtgacacttcaaccgagatctgaaggacagcagtctataaatgaagtagagaaaggcagtgctgagggcagagggcacctgcatgggcagaggctgggagcaagatgagtacagcgtgccccaagtaatcaggaagtgccagtggctggagtgcagagacagcagcgcagttttagctagagatgagagtaagggaggcaagggctggatcatcctgtctcctgtaggccacagcaagatgtttggtctttatggcagaggaaaagcatttattgaagtgacattttaaaaaattactgatggccgggcgcnagtgtcacgcctgtaatccccagcattttgggaggccgaggcaggtggatcacctgaggtcaggagtttgagaccagcctggccaacatggtgaaaccccgtctctactaaaaaatacaaaaattagctgggcatggtggcgtgcacctgtaatcctagctactcaggaggctgaggcaggagaatcgcttgaacctgggaggtggtggttgcagtgagccaagatcacaccattgcactccagcctgggtgacagagtgagactctgtctcaagaaggaaaaaaaaaaag

SEQ ID NO: 150791 - DNA, 2325 bp, Homo sapiens
atgcaccacgggaagagggagctgctgcccaagatggacaggaggtggcactggggcagacagctgcttctcaacaggctgggcgccgtgtacacagaaggtgggttcgtggaaggcgtcaataagaagctcggcctcctgggtgactctgtggacatcttcaagggcatccccttcgcagctcccaccaaggccctggaaaatcctcagccacatcctggctggcaagggaccctgaaggccaagaacttcaagaagagatgcctgcaggccaccatcacccaggacagcacctacggggatgaagactgcctgtacctcaacatttgggtgccccagggcaggaagcaaggcacctgctgcacagggacaggggaccggctggagacagggccaggcggggcgtctggggtcaccagccgctcccccatctcagtctcccgggacctgcccgttatgatctggatctatggaggcgccttcctcatggggtccggccatggggccaacttcctcaacaactacctgtatgacggcgaggagatcgccacacgcggaaacgtcatcgtggtcaccttcaactaccgtgtcggcccccttgggttcctcagcactggggacgccaatctgccaggtaactatggccttcgggatcagcacatggccattgcttgggtgaagaggaatatcgcggccttcgggggggaccccaacaacatcacgctcttcggggagtctgctggaggtgccagcgtctctctgcagaccctctccccctacaacaagggcctcatccggcgagccatcagccagagcggcgtggccctgagtccctgggtcatccagaaaaacccactcttctgggccaaaaaggtggctgagaaggtgggttgccctgtgggtgatgccgccaggatggcccagtgtctgaaggttactgatccccgagccctgacgctggcctataaggtgccgctggcaggcctggagtaccccatgctgcactatgtgggcttcgtccctgtcattgatggagacttcatccccgctgacccgatcaacctgtacgccaacgccgccgacatcgactatatagcaggcaccaacaacatggacggccacatcttcgccagcatcgacatgcctgccatcaacaagggcaacaagaaagtcacggaggaggacttctacaagctggtcagtgagttcacaatcaccaaggggctcagaggcgccaagacgacctttgatgtctacaccgagtcctgggcccaggacccatcccaggagaataagaagaagactgtggtggactttgagaccgatgtcctcttcctggtgcccaccgagattgccctagcccagcacagagccaatgccaagagtgccaagacctacgcctacctgttttcccatccctctcggatgcccgtctaccccaaatgggtgggggccgaccatgcagatgacattcagtacgttttcgggaagcccttcgccacccccacgggctaccggccccaagacaggacagtctctaaggccatgatcgcctactggaccaactttgccaaaacaggggaccccaacatgggcgactcggctgtgcccacacactgggaaccctacactacggaaaacagcggctacctggagatcaccaagaagatgggcagcagctccatgaagcggagcctgagaaccaacttcctgcgctactggaccctcacctatctggcgctgcccacagtgaccgaccaggaggccacccctgtgccccccacaggggactccgaggccactcctgtgccccccacgggtgactccgagaccgcccccgtgccgcccacgggtgactccggggccccccccgtgccgcccacgggtgactccggggccccccccgtgccgcccacgggtgactccggggccccccccgtgccgcccacgggtgactccggggccccccccgtgccgcccacgggtgactccggggccccccccgtgccgcccacgggtgactccggggccccccccgtgccgcccacgggtgactccggcgccccccccgtgccgcccacgggtgacgccgggcccccccccgtgccgcccacgggtgactccggcgccccccccgtgccgcccacgggtgactccggggccccccccgtgacccccacgggtgactccgagaccgcccccgtgccgcccacgggtgactccggggccccccctgtgccccccacgggtgactctgaggctgcccctgtgccccccacagatgactccaaggaagctcagatgcctgcagtcattaggttttag

SEQ ID NO: 150792 - DNA, 9761 bp, Homo sapiens
atgctcaccatggggcgcctgcaactggttgtgttgggcctcacctgctgctgggcagtggcgagtgccgcgaaggtaagagcccagcagaggggcaggtcctgctgctctctcgctcaatcagatctggaaacttcgggccaggctgagaaagagccccagcacagccccgccagcagatccccgggcactcacgctcatttcatatggggacaggtgcccaggtagaacacaggatgcccaaattccatttgaatttcagataaactgccaagaactgctgtgtaagtaatgtccccatgcaaatattttgaaacaaaattttcttatgggccgggcgcaagtggctcacacctgcaatcccaccaggtttgggaggccgaggtgggtggatcacttgaggtcaggagttggagaccagcctggccaaacatggtgaaaccccgtctctactaaaaatacaaatattaatcgggcgtggtggtgggtgcctgtaatcccagctactcgggaggctgaggcaggagaaccgcttgaagctgggaggtggagattgcggtgagctgagatcacgctactgcactccagcctgggtgacagggcgagactctgtctcaaaaaatagaaaaagaaaaaaatgaaacatactaaaaaacaattcactgtttacctgaaattcaaatgtaactgggcctcttgaatttacatttgctaatcctggtgattccacctaccaacctctctgttgttcccattttacagaaggggaaacgggcccaggggcagggagtgtggagagcaggcagacgggtggagagaagcaggcaggcagtttgcccagcatggcacagctgctgcctcctattcctgtgcaggaagctgaaagccgggctactccacacccgggtccgggtccctccagaaagagagccggcaggcaggagctctctcgaggcatccataaattctaccctctctgcctgtgaaggagaagccacagaaaccccaagccccacaggaagccggtgtcggtgcccggcccagtccctgcccccagcaggagtcacacaggggaccccagatcccaaccacgctgttctgctgcctgcggtgtctcaggccctggggactcctgtctccacctctgctgcctgctctccacactccctggccctgggaccgggaggtttgggcagtggtcttgggctcctgactcaaaggagaggtcaccttcttcttgggcgagctcttcttggggtgctgagaggccttcggcaggtcatcacgacccctccccatttccccaccctgaggccctctggccagtctcaattgcacagggatcacgccactggcacaaggagacacagatgcctcgcaggggatgcccacgatgcctgcatgtgttgcttctggttcctttcctccagttccaaccgccgcactctcccacaccagtgtgacagggggcccatcaccctagacttcagagggctgctgggaccctggctgggcctgggggtgtagggccaccctgcccttccccacctggaacctggcacaggtgacagccagcaagcaatgacctggtcccaccatgcaccacgggaagagggagctgctgcccaagatggacaggaggtggcactggggcagacagctgcttctcaacagggtgacttcaagcccaaaagctgcccagcctcagttccgtcagggacagagggtggatgagcaccaacctccaggcccctcgtgggggtggacagcttggtgcacagaggccattttcatggcacagggaagcgtggcgggggtgggaggtgtggtccctagggggttctttaccagcagggggctcaggaactgtggggacttgggcatggggccatcgactttgtgcccagccagctaggccctgtgcagggagatgggaggagggaaaagcaggccccacccctcagaaaggaggaaggttggtgtgaaacatcccgggtacactgagcattgggtacactcctcccgggagctggacaggcctcccatgtgatggcaaacaggccgacaggagacacggctgttgctcgtcttccacatggggaaactgaggatcggagtcaaagctgggcggccatagccagaacccaaacctccatcccacctcttggccggcttccctagtgggaacactggttgaaccagtttcctctaagattctgggagcaggacacccccagggataaggagaggaacaggaatcctaaagccctgagcattgcagggcagggggtgctgcctgggtctcctgtgcagagctgtcctgctttgaagctgtctttgcctctgggcacgcggagtcggcttgccttgccccctccggattcaggccgatggggcttgagcccccctgaccctgcccgtgtctccctcgcagctgggcgccgtgtacacagaaggtgggttcgtggaaggcgtcaataagaagctcggcctcctgggtgactctgtggacatcttcaagggcatccccttcgcagctcccaccaaggccctggaaaatcctcagccacatcctggctggcaaggtgggagtgggtggtgccggactggccctgcggcggggcgggtgagggcggctgccttcctcatgccaactcctgccacctgcagggaccctgaaggccaagaacttcaagaagagatgcctgcaggccaccatcacccaggacagcacctacggggatgaagactgcctgtacctcaacatttgggtgccccagggcaggaagcaaggtctgcctcccctctactccccaagggaccctcccatgcagccactgccccgggtctactcctggcttgagtctgggggctgcaaagctgaacttccatgaaatcccacagaggcggggaggggagcgcccactgccgttgcccagcctggggcagggcagcgccttggagcacctccctgtcttggccccaggcacctgctgcacagggacaggggaccggctggagacagggccaggcggggcgtctggggtcaccagccgctcccccatctcagtctcccgggacctgcccgttatgatctggatctatggaggcgccttcctcatggggtccggccatggggccaacttcctcaacaactacctgtatgacggcgaggagatcgccacacgcggaaacgtcatcgtggtcaccttcaactaccgtgtcggcccccttgggttcctcagcactggggacgccaatctgccaggtgcgtgggtgccttcggccctgaggtggggcgaccagcatgctgagcccagcagggagattttcctcagcacccctcaccccaaacaaccagtggcggttcacagaaagacccggaagctggagtagaatcatgagatgcaggaggcccttggtagctgtagtaaaataaaagatgctgcagaggccgggagagatggctcacgcctgtaatcccagcactttaggaggcccacacaggtgggtcacttgagcgcagaagttcaagaccagcctgaaaatcactgggagacccccatctctacacaaaaattaaaaattagctggggactgggcgcggcggctcacctctgtaatcccagcacgttgggagcccaaggtgggtagatcacctgaggtcaggagtttgagaccagcctgactaaaatggagaaacctcttctctactaaaaatacaaaattagccaggcgtggtggcgcttgcctgtaatcccagctactcgggaggctgaggcaggagaatcgcttgaactcaggaggcggaggttgcggtgagccgagatcatgccactgcactccagcctggagaacaagagtaaaactctgtctcaaaaaaaaaaaaaaaaaaaaaatagccaggcgtggtatctcatgcctctgtcctcagctacctgggaggcagaggtggaaggatcgcttgagcccaggggttcaaagctgcagtgagccgtggtcgtgccactgcactccagcctgggcgacagagtgaggccccatctcaaaaataagaggctgtgggacagacagacaggcagacaggctgaggctcagagagaaaccaggagagcagagctgagtgagagacagagaacaataccttgaggcagagacagctgtggacacagaagtggcaggacacagacaggagggactggggcaggggcaggagaggtgcatgggcctgaccatcctgcccccgacaaacaccaccccctccagcaccacaccaacccaacctcctggggacccaccccatacagcaccgcacccgactcagcctcctgggacccacccactccagcaaccaacgtgacctagtctcctgggacccaccccctccagcaccctacccgacccagcttcttagggacccaccatttgccaactgggctctgccatggccccaactctgttgagggcatttccaccccacctatgctgatctcccctcctggaggccaggcctgggccactggtctctagcaccccctcccctgccctgcccccaggtaactatggccttcgggatcagcacatggccattgcttgggtgaagaggaatatcgcggccttcgggggggaccccaacaacatcacgctcttcggggagtctgctggaggtgccagcgtctctctgcaggtctcgggatccctgtggggagggcctgccccacaggttgagaggaagctcaaacgggaaggggagggtgggaggaggagcgtggagctggggctgtggtgctggggtgtccttgtcccagcgtggggtgggcagagtggggagcggccttggtgacgggatttctgggtcccgtagaccctctccccctacaacaagggcctcatccggcgagccatcagccagagcggcgtggccctgagtccctgggtcatccagaaaaacccactcttctgggccaaaaaggtaaacggaggagggcagggctgggcggggtgggggctgtccacatttccgttctttatcctggaccccatccttgccttcaaatggttctgagccctgagctccggcctcacctacctgctggccttggttctgcccccaggtggctgagaaggtgggttgccctgtgggtgatgccgccaggatggcccagtgtctgaaggttactgatccccgagccctgacgctggcctataaggtgccgctggcaggcctggagtgtgagtagctgctcgggttggcccatggggtctcgaggtgggggttgaggggggtactgccagggagtactccggaggagagaggaaggtgccagagctgcggtcttgtcctgtcaccaactagctggtgtctcccctcgaaggccccagctgtaagggagagggggtgccgtttcttctttttttttgagatggagtctcactgttgcccaggctggagtgcagtgtcacgatctcagctcactgcaacctccacctcctgggttcaagtgattctctgactcaacctcccatgtagctgggactacaggcacatgccaccatgcccagataatttttctgtgtgtttagtagggatggagtttcatcgtgttagctaggatgatctcggtcttgggacctcatgatctgcccacctcggcctcccaaagtgctggaattacaggcgtgagccactgtgcccggccccttctttattcttatctcccatgagttacagactcccctttgagaagctgatgaacatttggggccccctcccccacctcatgcattcatatgcagtcatttgcatataattttagggagactcatagacctcagaccaagagcctttgtgctagatgaccgttcattcattcgttcattcattcagcaaacatttactgaaccgtagcactggggcccagcctccagctccactattctgtaccccgggaaggcctggggacccattccacaaacacctctgcatgtcagccttaccagcttgctacgctaaggctgtccctcactcattcttctatggcaacatgccatgaagccaagtcatctgcacgtttacctgacatgagctcaactgcacgggctggacaagcccaaacaaagcaacccccacggccccgctagaagcaaaacctgctgtgctgggcccagtgacagccaggccccgcctgcctcagcagccactgggtcctctaggggcccgtccaggggtctggagtacaatgcagacctcccaccatttttggctgatggactggaacccagccctgagagagggagctccttctccatcagttccctcagtggcttctaagtttcctccttcctgcttcaggcccagcaaagagagagaggagagggaggggctgccgctgaagaggacagatctggccctagacagtgactctcagcctggggacgtgtggcagggcctggagacatctgtgattgtcacagctggggagggggtgctcctggcacctcgtgggtcgaggccggggatgctctaaacatcctacagggcacaggatgcccctgatggtgcagaatcaaccctgccccaagtgtccatagatcagagaagggaggacatagccaattccagccctgagaggcaaggggcggctcaggggaaactgggaggtacaagaacctgctaacctgctggctctcccacccagaccccatgctgcactatgtgggcttcgtccctgtcattgatggagacttcatccccgctgacccgatcaacctgtacgccaacgccgccgacatcgactatatagcaggcaccaacaacatggacggccacatcttcgccagcatcgacatgcctgccatcaacaagggcaacaagaaagtcacggagtaagcagggggcacaggactcaggggcgacccgtgcgggagggccgccgggaaagcactggcgagggggccagcctggaggaggaaggcattgagtggaggactgggagtgaggaagttagcaccggtcggggtgagtatgcacacaccttcctgttggcacaggctgagtgtcagtgcctacttgattcccccagggaggacttctacaagctggtcagtgagttcacaatcaccaaggggctcagaggcgccaagacgacctttgatgtctacaccgagtcctgggcccaggacccatcccaggagaataagaagaagactgtggtggactttgagaccgatgtcctcttcctggtgcccaccgagattgccctagcccagcacagagccaatgccaagtgaggatctgggcagcgggtggctcctgggggccttcctggggtgctgcaccttccagccgaggcctcgctgtgggtggctctcaggtgtctgggttgtctgggaaagtggtgcttgagtccccacctgtgcctgcctgatccactttgctgaggcctggcaagacttgagggcctctttttacctcccagcctacagggctttacaaaccctatgatcctctgccctgctcagccctgcaccccatggtccttcccactggagagttcttgagctaccttccatcccccatgctgtgtgcactgagagaacactggacaatagtttctatccactgactcttatgggcctcaactttgcccataatttcagcccaccaccacattaaaaatcttcatgtaataatagccaattataataaaaaataaggccagacacagtagctcatgcctgtaatcccagcacattgggaggtcaaggtgggaggatcacttgaggtcaggagtctgagactagtctggccaacatggcaaaaccccatctctactaaaaatacaaaaattatccaggcatggtggtgcatgcctataatcctagctactcaggaggctgaggtagcagaattgattgacccagggaggtggaggttgcagtgagccgagattacgccactgcactccagcaggggcaacagagtgagactgtgtctcgaataaataagtaaataaataataaaaataaaaaataagttaggaatacgaaaaagataggaagataaaagtatacctagaagtctaggatgaaagctttgcagcaactaagcagtacatttagctgtgagcctcctttcagtcaaggcaaaaagggaaacagttgagggcctataccttgtccaatctaattgaagaatgcacattcacttggagagcaaaatatttcttgatactgaattctagaaggaaggtgcctcacaatgttttgtggaggtgaagtataaattcagctgaaattgtggaacccatgaatccatgaatttggttctcagctttcccttccctgggtgtaagaagccccatctcttcatgtgaattccccagacacttccctgcccactgcccgggacctccctccaagtccggtctctgggctgatcggtccccagtgagcaccctgcctacttgggtggtctctcccctccaggagtgccaagacctacgcctacctgttttcccatccctctcggatgcccgtctaccccaaatgggtgggggccgaccatgcagatgacattcagtacgttttcgggaagcccttcgccacccccacgggctaccggccccaagacaggacagtctctaaggccatgatcgcctactggaccaactttgccaaaacagggtaagacgtgggttgagtgcagggcggagggccacagccgagaagggcctcccaccacgaggccttgttccctcatttgccagtggagggactttgggcaagtcacttaacctccccctgcatcggaatccatgtgtgtttgaggatgagagttactggcagagccccaagcccatgcacgtgcacagccagtgcccagtatgcagtgaggggcatggtgcccagggccagctcagagggcggggatggctcaggcgtgcaggtggagagcagggcttcagccccctgggagtccccagcccctgcacagcctcttctcactctgcagggaccccaacatgggcgactcggctgtgcccacacactgggaaccctacactacggaaaacagcggctacctggagatcaccaagaagatgggcagcagctccatgaagcggagcctgagaaccaacttcctgcgctactggaccctcacctatctggcgctgcccacagtgaccgaccaggaggccacccctgtgccccccacaggggactccgaggccactcccgtgccccccacgggtgactccgagaccgcccccgtgccgcccacgggtgactccggggccccccccgtgccgcccacgggtgactccggggccccccccgtgccgcccacgggtgactccggggccccccccgtgccgcccacgggtgactccggggccccccccgtgccgcccacgggtgactccggggccccccccgtgccgcccacgggtgactccggggccccccccgtgccgcccacgggtgactccggcgccccccccgtgccgcccacgggtgacgccgggcccccccccgtgccgcccacgggtgactccggcgccccccccgtgccgcccacgggtgactccggggccccccccgtgacccccacgggtgactccgagaccgcccccgtgccgcccacgggtgactccggggccccccctgtgccccccacgggtgactctgaggctgcccctgtgccccccacagatgactccaaggaagctcagatgcctgcagtcattaggttttagcgt

SEQ ID NO: 150793 - DNA, 548 bp, Homo sapiens
ccctggtgatttaggcttgttttgtcgcccaggctggagggcattggtgcaatcttggctcattgaaacctgtgcctcctgggttcaaacgattctcctgcctcagctacccgagtagctgggattacaggcacccgccaccatgccccgctaatttttgtatttttagtagagatggggtttcgccatgttggccaggctggtcacaaactcctgatctcgggtgatccgcccgcctagcctcccaaagtgctgggattacaggcgtgagccaccgcgcctggccgccttgtccaatttctaaggtcttggacaggtacccaccccactgaaacaggcaacacttctttctttactggacacatccccttctctcccagccatattttttcttttctttttttgagacaggttctcgctctgtcacccaggctgaagtacagtgtggtgatcactgctcactacacccttgacctactgggctcaagggatcctcccgcttcagcctcccgattaggaactacaaggacgcgccaccattcccgcta

SEQ ID NO: 150794 - DNA, 934 bp, Homo sapiens
cattgccaagcaatatcaagatgctattcgagcacaccgagcaggacggaaagtcaactttgctgaattgcctgttcctccaggtaagtggggcatggcctaggggctctgtgaggaggtggtccctgggcaagaagggaatgggggacagccagtgattcccacttctcatgcgtctgcctcccctctgtggagccatccatcccagccatgccccagcagagccatgccccagacagggccccgggtagctttgtgcttctctgaggctgctccctgcccctcccatgctgtctctctcccacaggatttccccccatccctggcctggagtccactatgggtgttgaggaggacgcagtggcagcgacattggcagctgcagagaaactggcctctgcagaggattcagccccgggtgtataaagacgagtacgagcctcttgggcacctgcagggtgagcccccagcacaggccccagtggccaagaaacctgcacggcccacagtcccttcatcccagcgcctgcctgagcccagggcctcaagttctaaggagtcaccgagtccatctgtgcgggagcagctggcactgctggaggcacggaaactgcagtatcagcgggcagccctgcaggccaagcgcagccaggacctggagcaggccaaagcctatctgcgggtagccaaatggcttgaggctcagatcatccaggcccgatctggcagacctgttgatctgtccaaggtgccttcgcccttgacggatgaggagggtgacttcatcctcatccaccatgaggacctgcgactctcccagaaggcggaggaggtgtatgcccagctgcaaaaaatgcttctggagcaacaagagaagtgcctgctgttctccaagcagttcatgcaccaggggcaacgtggctgagaccacccg

SEQ ID NO: 150795 - DNA, 457 bp, Homo sapiens
agaagtgagagcccaaaatgggtcttcttacctctctggtacattctgtgctcttctctggtctgacatccgcccaggttcatccagaaaaagatggaaatgatttgaacaggataagctagggtgaggattagacacgatgagttcagctggagacactcatggtagagtctggaggtctctttgggggatcacttccaaaagtgcagatttttagaaaaacgagaaaggttctggaaagggatgttttccttctgctcaatggcagtttcaggtttcctagctgccggggcaggcctgaagcctcggtcaggaggcattgagtctttcactctccacggaggtcttggactgagaacttcaagttccaaagggatgaggtgtcggcttcgcccttaggagcctggagggctctgaccaaggagaagggcggagcccagccactggaaggtttgtt

SEQ ID NO: 150796 - DNA, 370 bp, Homo sapiens
ctgctggcgaaagagccaacaaaacgctgggtgctgccaccgtgacaccgactttaggaccccggcctcggatggagaaaggagggtacggagccaccacataacttcctaatgtcttcaaatagcgaaagtgctagccggaaactgccggctgggtttacctattggtgctcgtgtgggactagcagattcgagaaaccagcgggactggaacctagtacacttcggcctctcaaagtgctgggattatagaagtgagccaccacgctcggcaaatgtttcaattttattcacaaaagtatactttacccaattgttgtaaactataaatattaatgtttaaaataaaatttttcttgactcaaaaaaa

SEQ ID NO: 150797 - DNA, 799 bp, Homo sapiens
atgagggccctcactggggtgtctctgcatggggaagcaggagtctgttccttttggccggctgctgaacctagggaggcagcgtgggatggagttggcaaacatcctgcaagtccacgacccatgaagagccgctatggtaccactagcagtgctaggacccagaaactagcgaaactgtttaggagaagctgcgggctggacgccaccagcggtgctgccacggaggtcaatcctgctttgacaaatcggctaccagagcgctgccgccaccgagaaaatggaggcaccgaggaacaagatgtgccgcgaccaagagaactcggcttggcgaaatggcggtgctgggaccctaagagtgacgccagccggaggagttcccaaggacaacatccattttggcggaaccaacggtgttgtcacgcagaaaatgtcgaccctcggaaaagagaggttctgcgaccgagaaattcggtgcaacaagtgctgtgacagaaaaccccccgctcggcgctgctggcgaaagagccaacaaaacgctgggtgctgccaccgtgacaccgactttaggaccccggcctcggatggagaaaggaggcgaagtcatactgagggccccatcaaccgatcccttgcgatgcgcatgggaaaaggaggcagtatagggaccgagaatcgggcggattgggctggccctggttgtaaggtctgtgaaagctgtagccagtccttcatctttgtgtatatggctcccatcaccgcatctggcatatggaaggatatcaacacatgcttgtga

SEQ ID NO: 150798 - DNA, 1678 bp, Homo sapiens
ggaattcccgggtcgaccctcggaaaagagaggttctgcgaccgagaaattcggtgcaacaagtgctgtgacagaaaaccccccgctcggcgctgctggcgaaagagccaacaaaacgctgggtgctgccaccgtgacaccgactttaggaccccggcctcggatggagaaaggagggtacggagccaccacataacttcctaatgtcttcaaatagcgaaagtgctagccggaaactgccggctgggtttacctattggtgctcgtgtgggactagcagattcgagaaaccagcgggactggaacctagtacacttcggcagttgagaaatgacttaccaggacaaatactgcttctggctcgatggtgctgcccatgaacatccgccggctctgagaaacgagctgcactgtcagtgagaaaccgtgggcactgagaaacgagcggactgcaactgataactgcccacccagtgccactacgacaaagtgctgctggcactactcccaccctccgtcctcaaatcagtcccctcccgcctaagaagacctttatttttcctagcgaagtcatactgagggccccatcaaccgatcccttgcgatgcgcatgggaaaaggaggcagtatagggaccgagaatcgggcggattgggctggccctggtaacaaaagccatccgggtcgccaaccgtcttccactgcaagaaacaaaccttccagtggctgggctccgcccttctccttggtcagagccctccaggctcctaagggcgaagccgacacctcatccctttggaacttgaagttctcagtccaagacctccgtggagagtgaaagactcaatgcctcctgaccgaggcttcaggcctgccccggcagctaggtacctctccaggggatggaactctgtgggaactgctatttaattctgatggttaactctgtcagatggccttgatatatgggaataatcgttgcaggagggtaggggaaataagaatcgcaagactctagcacaggacgtgtggattgatggtgaggcctttgctccctctccccttgaaatcctcaaagggcagttcccgatttctatcacctttgaaattcatccctgatgtcttctccatctttgggaagtgcaatgcaatttcaagctcttgaatcttccctctcccacatttgtcaaatatactgacgctacaaactcctttcttacaggaaacctgaaactgccattgagcagaaggaaaacatccctttccagaacctttctcgtttttctaaaaatctgcacttttggaagtgatcccccaaagagacctccagactctaccatgagtgtctccagctgaactcatcgtgtctaatcctcaccctagcttatcctgttcaaatcatttccatctttttctggatgaacctgggcggatgtcagaccagagaagagcacagaatgtaccagagatggggtttcaccatgttggccaggatgtctcaatctctcgacctcgtgatcggcctgcctcagcctctcaaagtgctaggattatagaagtgagccaccacgctcggcaaatgtttcaattttattcacaaaagtatactttacccaattgttgtaaactataaatattaatgtttaaaataaaatttttcttgactcaaaaacaaaac

SEQ ID NO: 150799 - DNA, 1254 bp, Homo sapiens
atgaccttggaggccacacacctgctgttgagagttctgctggtgctcctggcctcaggcgggtccttattccaaagccccccagtcaagtccatcatcctgggtgtggcagtgaccgttgtgctgctgctgctgctgcttgccctcctcatcaaccggtacctccagaaagcccgaggaagagctaggaaaccctatactgaagatgtttctgttgacaaaaagactgaaacgtgggagtgggccagaggtgagggtgaatcttaccatgtttatgatgacgtccaaaaggagaagaccactgataggatgatcaggagttcaagcatgtgtgtgcacaaaataaacaccagtgtgagcatgtgtgcacaggagacacccaacagttccaagaaggctaaacttgggcagaaaattccagttcaagggaaagacgagatcttgcacaaggcactctgcttctgcccttggctggggaagggtggcatggagcctctccggctgctcatcttactctttgtcacagagctgtccggagcccacaacaccacagtgttccagggcgtggcgggccagtccctgcaggtgtcttgcccctatgactccatgaagcactgggggaggcgcaaggcctggtgccgccagctgggagagaagggcccatgccagcgtgtggtcagcacgcacaacttgtgggctgctgtccttcctgaggaggtggaattgggaacacagccattcacagacgataccctggggtggcactctcaccattacgctgcggaatctacaaccccatgatgcgggtctctaccagtgccagagcctccatggcagtgaggctgacaccctcaggaaggtcctggtggaggtgctggcagaccccctggatcaccgggatgctggagatctctggttccccggggagtctgagagcttcgaggatgcccatgtggagcacagcatctccagggctgagagacacgtgaaggaagatgatgggaggaaaagcccaggagaagtcccaccagggaccagcccagcctgcatacttgccacttggccaccaggactccttgttctgctctggcaagagactactctgcctgaacacttgcttctcctgggaccctgggaagcagggacttggtttgaggggagttggggaggttgtaagaacaccttgacaatttcttgaatattttggacattttaaacacttacaaataaatccaagactgtcatatttaaaaa

SEQ ID NO: 150800 - DNA, 1309 bp, Homo sapiens
tgaacaacaggatctccaagatccattagaagtttttcaccccactgtggaagctgcggaggctttacatatccaagaaccacctggaggagagccctcccaacctacccagctccctggtggagctccgaatacacgaccaccgcatccgcaaggtgccctatggagtgtttagcgggctccggaacaagaactgcatcaagatgggcggcaacccactggataacagtggcttcgaacctgcagccttggatggcctgaagctcaactacctgcgcatctcataggccaagctgactggccttcccaaagacctccctgagaccctgaatgaactccacctagaccacaacaaaatccagggccatcgaactggaggacctgcttcgctactccaagctgtacaggctgggcctaggccacaacccagatcaggatgatcgaaaacgggaagcctgagcttcctggcccaccctccggggaggttccattgggacaacaacaagttgggccaggggttgccttcagggttcccaggacctcaagctcctccaggtggtcttatcttgcactccaacaacattcaccaaagtggggtgttcaacgaatttctgttcccatggggtttcgggggtgaagcggggccttattacaacgggcattcagcctcttcaacaaccccgtgccctactgggaggtgcaagccggccactttccgccgtcgtcactgaccgcctggccatccagtttgggcaactacaaaaagtagaggcatgctgcagccaccgcggggcctcagtgggggtctctggggaacacagccagacatcctgatggggaggcagagccaggaagctaagccagggcccagctggcgtccaacccagccccccaccttcgggtcccttgaccccagcttcgattgccccattcaccgccttttccctgggttcccaagggttgcaggtggacgcaaaggccggaaggcatgacatgttacgcttgggctcatgagctacgccctgctctccctccacagccacccagaggcaccccatgaagcttttttctcgttcactccccagcctgccctgctcaggccttgcccccaaacctgtactgtcccggaggaggttgggaggtggaggcccagcatcccgcgcagatgacaccggttttcctagaagcccctcacccccactggcccactggtggctaggtctccccttatccttctggtccagcgcaaggaggggctgcttctgaggtcggtggctgtctttccattaaagaaacaccgtgcaacgtg

SEQ ID NO: 150801 - DNA, 928 bp, Homo sapiens
ccttggctcagaactgccctgattccctcaagagccaccagaggaccccaagaaggtttttctcggttactccaagacccaagtgtccaagtctccgatcctaggagaacagtccctgggtcagcagccaggggccggtcaataagcatggggacaagtggcttctggccagggctgcggcacctgtccagaaacacatgttctgttcctcctcctcatgcatttccagcctgtcaaccctcccggactctgcggctcccttcagccccccttgcaagttcatggcttgtccctccaagacccccgcttccactgccctttcgaccagtcctcccttctggtctcttctttcccagtctttcctctctctctctctctctctctctctctctttctgtgtgtgtgtgtgtgtgtgtgtgtgtgtgtgtgtgtgtgtgtgtcttgtgcttcctcaaaacctttctggcttcttgaaacttggtggcctgttccctcccaatctctcccgaaaccctgtcgcctgtccctttaaactccaaaaccctctggccttcttgccttgagcttgggacttgctttcttgtcttgtccgggccttgcaaccccaagccccttgcccacaaaaccccaagggacagcgggtcctccccagccttgcccttgctcaggccttgccccccaaaccttgtacttgtcccggaggaggttgggaggttggaggcccagcatcccggcgcagatgacaccaatcaaccggccagagtcccagacaccggttttcctagaagcccctcacccccactggcccactggtggctaggtctccccttatccttctggtccagcgcaaggaggggctgcttctgaggtcggtggctgtctttccattaaagaaacaccgtgcaacgtgaaaaaaaaaaaaaaaaaa

SEQ ID NO: 150802 - DNA, 649 bp, Homo sapiens
gccgatttgcctgttctcacgccccaccctcagacctagccggagcaaagtttcacttatagaagggagaggagcgaacatggcagcgcgttggcggttttggtgtgtctctgtgaccatggtggtggcgctgctcatcgtttgcgacgttccctcagcctctgcccaaagaaagaaggagatggtgttatctgaaaaggttagtcagctgatggaatggactaacaaaagaccctgtaataagaatgaatggagacaagttccgtcgccttgtgaaagccccacccgagaaattactccgttatccgtcatgttcactgctcctccaacttgcatagacaagtgtgtcgtttgcaagcaagctgatgaagaattcccagatcctgggcaaactcctgggcgatactcccagtgcattcaccaacaaggatattttttttgccatgggtggaattttgatgaaggctctgaatgtatttccagatgctaaaacattgaatttcagctcccaactttccatcaactttcctgcaaaaggggaaacccaaacgggggtgatacatattgagttacaggtgcgggggttttttcagctgaggcagatttccccgtggatccgccgacaggactgatgtccaatattaggagt

SEQ ID NO: 150803 - DNA, 766 bp, Homo sapiens
ttttttttttttttttttttgtgggttggtggggactgtttgtattttttttaataaaaataaagatgagagaaattatttggacaagatgttggcaaatcacttttacaggtgcttgtaaccttccaggagacttcagcttgactgtagaagatgcctgctgtagggcagttcacgttctggagtcgttcagcaccacctgcgaactctttgaccggaggaaggctgcctatacttcctgcttgctgggtctggaacagtcctggtttatgctgtttgtgctggcataaatagaatagcacggccttttattctcacaagtgactcagtttgacaataacttagtcacccttgctttggggcaggttagggtgagctttactgaatcaaagatttcaacaatatcatctaccttgaaagtctgtgaagcttggaggtcatataatcaaggtggctggccatgctgcctgctcagagctggtagagacagcagaggaaagcagctgagtactcctgagcttatttttccaacaccacagaacaacgttctctgaacaataaggtaaaagcatttctaggtaccctctgtacccttttgttattttttatttttattttttggagaccgagtcttgctctagtgcccaggctggagtgcaatggcgcaatcttggctcactgcaatctccgccttctgggttcaagcaattctcctgcctcagcctcctgagtagctgagactacaggtgagcgccaccacgcccag

SEQ ID NO: 150804 - DNA, 851 bp, Homo sapiens
atttttttttttttttttttgaaatggggtcttgctgtcgtccaggctgaagtgcagtggtgcgatctcagctcactgcagcctctgcctcctgggttcaagcaattctcccacctcagcctcccaagtagctgggattacaggggcacaccaccacacctgggctaatttttgcataattttttttaagtggagatggggtttcaccatgttggcccaggctggtctcgaactcttgacttcagatgatcccatctgccttggcctcccaaagtgctgggattacaggcgtgagcacttgcgcctagccgtcacatatctaaacaagcatgaaaggggttcatttttgtcttcttcttgcctgccgtcagcatggtggaaatggctctgcctatgctcatgcttctgggtgcccaaatgccttgcactgtgccatttcaaacactatggaaggaggaaacaagtaggccacacctcaaaataatgtgggctgttcaactgggcctaaataaacctaccacaaaccagtacttggcctttggtggggaaacattggattatgtgctcctcacgtagtagaaagcggtatcctgattagtctaacagttgtgttacgcctttagggccagtattgtcagcatttatttatttaaggaccctttgttatgatggggatatttttcatttgaaacttgtttcataaaaaatgttcaatgacattgatgactgatttggtacagatttttcatatagttttgtttaaaaaataattcacgcaaaatcttgaagtcatttttgctattgaaataaaccttaattaaaatatttcatcatcaaaaaaaaaaaaaaaa

SEQ ID NO: 150805 - DNA, 365 bp, Homo sapiens
  misc_feature (1)...(365): n = a,t,c or g
ggcannnnnnnnnnnnnnnnnnnnnnnnnnnnnnnnnnnnnnnnnnnnnnnnnnnnnnnnnnnnnnnnnnnnccaaaacccctgatataactcctgggaaaagggatcaacggatattggatagataaaattattatacccacctttatgcaaatatatttgacacattggaggaaaggggaaaattcctggaaaacaaaatttatcaaaactggagcaaacaggaaaagctcaagggttttatgatctgctgaaaaaattgaattaataactttaaagccttctcacaaaaaaagcttcagggcgagggcctttactagggaattctttccaattttaacggaaaaaaatgaccccaacgttaa

SEQ ID NO: 150806 - DNA, 797 bp, Homo sapiens
ctgacaatatcagtaatctagttgcaaggaacttgtagttattatatttaaagtcatttcccatgaaatttatatttgaagttttctaattcttggttacgcactcaaatccccaaatggaaattcaattctgtctttttatttacagaatatactgatgataatgctctgattcctaagaattcttctgtaattgttagaagaatcccctattggaggtgttaaatcctacaagcaagacatatgttataagtcgaactgaaccagcgatgggcaactacaaaaggcagtatgtaaaaacacaatctcacactttttcctacacattgcttttacctttataatgtggcagtggaggtaaatcattttagaacttaatatcccaactgatcatagtacatattgtaaataaaatgtattttgatgacagctcagttgaatatggataatatgtggcatcacttgcacacttattttgtagaaatgggtaatttgtgcccgtaacactgtttcatattaaatatgatagcattatccctgtatgacactgtgttgtacagttaatgtatgatcctttttagatcgtttaggttttacactaaggaacatgatgacatgttctacatttgtctgtctatagttagtgtatgatcctttttagatcgtttaggttttacactaaggaacatgatgacatgttctacatttgtctgtctatagttagtattttgtatgtatgtacaggctgttgtgtgctttttgtttcttgcaataaaaaatgtttggagtgtaaaaaa

SEQ ID NO: 150807 - DNA, 915 bp, Homo sapiens
ccccaatccacggagagagagacccgccgggaggtgcggccgcgctattgggacccctgaccccgtgtgcgtcatgcggactcttaacgtgtggactgaccgctactgactgcaccgccaatccccccgtctctgccggccccttagcatgagcagtgggggaccgggccgggtgacattgtgcccgttggcggattctcgattttcccctcttccccgtcctcgtcctcctcctcccccatgaagtgattctgagtatcggggggtctctgggattattgttctgacgaacccctgcttgtggttggggggtatttaatctgaggccttaagggtccttcgttgtcttttgagtgttttgtgtgtgtacataatttttgctcttaaaagtttataaatatacgtatattgagagtgtccacgtctcctcgctgaaaccttagggaattcccttgggcaccatgtcctgtgttgcattataaattttcctctaaactcaacctatggatacccgtcaccctttgagggggctcccacatcctcccctctgcgaccttaaagaagcagatttatggggagagagaagctgaaagctgccgactgcgacctgcagatcaccaatgcgcagacgaaagaagaatatactgatgataatgctctgattcctaagaattcttctgtaattgttagaagaattcctattggaggtgttaaatctacaagcaagacatatgttataagtcgaactgaaccagcgatggcaactacaaaagcagtatgtaaaaacacaatctcacactttttctacacattgcttttacctttataatgtagcagtgaagtaaatcattttagaacttaatatccaactgatcatagtacatattgtaaataaaatgtatttggatgccagct

SEQ ID NO: 150808 - DNA, 378 bp, Homo sapiens
  misc_feature (1)...(378): n = a,t,c or g
ggcacgagccaaagcggaggatnnnnnnnnnnnnnnnnnnnnnnnnnnnnnnnnnnnnnnnnnnnnnnnnnnngggtgtacaaaagactcaaatatttactttattaaggagcatttccagagcgttaataatcatataaaaagatgcctaatatccttcctcatcagggtaatgtagcttaaaccacagcaagtcaccattatacacacccattagaatggcgaaaatttaaaaggctgagaatagcaaatgttgtcaagaatgtggagcagcagtaaccctcatgcattgatgatgagtgtagctgcctttaaaaagctggcactttctactcaagttaagtacatgcttgttttatgacctagcaattccattat

SEQ ID NO: 150809 - DNA, 483 bp, Homo sapiens
atgggccaggcgcggtggctcacgcctgtaatcccagcactttgggaggccgaggcgggcggatcacgaggaccctcagctgcaggtctgttggagtttgctagaggtccactccagaccctgtttgcctgggtatccgcagcagtggctgcagaacagcggattttcgtgaaccgtgaatgctgctgtctgatcgttcctctggaagttttgtctcagaggagtacccggccgtgtgaagtgtcagtctgcccctactgggagaatgccttccagttaggctgctcagggacggtcacagttggtagcacgacagtgactctagctgagtgtttaaaatggctgacaactttccagctggtttccatcggcttggccgcagtggcgatggacgtgctgaacacaggcgatgttgtctggcttctcaacgttgctgctgagtggaacagttttgtgaatatcccaaatgacagtctctcatga

SEQ ID NO: 150810 - DNA, 955 bp, Homo sapiens
agaaagtaaagtgaagatagtattaaccacacccgcgctgatggtggcatagatgggctgttgaacacctgcatccttgaagattcctgttgagtaatagaacaccttgttagccaagatggtctccatctcccgacctcgtgatccacccgcctcggcctcccaaagtgctgggattacaggccctgcactgggtgctgaaggtgaacgggcattccacagacatagggttatgatcgttaccgaaggagcccctggtggcctgagctcagggcacctgagggatgcaatggacagtgaggctggaacagatgatggctgtgcctcccatgttagggttgtgcacagggacctgaagcccagcaacatcctgtatgtggacgagtccgggaatcccgagtgcctgcgcatctgtgactttggttttgccaaacagctgcgggctgagaatgggctcctcatgacaccttgctacacagccaactttgtggcgcctgaggtgctgaagcgccagggctacgatgaaggctgcgacatctggagcctgggcattctgctgtacaccatgctggcaggatatactccatttgccaacggtcccagtgacacaccagaggaaatcctaacccggatcggcagtgggaagtttaccctcagtgggggaaattggaacacagtttcagagacagccaaggacctggtgtccaagatgctacacgtggatccccaccagcgcctcacagctaagcaggttctgcagcatccatgggtcacccagaaagacaagcttccccaaagccagctgtcccaccaggacctacagcttgtgaagggagccatggctgccacgtactccgcactcaacagctccaagcccaccccccagctgaagcccatcgagtcatccatcctggcccagcggcgagtgaggaagttgccatccaccaccctgtga

SEQ ID NO: 150811 - DNA, 695 bp, Homo sapiens
ttggggtcttgcactgtcacccagactggggtgcagtggtgtggtcatagctcactgcggcctcaaactcaagctcaagcgatcctcttaccttgcctttcaaattgctgggattataagcatgagccactgcatctggcctatgtgacacaattctgttttttgtcttttttttttgggggggggggatggagtctcgctctgtcacccatgctggagtgcggtggcgtgatcttggctcaatgcaagctccgcctccttgggttcacgccattctcctgcctcagcctcccaagtagctgggaccacaggcacccgccaccatgcctggctaattttttgaatttttagtagagacgggatttcactgtcttagcccaggatggtctcgatctcctgacctcgtgatccgcccgcctcggcctcccaaagtgctgggattacaggcgtgagccaccgcgcccagcctatgtgatgcaattctgatgtcaactccctgatgttacctcaaatgccacaggttaaggccaccagtccccaataggctgccctcgctttagacacacctgcaggcttgggtgtcctcagaccacatgtacttctcaccaactggctgcaaatttggaggttcccaccatgccctcaagttcgataactcactaaaacaattcacagaatgcagaaaagcaacgaaa

SEQ ID NO: 150812 - DNA, 784 bp, Homo sapiens
  misc_feature (1)...(784): n = a,t,c or g
tttttttttttttttctacttaaaatatttatttattctctgacatgacaagacacaaaaagttacaacttcttaaaactcttcaaaagaaaaaaatataattctgtaagcagcagcagcagcttccaaggttctgatgtgaacgggaggggcagctccccaggagcaaccgtgaactgggggggtccaggcctgagccccaggtagtgtcgctgggaaggggcctctgtggagggccccggttttggggacacagcaccagcacatcagggtctgtcaccaacacgatcacatggccagggcggggcagggagagcttcggctcacagcagggatccgcccggtggcaccgggggatggggcttcttgaagtgtggtccaggggccttatgcccggagcgcgggaaggatggggcttctgccagtgtacccagggggcnttatgcagaggctgaaaaaggagggtgggccctgagaggacttgggggtgtggcagctcctggccctccctccagagcagggcaggcaccctcagggctccacactggtcccaatgcccgccctgctccctggccaatcccaggccagggtggaggactcaggagagaccaagctgggtaagttagttcctggacggggtcaacagagcctggggcacacacagcacacagagcgcctggccacggcgggaaggggggcagtccccagcagccccatccccaagggccaggccagatccccacaacacacacacgcatgcactcgtgccgaattactgcagcgc

SEQ ID NO: 150813 - DNA, 376 bp, Homo sapiens; identical to SEQ ID NO: 128399

SEQ ID NO: 150814 - DNA, 1511 bp, Homo sapiens
  misc_feature (1)...(1511): n = a,t,c or g
cttcttttttttttttttctttacaaacccttgtgtcgagggctgactttcaatagatcgcagcgagggagctgctctgctacgtacgaaaccccgacccagaagcaggtcgtctacgaatggtttagcgccaggttcccccacgaacgtgcggtgcgtgacgggcgagggggcggccgcctttccggccgcgccccgtttcccaggacgaagggcactccggagcggaccctttgtcccggcgcgcggcggggcacgcgccctcccgcgcgcgcggggcgcgtggagggggggggggccggcccgccggcggggacaggcgggggaccggctaatccgaggccaaaccgaggctccgcggcgctgccgtattacgttccgcctgggcgggattcatgacttagaggcgttcagtcataatcccacaagatggtaactttcgcccccattgggctcctcaancccaagcacattacaccaaatgtctgaacccttgcggttccttctcgtactgggagcaggattacccattggcaacaacgacatcatcagttaggggtaaaactaaccctgtcttaccaacgggtctaaacccagcttcacgttcctttttagtttgggggtgaacaattcaaacgctttgggtggaatttctgctttcacaatgatagggggaagagcccgacatcgaagggatcaaaagcgcgaacgtcggctatgaaacgcttggccgccacaagccagttatccctgtggtaacttttctgacacctcctgcttaaaacccaaaaggtcagaaggatcgtgaggccccgctttcacggtctgtattcgtactgaaaatcaagatcaagcgagcttttgcccttctgctccacgggaggtttctgtcctccctgagctcgccttatgacacctgcgttaccgtttgacaggtgtaccgccccagtcaaactccccacctggcactgtccccggagcgggtcgcgcccggccggctcgcgggcggacgcttggcgccagaagcgagagcccctcggggctcgcccccccgcctcaccgggtcagcgaaaaaacgatcagagtaatggtatttcacccgggggcccgcagggccggcgggaccccgccccgggcccctcgcggggacaccgggggggcgccgggggcctcccacttattctacacctctcatgtctcttcaccgtgccagactagagtcaagctcaacagggtcttcttttcccgctgattccgccaagcccgttcccttggctgtggtttcgctggatagtaggtagggacagtgggaatctcgttcatccattcatgcgcgtcactaattagannnnnnnnnnnnnnnnnnnnnnnnnnnnnnnnnnnnnnntcccgccgtttacccgcgcttcattgaatttcttcactttgacattcagagcactgggcagaaatcacatcgcgtcaacacccgccgcgggctttcgcgatgctttgttttaattaaacagtcg

SEQ ID NO: 150815 - DNA, 466 bp, Homo sapiens
ttttttttttttgaggtgtccccaacaattttattataaataaaaacaagactcccagtgggtggctgcagcccctgcctcggtggctgtgagcacctgttggaggggcctgccattaccctggtctggaggccagaaccgaggaaagggctccctgcccctccaagtacacaggggagcctgaggtactgagaattaaaaaccagggagggactcccaggccaggcggcggccccgggccctctgccccacgaggctcattcctttggagcacacaggaagctgcccgtccatcacaccacactctcttccagccgctcggcgctgcctcctaccccccggcaccctgccccgagcagccccccatgcacagagtggctccgtcgggcccaagctcctcccaggcgcctggcataaccgtagcacccggcatctcccaggtccagagagcagctgcgctgcggcc

SEQ ID NO: 150816 - DNA, 526 bp, Homo sapiens
acttccttgttcatctgttcattcattcattcttctatgcattggttagttcatggaatatctcactctttcattcattcatgtccttctgcaatgattcattcactgctttgttcatctgttcattcactcattcttctatgcattgatgaaatcactcattcagtgatttattcatctatactcatgcttcaatgcattgatttactcatttcctcatgcatttattcattcatctatgcattggttaaatcactggccaactcactaactcattcattcattcacacttttctgcaatgatttgttcacttgttcactcccttgcttatctgttcattcactcattcttcaatacattgaccaagccattcactgacatttattcagctacatttattctttcatgcattggtttctggatttatttggtcattcatttatttattttgcaaaattaatgtatttttaattgacaaataaaaactgtatatattttcatgtgcaacataaaaaaaaaaaaaaa

SEQ ID NO: 150817 - DNA, 1536 bp, Homo sapiens
acgcgcgtcgcgagctaacggactcggcggcggcggcggcggcggcctgcgccccacccgcaccccatctggaccgcatcgctgaatgtgcccggacctgcgccttctgggtctctgaaagaagatgaatttggctgagatttgtgataatgcaaagaaaggaagagaatatgcccttcttggaaattacgactcatcaatggtatattaccagggggtgatgccagcaagattccagagacattgcccagtcagtccagagatcccagctatccaaaggcaaatggccaaccaggttcgggcaggaattattgggaggaatatgaacaagttaaaagtattgtcaagcactttaagaaagtttttaaaattgacaagccctcccagatttcccctgtgtccctgtcaagatgaacccatttagagatccctgctgtttggcccaccccctgttcctgcagaacacagagctccacctcagatcaggcgtcccaatcgagaagtaagacctctgaggaaagaaatggcaggagtaggagcccggggacctgtaggccgagcacatcctatatcaaagagtgaaaagccttctacaagtagggacaaggactattgagccagaggggggagatgacaagggaaggaagaatatgcaagatggtgcaagtgatggtgaaatgccaaaatttgatggtgctggttatgataaggatctggtggaagcccttgaaagagacattgtatccaggaatcctagcattcattgggatgacatagcagatctggaagaagctaagaagttgctaagggaagctggtgttcttccaatgtggatgcctgactttttcaaagggattagaaggccatggaagaatgactcacagaacttagggaagccttacagtcgagcccaggacgacataggcatgaacatcgtgggtccccttacacatggcttttcttctgcctctgctgccccagagacaacaagacagcccctccttttccttctcctccttagcctatccaaggtgaagacctttaagggtgtactgatggttggacccccaggcactggtaaaactatgctagctaaagctgttgccactgaatgtggtacaacattcttcaacgtttcgtcttctacactgacatctaaatacagaggtgaatctgagaagttagttcgtctgttgtttgagatggctagattttattcccctaccacgatcttcatttgatgagatagattctatctgcagtcgaagaggaacctctgatgaacatgaggcaagtcgcagggtcaagtctgaactgctcattcagatggatggagttggaggagctttagaaaatgatgatccttccaaaatggttatggtattggctgctactaatttcccgtgggacattgatgaagctttgcgaagaaggtgtttcatctgggttggtgatttcccagatgtccctcaggaaaaggacacttctgtctccccagagtcctgtttgttgactgactggtggtgggggctgtga

SEQ ID NO: 150818 - DNA, 805 bp, Homo sapiens
atttatagactttcccacaggcaaacattaagtctacgcagggcattttgaaaatcatttgccagttctaaaagtagtaataataaatactcccaagaactaaaagtccccctggtagcattctgggatacctggcagggcaatgttctggtgggccccattcttcaatcccaagttatccaaacttagcttttgggatgtttgaggttcttcacttttgctccctctttgggtggccgttctagtggcaagaaatcacataatccttttgtgacgaacactgtcctattaaaaggccagagacaaaagccctttccttggagatttatgtttgaaagatactggccaacagtctcttctacaatgtaggttcttcccatttttaggaactaaaatctcctgttttcagaatgtgcactcgtggcagacaattacctcggacggtctctccgccggagatgggggtttcgggcccaagtaccagcctctaggggccagattccctccggtctcaattcactgccactgaattcatcagaaagcgacctacttcccacacctcacttcccactccaaagccagggacttgggagtcaggtggcgcagattgatgacgtaaaagccccccctcccttccccgcagagcctcagccaaagcgactgcggtcgccaccccgcccccttctgggcgccatagagagcgtggcggtatcccggagcctgccgtccggccctaccgggaccgatgccctctagtggctcagtgtacagaagccgccaacgaggacgatccatggcaacgaag

SEQ ID NO: 150819 - DNA, 428 bp, Homo sapiens
  misc_feature (1)...(428): n = a,t,c or g
cggacttcccgggtcgactacagcatcggcggcggcggctagtgccgctagcgcctctagcgatgcaccttctttccaactgggcaaaccccgcctccagcagacgtccttctatggccgcttcaggcacttcttggatatcatcgaccctcgcacactctttgtcactgagagacgtctcaaagaggctgtgcagctgctggaggactataagcatgggaccctgcgcccgggggtcaccaatgaacagctctggagtgcacagaaaatcaagcaggttatattccttttgggacgccaattgtagtcggtcttctcttgcccaaccagacactggcatccactgtcttctggcagtggctgaaccacagccacaatgcctgtgtcaactatgcaaaccgcaatgcgaccaagccttcacctgcatn

SEQ ID NO: 150820 - DNA, 352 bp, Homo sapiens
ccgctagcgcctcgagcgatgcacctcctttccaactgggcaaaccccgcttccagcagacgtccttctatggccgcttcaggcacttcttggatatcatcgaccctcgcacactctttgtcactgaggaagaaggctgtctttgttctaagaatgccttgaacaaagcttcagaggaggaggttgccctgcttgacagaggagaagaatggtgcattttgatcctaaatggagaaaggagagggaaggaagaggaggaaaaaaacagcgggaaggagagcatgatactgagatgagctgaaagaccaataaagaaatgccacaatgaggtgtggctgggggctcttttgaa

SEQ ID NO: 150821 - DNA, 888 bp, Homo sapiens
agacgtctcagagaggctgtgcagctgctggaggactataagcatgggaccctgcgcccgggggtcaccaatgaacagctctggagtgcacagaaaatcaagcaggctattctacatccggacaccaatgagaagatcttcatgccatttagaatgtcagggatttgtcagggatgtcttctcgtggcaacctcagatgctcagcagggcaagcaggaaggcatgaggcctctgagccagggctcagaactgacacgctgccacgtcctcccacgtgctgtcagtcagagcaagttagatgaccaagcagagccaaaaagtgaggaaataaattccttctgtgatgaggccgtggcaaggaggattataaagggaaccctgtggtgtcacgggcagtgtcctggacagcagttgtctggtaaatgcagtgagtgctattgggctgtatcttacgatgttcctggtggtccaagtacagttcgaggggtagtcggtcttctcttgcccaaccagacactggcatccactgtcttctggcagccttcacctgcatccaagttcatccagggatacctgggagctgtcatcagcgccgtctccattgctgtgggccttaatgtcctggttcagaaagccaacaagttcaccccagccacccgccttctcatccagaggtttgtgccgttccctgctgtaggtcctctggacacagacatgcagcagttggcccgggagacctccgtggacccagacatgcgaaaagggctgcaggagctgaaggcaaaggggaagctggtggattgcaaggtgtcagcccagaaactgctgagcttactggaaaaggacgagttcaagtctggagcccacgtggacttctatgacaaataa

SEQ ID NO: 150822 - DNA, 674 bp, Homo sapiens
gagctgccccttgtcctgcacttcagcagctacagggctgtgggtgaaggagggcctgaggattgtgagctcggtgcttttaggcttgagctgcccttggggatcccccctggaggcagagctggaccttggggagggaccctgtggcggacgtccttctatggccgcttcaggcacttcttggatatcatcgaccctcgcacactctttgtcactgagagacgtctcagagaggctgtgcagctgctggaggactataagcatgggaccctgcgcccgggggtcaccaatgaacagctctgaagtgcacagaaaatcagccagggctatttaccatccggacaccaatgagaagatcttcatgccatttagaatgtcaggttatattccttttgggacgccaattgtagtcggtcttctcttgcccaaccagacactggcatccactgtcttctggcagtggctgaaccagagccacaatgcctgtgtcaactatgcaaaccgcaatgcgaccaagccttcacctgcatccaagttcatccagggatacctgggagctgtcatcagcgccgtctccattgctgtgggccttaatgtcctggttcagaaagccaacaagttcaccccagccacccgccttctcatccagaggtttgtgccgttccctgctgtag

SEQ ID NO: 150823 - DNA, 1325 bp, Homo sapiens
gccgccggcggagaacaggagcatggagggcgggctggggcgtgctgtgtgcttgctgaccggggcctcccgcggcttcggccggacgctggccccgctcctggcctcgctgctgtcgcccggctccgtgcttgtccttagcgcccgcaacgacgaggcactgcgccagctggaggccgagctgggcgccgagcggtctggcctgcgcgtggtgcgggtgcccgccgacctgggcgccgaggccggcttgcagcagctgctcggcgccctgcgcgagctcccccggcccaaggggctgcagcgactgctgcttatcaacaacgcgggctctcttggggatgtgtccaaaggcttcgtggacctgagtgactccactcaagtgaacaactacatgggcactgaacttgacctccatgctctgcctgacttccagcgtcctgaaggccttcccggacagtcctggcctcaacagaaccgtggttaacatctcgtccctctgtgcccatgcaacctttcaaaggctgggcgctgtactgtgcaggaaaggctgctcgtgatatgctgttccaggtcctggcgctggaggaacctaatgtgaaggtggctgaactatgccccagtgtcctctggacacagacattgaagcagtttggcccgggagacctccgtggacccagacatgcgaaaagggcctgcaggagctgaaggcaaagggaaagctgttggatgcaaaggtgtcagccaagaaactgctgaggcttactggaaaaggacgagttcaagtctggagcccacgtggactttattgacaaataagcccatgttttttggtttccggaacctttttgcccccacttttagacataccccagaagccctgtggctccccacaccctgccataggggcagtcctgccttacacatagaagcattcatgcctgctgccctgccctcaggcacagccagctgtgagctcccaggtcattggccttaccagttgtcaggagtcttgtgctgtgcaccctgggttataaaggaggcttaggagagaggttatgggtattggtgtctctatccccaggaatagaacttaaggggtgggaagaacaggaaaagaagctggaacacagaagagaggaggttgtgtctcttgctcatagcaagcctgtgggtagaggaaagagtgatctggtgtcgaataggaggacccatgtagattcgcagatggcctggatgggaggaagggcagacggtacatgtcccagcccacatagatgccccttgctgagggtagcaggaccttctgttgaactttgtgtcctcac

SEQ ID NO: 150824 - DNA, 1213 bp, Homo sapiens
ttccaaaaaggtaatatgcatcttccagcgcccactcaaattttgctaaggaccagggcagccaaaatccctgccttccaagaaatgtataggactactgcaagaaacaaagaaattaggcaattacaatatagtgtattcaaaagtgttatgctaaaggagctaaagaagacaatgggggtggggagtggataggggtgtctgacacagccgtgcagtcaggaaaagctttccagatgttaaaatttgattcttcagagataggtgttagaccaattaaaataggagaaatgctagggaggatggaggatagaggatctcaatgctactaaagctgaggactagaaaaatggtgagtaatgaactgagaggggaagaagcaagcccagatcaccacataataaaaattgtactttattcctgagtgcagtggagagacactaaagtaaaaagagagtgacataaccaaatttgtgttttttactgtactttattgtcggtgtgagtgttaaaattgcaaagaggcgagcatctgaacctgagtactaggttaatcaaatctcaaatccaataacaatactgaaaaaggaactagaaatcctaagagggggaaaagctaaatacaaagcaattccttcaaggcaaaaaccactatgcactatcatggggttggggggcaggatacaacagcatctctgagactgtaggattagaattatgtcagaaggaggccaagaagggtctagggatttatccctgggaatggcaatggcatttatactggatttaagatttgatccttactttacaatcctcaaattattagaaatataactacttagaagttagtctgactatactcctaagaacaaagaaaggcctggtggctcaagcctgtaatcccagcactttggaaggccaaggtgggcggatcacttgaggtcaggagtttaagaccaacctggccaacatgacgaaaccccatctctactaaaaatacaaaaactagccgggtatagtggtgagcacctgtaatcccaactactcaggaggctgaggcacgagaactgcctgaacccgggaagtggaggctgcagtgagccaagactgcaccactgcactccggcgtgggcgcagagccagactctgttgggggtggggtcgggggcaaagagaaaaataatacttctaatatgttgcaaacaagaccttt

SEQ ID NO: 150825 - DNA, 1012 bp, Homo sapiens
ggctcttataagaagacatcgttgggagaaatttgttgtatgcagcttgcatggctgggcaaagtgacgtgattagagctttggcaaaatatggtgtgaatctgaatgaaaaaccaccagagggtacacactcttacattgtgctgcagcctggggtcgtttggaaactttgaaagcactggtagaactggatgttgatatagaagctttgaacttccgggaagaaagggctcgagatgttgctgctagatattctcagactgagtgtgttgaattcctggactgggcaggactcaatcctggtacagcaacccatgattctgacgaggaagctgctttcttaactagagtatggtctacaggtcacaatgattctggtgtgaagcagaggatgggccagaaagagattcaaaatgctacatcttcaaatcacttcacctgtccctccagtagcccttcagaggaagaaaggagtatgatttgtagggctgctatggtagttcaggaatgtgagcaccctcctgatgaaaacattcctaccacaggccagaaattctccacccgagacccccagtgggacaataacaacgcagatcaccgggaaaatatgcagaatgtatttttggagttatatggagtcagaaggacctccagagtcggagagggcagaatttttctcacagcaagaagaggaaaatgaagaagaagaagcccaagaaccagaggaaacaggccctaagaacccccttttacaacctgctctcacaggggatgtagagggtttgcagaagatatttgaggatcctgagaatcctcatcatgaacaggccatgcagcttctcttagaagaagacatcgttgggagaaatttgttgtatgcagcttgcatggctgggcaaagtgacgtgattagagctttggcaaaatatggtgtgaatctgaatgaaaaaaccaccagaggggacacactcttacattgtgctgcagcctggggtcgattggaaactttggg

SEQ ID NO: 150826 - DNA, 496 bp, Homo sapiens
tggggctccttcctggcactgaggaggggcgctcccaatgctgtgaggcagcggggagggaccgtgcacccgtggctatcagagcccctccgctgtcccaccctgggcctgggacacgggcctggggcagtgtgtgtctgctggtcatgtgctggtgccagttggggaggaatcagctgtctcggtggattctgagactcactgtggggcgggaagaagggtcttcactctgccattcagggataaagtttaattttatttttctacacattttgccaggtcaggcattttgctagtaagcaggatgcccccaactctcagccgggcagcctggcctctcctgcccagacctgcggtcccagcatcccccagagccagggaacaggcccagcgggagggggttttatgttttgtttcaaacagaaaacacaaccttatttttctttacaaaagcaaaaaaggaaaccaaaaaagatacagcctttgaatgataaaa

SEQ ID NO: 150827 - DNA, 1139 bp, Homo sapiens
ttttcatcattcaaaggctgtatcttttttggtttccttttttgcttttgtaaagaaaaataaggttgtgttttctgtttgaaacaaaacataaaaccccctcccgcctgggcctgttccctggctctgggggatgctgggaccgcaggtctgggcaggagaggccaggctgcccggctgagaggagggagcgccctcagagccagagatggagtgcatttgggaatggagtttgattaagcaaaaaataaaaaacctcgacacacacacacacgcctgctatacagaaatgggggaccaagagggcgctgcctccgagttgggaaccattgctgggcagctgggacttcaaaagtcctgatgctgtcctggggggcccccatttccccacgttttcaggggtagggcaggggcagggagggcggcatccacagcttttcagggacaggattcagggggagaggagggttacgtcagagcaagctccttccccacattaaaaaaaaaagtattaaaaaagcacccaaagcttaaaaaaaagaatcctccatggcagggagagttgggggcatcctgcttactagcaaaatgcctgacctggcaaaatgtgtagaaaaataaaattaaactttatccctgaatggcagagtgaagacccttcttcccgccccacagtgagtctcagaatccaccgagacagctgattcctccccaactggcaccagcacatgaccagcagacacacactgccccaggcccgtgtcccaggcccagggtgggacagcggaggggctatgatagccacgggtgcacggtccctccccgctgcctcacagcattgggagcgcccctcctcagtgccaggaaggagccccagcaggggagtgggcaagagaaccaggggaagatggggttctcaggggctcctgggcagaactaggggaagatggagttctcaggggctggaggcaggtgcccagtagggtggtcgaaggggtgcagtctcatctgagatctgaaggccccccgccagcctgccctgcagttccatgtgcagctgaaggaccagacgtgcaggcctggaaacacagggcgaggtgggccagggctaaggaaccaaaggaggtgggaagagtggg

SEQ ID NO: 150828 - DNA, 617 bp, Homo sapiens
ttttctggctaattttttgtgttttattagagacggtttcaccatgttggccaggatggtctccatctcctgacctcatgatctgcttgcctgggcctcccaaagtgttgggattacaggcgtgagccactgcgcccaacctccccactcctctcccgtccacaccaggcactctgctgcttggcctttgggcactctgcagccacctgtacctgtgtgaactggcacttgcctgggcggggttttggaatccacaggccccaggcttcctgtagctcctgcccacctgctcacccacactgtctccctatctcccatgccactttgggccacctgttccccaggggcagggcatgaagcccctggtctaatgctccaagacccatttgggccaccgtggtgctcctgtggccctgtgtttcatgagaagacagctggttgcaaagccagggctttctctgggagggtctgtaggtgcaaggctcaggcacttcctgagacaggtaggtagaagccagggttcggccagggcccagccccagggtgtttgtgaacaggtggacttgggtgtggctgaaaaggagaggttgtaggaagctggccagagaatcagggca

SEQ ID NO: 150829 - DNA, 434 bp, Homo sapiens
gttataggtaaggaatatagaaatgaatgttttttgttgtgaaggtgttttcatgtgatattttataaacacattttaaaaaatctccatcactttttagtataggaaggatagctttgcctgggaaaaacagtttcaacacacctgctcagagtagcagttctccctcaaaaaagcagtgttcagcctgcactgactgttctgcttgccaaaaggaggaagcatgcaagatacttatttctccatagattgtggagtatagagggatgtgggactacagattattattttttttccccgagacagagtcttgctctgtcgcccaggttggaacacaatggcacgacctcagctcactgcaacctctgtctcccgggttcaagcaattctcctgcttcagcctcctgagtagctgggattacaggcacacacca

SEQ ID NO: 150830 - DNA, 986 bp, Homo sapiens
gatgctcctccattcttggccagaggcctgggcctccttcacacgcccctccctgtggatcgcctgcctgttcccatagcaggggaactggagtttgtgggggggcagagcaggttatgtgcagacagggaaacgagaactttggacctggctttctgagtccaggtgagagctgtgtggccccccgatgccactctgcccgccggagggatgtgcctgctgagccttttccttccacgccgcctctcactgccaggccagcggcttccgctgagactcgctggagaggcggctcccgtgtccgtccaccgagcactcagatggatgctgatcaccagggccgagggggctcccagaaggaccccaggccctggggagggtggctgtgggaggccaagtccactggccggaagtcttgtcagccctaagccagggaagcctggagcgtggcctggcgggtctgggtggacaccgtccccactccggactcccagcacaggggaggagacctgagcctgtatggccctgtagccctgggcaaagctgggcctgtcgtgtgttcctgcctggcaggtgcaggtgctggccatttgcaggtggaaagaggtgggaatcttggattttttgtttttttttgtctttttttttttgagatgaagtctcgctctgacacccaggctggcgtgcagtggtgtgatctcggctcactgcaaactccgcttcctgggttcaagtggttctcctgccccagcctcccaagtagctgggattacaggcatgcgccaccacgctcagctgatttttgtatttttagtagagatggggtttcaccatgttggccaagctggtctcaaactcctgacctcaagtgatctgcccgcctcggcctcccagagtgctgggattacaggcgtgagccagtgcacccggcggaatcttggaatttttatagacggcacctcagtttctgactccagccgcacacc

SEQ ID NO: 150831 - DNA, 1364 bp, Homo sapiens
  misc_feature (1)...(1364): n = a,t,c or g
tttcgtggacgccgccggttgtcctcttcgctgctccgtagtgacggggattgttgtgttgcagaaatccggcaatcgacctgaggacttgcgagccgctcagctcccgggacgtttggagctgctgctaaataatttctgctcagccatgtcgccggctccagatgcagccccggctcctgcgtcgatctccctgtttgacctcagcgcggatgctccggtctttcagggcctgagcctggtgagccacgcgcctggggaggctctggcccgggctccgcgtacttcctgttcaggctcaggggagagagaaagcccagaaagaaagctactccaaggggtcctatggactatttcagagaagttattttgttcaacttgtgaccagaccttccagaaccaccaagaacagagggaacattataagcttgactggcatcggtttaacctaaagcaacgtcttcaaggacaagcctctcctgtctgccctgggactttgaaaagcagagctccacaggagatcttttccagcattttcggggatcagaaggattcaggattcagccagtgaggaggacttgcagacactggatcgggagagggctacatttgagaagttgagccgacccccaggcttttaccctcatcgagttcttttccagaatgcccagggccagttttctttatgcctaccgctgtgtcctaggccctcatcaggatcccccagaagaggcagaacttgctgcttacaagaaccttgcaaagtagaggtcccagagactgcgtggtgctcatggctgcagctgggcactttgctggtgctatatttcaaggaagagaagtggtgacacacaaaacttttcaccgctatacggttcgggccaagcggggcacagccagggggctttcgggatgcccgaggtgggccatcacactctgctggagccaacctgagggcgctacaatgaagccacactatataaggtgagttaagccttttagatctggtggtactgatccatactttttttgcatctctgttcaactcactgttaagtagggaggtttttgactcatatccttccaattttcattataggtagacaaaggtagatgagggattccccaggagccttaatcctctattctttctccgtgttatgctctactttccaccccttgcacttctgtgagccattttttttagctggagaattataaatagcaagcgatggcatgcaggactgaggtactctcttctctaggatggtcgagacctgctggcagggccaagctgggctaaggcgctgtaggaggctggtacaatactggtgcgtgctccccgctctgaccggnctttgatc

SEQ ID NO: 150832 - DNA, 9234 bp, Homo sapiens; identical to SEQ ID NO: 145209

SEQ ID NO: 150833 - DNA, 336 bp, Homo sapiens
atgggccgggcgcggtggctcacgcttgtaatcccagcactttgggaggccgaggcgggcggatcacgagaggtggaagaatacatgggagctgaggcagttaaatcttggacaagctccatgttcaaggaatgggatgagaaggtacggagagagaagacatcatccagacgagcccgggcagcccagtgtggaggggtttttgagagtcctgagtatgtgcatctgctgaaggtgttcctagaggacctagataaacaacagcagaccaactccaaagctagcagaagacaagaaataatcaaaatcagagctgaactggagattaagacatga

SEQ ID NO: 150834 - DNA, 3847 bp, Homo sapiens
tttttttttttttttgagacggagtctcgctctgtcgcccaggcttgagtgcagtggcgtgatctcggctcactgcaagctccgcctcccgggttcacgccattctcctgcctcagcctctcgcatagctgggactacaggcgcccgccaccacgcccggctaattttttgtattttttagtagagaaggggtttcactgtgttagccaggatggtctccatctcctgacctcgggatcccgccgcctcggcctcccaaagtgctgggattacaggtgtgatagtatgaattttcttatggttagtaaggattgaagactggttaaaggctttgccacatttttcacatttgtagggtttctctccagtgtgaattatcttatgtttagtaagagctgaggactctttaaaggctttgccacattctccacatttgtagggtttctctccggtgtgcaacctcttatgtctaggtaggggtgaagattggctaaatgctttgccacattcttcacatttgtagggtttctctctagtatgaattctcttatgtccatttagggttgaggatgatataaatgctttgccacattcttcacacttgtaaggtttctctccagtatgaattatcttatgtgtagtaagctttgaggatcgattaaaagctttcccacattcttcacatttgtatggtttctctccagtgtgcatcctcgtatgtctagttagggttgaggattggctaaatgctttgccacattcttcacatttgtagggtttctctccagtatgaattatcttatgttcagtaagagttgaagatttcctaaaagctttgccacattcttcacatttgtagggtttctctccagtatgaattatcttatgtgtagtaagggttgaggattggctaaaagctttgccacattcttcacatttgtagggtttctctccagtgtgcatcctcttatgtgtagtaaggtgtgaaggctggctaaatgctttgccacattcttcacatttgtagggtttctctctggtatgaattctcttatgttcagtaagggttgaggaccagataaatgctttgtcacattcttcactcttggaaggtttctctttagtatgaattatcttatgtgtcgtaagatttgaagattgattaaaagctttgccacattcctcacatttgtagagtttctctccagcatgtattattttatgtttagcaagggctgaggagtgcttaaaagctttgccacattctttacatttgtagggtttctctccagtatgaattgtcttatgcttagtaagggttgaggaacggctaaaagctttgccacattcttcacatttgtagggcttctctccagtgtgtatcctcttatgtctagttagggttgaagaccatataaatgctttgccacattctttacatttgaagggtttctctctagtatgaattcttttatgtttagtaaggcttgaggaccagttaaatgctttgccacattcttcacacttgtaaggtttctctccagtatgaataaacttatgtatagtaagatttgaagatcgattaaaagctttgccacattcttcacatttgtagagtttctctccagcatgtattattttatgtttagtaagggttgagagtcgcttaaaagttttgtcacattctttacatttgtagggtttctcttcagtatgagttatcttatgattagcaagggttgaggaattgctaaaagctttgccacattctttacatttgtagggtttctctccagtatgaattctcttatgtttagcaagggctgaagaatggctaaaagctttgccacattcttcacatttgtagggtttctctccagtgtgtatcctcttatgtcttcttagggttgaggaccatagaaatgctttgccacattcttcacacttgtaagacttctctccagtatgaattatcttatgtgtagaaagacttgaggaatgattaaaagctttgccacattcttcacatttgtagagtttctttccagcatgaattattttatgtgtagtaagggttgagaattgcttaaaagctttgccacattctttacatttgtagggtttctctctactatgaattatcttatgtttattaagggttaaggattgtctaaaagctttgccacattcttcaaatttgtagggtttctctccagtatgaattatcttatgtttagtaagggttgaggattgcctaaaagctttgccacattcttcacatttgtagggcttctctccagtgtgtatcctcttatgtctagttagggttgaagaccatataaatcctttgccacattctttacatttgaagggtttctctctagtatgaaatcttttatgtttagtaaggcttgaggaccagttaaatgctttgccacattcttcacacttgtaaggtttctctccagtatgaataaacttatgtatagtaagatttgaagatcgattaaaagctttgccacattcttcacatttgtagagtttctctccagcatgtattattttatgtttagtaagggttgagagtcgcttaaaagttttgtcacattctttacatttgtagggtttctcttcagtatgagttatcttatgattagcaagggttgaggaattgctaaaagctttgccacattctttacatttgtagggtttctctccagtatgaattctcttatgtttagcaagggctgaagaatggctaaaagctttgccacattcttcacatttgtagggtttctctccagtatgaattctcttatgtttagcaagggttgaagaatggctaaaagctttgccacattcttcacatttgtagggtttctctccagtgtgtatcctcttatgtctagttagggttgaggaccatagaaatgctttgccacattcttcacacttgtagattttctctttagcacagattattttatgtgtagtaagggttgagagctgcttaaaagctttgccacattcttcacatttgtagggtttatcttcagtatgaatttccttatgattagtaagggttgaggaccaatgaaaggttttttcacattctttacatttacaggacttctctgtaatataaacgcatttatgttgggttttgtgtaaacggatgcaaaatgacttgacacattttttacatttgaagcatttctttccggtatgtcttatcgtatgtctgtttgaatttaaaaatttatagaagactttcaaatatttcccacattgaaatactttgctctgggcagttgtgagacactggttaagtttattataaccttctttgtgcaccttacactcatccacacttttacaaccttttcttaactgtaaattctcatgtccacatttttcatattttctcagtaatactttttgaaaagaatcttccatgctctgctctggccaaaagtcttgaggaaaatgaggacatatacctgtgggttcatccaccatctcatgttgcttcatattccagggctcttttccttgctccagataagtaatcaggtctggcttagagagagcaatacccaggaaggccaggtttctgtagttctctaacatcacattcctatataaattctgctgtgcagtgtccagacattgccactcctccggagagaattctatggccacatccctaaatgtcaacagtcccatttctaggcttccaggggttcctggcatcttagctgtggctcttccaatacctgcaggtcacagggccacacaggctgggcctcctggagcagaggacacagagcagtgaagtcgagacctg

SEQ ID NO: 150835 - DNA, 6063 bp, Homo sapiens
gcggggagccggcggttatctgggcggcggagcgctcacaatgtggcaggagacagaaaagataagatgctcccaagtcccttgcagctctcttcagaagaaaaatcactagtgctctgctcttgccataataccaaacctttttgactcatgctttggtgctgcaacactggaagaattgcacacagtttccaggaatatctttttttcatttgagtgattctttgtggatgagaaaagatttgagtcttaataattaccttgttttaaagctatttctttatagtctgaactgtttaataaattgggccacttaccaatgagccacacagccagttcttgtcaggagctggttgaaaactgtgctgtgcatgtagcaggaatggcacaagaagatagccgtcgtggtcaagtgccatcttccttttatcatggtgccaaccaagaacttgacctgtccaccaaagtgtacaaaagggaatcaggaagtccttattctgtgttagtggacaccaagatgagcaaaccgcatctccatgaaacagaagaacagccatatttcagggagacaagagcagtgtctgacgtgcatgctgttaaggaagaccgggagaattctgatgacacagaggaggaagaggaagaagtctcttacaaaagggagcagatcatagtggaggtaaaccttaataatcaaacattaaatgtatctaaaggggaaaagggtgtctcttctcagtccaaagagactcctgttcttaagacaagcagtgaggaggaagaggaagagagtgaggaagaggccacagatgacagcaatgactatggagagaatgaaaagcagaagaaaaaggagaagatagtagagaaagtcagcgttacacaaaggagaaccaggagagctgcctctgttgccgcagctaccacttcccctactcccagaactacaagaggtcgtaggaagagtgtagagccacctaagcgtaagaagcgggccacaaaggagcccaaagcaccagtccagaaagctaagtgtgaagagaaagagactctgacctgtgagaagtgccccagggtatttaacactcgctggtacctggagaagcacatgaacgttactcataggcgcatgcagatttgtgataaatgtggcaagaagtttgtcctggaaagtgagctgtcccttcaccagcaaacagactgtgaaaaaaacattcagtgtgtttcctgtaacaaatcgttcaagaaactctggtcccttcatgaacatatcaagatcgtccatggatatgcagaaaagaaattttcctgtgaaatttgtgagaagaaattctataccatggctcatgtgcggaaacacatggttgcacacacaaaagacatgccatttacatgcgaaacctgtggaaaatcattcaaacgcagtatgtcactcaaggtgcactccttgcagcattctggagagaagccctttagatgcgagaactgtgacgaaaggtttcagtacaagtaccagctacgctcccacatgagcattcatattgggcacaaacagttcatgtgccagtggtgtggcaaggatttcaacatgaagcagtacttcgacgaacacatgaaaacacacactggagagaaaccctttatctgtgaaatctgtggcaaaagcttcaccagccgccccaacatgaagagacaccgcagaactcacacaggcgagaagccctatccatgtgatgtgtgtggccagcggttccgcttctcgaacatgcttaaggcccacaaggagaagtgctttcgggtgaccagccccgtgaatgtgccacctgctgtccagatcccacttacaacttccccagccaccccagttccttctgtggtgaacacagccacaaccccaacccctccaatcaatatgaatcctgtaagcactcttccccctcggcccatcccccaccccttctcacacctgcacatccacccacaccctcaccacccacaccaccttcccatccctccagtccctcacctcccgccacctccagctctctttaagagtgagcctttaaatcatagaggccagagtgaggacaactttctgcggcacctggcagagaagaacagttcagcacagcatcattaacatccgtctccttagtgtgttctccaggagacacgtccccatgtgtgagcgtgcacagagggagtcggtgagcatttccttagttctcagactctcctccgcctctaccaagagcttcgccagtgtcactgaatcaacagatccaagggaatgaacaagaagactaccttgagctcacagagggactgtcatctaaaccaggggaaccactgaactaaagcccaatttgcttgcattttctgatgacttttataagtttcaaatactcagacttgtggaattttataatttcatatcagctgatgaggtatgcttgcttttatatcccagacttctcctcaaagaggggataggcctggtttcctttgtactaatcgggaaggctgtgagattaatccagagcattaattgtatcactgtgtatggtaaggaattcttttcagcttttggtgccagctacagagttgagctggccatgtttcacagtatatcaagcattatagagaaagacagaaattttcttctttgtgtagctctcctaacgcactctttattttactacagaaattattttagagtttttgtatagacttctttggtagtctgtttctaaaatgaaatgtatttcaataagcagtgtaattttttcagtgtagctgaacctatgttgtaaaatagaaaaaaatttttataatcatcaaaatgtgattcttaaagatgcatataacttctataattcaaagctattcttacatccgtacaactcaaaaggtgcttcagagactagatgtatctgagagggtctccagaccaggttactgcaaaaatgaggttttgctttcaggatttggcgtaaatacttggtagttttgacatctctgcttaacactcaagagaggctccctaatgtgctcctgtcctccatgttctgcttggcttcgttagtgcattacatgaaatgatttgcaggggatggggccttttccagggaagtcacctaaagcttgcatgttttgaaaatttgaataaggctgtttgctgacaggaggaggaagtagtggagatcatttcatctcagtcacgtctgtttctcacttcccttaggaattgtgttgatgtttaacttttatgggatgacaaattgaaatcgctcattttgaggttgctttatttttctagaattgttataagaagctaaaatagtaaacttaaaatcacaaacatgacattgctgatagtggctgagaaattcagatgagaagacaaattggttatgaattttgaaatatctattatatgtaaaatgtggatatgttcacaaccttgagctattttaacacagtttaaatatagtgagggaaaactcctaagttttactgccctgtcctctgcaaattatgtaataccagcattcttaggcgataaagagagcagcacctctagtacctttaggcagattactttttcaagtttggggaacttcaaaagaccataatcaaccaggagcttattataggaaaggctgaacagaagggctagtgtattgattacacttaacagatcatatttatccagactcagtatagcttaaaattttgtatttctttatctgagagaactgagttcccaggctaaatcacttacctcccaccccctctccaattttttttttaagagacaaggtcttgctatgttgcccaggctagagtgcagtggctattcacaggtgcagttatagcacactacagcctccaactcttgggttcaagcaaccctgcctcagctaaccaagtagctgggactacaggtgcatgctaccatgcccagtccattttttaatcttgaaatttcttcatttttctttcttcggtttcttaaaatctttgcctgaatcagaacgctggcttttatttatttttttatttttaatattaaatgtgcagatatgcttcgagcacttttctaactaatgagctctgtggtaagaaaaaatgaactctttcaattgagattaagtccatatttttcaaacatcacgttctctattggctttttggtttagtgtttctaaattttctccttctgattttgcctgtcttatataatgagcataggaaaattttggaatgaggcagaaaagtatatcaagacatacttcctggttttggatgtaagttttaaagaatggtatttttaatatttgtacacattctttgagcacccaggtacccaagccaataaggaaagttaattccttgcatatgactgttatatctttagtggttgtctccctctccctccacagtctccttggcattccatgacaagtttgtcaacctacacttttatatagacatgtcattatttcatggtcaagcctgtagtattaaaatgatttttttaaaagatgtaaactgtgcttagttaattggttatattttgttctgtttttttttttttttttttttttttttgaggcagagtcttgttctgttgcctgggctggagtgcagtggcgtgatcttggctcactgcaacccccgccccccgggttcaagtgattctcctgcctcagcctcccgagtagctggaattacaggcatgcgccagcacgcccggctaagttttgtatttttggcagagatggggtttcaccatattggccaggctggtctcaaactcctgaccttgtgatccgcccacctcagcctccgaaagtgctgggattacaggcgtgagccaccacgtccaactgccttattttgttctgaataaatttacagtattgggcagcaattctggattctagacttgagaccacagaatcaaccatttcatgaggttgtactgtaattatacactggaatattcaggtagtcatctttgatttttcattcaagtaaatatagccataagaaaatatctgctatacaggaaaaccagtattaagcaaataccaccatccttaacagaaacaaaaatatatatatatattatttttaaaaattagcattgtcatacagtacaattcttagtgaagtgtattgtggaacaatttagaaacttcctttttttcccctagattaaggatactttccttgacttgagacttgtggtcttcaggaaaactactcagaatataatgactcctcatcagtatcatattgtatataaataatgaaatgcattaagaatattcacaacattgaacccaggaggcggagcttgcagtgagccgagatcccgccactgcactccagcctggggtgacagagcgagactccgtctcaaaaaaaaaaaaaaaaaaagaaaccacagcagctgtggctggggagcccagatgaagtgtggctctatcttgtatgtgagcacacccacattttcactgccattatctgggacagcagaaccaggtttggctcaacagatttctctttccacccatctattgcaggagtagtggtcttgctgcttctccagggaggtaagtagtcaataagtcactaccgcctggatctcctggcttgggtgctttcatttttgatgtacagtttctttttctgctacatgctttttctcttgattactctctccggttctgccactgacatatttatgacactgagtttttattctatctttttgtgtatcccttgttctagttctttttgagccactctctctctcacccctcccccatagctggcctcaatatgtgtgtgtgaatacaaacatacacaatgtttgtattatctgtttctctactgatctgtgtcatccatccatacatacatactgaatcttagtgctccatgggtgtttcatatgttggtggtatctctgtctctcaatgtattttttttttaatttttttgagacagggtctcactgtaaggtccaggctgtagtgcagtggtgtgacc

SEQ ID NO: 150836 - DNA, 741 bp, Homo sapiens
cctttgtgcagatcaggcccgtggattggtgagtgaatcctaaccacgtcttccctggcctgtcttcactcttctccccagaatcaccacttctgcactggtgtctgaaggtgtattgagtgattttgtggagggcagaagtaggaagtctttgggacaaaactgtatttaccttgggatctgtgaacaagaggaacctcagcagccaggacaggcaggagcagtggaatagctagtatggcttctggaatcctggttaatgtaaaggaggaggtgacctgccccatctgcctggaactcctgacacaacccctgagcctggactgcggccacagcttctgccaagcatgcctcactgcaaaccacaagaagtccatgctagacaaaggagagagtagctgccctgtgtgccggatcagttaccagcctgagaacatacggcctaatcggcatgtagccaacatagtggagaagctcagggaggtcaagttgagcccagaggggcagaaagttgatcattgtgcacgccatggagagaaactttctactcttctgtcaggaggacggggaaggttcattttgctgggctttgttgagcggttttcagggagcaccgtggttcaccacacgtttcctcacagaggaggtttgcccgggagtaccaagtgaagctccaggcagctctggagatgctgaggcagaagcagcaggaagctgaagagttggaagctgacatcagag

SEQ ID NO: 150837 - DNA, 1411 bp, Homo sapiens
  misc_feature (1)...(1411): n = a,t,c or g
ttttttttttttttttttgcaaggccagataaagcatttattctgtgaaaacagtgctgatgtctgagtgctaaaagggcaactggcctccagtggcaggtgggggctctggccaggggaaaacatggtccacacatgcctgcatgagtggcaaaactttaatgggggcaggtgagaggagatcctggaggcgggagacgcccggcacccaagccacagcaggagacccataggggacgcttccagttttaggttgtggagtgaggcattgtgaattgccaagaagacaagctaagctccttcaccagggcttgacgggcctgggagggcccatcagtgagcaggggccagccctcaggatcccaatgcaagaggtggcagtgaggtcaggtcagctcaggaagggaagtgtggcaagagcccccattgacagcctgtggggctttggcagccacataactggcaggtgaggggatgcacataaggtccaggggagaaagcacgttaagggcgcctggggcctataagtggggctctaccacaggggcagaggggtggctgggggagaagcttgggccagggactaggctgcaggcaacatctggaggctcttggccaaaggttaagaaggccagggaggagtggcccaggctcaaggaagctgaccccnggaaaacggcctagctaaaaaaggcccaatgagagcacccactcaatctgagactgggaaacaggaagacttagggagctgacaagggttgagggcagggtccctggagcataggtcaagcagggaggcacaagtcctagaaagaccccaggatctacgtatggctgggtcagccctttgaggccaggtctcagggaacagggagctgagagctgcagggagtgaggctgacaaagcagcacttgtacctatgcgcccacctctgcccagactctgcagtgccctggggattgggaggcttcagctggctccttggggcttgcagtggttttctgtccagtccccacgccgtgcccaggaagagtcttctcatggctccctggccatccgcctgccacctccaccttctgcacaggcagccgagtcacggtgcctacctcacagtactgctctgcacaaccttcattcttgctggtagcaacactgcacagggctggaaagtgcctccaatccttactggagcctaagcgtagctctgcttctcagaagagcacagtctctgaacaaggggacccagggggcctgcagacagctgcaggaaggcctggtctgagaaagcctggcaaaggggaccctggagctggtgtccggctgcaggggcctcaggtgggtgtggccctctccacccatggctctggggccagctcccgctccaactgctcctgctccctgcaatccagc

SEQ ID NO: 150838 - DNA, 596 bp, Homo sapiens
  misc_feature (1)...(596): n = a,t,c or g
aaccctaacaatttnaacttgtaacgggaangaaaaaaacacgtttgtgcaagtgtgccatgtaaagttttacccataattatgtntaataattttgaaaacaggttcctcactctgtcaccccaggctggagtgcagtggcgtgatcttggttcaccgcaacctctgncctccctgggttcaagcaattctcctgcctcaggctccccagtagcttagattacaggtgcccgccaccatgacaggctaatttttgtatttttagtagagatggggttttgctatgttggtcaggctggtctcgaactcctgacttcaagtgatccacccacctcggcctcccaaagtgctggggttacaggtgtgagccactgtgcccggcctagttttgccttataattttaaaaatctgcttgatataatctagagttgtgtctcttttatcatcattaatactctaaatgtattatctttcattttctcttccttgattataactgccaaaatctaatcactattaacattgaatcaagtctaatattctccattctcttaatttctactttctactgttacttggctgaaattccacggca

SEQ ID NO: 150839 - DNA, 639 bp, Homo sapiens
ctttgatatcaaccaagagatcaaataggtattgtgttattgagggcacagaaagaaagataggttgatatgttactattgttaggtataaaagcacaaagaaatagactttctgagcttagtgtatgtggaagaaattatatacaaatcaattggtgaagtactaagtctttgatgaatgaacaaatgaaaaggaacagataattcaaaaggaagaaaatgtaaatgcctaataaacatgtgaaaagatattgagcctcctagtaatgagaaatttttgcttctcatgtgagctgattttaaaaattcccaatgatatggctgccttgatatcgctggggggaagtactcaatccatgtaatttttttgaagagcattctggcagtatttcaagagcctaaatatgttcatgtcctttgacccagcaattctgctaataggaatatatcccaaggaaaagtcataaatacagaaaatactttatgcccagaagtgtctgagatattacttatggtagtaaaaaattataattaatatatttgtcacactaggaatgatcaggcaggattgatctatatctatatagtggaatatacttagcattaaagtaggtttgtgaattcttcacccttaaaggg

SEQ ID NO: 150840 - DNA, 251 bp, Homo sapiens; identical to SEQ ID NO: 144904

SEQ ID NO: 150841 - DNA, 501 bp, Homo sapiens; identical to SEQ ID NO: 144905

SEQ ID NO: 150842 - DNA, 525 bp, Homo sapiens; identical to SEQ ID NO: 144906

SEQ ID NO: 150843 - DNA, 151 bp, Homo sapiens
  misc_feature (1)...(151): n = a,t,c or g
gtggcttccttcgttattggagccaggcctacatcccagcaaccatgtccaagggcctgcagttggtattgatcttggcaccacctactcttgtgttnngatcagggaaccgaaccactccaagctatgtcgccttaagaccgggttaatc

SEQ ID NO: 150844 - DNA, 1787 bp, Homo sapiens
atgtgtctcctggtgatcacttactccagtcgtcatgtctacaataacttgactgaggaacagaagggccgagtggcctttgcttccaatttcctggcaggagatgcctccttgcagattgaacctctgaagcccagtgatgagggccggtacacctgtaaggttaagaattcagggcgctacgtgtggagccatgtcatcttaaaagtcttagtgagaccatccaagcccaagtgtgagttggaaggagagctgacagaaggaagtgacctgactttgcagtgtgagtcatcctctggcacagagcccattgtgtattactggcagcgaatccgagagaaagagggagaggatgaacgtctgcctcccaaatctaggattgactacaaccaccctggacgagttctgctgcagaatcttaccatgtcctactctggactgtaccagtgcacagcaggcaacgaagctgggaaggaaagctgtgtggtgcgagtaactgtacagtcaaccatgttccaagggaccttgcagttgggtattgatctgggcaccacctactctttgtgtgggtgttttccagcagcggaaaagtccgagattaattgccaatgtatcagggaaaccgacaccactccaagcgtatgtcgcctttacgggacactgaaccggttggatcggtgatgccgcaaagaatcaaagttgcaatgaacccccaccaacacagttttttaatgccaaacggtctgatttggacggcagattttgaatgaatgctgtttgtccagtcttgattatgaaacattgggccctttattgggtgggtgaaatgatgctgggcaggccccaaggtcccaagtaggattacaagggagaagaccaaaaagctttctatccagaggaaggttgtcttctatgggttcctgacaaagattgaaaggaaatttgcagaagccctaaccttggggaagaactggttaccaatgctgtgggtcacagtgccagcttacctttaatgacttctcagcgtcaggctaccaaagatgctggaactattgctggtctcaatgtacttaggattattaatgaggccaactgctgctgctattgcttacggcttagacaaaaaggttggagcagaaagaaacgtgctcatctttgacctgggaggtggcacttttgatgtgtcaatcctcactattgaggatggaatctttgaggtcaagtctacagctggagacacccacttgggtggagaagattttgacaaccgaatggtcaaccattttattgctgagtttaagcgcaagcataagaaggacatcagtgagaacaagagagctgtaagacgcctccgtactgcttgtgaacgtgctaagcgtaccctctcttccagcacccaggccagtattgagatcgattctctctatgaaggaatcgacttctatacctccattacccgtgcccgatttgaagaactgaatgctgacctgttccgtggcaccctggacccagtagagaaagcccttcgagatgccaaactagacaagtcacagattcatgatattgtcctggttggtggttctactcgtatccccaagattcagaagcttctccaagacttcttcaatggaaaagaactgaataagagcatcaaccctgatgaagctgttgcttatggtgcagagatgaggcaggacaagaaagagttgctgctggatccgattgcagaggacttcttggaggaggtggcttttgacaagaaaaggatgggttttggagggttctga

SEQ ID NO: 150845 - DNA, 445 bp, Homo sapiens
  misc_feature (1)...(445): n = a,t,c or g
ccgcaaagaagggtggcgagaagaaaaagggccgttctgccatcaacgaaggnttaacccgagaatacaccatcaacattcacaagcgcatccatggagtgggcttcaagaagcgtgcacctcgggcactcaaagagattcggaaatttgccatgaaggagatgggaactccagatgtgcgcattgacaccaggctcaacaaagctgtctgggccaaaggaataaggaatgtgccataccgaatccgtgtgcggctgtccagaaaacgtaatgaggatgaagattcaccaaataagctatatactttggttacctatgtacctgttaccactttcaaaatgtttacagtcgccaagagcccataaagggagccctcctggnaagtgggttgaggcctgggttttcggctcttcattgcttcctggagntggcagcagatgccttg

SEQ ID NO: 150846 - DNA, 928 bp, Homo sapiens
cccacgcgtccgtgcaagatggcgggtgaaaaagttgagaagccagatactaaagagaagaaacccgaagccaagaagagttgatgctggtggcaaggtgaaaaagggtaacctcaaagctaaaaagcccaagaaggggaagcccccattgcagccgcaaccctgtccttctcagaggaattggcaggtattcccgatctgccatgtattccagaaaggccatgtacaaaaaggaagtactcagccgctaaatccaaggttgaaaagaaaaagaaggagaaggttctcgcaactgttacaaaaccagttggtggtgacaagaacggcggtacccgggtggttaaacttcgcaaaatgcctagatattatcctactgaagatgtgcctcgaaagctgttgagcccacggcaaaaaaacccttcagtcagcacgtgagaaaactgcgagccagcatttaccccccgggaccattctgatcatcctcactggacgccacaggggcaagagggtggttttcctgaagcagctggctagtggcttattacttgtgactggacctctggtcctcaatcgaggttcctctacgaagaacacaccagaaatttgtcatttgccactttcaccaaaatcgatatcagcaattgtaaaaatcccaaaacatcttactgatgcttacttcaagaagaagaagctgcggaagcccagacaccaggaaggtgagatcttcgacacagaaaaagagaaatatgagattacggagcagcgcaagattgatcagaaagctgtggactcacaaattttaccaaaaatcaaagctattcctcagctccagggctacctgcgatctgtgtttgctctgacgaatggaatttatcctcacaaattggtgttctaaatgtcttaagaacctaattaaatagctgactac

SEQ ID NO: 150847 - DNA, 1272 bp, Homo sapiens
  misc_feature (1)...(1272): n = a,t,c or g
ctggattctacatcctggtttctggaaaaatgcttatcttagaattagcaaaacatacaagtagaataattaacaatatgccttcagtatcccaactacccagaacagaggttctaaaactaggttgcagtttgaaatcactttaaaaccccaggggatggggagaaggcagcacaggccatcaatttgggaaaagctcttcaaatgatcccataattaggatagggtatacaagtacattatgttgcaactaaaaagaacaaaaacatgaaggcaattttataactttatttgatctgacgatcagcgattagttctcatccacattgactgtctgtagatctgtaaaggaagtaacagtcaatttccatacccacatcacatttcatatttcaactctaaaaaccttttcgtagacgggtctggacattctattttcccacaacctttttacatccccagatatggatcagttttgcattctttagcatcttcccacaccaacaatttaaaaagggtacaatgacgtgtgtcacccctagcttaacagatgaattcacattttaaagaggtaaggacatttttccaaatgaattttaaatggccttaatgggatgggagaacctacctttggaaagtggtaaacaggtacataggtaaaccaaagtatatagctttatttggtgaatcttcatccctcattacggttttctggaccagccgcacaccggattccggtatgggcacattccttcgaatacagataactttagcaccttattcctttggcccagacagctttgttgagcctgggtgtcaatgcgcacatctggagttcccatctccttcatgggcaaatttccgaatctctttgagtgcccgaggtgcacgcttcttgaagcccactccatggatgctgcttgtgaatgttgatggtgtattctcgggttatgcacttcgttgatgagcagaacggccctttttccttctcgccacacattctttgcgggagccattctgcagcgtccaagttggaaagaaaaagaaggagaaggttctcgcaactgttacaaaaccagttggtggtgacaagaacggcggtacccgggtggttaaacttcgcaaaatgcctagatattatcctactgaagatgtgcctcgaaagctgttgagccacggcaaaaaacccttcagtcagcacgtgagaaaactgcganccagcattacccccggggaccattctgatcatcctcactgggacgccacaggggc

SEQ ID NO: 150848 - DNA, 2610 bp, Homo sapiens; identical to SEQ ID NO: 144874

SEQ ID NO: 150849 - DNA, 1845 bp, Homo sapiens; identical to SEQ ID NO: 144875

SEQ ID NO: 150850 - DNA, 377 bp, Homo sapiens; identical to SEQ ID NO: 144876

SEQ ID NO: 150851 - DNA, 621 bp, Homo sapiens; identical to SEQ ID NO: 144877

SEQ ID NO: 150852 - DNA, 2852 bp, Homo sapiens; identical to SEQ ID NO: 144878

SEQ ID NO: 150853 - DNA, 1627 bp, Homo sapiens
  misc_feature (1)...(1627): n = a,t,c or g
ttacaaatgtgacctgattacgaacgtatactactacattttgaacctcgacgtcaagaattcgactcgaggacgatccctgcgagttaattgggggtgggttcccttgcccagggagacacaatcagtatgacagtatctatgacctgcaaaaatgagcaatttagcatgtcagtcatttatacttcattagtcccatagcaaccctccaagagggcccttnnnnnnnnnnnnnnnnnnnnnnnnnnnnnnnnnnnnnggggggttaatttgctcagtctgtttgctcacagactcagcagatggccaagctggtacttattccaagtttagactggccccaatgcccatgctgggaattgctggggatcacagtcctctgtgcctctctcaccacaaaactggaacctcacaaactccctgacactaggcagggcctccccagcccctactgacctgcccacacctccatttggactgacacatttggactgtgccatcacattcccctcagaacagccctgataaatgtaccggtgcatgtgagtacatatatgcatgtgcacgcatatgtgtgcagcctgcgagcacgtagtgggtgggtgtttactatcaagaaacaacagacagccgtgagcctcactcaccccatctatggggtgggaagcccacgggtggcgcatatggttgctgtgagcattactcaagagagagaagatgacttaacggcttgcatttcagtcacatcaaaaagccctgcgccaacgataaaatcacatcccatttgccccaacccccataaagggtttccctggacgtgcccgatttccaaagcctaatgtttgtagtcacatctccacctctatctgccagtgttggggcccctctggggcccagcagcgctaagacaggaggaaggcacggggctgggggagaaggaacccctagaccctgctcaccactgcccttcggcttttcagccacaccggtgagccccgccatgtcctatctgagtgagtacatgctggcagctgccactcctcccactgcttagagcctgcccctgccacatgtccctccaccgtggctactcactcagctctccgggatgggcagatggacaatgtgccctgaggagattgcggggtgggagggcaatggcattagcgagcgggaaggggaggggaggggcataagctgaactcctatgggggtcgtcgggcgcgctcccagggccacttgcttagctcagccctctctccctttgtatctgcagccagctaccagcctcctcaaaacccctactactatgtggacggggatccccacttcatcatccaaattccggagaaagacgatgccctctgcttcaacatcgatgaagccccaggcacaggggctgcgccttattcaggatgcagtcacaggccctcacagttaatgggcaaatcactggcgacaagagaggcagccctgactccaagaccagaaagacttactttggaaaactgggcatcgccaatgctcagatggacttccaggtggaggtgacaacggagaagatcaccctgtggaacagggccgtgccgagcactttcagctggctggacacagtcacagtcacgcc

SEQ ID NO: 150854 - DNA, 554 bp, Homo sapiens
cttttttaagagcgagcggttttgcgggggcggttggggggggccgccgccaaggggaggccgtctcgcctcccgcgcgccggtagatgggttgtttcattagggaggggggggaggagggtaaccttattatcaaaaagaggtttgtgtctgaggcagaactatgatgttcggcgcaaaaggaggcaagaagaatgggagaatgttcgaaaacctgaagatccagaagaatgtccagaggaggtttatgaccctcgatctctatatgaaaggctacaggaacagaaggacaggaagcagcaggagttacgaggaacagtttcaaattgcaaaaacatgggtaaggggctttagatgaagatgagaccaacttccttgatgaggtttctcgacagcaggaactaatagaaatgcatcgaatagaagaagaactgatagaactgaacgaatacagaattgcgctctggaatgtcggaatttcttatgagaactatgaaggacggggatgagatgctgtactgtaactctattacaatccaagttctagtagttcg

SEQ ID NO: 150855 - DNA, 552 bp, Homo sapiens; identical to SEQ ID NO: 115513

SEQ ID NO: 150856 - DNA, 1049 bp, Homo sapiens
ctagaaagatggcggagcaagagcaaagaaaaatccctttggttccagaaaatctcctgaaaaagaggaaggcttatcaagccctcaaagccacccaggcaaagcaggcacttttggcaaagaaggaggtaatggtggggaaccaagagaaagtaattagaatttttatttggtgagttttatcccgcatgtgttggactacatttggtattgacgagctccccccaacggtttgacagaccagcagaagaaaggaaaagggctcaggtttaagcgactggaatcattcctacatgattcctggcggcagaaacgtgacaaggtgcgtctcagacgactagaagtgaaacctcatgccttggaattgccagataaacattccttggcctttgttgtacgcatcgaaaggattgacggcgtgagtttactggtgcagagaaccattgcaagacttcgcctaaagaaaatttttagtggtgtctttgtaaaagtcaccccccacaatctaaaaatgctgcgtatagtggaaccttatgtgacctggggatttccaaatctgaagtctgtccgagaactcattttgaaaccgtggacaagccaaggtcaagaataagaccatccctctgacaagacattacagtgatggaggagcacctggggaaagtttggcgtcatttgcttggaagacctcattcatgaaattgccttcccagggaagcatttccaggagatctcatggttcttgtgccctttccaccgtctcagtggcccgtcatgctaccaaaaatagagtgggcttcctcaaggagatgggcacacctgggctatcggggtgaacgcatcaaatcagctcatccgtcagctgaactagacccaggtgccaaacttgcggtaaattttttatccagtgaagtgggaagcatgtgttttgtttttggaaatttttatcaagtatcttcagagaagattatttccctgctttatcttccagaaactgggaaagggttcaaagaaaagacagttaggctgggccggtcgtggttggctca

SEQ ID NO: 150857 - DNA, 941 bp, Homo sapiens
  misc_feature (1)...(941): n = a,t,c or g
cggacgcgtgggcaggctctaaaaaccctggaagcgttgcttcttttggcaggaatgggggttagcaggacctcaatggctcactatggctaagtgaacgctgactgggtcctccagcgtgagctagaacagacgtctctatggtcaagtaaacagcgcgcgtgctgtctttcccatgtggtggggttgcgcatgatcagtagctgcaccactagaaagatggcggaggaagagcaaagaaaaatccctttggttccagaaaatctcctgaaaaagaggaaggcttatcaggcactcaaagccacccaggcaaagcaggcactttttggcaaagaaggagcagaagaaaggaaaagggctcaaggtttaagcgactggaatcattcctacatgattcctgggccggcagaaacgtgacaagggtgcgtctcagacgactagaagtgaaacctcatgccttggaattgccagataaacattcacttggcctttgtttgtacgcatcgaaaggattgacggcgtgagttttacttggtgcagagaaccattgcaagacttcgccctaaggaaaatttttagtggtgtcttttgtaaaggcaccccccaggattcaaaaatggctgcgtatagtggaaccttatgtgacctggggatttccaaatctgaagtctgtccgagaactcattttgaaacgtggacaagnccaaggtcaagaataagaccatccctctgacagacaatacagtgattgaggagcacctgggtgagtgctacagcttaggggtcagctggggcagaaagccagggtctttgaagctttgatgtgagattcacggttgtattcttcttggggccccaagagtctgccagagtggccagcttagtatatgctggatacatgttaaataaaggaatctgagcttttgtgtttcttagagaaa

SEQ ID NO: 150858 - DNA, 370 bp, Homo sapiens
gatcagcatagtacagcgagcaagcgtggtgagccacgcgcagcagactaggcaaacatactcgcagatctaaatcgtcagccatccaggcagtacggatcatctcccaagtgctccggtgcaagcaaagatgtatgcactgtccgagaaccattccagcaacactgcaagagcataaaagtgtaaacaacccaagtgcccaacagagaaccaaaacgtggtccatccacacgccagcacctcatccacacaccagcacctcatccatccacacaccagcacctcatccatccacacagcacctcatccatccacacaccagcatctcatccatccacacaccagcatctcatccatccggacgcgtggg

SEQ ID NO: 150859 - DNA, 506 bp, Homo sapiens
  misc_feature (1)...(506): n = a,t,c or g
aagaggtcgttcgatttganaccggtccggaannaccgggncgacgatttcgtgcggcggcggtgatggctcctccgggctgcccgggtttttgccccaacttcgttttagtctgctccttcttggagcgctacgggccgctgctagacctgcctgagttgccgctccctgagctggagcgggtgctgcaggcgccgccgccggacgtcggcaacggagaagtaccaaaagaattggtggagctccatttgaagctgatgaggaaaattggcaaatctgttactgcagacagatgggaaaaatatttgatcaagaaatcgaaacgagttggctgagactcttgcactcctgaaagcacaaattgatcctgtactattgaaaaactctagccaacaagacaactcttctcgggaaagtcccagcttagaggatgaggagactaaaaaagaggaagaatcacctattcatgaggaacagaangaaagtgaaaagataaaaatgacgag

SEQ ID NO: 150860 - DNA, 1078 bp, Homo sapiens
aacggtcgacgatttcgtacggggaggagagaagggggcggatttagggcttaaagtgaaaggcgccgagggccgctctgtctcccgtctgactcggttctcgactgctccgggccgccgatgtattgtgggatcgcggagccgtccctaagacgctgggatccgcagaggagcccacttgagagcgcctcctgtcgtctgttaggttgccttgccatccctcggcaccccaacttcccccgcccccccatcgcctcctcctccatcctccagatcaaaatggcgacggcggcggcagcggcggcggtgatggctcctccgggctgcccgggttcgtgccccaacttcgccgtagtctgctccttcttggagcgctacgggccgctgctagacctgcctgagttgccgttccctgagctggagcgggtgctgcaggcgccgccgccggacgtcggcaacggagaagtaccaaaagaattggtggagctccatttgaagctgatgaggaaaattggcaaatctgttactgcagacagatgggaaaaatatttgatcaagatatgccaagagtttaacagtacctgggcatgggagatggagaagaagggctatcttgaaatgagtgttgaatgcaaactagcactcttaaagtacctctcgtgagtgtcagtttgatgacaatctcaaattcaagaatattattaatgaggaggatgccgatactatgcgtctgcagccaattggtcgagacaaagatggcctcatgtactggtaccaattggatcaagatcacaatgtcagaatgtacatagaagaacaagatgatcaagatggctcttcatggaaatgcattgtcagaaatcgaaacgagttggctgagactcttgcactcctgaaagcacaaattgatcctgtactattgaaaaactctagccaacaagacaactcttctcgggaaagtcccagcttagaggatgaggagactaaaaaagaggaagaaacacctaaacaagaggaacagaaagaaagtgaaaagatgaaaagtgaggagcagcctatggatttagaaaaccgttct

SEQ ID NO: 150861 - DNA, 733 bp, Homo sapiens
gcatctggaccggaactcccgggtcgacgatttcgtgatcgagctccctggctgccggctcgccttctgcgtggagatctttcggtttgggtttcgctgactgctcttggcccggggtcattttgtcggcgtcgggtgccctctcttgcccagctggggcacagcgaggcggccccttctcccgacgacgttcgatggagtagggtcccagaccgttgtcccgaagagcgagatcgagcttggccccctcccccccctccttccctccctccttccttccgccgcaacatggctaacaacagccccgcgctgacaggcaactcgcagccgcagcaccaggcggctgcagctgcggctcagcaacagcagcagtgcggcggcggcggcgctaccaagccggcggtctccggcaagcagggcaatgtgctcccgctctggggcaacgagaagaccatgaacctcaaccccatgatcctgaccaacatcctgtcgtcgccttacttcaaagtacagctctacgagctcaagacctaccacgaggtggtggacgagatctactttaaggattgactcagtcttgcagcgaggctcggagcagcccagggtcgcaggtagaggtcacgcacgttgaaccatgggagaaaggaagcaggaaaacagcgggccagacagggatgtgcggaggggttcgaggtgttggaacaggaggaattgtttctacagcattttgcct

SEQ ID NO: 150862 - DNA, 1183 bp, Homo sapiens
gctaacaacagccccgcgctgacaggcaactcgcagccgcagcaccaggcggctgcagctgcggctcagcaacagcagcagtgcggcggcggcggcgctaccaagccggcggtctccggcaagcagggcaatgtgctcccgctctggggcaacgagaagaccatgaacctcaaccccatgatcctgaccaacatcctgtcgtcgccttacttcaaagtacagctctacgagctcaagacctaccacgaggtggtggacgagatctactttaaggtcacgcacgttgaaccatgggagaaaggaagcaggaaaacagcgggccagacagggatgtgcggaggggttcgaggtgttggaacaggaggaattgtttctacagcattttgcctgttatacaaattatttaccctgaagttaactcgaaagcaagtgatgggtcttataacacacacagactctccatatattagagcgcttggatttatgtatataagatatacacagccccctacaggatctgtgggactggtttgaatccttccttgatgatgaagaggtatgtcaacaagggtaataatttgttttcttctgattactctcatatttttattatcttttatttattggtggtttaatgtcttcaagaacttcctgtagttaaatttatttcagtgaagatacttttggaaattaaatgtccttttactgagacctgatggcttttatgtattttagggtaaatttctgaagttttattttcttgttttaaaattgtttaaatgtgtttggtaactattggaaaattttctcttcttaattatgttctgtgtattgtattgatcctgaattgtatagttaatagtgacttttcaagatggggcatgctcaagatcgaacagataataaaagatatgcacatagaatactaattgtagcttttttttcttctggaacatttcagttcttcaccctctagcttcttccaaatatcagtattcccacttgcatagaagtgcagaattgaagagttgggtgttacataaataggctaagtggttggatgacttgctcaaggtgacaaaattttaagtccagttttctgactcctagtacaccacacacacctttaaaaaagaaattttttaaattgtaattcgagtctccctaatttgaaatctgaaat

SEQ ID NO: 150863 - DNA, 531 bp, Homo sapiens
cgtgaacagtaacaaactttggtgaaatttcaggaaccatagccattgaaatggatgagggaacctatatacatgcactcgacaatggtctttttaccctgggagctccacacaaagaagaatcgccctgaaatctggctatggaaaatatcttggtataaattcagatgaacttgttgggcattcagatgcaattggaccaagagaacaatgggaacactgaaaggttttgaccagaccattaatttgattttggatgaaagccatgaacgagtattcagctcttcacagggggtagaacaagtggtactaggattatacattgtaagaggtgacaacgttgcagtcattggagaaatcgatgaagaaacagattctgcgcttgatttggggaatattcggagcagaacctttaaattctgtagcacactgaggaaaaactacatacttggacatctgtaaacctttgtacaggaactggattattcctgaggatgatatatggagtgtttatgagtgtgtcactggatt

SEQ ID NO: 150864 - DNA, 685 bp, Homo sapiens
gacgtacccagtcagggaatgtttactttgcctccacttctgttcctccccgccctggtgctgctccgggtcacatactcgtcctgagccggcttcagcctctccgcgcagaagtctcccggagccgacttctgagagtcgagtactcctatgtgaagactaccaagctcgtgttcaagggaaccaaggcgaagagtaagaagaagaagagcaaggataagaaatgacaaagagaagaagatgaggaaacccagcttgatattgttggaatctggtggacagtaacaaactttggtgaaatttcaggaaccatagccattgaaatggataagggaacctatatacatgcactcgacaatggtctttttaccctgggagctccacacaaagaagttgatgagggccctagtcctccagagcagtttacggcctgtcaaattatctgattccagaatcgccctgaagtctggctatggaaaatatcttggtataaattcagatggacttgttgttgggcgttcagatgcaattggaccaagagaacaatgggaaccagtctttaaaattggggaaaatggctttgtcgacctcaaatagctgctttattaggatacagtgaagcagaggacatagaagcaaaaagtaaaacagcaggagaagaagaaatgatcaagattagatcctg

SEQ ID NO: 150865 - DNA, 662 bp, Homo sapiens
ggtgaagacggaggcgggttctggacagacgtaggctgtcagggagtgtttacttcgcctccacttctgttcctccctgccctggtgctgctccaggtcacatactcgtcctgagccggcttcagcctgtccgcgcagaagtctcccggagccatggcctagtactcttatgtgaagtctagcaagctcgtgctcaagggaaccgagtaagaagaaaaagagcaaagagaagaagagaaaaagagaagaagatgaagaaacccagtttgatatgttggaatctggtgaacagtaacaaactttgatgaaatttcaggaaccatagccattgaaatggatgagggaacctatatacatgcactcgacaatggtctttttaccctgggagctccacacaaagaagaatcgccctgaaatctggctatggaaaatatcttggtataaattcagatgaacttgttgttggcgttcagatgcaattggaccaagagaacaatgggaaccagtctttcaaaatggtgcctgtgcagcagtattcactgtgataggaagtgagaagcagtctgagtgttcattgctgagggaatcaagggcaaaatatcatggatgcactcatggacaaataagcagcagtttgaagcaacaccctagatggatgtaca

SEQ ID NO: 150866 - DNA, 380 bp, Homo sapiens
gggccacctgcgagtgtgcgcacggactctggacacccgcggcggcgagctgagggagcagtctccacgaggacccaggcggaccctctggcgccatgcggccctccccggcctgctggaggccagggcgcgtacgcccggctgctcctcctccagtgccttctcgctgccgcgcgcccaagctcggcggtacggcagtgccccagattcgccttttacaagtccacctctcagagaagaaataatgtcaaataacttttccttggagagtcataacatatcactgactgaacattctagtatgccagtagaaaacaatatcactttagaaaggccttctaatgtaaatctcacatgccagttcacaacatctggggatt

SEQ ID NO: 150867 - DNA, 328 bp, Homo sapiens
  misc_feature (1)...(328): n = a,t,c or g
cacgcgtgatgtctcacagaaaggtgctccgctcccagacgggggtccctcggcttcctgcctcggaagcgcagcagcaggcatcgtgggaaggtgaatagcttgcctaaggaggacctcgtacatccgctacacctcacatgctacctggaagactcacctgcattcgctgacatcgtgcgaaatgtctacaagacaggaggctctgccatgaatannnnnnnnnnnnnnnnnnnnnnnnnnnnnnnnnnnnnnnnnnnnnnnnnnnnnnnnnnnnnnnnnnnnnnnnnnnnnnnnnnnnnnnnnnnnnnnnnnnnnnnnnnnccaa

SEQ ID NO: 150868 - DNA, 637 bp, Homo sapiens; identical to SEQ ID NO: 144817
  misc_feature (1)...(637): n = a,t,c or g

SEQ ID NO: 150869 - DNA, 763 bp, Homo sapiens
  misc_feature (1)...(763): n = a,t,c or g
gacactcgcttctggaacgtctgaggttatcaataagctcctagtccagacgccatgggtcatttcacagaggaggacaaggctactatcacaagcctgtggggcaaggtaaatgtggaagatgctggaggagaaaccctgggaaggctcctggttgtctacccatggacccagaggttctttgacagctttggcaacctgtcctctgcctctgccatcatgggcaaccccaaagtcaaggcacatggcaagaaggtgctgacttccttgggagatgccataaaagcacctgggatgatctcaaggggcaccttttgcccaagcctgaagtgaactgcactgttgacaagcctgcaatgtgggatcctgagaacttcaaagctcctggggaaatgttgctggtgacccgttttgggcaatcccattttcgggcaaagaatttcacccctgaaggttgcaaggcttcctgggcagaaagatgggtgacttggagttggccagtgcccttgttccttccagataccactgaggctcactggcccatgaatgcagagcttttcaaggataaggcttttattcttgcaagcaattacaaataataaatctatttctgctaagagatcaccaaannnnnatnntnnnnnnncccccggattttttatttagcgggccgcacctttttccccttttagggggggtaaatttatattgggccttgggccggggttttcaaaagcggggggannnnnnnnnnaaagagccc

SEQ ID NO: 150870 - DNA, 600 bp, Homo sapiens
ggcacgaggcgacccaatgggagtccccgccaggagacacaaccggcggctctccggggatttataaggtcccgccagcaaccgcgcgttgggattcgtggtgttgctggagacccgtatggtgtctgcagtcagcgaccctccaacttcaactactggatcaaccatgtgtgagtgcatctccatccatgtgggccaggccggagtgcagatgggcaatgcctgctgggagctgtactgcctggagcacgacatccagcccagtggcaccatgcccagccacaaggccctgtggagcagtgataactccttcaacaccttcttcagggagacccagcctggcaggcatgtgtcctgggctgtctgtggacctggagcctgctgtcatagcacaatgaagtcgctgtagagggaagggaccactgaaggtgccacctgctctccccgtctcaagcccaggcaggacctggccttagaagtgggtctctggtcgggaggctgaggcaggagaatcgcttgaacccgggagacagaggctgtggtgagccaagatcgcgtgattgcactccagcctgggcaacaagagtgaaactccgtctc

SEQ ID NO: 150871 - DNA, 398 bp, Homo sapiens
cctgctttcgcgacatggccttcaattttggggctccctcgggcacctccggtaccgctgcagccaccgcggcccccgcgggtgggtttggaggatttgggacaacatctacaactgcaggttctgcattcagcttttctgccccaactaacacaggcactactgcattaggtggtctcttcagtcagcctacacaagctcctacccagtccaaccagctgataaatactgcgagtgctctttctgctccaacgctgttgggagatgagagagatgctattttggcaaaatggaatcaactgcaggccttttggggaacaggaaaagggtatttcaacaataatattccgccagcggaattcacacaagaaaatcccttttgccgatttaaggcagtg

SEQ ID NO: 150872 - DNA, 258 bp, Homo sapiens
atggccttcaattttggggctccctcgggcacctccggtaccgctgcagccaccgcggcccccgcgggatttggtgggcttgagactgccaactccaccgccagtgggtttaattttgggggtttcggattaactgctaatcctgcagtgaactttaatattgggaatttcggtgtttctactacctcggcgactccgttcaattttggtaacagtctggcaagtgcagagaaacaagtcttatacgaacagcagtaa

SEQ ID NO: 150873 - DNA, 732 bp, Homo sapiens
ctacttggtctcctgctttcgcgacatggccttcaattttggggctccctcgggcacctccggtaccgctgcagccaccgcggcccccggctgggtttggaggatttgggacaacatctacaactgcaggttctgcattcagcttttctgccccaactaacacaggcactactggactctttggtggtactcagaacaaaggttttggatttggtactggttttggcacaacaacgggaactagtactggtttaggtactggtttgggaactggactgggatttggaggatttaatacacagcagcagcagcaaactagcagtaggttatagttgcatgcccagtaataaagatgaagatgggctagtggttttagttttcaacaaaaaagaaacagagattcgaagccaacaacaacagttggtagaatcattgcataaagttttgggaggaaaccagacccttactgtaaatgtagagggcactaaaacattgccagaatgatcagacagaagttgttatttatgttgttgagcgttcgccaaatggtacttcaagaagagttccagctacaacgctatatgcccattttgaacaagccaatataaaaacacaattgcagcaacttggtgtaaccctttctatgactagaacagaactttctcctgcacagatcaaacagcttttacagaatcctcctgctggtatgtttctagaatcacagagttcaaa

SEQ ID NO: 150874 - DNA, 681 bp, Homo sapiens
  misc_feature (1)...(681): n = a,t,c or g
ggcacgagaggggagcgcgctgcgcgtcgcaggagtaacctacttggtctcctgctttcgcgacatggccttcaattttggggctccctcgggcacctgcggtaccgctgcagccaccgcggcccccgcggnaacacattcttgttgtttggaggtgggtttggaggatttgggacaacatctacaactgcaggttctgcgttcagcttttctgccccaactaacacaggcactactggactctttggtggtactcagaacaaaggttttggatttggtactggttttggcacaacaacgggaactagtactggtttaggtactggtttgggaactggactgggatttggaggatttaatacacaacagcagcagcagcaaactacattaaggtggtctcttcagtcagcctacacaagctcctacccagtccaaccagctgataaatactgcgagtgctctttctgctccaacgctgttgggagatgagagagatgctattttggcaaaatggaatcaactgcaaggccttttggggaacaggaaaagggtatttcaacaataatattccgccagtggaattcacacaagaaaatcccttttgccgatttaaggcagtaggttatagttgcatgcccagtaataaagatgaagatgggctagtggttttagttttcaaaa

SEQ ID NO: 150875 - DNA, 459 bp, Homo sapiens
catcgacgtcctctgtacccggccggaattgcccggatgacccgaggcgaccgcacgcgtactggctgcactagaccgaaggggagccgtaccggaggggccgtcggcgccgccatgcaggaaatcatcggcagcgtggaccacatcaagtttgacttggagatcgcggtggagcagcagctgggggcgcagccgctgcccttccccggcatggacagactcctgactcccaggcccccatttccaccgtctggggactccttttaccctcactcggactcaggagttcactgcctcggatctttggccctctgcggctgttcaaagagtcgggcgctgctgtctgtgaattctttttgaaagctgcctgcggcaaagggggcatgtgtccgtttcgccacatcagtggtgagaagacagttgtgtgcaaacactgcttgcgtggactatgcatgaatg

SEQ ID NO: 150876 - DNA, 811 bp, Homo sapiens
gacggcaccatggaggactccgaggcggtgcagatggccacagcgctcatcgagcagcggctggcacaggaggaggagaatgagaaactccgaggagacgcacgccagaagctgcccatggacttgctggtgctggaggatgagaagcaccacggggctcagagtgcagccctgcagaaggtgaagggccaagagcgcgtgcgcaagacgtccctggacctgcggcgggagatcatcgatgtgggcgggatccagaacctcatcgagcttgcggaagaaacgcaaagcagaagaagcgggacgctctggccgcctcgcatgagccgcccccagagcccgaggagatcactggccctgtggatgaggagaccttcctgaaagctgcggtggaggggaaaatgaaggtcattgagaagttcctggctgacggggggtcagccgacacgtgcgaccagttccgtcggacagcactgcaccgagcttccctggaaggccacatggaaatcctggagaagcttctagataatggggccactgtggacttccaggatcggctggactgcacagccatgcattgggcctgccgcgggggccacttagaggtggtgaaacttctgcaaagccatggagcagacaccaatgtgagggataagctgctgagcaccccgctgcacggtgcagtccggacagggcaggtggagattggggagcactttctatccctgggcctggaaaataatgccagaaacagggaaggggatactgccctgcattgacgctgggagggttaaccgctacccaattcttcaaa

SEQ ID NO: 150877 - DNA, 1532 bp, Homo sapiens
agctgatgcaacccagccacctcccggcaatccgcttacttgcaatcaagggttcaggtgcaagcagatgctgactcagcctgttccattaagagctaagaagcaagaagaaattggggcgccatggggaaagcccgcagatccccgccagggcaccacaggcattgtgagggatgcttcaaccgccactgccacattcctgtggaacccaacacctcctgcctggtaataagctgccacctgctctgtggtgccaccttccacatgtgcaaagaggcagagcaccagctcctctgccctttagagcaggttccgtgcctcaactccgaatatggctgccctctgtccatgtaccgccacaaactggccaagcacctgcaggcgtgccccgccagcgtggtctgctgctccatggagtggaaccgctggccaaatgtggactctgaaaccacccttcatgaaaacatcatgaaagagacccccagtgaggagtgtttggacacagccctggccctgcaggatcagaaggtcctcttcagatccttgaaaatggtggaacttttcccagaaactagagaggctactgaggaggaaccaactatgaatggtgaaaccagtgtggaggaaatgggaggagcagtgggtggagtggatatcggtttggtaccacatggtctgtcagcaactaatggggagatggcagagctaagtcaagaagaacgggaggtgctagccaaaaccaaagaagggatggacctggtcaagtttggccagtgggaaaatattttcagcaaagagcacgcagcctctgctttaacaaattcatcagcgagctgtgagagcaagaacaagaatgactccgagaaagaacagatttccagtggccataacatggtagaaggagagggcgctcccaaaaagaaagaaccacaggaaaatcagaagcagcaggacgttcgtacagccatggaaaccacagggcttgccccttggcaggatggtgttctggaaagactgaaaacagctgtggatgcaaaggactataacatgtatctagtgcacaatgggcggatgcctgatacactttggtcagatgcctgcttgtacacccaaggagagagactttgtttatggcaacgctggaggctcaggaagttaagactgtttacaccttcaaagttcctgtgagctactgtggaaagcgagctcgacttggagatgccatgttgagttgtaagccaagtgaacacaaggcagtggatacttcagatttggggatcactgtggaggacctgcccaaatcagatctcatcaagaccaccctccagtgtgctttggaaagagaactcaaaggccacgtcatctctgaatccagaagcattgatggactgttcatggattttgccacacaaacatacaactttgagccagaacagatttcctctgggacagagctggctgacctaaccgctgccaccccagggggactccacgtggagctccacagcgagtgtgtgaccaagagacacaac

SEQ ID NO: 150878 - DNA, 615 bp, Homo sapiens
acgagggctccagtcaggccaatacgctccgctcacggaaggaaaacagaaataacttgctggcttgtctggagtcacatgtacttaggtgacaatttacagaaagtcatctctgcagcttgatgggcgacaaccccttttcaaccaaaaagtaattcaaaaatggcagaactgtttatggaatgtgaagaagaggagctggaaccatggcagaagaaagtaaaagaagttgaggatgacgatgatgatgagccaatctttgttggcgagatatcaagttcaaaaccagcaatttcaaatattttgaacagagttaaccccagctcatattcaaggggactaaagaatggtgcactcagtcgaggtattactgctgcattcaagcctacaagtcaacactacacgaatccaacatcaaatcccagtgcctgcctcaccaataaaattttcatcctgagtctagatcttcagatagttctgttattgttcagcctttttctaaacctgtaagtgtttctaaaactatacggccagctcagggatccattggatgttgtttatcaatatcaacagtacccagttacaattctggactgtcataagtagtcatccagt

SEQ ID NO: 150879 - DNA, 368 bp, Homo sapiens
atctgtcgttttaatccttatgtctttttggcagctaaggcggaccagctccaggtaaggactactcaattgaccttaaatcttgctggttatatcactgcattaatcatagcacattgcaaacatgtaatatctctactttgatatctgggtcacattcctgggctatggattctcattaatctgtctgagccttgtgatgccacccctgtttggcactttgtgaaacttcttctaactaaacttactcatcatgcctgtagagcctcaggcattcataatttttgctattgtttctttggtcacactaatcacttctgctgtaatgtcctctgtagctttgcatagttctgttcaaatggctcagt

SEQ ID NO: 150880 - DNA, 373 bp, Homo sapiens
ggcacgagcaaaatttcatctttgcgttttctactggctccccatcatcgtactagggaggaagaagcgggtgagaaacaaaacttctttccattgtcctgcccgtttctgcggacttgttctgaggccgaggcacctctaagatactgatggctctgcagaggacccattcattgcttctgcttttgctgctgaccctgctggggctggggctggcttatccctcctatggccatgatgtgctgtatccatcgagtcgttgcggataacgggcaccttgaggagaccttagtcatggtatcgctgcttgtccgtgatgattctactacgcattatttctcgtgatgactgcgagcgtctcatcgggctggcg

SEQ ID NO: 150881 - DNA, 1812 bp, Homo sapiens; identical to SEQ ID NO: 118117
  misc_feature (1)...(1812): n = a,t,c or g

SEQ ID NO: 150882 - DNA, 1088 bp, Homo sapiens
  misc_feature (1)...(1088): n = a,t,c or g
ctgcgcaggcccagcagctaagatcgggtccggcgctccagaacagaacgatccctgaggctcccttgctcgaactgtgggacttaccctactatggtccgagcctaccctatttcattatactcaagtaacgccccagaaattccagagaatctcacacaaagaggttgagtcttgccgtggtgccttcaggggaatgtcatcccgggctagaagagctgcaaaaggctgtcaggncttctcagaactttgcttctccagcagaataatcctgcggaagactgagcagttcttgtgagtgtaaaaccattggcccatgcatttggtgacgttcagggatgtggctatagactttctctcagaaggaatgggagtgcctggacactacccagaggaaaattgtcaagagatgtgatggttggagaattataataacttgggtctcactggcaggatattctgggctcaaagccagttgtgattaccttactggagcaagggaaagagccctgcgtggtggcgagggatgtgacaggaagacagtgccccggtttgttatccaggcataagaccaagaaattatcttcagaaaaggacattcatgaaatcagtttatccaaagagagtataatagaaaaaagtaaaactcttcgtctgaaaggatccatttttagaaatgagtggcagaacaaaagtgagtttgagggtcaacagggacttaaagaaagatctatcagtcaaaagaaaatcgtctctaaaaaaaatgtcagctgatagaaaacgtccctcttttactctgaatcagagaattcacaatagtgagaaaagctgtgactcacacttggttcaacatgggaaaatagattctgatgtgaaacatgattgtaaagaatgtgggagtacttttaataatgtctatcagcttactctccatcagaaaattcatactggtgaaaaatcctgtaaatgtgagaaatgtgggaaagtttttagtcatagctatcaacttactctgcatcagagatttcatactggtgagaaaccctatgaatgtcaagaatgtgggaagacctttactctttacccac

SEQ ID NO: 150883 - DNA, 2091 bp, Homo sapiens; identical to SEQ ID NO: 122330

SEQ ID NO: 150884 - DNA, 964 bp, Homo sapiens
  misc_feature (1)...(964): n = a,t,c or g
ctgctctatcgcgagacttgagcgggcactcatctgcggcaagcaggttctaggaattcgcctggttcccacctcgcgtcccttgccttccttcctagtctacccactgtagtgccccctgcgtcccgctccctcctagccgactcagagcacaagaaggattgccacggtttccattgcagcagccgtggcgcctctgaccctttttttatatcgcggcgacggcgggctgtcgtcacgacgacgtgcggacgcagccggcgggggcctttcagcttatgtggagaagtcgctgtgaagccacctataaatccatttactgaacttatgagagaatgctgtaaatgatggaagtcattcagaagaactcttttgccatcttaaaactatctcacagaaagaagattttaacacggtgtanccagtgaaagtcatctcagctggtattctcatcagtatcaggggaaatctaaatttccgattctaggatttcctgttttgtctataatataaattatttgaatcaaatacagcattcttttaagagtatcttttccaaatctagtatttatttattaaaatatatttaatctgattacaagtgtactcatctagcagaattcaactagttttttttgaatcttaatgaaagcaattaaaaatgaaaaccctggccgggcgcaatggatcatgcctgtaatcccagcactttgggaggatgaggcaggtggatcacttgaggtcaggagttcaagatcagcctggccaacatggtgaaaccccatctctactgaaaaaatgcaaaaattagccagatgtggtagcgtgtgcctgttgtcccagctacttggaaggctgtggtagaagaatcaccttcgcctcccaggttcaagtgagccgagataatgccactgcactcctgggtgacagagcctgggtgacagagcgagactccatctcaaaa

SEQ ID NO: 150885 - DNA, 1017 bp, Homo sapiens
atgcttctcaaacttcagtgtgcacacagatcacctggggaaactttcaaaatcaattctgattcagttggcttgggtgaggcctcagctgacagctcttacaagctcctggttgatgcgaatgttgcagagagagctgcaggtctctgctgccgcctagtagttccctgtcacaaagggatgccaaggcttaccgatctgtctgtcaaaaccaaagatgtctgggaaatccctcgagaatccctgcagttgatcaagagactgggaaatgggcagtttggggaagtatggatggagaaagctgatggtttgtgttttaacttaactgtgattgcatcgagttgtaccccacaaacttctggattggctaaagatgcttgggaagttgcacgtcgttcgttgtgtctggagaagaagctgggtcaggggtgtttcgctgaagtgtggcttgagatcccagtttatccattgaagaaaggtagtaaaaggtttgcgaagccctccttccccgtgggagaggtgccctactgtgcatgccgggagttggctgtgggtcatgggcccagtacccctcacccaaatgattcttcccaaccatcaagaaaggaaggagattggtgggaagcccgctccttgacaactggagagacaggttacattcccagcaattatgtggctccagttgactctatccaggcagaagaaagagctgaaaatgaggcacaggtctcagcacagggtaggaaggatccgggggatgggagaaacaaggctctacagcttgtgggaggctctgtggcacgagtcctcacagccactcacgggagtggagcaggagggatggacacaacttgccgaagggatattgaatatgaggaagggaggaaaagaaaacgtacaaaaaagaaaagggaactggaaagccaaatgccaagagggctctgctgtggcctgtcaggaggaccagctgtccagtatggacacaatttaacaagagagacaatggtagaaaagtag

SEQ ID NO: 150886 - DNA, 2651 bp, Homo sapiens
gccgcgctggtggcggcggcgcgtcgttgcagttgcgccatctgtcaggagcggagccggcgaggagggggctgccgcgggcgaggaggaggggtcgccgcgagccgaaggccttcgagacccgcccgccgcccggcggcgagagtagaggcgaggttgttgtgcgagcggcgcgtcctctcccgcccgggcgcgccgcgcttctcccagcgcaccgaggaccgcccgggcgcacacaaagccgccgcccgcgccgcaccgcccggcggccgccgcccgcgccagggagggattcggccgccgggccggggacaccccggcgccgccccctcggtgctctcggaaggcccaccggctcccgggcccgccggggaccccccggagccgcctcggccgcgccggaggagggcggggagaggaccatgtgagtgggctccggagcctcagcgccgcgcagtttttttgaagaagcaggatgctgatctaaacgtggaaaaagaccagtcctgcctctgttgtagaagacatgtggtgtatataaagtttgtgatcgttggcggaaattttggaatttagataatgggctgtgtgcaatgtaaggataaagaagcaacaaaactgacggaggagagggacggcagcctgaaccagagctctgggtaccgctatggcacagaccccacccctcagcactaccccagcttcggtgtgacctccatccccaactacaacaacttccacgcagccgggggccaaggactcaccgtctttggaggtgtgaactcttcgtctcatacggggaccttgcgtacgagaggaggaacaggagtgacactctttgtggccctttatgactatgaagcacggacagaagatgacctgagttttcacaaaggagaaaaatttcaaatattgaacagctcggaaggagattggtgggaagcccgctccttgacaactggagagacaggttacattcccagcaattatgtggctccagttgactctatccaggcagaagagtggtactttggaaaacttggccgaaaagatgctgagcgacagctattgtcctttggaaacccaagaggtacctttcttatccgcgagagtgaaaccaccaaaggtgcctattcactttctatccgtgattgggatgatatgaaaggagaccatgtcaaacattataaaattcgcaaacttgacaatggtggatactacattaccacccgggcccagtttgaaacacttcagcagcttgtacaacattactcagagagagctgcaggtctctgctgccgcctagtagttccctgtcacaaagggatgccaaggcttaccgatctgtctgtcaaaaccaaagatgtctgggaaatccctcgagaatccctgcagttgatcaagagactgggaaatgggcagtttggggaagtatggaatggtaccctggaattggaaacacaaaagtagccataaagactcttaaaccaggcacaatgtcccccgaatcattccttgaggaagcgcagatcatgaagaagctgaagcacgacaagctggtccagctctatgcagtggtgtctgagggagcccatctacatcgtcaccgagtatatgaacaaaggaagtttactggatttcttaaaagatggagaaggaagagctctgaaattaccaaatcttgtggacatggcagcacaggtggctgcaggaatggcttacatcgagcgcatgaattatatccatagagatctgcgatcagcaaacattctagtggggaatggactcatatgcaagattgctgacttcggattggcccgattgatagaagacaatgagtacacagcaagacaaggtgcaaagttccccatcaagtggacggcccccgagcgagccctgtacgggaggttcacaatcaagtctgacgtgtggtcttttggaatcttactcacagagctggtcaccaaaggaagagtgccatacccaggcatgaacaaccgggaggtgctggagcaggtggagcgaggctacaggatgccctgcccgcaggactgccccatctctctgcatgagctcatgatccactgctggaaaaaggaccctgaagaacgccccacttttgagtacttgcagagcttcctggaagactactttaccgcgacagagccccagtaccaacctggtgaaaacctgtaaggcccgggtctgcggagagaggccttgtcccagaggctgccccacccctccccattagctttcaattccgtagccagctgctccccagcagcggaaccgcccaggatcagattgcatgtgactctgaagctgacgaacttccatggccctcattaatgacacttgtccccaaatccgaacctcctctgtgaagcattcgagacagaaccttgttatttctcagactttggaaaatgcattgtatcgatgttatgtaaaaggccaaacctctgttcagtgtaaatagttactccagtgccaacaatcctagtgctttccttttttaaaaatgcaaatcctatgtgattttaactctgtcttcacctgattcaactaaaaaaaaaaaagtattattttccaaaagtggcctctttgtctaaaacaataaaattttttttcatgttttaacaaaaacc

SEQ ID NO: 150887 - DNA, 1053 bp, Homo sapiens
tttttttttaatggaaaatatccaagaagcagcccaggagtatctgacatggtggaatggaatcagttagaaagcgaagaaatcactaaaaaaagttacttctttttttccccaccagttataatcttcaaccttactagtttataacagtttaatgtcctatagaaggatcctccactaaagttataattttaagtatagtcatatagagagatccctaatcccctgggtaatctagatactaaaggtggggaagaacagtcatattgacattctttaatccaaaaccactgtttggaaattagtaaggatatttttcaggcattcccaaaaacatgttattagcacgttggagctggaaaacgtttttcttcctcagtgagtacagaaaccaaagcagtctgtcgtgtatgtctatgtatagactgtatcgtacctgggctcatggagtagtctaaatttaaaacgtcctctcttctacctccaatgaaaatgtttccgtgtgtggcgtctgatcttccaccgtgtgtgtggtcgtctgctggtgtagcgctgtttaaggagcgctgtgtgctgctagtgttccacgatgtgtgtggtcgtctgctggtgtagtagcactgtttgaggagcactgtgcgccgctagtgtgggtttacacttatgagtgttgtcattacatgtgttctgctcttctctccctctcctgcccctgccctgctccatcagagagagctgcaggtctctgctgccgcctagtagttccctgtcacaaaagggatgccaaggcttaccgatctgtctgtcaaaaccaaagatgtctgggaaatccctcgagaatccctgcagttgatcaagagactgggaaatgggcagtttggggaagtatggatgggtatgctgagactcaattactctcttattagcttccccgtttggaagatcccaaacaccaaagatggaaggtgaaaataaagactgcgtgaccgggaagaaagtttgaattactaatagtggggaataataatttcagttttggttttaacctcgtgc

SEQ ID NO: 150888 - DNA, 949 bp, Homo sapiens
ctgattggggccctgaatacggtcgacatttcgtcagctccttaggctcggcgtccccggccgtggctgagctctgccagaacaccccggagacctttttggaggcctccaagctgctgctcacctatgctgacaacatcctcagaaaccctaatgatgaaaaatatagatccatccggattggaaacacagccttttctactagactcttgcctgtcagaggagctgttgaatgtttatttgaaatgggctttgaagagggagaaacacatctcatctttcctaaaaaagcttcagtggagcagctgcaaaaaattcgtggacctgattgccatagagaggagtagcagactggatggctcaaataagagccacaaagtaaagtcatctcagcaacctgcagccagtacccagcttcctacaacaccatcttcaaatcccagtgggttaaaccagcacacaaggaaccgtcaagggcagtcatcagatccaccatctgcttcaacggttgctgctgactcagccattctagaagttcttcagtccaacattcagcatgtgctggtctatgaaaatcctgctcttcaggagaaagcgttggcttgtattccggtccaagaactaaaaaggaaatcacaagaaaagttatcgagagctagaaaattggataaaggtatcaatataagtgatgaggattttcttttgctggagcttttgcactggtttaaggaagaattttttcactgggtgaataacgttttgtgcagcaaatgtggtggacagactaggtctagagatagatcattactgcccagtgatgatgagctgaagtggggtgcaaaggaagtggaagatcattactgtgatgcctgccagttcagcaatcgattcccaagatataataaccctgagaaacttttggaaacaagatgtggaccgtggtgcgagt

SEQ ID NO: 150889 - DNA, 390 bp, Homo sapiens
ttttttcctttcttgttttttcttcgccgcttctcgtttttctttgtgaacaggactgttttcaccattgtagaaaacatctactttctcttgtaggattttccgagctagctttctgttctgatcaactgatcttgtctgatggcactttacaacgatgcctgaggggatgtgcttcagcaccacgcagttgctggttttgttggttgcctggccccctggaccgtgtcctttcacaaactgctcttcgagttcattctcatccaaggaaagcagtggtgtaggaaaatgaaataaacccacggtgctcataaggaacgtggctctgctggctgaggacctggtctcaggacccgactcgtgccctcaacgttctagggatatccaaat

SEQ ID NO: 150890 - DNA, 775 bp, Homo sapiens
cgtgcgcagatcagggatcgcgattgcgaatcctccgctgaggtgatttggatatccctagaacgtcgagggcacgagtcgggtcctgagaccaggtcctcagccagcagagccacgttccttatgagcaccgtgggtttatttcattttcctacaccactgacccgaatatgcccggcgccgtggggactccggctttgggaggagctgacgttgctatccccaggaatagctgtcactccggcccagatggcaggcaagaaggactaccctgcactgctttccttggatgagaatgaactcgaagagcagtttgtgaaaggacacggtccagggggccaggcaaccagcaaaaccagcaactgcgtggtgctgaagcacatcccctcaggcatcgttgtaaaggtagatcacagtaggccgctgaggggagaggccccgcccaagggttccacagcctccagagatttctcccaagtgtgaatgggatcaagccgaagtgcattatttttctggcttgggccaccctctaccagccaggcagtagagagcaccgcagatctcgtcccatccctgagccgttcctccctaaggcagaacctcctacaacagcctgggaagcctgtttccaggatcttttggagccaggtgccatcagacaagatcagttgatcagaacagaaagctagctcggaaaatcctacaagagaaagtagatgttttctacaatggtgaaaacagtcctgttcacaaagaaaaacgagaagcggcgaag

SEQ ID NO: 150891 - DNA, 753 bp, Homo sapiens
  misc_feature (1)...(753): n = a,t,c or g
ttcagggatcgcgattgcaagtcctccgctgaggtgatttggatatccctagaacgttgagggcacgagtcgggtcctgagaccaggtcctcagccagcagagccacgttccttatgagcaccgtgggtttatttcattttccccctaacccactgaccccgaattattcccgggcgcccatggggactcccggctttgggagaaagcctgaacgttgtttatccccagggaatagcttgtaactcgggtcccagattggcagggcaagaagggcctacccctgcactggctttccttggatgagaatgaactcgaagaggcagttttttgaaagggacacgggtccagggggccaggcaaccaacaaaaccagcaactgcgtggtgctgaagcacatcccctcaggccatcgttgtaaagtgccatcagacaagatcagttgatccagaacagaaagcttagctcgggnaaaatcctaccaagagaaagtagatgttttcttcaaatggtgaaaacagtccatgttcacaaagaaaaacgagaagcggagaatgaataatcgagataggaataatggagcaaaggaaaccctggaagaaaatatgctatttcatctgctgtgcgagtcatgccaaagggtctttgtgaggagaatgaagagagcgcctgtctactatggtcggactgtccctagtcctgacggtagtattgctcatggagaataccacgttttgctggaactgaacactgag

SEQ ID NO: 150892 - DNA, 499 bp, Homo sapiens
cagctgaagacaaaaaagtggcaccaaaagagcttgtggaagagacagacaggcccagcccagagcccagcaatgaagctgccaagccaagaaatacagagaaggacagtaatgctgagaacatgaattctcaaccatgagaaaacagttactactcccacagaaaaaaaggagagtgtatctcctgagaataacgaagaaggtggaaatgataccccaagacaatgaaaatcctggaaatacaaattgccatgatgttgtactagtacagtgaattatcagaaaacccagaagccagtttaggctagagaggaaaaaactacgtgtatcatttatcctaaagaacagagatgaggtcaatttcaaattttagccatctgtttgtgatttctgtcataagcattttgttgtttgttttttttattttggatgacaatgaattgaatatctaataaggagatttaagataagacccaataaatgaatgtattctgtaaaa

SEQ ID NO: 150893 - DNA, 2155 bp, Homo sapiens
atgaagaagaagaagatgaaggaggaggaggagaaagagaagaaagaggaggaagaagaggaggaggaagaagaaagaagaaaggaggaagatgatttctgtaacaggacaagtccggccggcggcagcgagggcccggggcaggagtcggagcagcccgcgcagcccccggagcaagccggcgggcggcccggcgccagccccgcgccggacgaggacgccgaggcggcgggcgccgagcagggtggtgattccactgaagcaactgccaaaccaaagagaagtttttatgctgccagggatttgtacaagtaccgacaccagtacccatggaaactgagccagttccacagcagtgtgagtcacagaaggaaggagatagactgcaaggctttcaagtggcaggaccttgcattctttggtgaactaactcgaggcaagaggtcccagcacaactatttaagaatcactcgtattcttaaaagccttggtgagcttggatatgaaagttttaaatctcctcttgtaaaatttattcttcatgaagctcttgtggagaatactattcccaatattaagcagagtgctctagagtattttgtttatacaattagagacagaagagaaaggagaaagctcctgcggttcgcccagaaacactacacgccttcagagaactttatctggggaccgcctcgaaaagaacagtcggagggaagcaaagcccagaaaatgtcttcccctctcgcctccagtcataacagtcaaacttctatgcacaaaaaagccaaggactccaaaaattcctcctcagctgttcatttaaatagcaaaacagctgaagacaaaaaagtggcaccaaaagagcctgtggaagagacagacaggcccagcccagagcccagcaatgaagctgccaagccaagaaatacagagaaggacagtaatgctgagaacatgaattctcaacctgagaaaacagttactactcccacagaaaaaaaggagagtgtatctcctgagaataacgaagaaggtggaaatgataaccaagacaatgaaaatcctggaaatacaaattgccatgatgttgtactaccccgcagccccgcgcccgccgccgcctcttcaatgggcaacctgctcggcggggtcagcttccgcgagcccaccaccgtggaggactgcgactccacctggcagaccgactcggagcccgagcccgaagaaccagggccgggcggcggcagcgagggcccggggcaggagtccgagcagcccgcgcagcccccggagcaagccggcgggcggcccggcgccagccccgcgccggacgaggacgccgaggcggcgggcgccgagcagggtggtgattccactgaagcaactgccaaaccaaagagaagtttttatgctgccagggatttgtacaagtaccgacaccagtacccacagaacttcaaagatatccgatatcaaaatgacttgagcaatcttcgtttttataagaataaaattccattcaagccagatggtgtttacattgaagaagttctaagtaaatggaaaggagattatgaaaaactggagcacaaccacacttacattctatggctggttgcccctgacagaacaaggcttgaacttctatgccaaagaactaactacatatgaaattgatgaatcctcaaaaacaaaagaagcaattataagattccctccctgggcttataaaaatgatgctagaattttttggaataaaactgactgataaaactgggaatgtttgctcggggtgtttactggcaggaaagttttcagcatctgaatgagtcccagcacaactatttaagaatcactcgtattcttaaaagccttggtgagcttgggatatgaaagttttaaatctcctcttgtaaaatttattcttcatgaagctcttgtgggaggaatactattcccaatattaaggcagagtgctctaggagtattttgtttatacaattaggaggacaggaaggaggaaagggaggaaagctcctgcggtttcgccccaggaaacactacacggcctttcaggggaactttatctggggggacccgccttcggaaaaggaacagttcggagggggaggccaaaggccccgggaaatgt

SEQ ID NO: 150894 - DNA, 486 bp, Homo sapiens
acccagtctcttccccaactctccccacccctggtgctctccgccccgcttgcctcccgttcttccccgcccgctccatccgggtcgctgacggctgtctctggactggacagcagtggcgtccgcttttctctaaggaacccgataagaactccattttctgttgatgtggagacatagggtacctccaactttccggggtttcagaagagaattttttattgaaactggaagaccaaaataattacaagcatgttgtgctggggaaatgcatcctttgggcagctaggtttgggtggaattgatgaagaaattgtactagagcccagaaaaagtgacttctttataaataaaagggtccgagatgtaggatgtggactcagacatactgtgtttgttctggatgatggaacagtgtacacatgtggatgtaatgatctaggaccagttaggtcatgaaaaatccagaaagaaaccagagtttcg

SEQ ID NO: 150895 - DNA, 1026 bp, Homo sapiens
  misc_feature (1)...(1026): n = a,t,c or g
cccncagggctccaccccccagcgcccaaggttccaaggcaaagcagagactgtctgccttcctttgggagagggacccccaagcttctctgggaccagggcccttcaccgttcttgctccacctccgcggcagagttcccgctcttcccccattccttggctttcattcagagggggaaggtggaaaagcaccaagccccaatttaataggtcagtgacatgaccataaaaaagaaccccccaaatttagtcaccaaaaaaataagacctacagagataaggtggcttggcttattaagagtcaaggaatcaaggtaccaaaaaatacgggagatggctgggaagagttagagacagctgcagatgcagcttttgcagacttcttgcccgagctgtggggttgggggaggagggagcagacctgagaaattaaaggaaatagggggtggtgggaggattcaaggaaggctggagggatgtgtaagttaggagctcccagcaacatttcttgaagcccaggttctgaaccctggggttgcccagcttggcctctcagatgaacaggggagaccttttccatcaaatacaagcttttaagcttcacaccatcttgcctgcctttccgccttcctgctggaacaatggagaccaagcagctcgggatgcatgtgactctgggcagagggaaccctggtctggggaagcatccgagaatggcttcagcacactccccctaatggaatcagagactgggcaaaacagaggatgtggagaacggggcagcctcagcctgctcccaccagggtcaacatctcccggccctcaccgaccccttttcccagattcacaacaaaactgatgtgggctctaggaacagacccctttacacacacacacacacactcacactcttttgcacacatccacagctgcacccatgctatgtacaggaacacacatacacatactctcttccacatacatcaagaccatttttaaaaggttccaaatctacccctaaaccc

SEQ ID NO: 150896 - DNA, 431 bp, Homo sapiens
  misc_feature (1)...(431): n = a,t,c or g
nagcctttggaaggatggcgaccttgctgacactggggacagcctcgtgagacacatttcagatttctggcctggaaacccggcatgatacagatgtactgtttccagcgtgaggctgtggaaagccatagcagcagccacagaaacactgaccccgttcttggggccaggacaccactccgtcccggggagaacgcagtcccaactcctcgggaacaccagggctgccacctcccggaggacaccccttccccagccagcctgtcaggccacagctactgcctccaactcctgatcttggcccggggcctggaggccaagcagggatacagggctccttctgggtctccaactcaagacggtgccaactctaggctctgaactccttgcgccttgcagaaccaccacttctctctccccagtgaggcaag

SEQ ID NO: 150897 - DNA, 754 bp, Homo sapiens
  misc_feature (1)...(754): n = a,t,c or g
gcaaggggaacgttccgggacgttctcgctacgtactctttatcaatcgtcttccggcgcagccccgttccctgttttttgtgctcctccgagctcgctgttcgtccgggttttttacggtttaatttccaggacttgaactgccatgtcctctgaagaaggaaagctcttcgtgggagggctcaactttaacaccgacgagcaggcactggaagaccnaccacttcagcagtttcggacctatctctgaggtggtcgttgtcaaggaccgggggacctcaagcggtccagggggttttggtttcatcaccttcaccaacccagaagcatgcttcaagttgccaatgaagaagccaatgaaccggagaagtctcctggaatggtccgtcagatcccgttgttggatcatgcaggcaaagtctgcttcgggggaaccagagggaggtgggcttttgggggcccattgggggttgggttcgcagctaacttttaagaaggttgttgggggaccagggnttattggggaattgtcatttgccatgagagccatgaacggagagtctctggatggtcgtcagatccgtgtggatcatgcaggcaagtntgctcggggaaccagaggaggtggctttggggcccatgggcgtggtcgcagctactctagaggtggtggggaccagggctatgggagtggcaggtattatgacagtccgacctngagggtatngatatngatattggacgttccagagac

SEQ ID NO: 150898 - DNA, 429 bp, Homo sapiens
gggtggaattcgatttagcttttccacatatgagaacgaaattgcacagtgcgaagtctttcatcagtgcgagcagtggggaaattattttctgcattctgggcatttgcacgccaaaggcaaagaagaaaaaatgtccaaatcattaaagaactacattactattaagccatcgactacagtgacagcgccatgctccaagctcagcagctgctcctggggctgggctctttcctggaggacgcacgtgcctacatgaaggggcagctggcctgcggctccgtcagggaagcgatgctgtgggagaggctctccagcaccaagagggccgtgaaggcggccttggcagatgattttgacacacccagggtggttgatgccatcctgggccttgcacaccacgggaatggacagctcagggcgtccctg

SEQ ID NO: 150899 - DNA, 480 bp, Homo sapiens
gacgacagatgctcagagttgagtggagccttgcccagagcccagcgctcgcgggctgtacccatccctgccagacccagaaagaggcccagctgcagggaatcagggaagcccagggctgggtgggtgtcggcccagagcccaaccacggggtggggaggggggcatccacaatccacagtctccgggggacgtaaccgcgccctgctggcttcagtacgtttcaggagacggcagcgaggctaccttgcatggtgtggtggacgagctggtgcggttccggcagaaggtccggcagtttgcgctggccatgcccgaggccacgggggacgcccggcggcagcagctcctagaaaggcagcccctgctggaagcatgcgacaccctgcgccggggcctgactgcccacggcatcaacatcaaggaccagaacagtacaacatccacgtgggaactgctggatcaaaggacaaaagacca

SEQ ID NO: 150900 - DNA, 483 bp, Homo sapiens
caagtgcctgatttgtcaaatgagagctttgtcgtttcttcagatgctgaccagtatctgaattcagtatctctgaattacaggagaggagaaaatagatgaaatactgctgtcagtaccacggttgctggctcttgtttagcttctgagtcagctggggcacccctgccatctgctctcagtgtggggctgggtgtccctgcaccatggaacaagggcaggtcgtgtcttcccggaaggcccagcacgggtgaagatttgggggcagattttattcccaacccaaccctgggtctatacattgggatatgtgcaggttcccattcgtttcctggggagccatgtgtccctgaggccagagagtctcctcacccagctcagactgaatgcttttgtttttgtttcagggcatttgcacgccaaaggcaaagaagaaaaaatgtccaaatcattaaagaactacattactattaaaaaaaaaaa

SEQ ID NO: 150901 - DNA, 1613 bp, Homo sapiens
tgcgggtgtcactctttattgcggggtccacactgtgggtgctggggcccctcccactgagggaaggctgagcctctagccagggctgacatgttgaggactacgcgcggcccaggcctgggccccccgctgctccaggccgcgctgggccttgggcgggctgggtggcactggcctgcggtccttgtcggcgagcggcgggcgcgggcgggcctggctgcagcccacgggccgggagacgggtgtgcaggtgtacaacagcctcaccgggaggaaagaacccctaatcgtggcgcacgccgaagccgcctcctggtatagctgtggaccaactgtatatgatcatgcgcaccttggccatgcttgctcatatgttagatttgatatcattcgaaggatcctaaccaaggtttttggatgcagcatagtcatggtgatgggtattacagatgtagatgataaaatcatcaaaagagccaatgagatgaatatttcccccgcttccctcgccagtctttatgaggaagacttcaagcaggacatggcagccctgaaggttctcccacccacggtgtacctgagggtaaccgaaaatattcctcacataatttctttcattgaagagaatcattgctcgtgggaacgcttattcaacggcaaaaggcaatgtctacttcgatctgaagtctacaggagacaagtatggcaaattggtcggcgaggtccctggtccagtcggagagccagcggactctgacaagcgtcatgccagtgacttcgccctgtggaaggcggccaaaccccaggaggtgttctgggcctctccctgtggacccgggaggccgggctggcacatccgagtgctcttgccatcgctagtaatggtatttggaaagtcaacttggatatccattcaggtgggatagatttagcttttccacatcatgaaaacgaaattgcacagtgcgaagtctttcatcagtgcgagcagtggggaaattattttctgcattctgggcatttgcacgccaaaggcaaagaagaaaaaatgtccaaatcattaaagaactacattactattaaggactttctgaagaccttttcccccgatgtcttccggttcttctgcctgcggagcagctaccgctcagccatcgactacagtgacagcgccatgctccaagctcagcagctgctcctgggggctgggctctttcctggaggacgcacgtgccttacatggaaggggggcagctggcctgcggctccgtcagggaagcgatgctgtgggagaggctctccagcaccaagagggccgtgaaggcggccttggcagatgattttgacacsccagggtggttgatgccatcctgggccttgcacaccacgggaatggacagctcagggcgtccctgaaggaacctgaagggccgagaagtcctgctgtgtttggtgccatcatctcttactttgaacagttttttgaaactgttggaatttctctggcaaatcaacagtacgtttcaggggacggcagcgaggcttaccttgcatggtgtggtggacgagcttgtgcggttccggcagaaggtccggcagtttgcgttggccat

SEQ ID NO: 150902 - DNA, 833 bp, Homo sapiens
tttttttttttttttttggttgccttactttaatgctgacctagcagccccgacaggaagctttaacataaagccttgaccctgaaaagcatgggtgcgtcttgtcgtgagcaggttcatggctgtgctccatcctcagcccgctgatttttggtcttttgtcctttgatcacaccagttaccacgtggatgttggactgcttctgtccttgatgttgatgcccgtgggcagtcaggccccggcgcagggtgtcgcatgcttccagcaggggctgcctttctaggagctgctgccgccgggcgtcccccgtggcctcgggcaatggccagcgcaaactgccggaccttctgccggaaccgcaccagctcgtccaccacaccatggcaaggtagcctcgcttgccgtctcctgaaacgtactggtgatttgccagagaaattccaacagtttcaaaaaactgttcaaagtaagagatgatggggaacaaacacagcaggacttctcggcccttcaggttccttcagggacgccctgagctggtccattcccgtggtgtgcaaggcccaggatggcatcaaccaccctgggtgtgtcaaaatcctctcgccaaggccgccttcacggccctcttggtgctggagagcctgagggaagaggagagaacagtcacagcagagggagctccactctccccaggcggcccccacaccagtccttccccagggagagacgctgggggctctaatctggggactttctctaggtcatattcccaaagacttgagttcctgagtagcagaaaattatgtaacatcaactgcaaactgtcatg

SEQ ID NO: 150903 - DNA, 901 bp, Homo sapiens; identical to SEQ ID NO: 112323

SEQ ID NO: 150904 - DNA, 1099 bp, Homo sapiens
tttttttttttttttttgggatttcattatctcagtttacttttatttgcttgtttacacacacgatctgtgtgtacataacaagtggcaagagccattctctaaatacaatctggtacccagactatgacagatgcacgtggaaaatgaggcgtcagtgagtttattctcaacatagaaaggcaaaataagcatggcagtattctatgatcacagatgcccccagagcctgggggttaaccgacacttttcaacataatacaggacaattgtaacaaaagacccagactccaaatggcacccaaaatatatttcgtttctctgccttctctagagcgagtcagaaagttctaaagggcttactcaagaaaaaggaggcagggagacttatggcctgctaagcaccagatgctgagcactttacatgcaccatttctcttcatctccacctgacagacgatgaaaacgaggtttgccatgatcacacagctatcaggagtggtggccaagatatgaacccacatctcatgtttgccttgaacccccaaaccctttcacttaatgtcaggcctgtttccacataggaaatagaaaagcatgctccccaaggaagaggcaagggggttaagcatggacaaagtggcggaagcctcatcgatacagaaggctctgcaattgaacactttcccacatacagttaatttagtgctgagcccgcatcagacccacgtgggataaatatctggagatttaagtgtcacaaatgaacttcctggggtcaccctgtgcctattcccttttggtgctgaacatgacactttggagagccttttttttttttgagacagagtctcactctgtcgctcaggctggagtaatagtggcgtgatcctagctcactgcaacctctgcctcctgggttcaagcgattctcctgccccagcctcccgagtagctgggattacaggcgtgtaccaccacacctggctaatttttgtatttttagtcgagacggggttttatcatgttggctaggctggcccaacctcaagtgatcctcccatctcagcctcccaaagtgctaggattacaggtgtga

SEQ ID NO: 150905 - DNA, 452 bp, Homo sapiens
tttcgtcagaaatggctgcaagtggccgaggtctctgcaaggctgtggccgtctctcccttcccggcgtggagacgagataacacggaagccaggggaggtctgaagcctgagtatgatgcggtggtgataggagcaggacacaacggactggtggctgtgagtacctccccacttgatcccacttcactggccctgggcgtgtggctctcagcagcctgggaaggagtgtgaagaagcaggtgggataagggccttgagagagaaggaaaaggcagcctagtcgatgctctctgctctccagtgctgactgggggctgggtcgaatgctcatctgcagccagctgaggacatcacaggctcctttcctccccttcccctaatggggaaaggtggtttccccatggcctgtgagggagtcagggagcttccagaaacaagctgacaaggtgg

SEQ ID NO: 150906 - DNA, 732 bp, Homo sapiens
tttcgtgcctggggcagaaatggctgcaagtggccgatgtctctgcaaggctgtggccgcctctcccttcccggcgtggagacgagataacacggaagccaggggaggtctgaagcctgagtatgatgcgggggtgataggagcaggacacaacggactggtggctgcagcgtacctgcagagactgggggtgaacaccgccgtcttcgagaggcgccatgtgatcgggggtgcagctgtcactgaggagatcatcccagggtttaagttctcccgtgcgtcctacctgctcagcctgctgaggccgcagatttacactgatctggagctgaagaaacatgggctgaggcttcatcttcgaaaccactactccttcacccccatgctggaagagggtgcaggcagcaaaggtgcccaggtgccttctgctgggcacagacatggcaagaaaaccagaagcagatcgcccagttctcccagaaggatgcccaggtctttcccaaatatgaggagttcatgcatcgcttggcattagccattgaccctctgctggatgcggcccccgtggacatggcggccttccagcatggctccttgctgcaaaagaggagggcgctctccaccctcaagcccctgctgaaggcaggccgcatcctgggagcccagcttccccgatattatgaggtcctcacagcttccattaccaaggtgctggatcagtggttcgagtct

SEQ ID NO: 150907 - DNA, 610 bp, Homo sapiens
gagctccgcgcacctgggcgccatccgccctggctccgctgcactagctccacgcccgtaccccggcgtcacgctcagggaccggcgatgctctgcgggctgtgctggctggtctcgtacagcttggctgtgctgttgctcggctgcctgctcttcctgaggaaggcggccaagcccgcaggagaccccacggcccaccagcctttctggggctcccccaacaccccgtcacagccggtgtccacccaaccacacagtgtctagcgcctctctgtccctgcctagccgtcaccgtctcttcttgacctatcgtcactgccgaaatttctctatcttgctggagccttcaggctgttccaaggataccttcttgctcctggccatcaagtcacagcctggtcacgtggagcgacgtgcggctatccgcagcacgtggggcagggtggggggatgggctatgggccgacatctgaagactgatgctcctcctatggctggcatgatgcgctaccccgacccagctgatggcctatgagagtagggagtttgatgacatcctccagtgggacttcactgaggacttcttcaacctgacgctcaaggagctgca

SEQ ID NO: 150908 - DNA, 481 bp, Homo sapiens
ccagcagcgcgtaaggcggcaccggggccatggctccctgggcggaggcgagcactcgcgcatgaacccgctgcgcgcggtcgtggctcacgctgaccgccgccttcctgctgaccctactgctgcagctcctgccgcccggcctgctcccgggctgcgcgatcttccaggacctgatccgctatgggaaaaccaagtgtggggagccgtcgcgccccgtcgcctgccgagcctttgatgtccccaagagatatttttcccacctctaataccatctcatttctgtggaatgatatatctgccttctggcctttctattttttctgttcctgacaccactcttttcatatttacgttttttatttcactcacaccttgcgtcttgctttcattttcttgtttaattaacccatcacccgcactctttttaatgctttgatgtccttagtctctctacgttctcgtatcgcccgttaccccg

SEQ ID NO: 150909 - DNA, 438 bp, Homo sapiens
  misc_feature (1)...(438): n = a,t,c or g
gtacgacggacccttctgggctgaggcccgtttcacacacggtgctgctacctcgtttgcttcgtgcgtgcgtgcgcagatgtgggccccgcgggagcagctactgggctgggctgcggaagctctgcctgccaaggattctgcctggccctgggaagagaagcctagatatctgggaccagtgactttcgaggatggggctgtgcttttcactgaggcagagtggaagagactgagccttgagcagaggaacctataccaagaagcgatgctggaaaatctcaggaatctgggctcattgnnnnnnnnnnnnnnnnnnnnnnnnnnnnnnnttctggccctggacctgaacctgggattttggctttgaagttggacttgcgcggagatataactttgaccctgcgccttggacgtaacccttgactgggattggcc

SEQ ID NO: 150910 - DNA, 1086 bp, Homo sapiens
atgattgattttcaaatgttgaaccagctttgcagaactataataaacccaagtgtgataccctgtctcaagtattgcggtgatcaaataggaccagtgactttcgaggatgtggctgtgcttttcactgaggcagagtggaagagactgagccttgagcagaggaacctatacaaagaagtgatgctggaaaatctcaggaatctggtctcattggaatcaaagccagaagtccatacctgcccttcttgccctctggcctttggcagtcagcagttcctcagccaagatgagctacacaatcatcctattccaggtttccatgcaggaaatcaactccacccaggaaatccctgcccagaggatcagccacagtcacaacatccttctgataaaaatcacaggggggctgaagcagaagatcaacgagtggaaggaggcgtcagacccttgttttggagtacaaatgaaaggggggctttagtgggtttctctagcctgttccagagaccaccaataagctcttggggaggcaacagaatattagagatacagctcagtccagcccagaatgcaagctctgaggaagtagacagaatttccaagagggcagaaaccccagggtttggagcagtcaggtttggggagtgtgcactagcttttaaccagaagtcaaacctgttcagacagaaggcagtcacagcagaaaaatcttcagacaaaaggcagtcacaggtgtgcagggagtgtgggcgaggctttagcaggaagtcacagctcatcatacaccagaggacacacacaggagaaaagccttatgtctgcggagagtgtgggcgaggctttatagttgagtcagtcctccgcaaccacctgagtacacactccggggagaaaccttatgtgtgcagccattgtgggcgaggctttagctgcaagccatacctcatcagacatcagaggacacacacaagggagaaatcgtttatgtgcacagtgtgtgggcgaggctttcgtgaaaagtcagagctcattaagcaccagagaattcacacgggggataagccttatgtgtgcagagattga

SEQ ID NO: 150911 - DNA, 503 bp, Homo sapiens
ggaccggaactccagtgtcgacgatttcgtggtgctgctacctcgtttgcttattgcttgcgtgcgtgcgcgcgcagatgtgggccccgcgggagcagctactgggctggactgcggaagctctgcctgccaaggattctgcctggccctgggaagagaagcctatatatctgggaccagtgactttcgaggatgtggctgtgcttttcactgaggcagagtggaagagactgagccttgagcagaggaacctatacaaagaagtgatgctggaaaatctcaggaatctggtctcattggcagaatcaaagccagaagtccatacctggcctttttgcccttctgggctttgggagtcagcagttcctcagccaagatgagctacacaatcatcctattccaggtttccatgcaggaaatcaactccacccaggaaatccctgcccagaggatcagccacagtcacaacatccttctgataaaaatcacaggggggctgaagc

SEQ ID NO: 150912 - DNA, 2363 bp, Homo sapiens
gcggcttgttgataatatggcggctggagctgcctgggcatcccgaggaggcggtggggcccactcccggaagaagggtcccttttcgcgctagtgcagcggcccctctggacccggaagtccgggccggttgctgaatgaggggagccgggccctccccgcgccagtccccccgcaccctccgtcccgacccgggccccgccatgtccttcttccggcggaaagtgaaaggcaaagaacaagagaagacctcagatgtgaagtccattaaagcttcaatatccgtacattccccacaaaaaagcactaaaaatcatgccttgctggaggctgcaggaccaagtcatgttgcaatcaatgccatttctgccaacatggactccttttcaagtagcaggacagccacacttaagaagcagccaagccacatggaggctgctcattttggtgacctgggcagatcttgtctggactaccagactcaagagaccaaatcaagcctttctaagacccttgaacaagtcttgcacgacactattgtcctcccttacttcattcaattcatggaacttcggcgaatggagcatttggtgaaattttggttagaggctgaaagttttcattcaacaacttggtcgcgaataagagcacacagtctaaacacaatgaagcagagctcactggctgagcctgtctctccatctaaaaagcatgaaactacagcgtcttttttaactgattctcttgataagagattggaggattctggctcagcacagttgtttatgactcattcagaaggaattgacctgaataatagaactaacagcactcagaatcacttgctgctttcccaggaatgtgacagtgcccattctctccgtcttgaaatggccagagcaggaactcaccaagtttccatggaaacccaagaatcttcctctacacttacagtagccagtagaaatagtcccgcttctccactaaaagaattgtcaggaaaactaatgaaaagtatagaacaagatgcagtgaatacttttaccaaatatatatctccagatgctgctaaaccaataccaattacagaagcaatgagaaatgacatcatagcaaggatttgtggagaagatggacaggtggatcccaactgtttcgttttggcacagtccatagtctttagtgcaatggagcaagagcactttagtgagtttctgcgaagtcaccatttctgtaaataccagattgaagtgctgaccagtggaactgtttacctggctgacattctcttctgtgagtcagccctcttttatttctctgagtacatggaaaaagaggatgcagtgaatatcttacaattctggttggcagcagataacttccagtctcagcttgctgccaaaaaggggcaatatgatggacaggaggcacagaatgatgccatgattttatatgacaagtacttctccctccaagccacacatcctcttggatttgatgatgttgtacgattagaaattgaatccaatatctgcagggaaggtgggccactccccaactgtttcacaactccattacgtcaggcctggacaaccatggagaaggtctttttgcctggctttctgtccagcaatctttattataaatatttgaatgatctcatccattcggttcgaggagatgaatttctgggcgggaacgtgtcgccgactgctcctggctctgttggccctcctgatgagtctcacccagggagttctgacagctctgcgtctcagtccagtgtgaaaaaagccagtattaaaatactgaaaaattttgatgaagcgataattgtggatgcggcaagtctggatccagaatctttatatcaacggacatatgccgggaagatgacatttggaagagtgagtgacttggggcaattcatccgggaatctgagcctgaacctgatgtaaggaaatcaaaaggatccatgttctcacaagctatgaagaaatgggtgcaaggaaatactgatgaggcccaggaagagctagcttggaagattgctaaaatgatagtcagtgacattatgcagcaggctcagtatgatcaaccgttagagaaatctacaaagttatgactcaaaacttgagataaaggaaatctgcttgtgaaaaataagagaacttttttcccttggttggattcttcaacacagccaatgaaaacagcactatatttctgatctgtcactgttgtttccagggagagaatggggagacaatcctaggacttccaccctaatgcagttacctgtagggcataattggatggcacatgatgtttcacacagtgaggagtctttaaaggttaccaa

SEQ ID NO: 150913 - DNA, 2583 bp, Homo sapiens
atgaagactgaggtaggaacaggtttgggagaagatgacatgttcccttttagacaagtggaattatggaagatggcagtgaaaggcaaagaacaagagaagacctcagatgtgaagtccattaaagcttcaatatccgtacattccccacaaaaaagcactaaaaatcatgccttgctggaggctgcaggaccaagtcatgttgcaatcaatgccatttctgccaacatggactccttttcaagtagcaggacagccacacttaagaagcagccaagccacatggaggccgctcattttggtgacctgggcagatcttgtctggactaccagactcaagagaccaaatcaagcctttctaagacccttgaacaagtcttgcacgacactattgtcctcccttacttcattcaattcatggaacttcggcgaatggagcatttggtgaaattttggttagaggctgaaagttttcattcaacaacttggtcgcgaataagagcacacagtctaaacacagtgaagcagagctcactggctgagcctgtctctccatctaaaaagcatgaaactacagcgtcttttttaactgattctcttgataagagattggaggattctggctcagcacagttgtttatgactcattcagaaggaattgacctgaataatagaactaacagcactcagaatcacttgctgctttcccaggaatgtgacagtgcccattctctccgtcttgaaatggccagagcaggaactcaccaagtttccatggaaacccaagaatcttcctctacacttacagtagccagtagaaatagtcccgcttctccactaaaagaattgtcaggaaaactaatgaaaaaaagtcagggctttagattccctatacttcagcacacttcctgtagctatgtcaacctctgtggccacgacttcttcttcttgggactgcagtttctcttgtcagaaagtaggattcttggagctgctgtcattgctgctgtggctgctctgatgctgcctgggagtcgaaggagagaaaggaacaaaacaaaacaacccaggggatttcctccactctctttgatccgtatagaacaagatgcagtgaatacttttaccaaatatatatctccagatgctgctaaaccaataccaattacagaagcaatgagaaatgacatcatagccgggccggcgggcggctacgctaaccggcacagaccaccggatggactggccggcagccccgcaccagtgcacgaagtgggcgggacagaaacttctggggttggaagtccagtgaggctaaaagccgcaaggatttgtggagaagatggacaggtggatcccaactgtttcgttttggcacagtccatagtctttagtgcaatggagcaagagcactttagtgagtttctgcgaagtcaccatttctgtaaataccagattgaagtgctgaccagtggaactgtttacctggctgacattctcttctgtgagtcagccctcttttatttctctgagtacatggaaaaagaggatgcagtgaatatcttacaattctggttggcagcagataacttccagtctcagcttgctgccaaaaagggccaatatgatggacaggaggcacagaatgatgccatgattttatatgacaagtacttctccctccaagccacacatcctcttggatttgatgatgttgtacgattagaaattgaatccaatatctgcagggaaggtgggccactccccaactgtttcacaactccattacgtcaggcctggacaaccatggagaaggtaacccagaacttcaaacgtatcaaactacaagaagttttattggtagaactcataaaatataaggtgggaaaaccaagcagaatagcacagtggaaattgaagcagtccagcaaagtgattaagagcagaggccttgagtctggcctgaaaacagttaactgtaaaacagcttcagacaggtccttcaggaggtttccagaaggaggcattgttatcaaaggagatgacggctccatgcgtgttactgcccctgaagaccttccagtgggacaagatgtggagtccagtgtgaaaaaagccagtattaaaatactgaaaaattttgatgaagcgataattgtggatgcggcaagtctggatccagaatctttatatcaacggacatatgccgggaagatgacatttggaagagtcagtgacttggggcaattcatccgagaatctgagcctgaacctgatgtaaggaaatcaaaaggatccatgttctcacaagctatgaagaaatgggtgcaaggaaatactgatgaggcccaggaagagctagcttggaagattgctaaaatgatagtcagtgacattatgcagcaggctcagtatgatcaaccgttagagaaatctacaaaggatagtaagagactcactcactgcacttctgctcagttggcttctgcatcgggatcacacagccatcagcaggactgcccagttggtgagcacactccattgaccacgtggcgccagcgcttcctcaatgcacatgattga

SEQ ID NO: 150914 - DNA, 690 bp, Homo sapiens
tacatggaaaaagaggatgcagtgaatatcttacaattctggttggcagcagataacttccagtctcagcttgctgccaaaaagggccaatatgatggacaggaggcacagaatgatgccatgattttatatgacaatgcggcgcaggtatcagcaccgcggctccgcgggcccggagcgcgccagcgtgcggcgggtctggggcagccgcagccccgggcccgggcggactctcatgccgagagaccggagcggaaactggggaagctgccgcgcggagccagggtcagcgaggcccggcccggcccctgccgctcatggcccggcctgccgccggccgctggctgtctggcgaagcggcctcggcgctgccgggccaggggtgccgtcaccgtcactgtccgcgcccagagccgcacacgcgctctgaggcagtacttctccctccaagccacacatcctcttggatttgatgatgttgtacgattagaaattgaatccaatatctgcagggaaggtgggccactccccaactgtttcacaactccattacgtcaggcctggacaaccatggagaaggtaacccagaacttcaaacgtatcaaactacaagaagttttattggtagaactcataaaatataaggaattacccaactctgtctttttggtgatggagattctagcataa

SEQ ID NO: 150915 - DNA, 1065 bp, Homo sapiens
tctcacaaagcagtaatttagacactcgattctgcctctttacaagaatacaggtactcagttgatttgttttctcactccctttctttgctataagtttaaatcaacaatttgtttaggttaatatgtcctcatggaatggtggaaatgatcagatataaaatatttggtttggttagtttactctttatatgtttgctggcaaggaaccacaaatccagtttagtataatttttactctagttcactaaaagtttgcatccagctgtgtaggtagtgtttgtttcttgttaactttttttttctctaaaagaatactttaaaacttttcaatctcaaatgactgtaacttgctgacaggtgttaacagaagaagtagatctttttgttttttgcttatgacctgtattttaatatttgagcttatagattagagattgtgagagaaatctgtttatagtcttattttcccttgtgtattttttcttcctagtacatgggaaaaagaggatgcagttgaatatcttacaattctggttggcagcagataacttccagtctcagcttgctgccaaaaagggccaatatgatggacaggaggcacagaatgatgccatgattttatatgacaagtacttctccctccaagccacacatcctcttggatttgatcgatgttgtacgattaagaaaattgaatccaatatctgcagggaaggtgggccactccccaactgtttcacaactccattacgtcaggcctggacaaccatggagaaggtaacccagaacttcaaacgtatcaaactacaagaagttttattggtagaactcaataaaatataaggtgggaaaaccaagcagaatagcacagtggaaattgaagcagtccagcaaagtgattaagagcagaggccttgagtctggcctggtatgtacagtcacgtgccacataacattttagtcaacagtggactgcgtgtacgatggtcctgtacgattataatggatcaaagctggtagtgcaataataacaaaagttagaaaaaataaattttaataagt

SEQ ID NO: 150916 - DNA, 416 bp, Homo sapiens
  misc_feature (1)...(416): n = a,t,c or g
nnnnnnnnnnnnnnnnnnnnnnnnnnnnnnnnnnnnnnnnnnnnnnnnnnnnnnnnnnnnnnnnnnnnnnnnnnnatccaaaagcagaccaatagcaagtaacaagattgaagccataataaaaagtctcccagcaaagaagcccaggacctgatggcttcgctactgaattttaccaaacatttaaagaagaactaannnnnnnnnnnnnnnnnnnnnnnnnnnnnnnnnnnnnnnnnnnnnnnnnnnnnnnnnnnnnnnnnnnnnnnnnnnnnnnnnnnnnnnnnnnnnnnnnnnnnnnnntcnnnnnnnnnnnnnnggggaaatttttaaaccattttttttgagaaccttttttgaaaaatttttttttaaaaaaaaaccaaccggatttaaccggggcataaaaaaaatat

SEQ ID NO: 150917 - DNA, 380 bp, Homo sapiens
  misc_feature (1)...(380): n = a,t,c or g
gccttcttggagcccacagggganataaagtgaaacacctcaggctccaaccctcccaacccaaggctccctcctggagggagaggagaggatggaggacatcaggaccctgactgtggccctcttcaccctgatctgctgtccaggatcggatgagaaggtattcgaggtacacgtgaggccaaagaagctggcggttgagcccaaagggtccctcgaggtcaactgcagcaccacctgtaaccagcctgaagtgggtggtctgggagacctctctaggataaggtttttgctgggacggaacaggctcagtgggaaacatttanttgggtcttcaaacntttcccntggacacggtccttccattgccattttcacct

SEQ ID NO: 150918 - DNA, 437 bp, Homo sapiens
  misc_feature (1)...(437): n = a,t,c or g
tttcgtcgtgaactgggcagatgtgacacgcgcaccttgtcaccttggcaccaatttcctgcccgggatcccagagctacccttcttggagcccacaggggaccctgactgtggccctcttcaccctgatctgctggccaagatcggatgagaaggtattcgaggtacacgtgaggccaaagaagctggcggatgagcccaaagggtccctcgaggtcaactgcagcaccacctgtcaccaccctgaagtgggtggtctggagacctctctagataagatactgctggacgaacaggctcaccggaaacattacttggactcaaacatgtaccatgacacggtacttcaatgccacttcacctgctccgggaagcaggaggcaatgaatatcaacgtcagcgggtaaccggagcagctgtgctgcngagccatcctc

SEQ ID NO: 150919 - DNA, 1077 bp, Homo sapiens
  misc_feature (1)...(1077): n = a,t,c or g
acacgcgcaccttgtcaccttgtcaccaatttcctgcccgggatcccagagctacccttcttggagcccacaggggaataaagtgaaacacctcaggctccaaccctcccaacccaaggctccctcctggagggagagaaaggatggaggacatcaggcagcccttggctggtccctgcgaacccgttgaagactgccagagatgtcctctttcggttacaggaccctgactgtggccctcttcaccctgatcttgctgtccagggatcggatgagaaggtattcgaggtacacggtgaggccaaaggaagctgggcggttgagcccaaagggtccctcggaggtcaactgcagcaccacctgttaaccagccttgaagtggggtgggtttgggagacctctcttaggattaaggtttttgctgggacgaacaggttcagttgggaaacattatttgggttttcaaacattttcccattgacacggtcctccaattgccatttcacctgcttccgggaagcaggaagtcaatgaattccaacggtcagcgttgtaccagcctccaaggcagggtcatcctggacacttgcaacccacttttgggtgggctnttgggcaagtcctttcaccatttgaagttgcagggggtgcccaccgtggagccccttggacagccttaaccctctttcctggtttccgtgggcaatgagactcttgcactatgagaccttcgggaaggcagcccctgctccgcaggaggccacagccacattcaacagcacggctgacagagaggatggccaccgcaacttctcctgcctggctgtgctggacttgatgtctcgcggtggcaacatctttcacaaacactcagccccgaagatgttggagatctatgagcctgtgtcggacagccagatggtcatcatagtcacggtggtgtcggtgttgctgtccctgttcgtgacatctgtcctgctctgcttcatcttcggccagcacttgcgccagcagcggatgggcacctacggggtgcgagcggcttggaggaggctgccccaggccttccggccatag

SEQ ID NO: 150920 - DNA, 403 bp, Homo sapiens; identical to SEQ ID NO: 145781

SEQ ID NO: 150921 - DNA, 497 bp, Homo sapiens; identical to SEQ ID NO: 145782

SEQ ID NO: 150922 - DNA, 426 bp, Homo sapiens
attctttctgtttcagatgaggaaattcagaaaggttaagttacttgttcagtccctgaaccctgatcttccatcttcatatccttccaaagtgggagataatctaaataggaatgaggactgcccgtttttgagtgctcatttatagttctgagcttcctggcaggcagatcaaagagggagcaaagtaactccatggaaatgtcccagcagtagacattggtaaatatggttgaggctgatgttaccaccagatgtttgattcgtagtgggatccgagttggctacaccccagatgtcctgacagataccaccgccgaactcgcagtctccctgctacttaccacctgccgccggttgccggaggccatcgaggaagtgaagaagtaagtgaacgcagaccaggtgcggtggctcacggctgta

SEQ ID NO: 150923 - DNA, 1060 bp, Homo sapiens
ggaaatccccgggccagcttctgtactgccaggtccgggtcggcggctgcactgcggatgtgttcggtgcgactcatgaaggtgttcgtcacccgcaggatacccgccgaggtgtagggtcgcgctcgcccgggcggcagactgtgaggtggagcagtgggactcggatgagcccatccctgccaaggagctagagcgaggtgtggcgggggcccacggcctgctctgcctcctctccgaccacgtggacaagaggatcctggatgctgcaggggccaatctcaaagtcatcagcaccatgtctgtgggcatcgaccacttggctttggatgaaatcaagaagcgtgggatccgagttggctacaccccagatgtcctgaccagataccaccgccgaactcgcagtctcccctgttcttaccaacctggcggccgttggccggaggccttctagggaagtgaagaatggtggctggacctcgtgggaagcccctctggctgtgtggctatggactcacgcagagcactgtcggcatcatcgggctggggcgcataggcccaggcccattgctcggcgtcttaaaaccattcggtgtccagagatttcttgtacacagggcgccagcccaggtcttgaggaagcagcaagaattccaggcagagtttgtgtctacccctgaagctggctgcccaatctgatttcatcgtcgtggcctgctccttaacacctgcaaccgagggactctgcaacaaggacttcttccagaagatgaaggaaacagctgtgttcatcaacatcagcaggggcgacgtcgtaaaccaggacgaccttgtaccaggccttggcaagtggtaagatttgcagctgctggactggatgtgacgagcccagaaccacttgcctacaaaccaccctctcctgaccctgaagaactgtgtgattctgccccacattggcagtgccacccacagaacccgcaacaccatgtccttgttggcagctaacaacttgctggctggcctgagaggggagccgatgcctagtgaactcaagctgtag

SEQ ID NO: 150924 - DNA, 4056 bp, Homo sapiens
tttttttttgccaccgcacctggcctttattatttttaaacagtatgaaatttagaagcaaacacgtatacaaaaaaaaaatcccattacatttattaataatatatctttagatttctcattcctgttcttttaaatggcgcccactggtctcatacaagaggaggctgtgtgacctttctggaattatagaaatatccgcatccagccatgtgctgagcagacccaatgtaaaatgttcaagcaaggttttccaaatgtctctttggatatattttaatcatctctgcagaagaactcaaaatctcagagcagctccactccagatccaggggcaggaggcagcctccaggggaggcgaggctcggtttttacggaggaatctggcctttatagtgtgtggcctggcatgggaccagcctctggggaaagaagaagcaccaagacgttgaacaggggctgttgggccgatggcttttagcagccacataaatccctcctttgatggtccaggggtcagttacgagcctgggtcccccaggctaggaggagacgaatgaaagaatcttgctgtggtctttcctgcaaaggcaaacagcagtaaacattgattacccagtcaccgggaggaattcttgtgaagcgcgcacctctgtgtgcctttgctctccactttcaagagaggactttaatcacaggacaaaggagaagacccaggcccatttcagtctccgggacgggtcacagcgagccgtgtgaacgctggccttgcttcacacgttgcccatgaacaccaacaggctgtaactcaaggcttttgcgtaacaacaaataagcttgctagaagtacccaatttcaagacacgcacccactctaactgttctcaagaaagtctcacgctcacctcgccgtgggaagaagctgggccctgcctcccttaacaacaatggggcaaacggccccctgctggcactgtgtccctgccttcaggcctgggagctcttaactttctgccaacagggttttccaagtctacaaacccccacgccgcaggagcacatgcagatgaactggcaccgtgctgccgccgggccggggtggacgcagggtggacgcgggcctgtctgccgcgagtgggagccccagctctcctgagcctcgggcacttacagacacgaaggctttttgctcaagggctcgactcctgttcctgctgaactgagccagtgtgtaaaatgagaactgatatcagctcagtaggcaccggagggcgggtccaatcgacagcccggagaagcagcgcctcagctgggagctccgtgggcaccgtctgctgacgcaggagacgcgaaggcctggactgcaaatacaagagagagttctccgcgcccagaacaacaggagctcctccgaaagccccgccccgccccgctcacagccatgagctaccacatgatttcacacgacttaggtgatgcatttgagttttagttttttgtaagaagaatttttgcaactttcaatacatttgacctttcagacagatgtccgattagtggatgtttctgtggacagacttaaggactcagtacatggctagcattcccagcaggagacagtgcatccttggggtcaagtggtctctcatcctccaggatcgcgctccgcacccaagctgactgtgcagcagcggccggcccgtcagcaacggcctctgccccagcggctccatcttaactgtccccatctcaccttctcttcaggtgcagaacttagccgctgtgaacaaagcggaaaccaatcactgttcaccaatcagataagctctgccccctgttagagaggtcatcgctgggcataaataaagggacggtgaccggtgagcatcttcctcagctggtggcttcttttgtttccaaagaagagttacgatatgcacctgttctccaatctgcagtgagcgcaaccacggtttctggaggagcagccaaggtcgtggttgcgtggtaatccctggcaatgtgattttaatcttaagtcacaaatcagcatgccaggaacccaagcagccagagcacctgagagcagcgccaccccgtgctgtctgcacacactgggcttccgcggaaggacgccggcgacactgccgccttcacgcctgttatgctagcaaacaggtggagtttctgtttgttgttcgtttagttggcatcctagaggtataatttcttgaatcaaagggactccagagatgaccataaaaatgccagtgcagctttggaactgaagaaaaatgcagggaccggccatgcgacacacacaattgctaaaggcagctgtccttgctattagtttactgcctctaacccttggggacaagatcccttctctccaggcagattctagctgccctgggaaggctttggggactctcaagtcaggaggtccccctgctggaaggggccctgggacaatcccggccactgttcctcacggggactggttggggggcaggcttgcaacccctggatgcatctggaggggtggggacaggatcgaagatgctggggagggggaaaagggagacttgtgaccaagatgactcctctgcctgcctgggcaaaaattccccataaagagtggcgaggggtgtgccctgtggtgctgctccaaaacctgcaccaaagggaatgatgaaaggactagctggccttgtagtttcacacactttaacacgtacgccacgaaataacaaaacgaaagagaaacaccatttacactgattactattatgaggccggcagtgaggtaagtgcacagtctgtgtgccgccagcccgtcctggaggggagccgcgtcaagtctgcagcaggcgtttcgctacgagacgctcagtcccgtttccctttcctggcacacatggttcctgactcttctggaagaatatgatcatgcttctgaaaaactttttatttcttttcattattagagttctttcagataaataagctacttaaacacgttacacagaaatggttttcataagcacaaaacattagaagaaaactcaatgttcaaaactgagtgaagaatatcaacaccaaatattcaatatccatgaaaaattatagagaagctataacacgaaaaatgcttcagatttgataaagtttttttaaagaatacaaaattagacatcccctattaatatcatataaaacactgaagaaaaacggagcagccacagaaataatgatgattgttagagaaaaaaaatctcacagctatcctaacaaaaccttgtgtactaccgctaggttgctttaatagtgtagaaacccatactgagcaactaactgctaggaagtaaatctaacaggttaattccaggcacaattaacagaggaagtgatttaaataatctaggactccaatagaagccaggggagaaattccgctccaacacaacaaagcaaaaagtaggacctgccctcaagacacagggtcatggaggccatatgccacgtgtgctgtgtgcgccgcgggtgctgtgtggtgcgtgcactgtgtgtgccacatgtgctctgtgtggtgcgtgcggtgtgtgctgtgtgtgccgcaggtgctctgtgtggtgcacgcgctgtgtgtggtgtgtgtgctgcctgcagtgtgcgcgctacgtgtggtgcatgtgctgtgtgtgctctgtgttgtgcatgcgctgtgtgtggtgtgtgtgccgcgtgtactctgcgtggtgtgtgtgctgtgggtgctccaggtgctctgtgtggtgtgtgtgctgcgtgtgccgcgtgtgctctgtgtggtgcatgcgctgtttggtgtgtatgctgcatgtgccgtgtgtgctctgcgtggtgcgtgcgcttgtgtgtgctgtgtgtgccgcgtgtgctctgtgtggtgcgtgcgctgtgtggtgtgtgctgtgcgtgctctgtgtggtgcgtcctctggtgtgtgtgtgctgcatgcaatgtgtgtgctacgtgtggtgcatgtgctgtgtgtgctgcgtgtgcctggag

SEQ ID NO: 150925 - DNA, 858 bp, Homo sapiens
ggcgcgacgctgggaggcatgtcggagcacgtggagcccgcagctccggggcccgggcccaacggcggcggcggcggcccggcccccgcgcgcgggcctcgcacccccaatctcaaccccaaccccctcatcaacgtgcgcgaccggctcttccacgcgctgttcttcaagatggctgtcacctattcgcggctcttcccgcccgccttccgccgtctcttcgagttcttcgtgctgctcaagagggttctggagaggaggccccagctcactgtgggcgtggaagagttgaggctcctggtggtcttgcctatggctgtgcggccacaggtggctcactgcaccccgggcattggtgcacctgccagcaggtcacgggtcacggaggggccctgtgctccaggctctctggcttgtgattttgagtctgatcaattcttccctgagagtctggggttccatgtggccgtgggcgcccccttggcccagctgggtcctcagttttgcggatcggggcagcaggtagacgtgaccctcaccaggctcgggggtgatgcctggacctcaggttgggaggccctgtttgtgctcttcgtcctggcctacatccacatcgtcttctcccgctcgcccatcaactgcctggagcatgtgcgtgacaagtggccgcgtgagggcatcctgcgtgtggaagtgcggcacaactcgagccgcgcgcccgtcttcctacagttctgtgacagcggcggccgcgggagcttcccgggcctggccgtggaaccaggcagcaacctggacatggaagatgaggaggaggaagagctgaccatggagatgtttgggaacagctccatcaag

SEQ ID NO: 150926 - DNA, 542 bp, Homo sapiens
cggcacgaggggcggcggcggccgggggcccgtgaggggagcggcggctgcgagggcggccgatggcggccgggaggcgccctcggacacttgcgggtcgcttagggcgcgacgctgggaggcatgtcggagcacgtggagcccgcagcctccggggcccgggcccaacggcggcggcggcggcccggcccccggcgcgcgggcctcggcacccccaattctcaaccccaacccccctcatcaacgtgcgcgaccggctcttccacgcggctgttcttcaagatggctgttcacctatttcgcggctcttcccgcccgccttccgcccgtctcttcgagttcttcgtgctgctcaaggccctgtttgtgctcttcgtcctggcctacatccacatcgtcttctcccggctcgcccatcaacttgcctggagcacgtgcgatgacaagtggccgcgtgaaggcaatcctgcgttgtggaaagtgcggcacaactcgagccgcgcgcccgtcttcctacagattctgtgaccagcggcggccgc

SEQ ID NO: 150927 - DNA, 586 bp, Homo sapiens
ctgaatttcagctaatggccaactgtggtcaaagaatggctttcagttaaagttttgacttcttattataaataatataaagaatgtctcagtaattagaaatcccttaataagtagaacacatgtggcaagtaggactcctatcggtatacaaattccatttctttttataagaaaaacacataagaccattatcatttattcatgagccaaagccattaagaagataaatccagttatcacgcttcctgtctctgaagtttggatcattttatagatccacgcaatagagagcttccttcctatgaaacaaaaaccttgagatctcttttttttttgagacagagtctcgctgttgtcagcccaggctgggagtgcaatggcgcaatctcggttcactgcaacctctgccttccaggttccagcaattctcctacctcagctcccaagtagctgagatgacaggcgtgtgccaccacgcccagctaatttttgtatttttagtagcgatggtgtttcacttacattgggccagggtggtctcgaactcctgacctcaggtggaccacccgcctcagcctcccaa

SEQ ID NO: 150928 - DNA, 608 bp, Homo sapiens
cacagactcagagagaacccaccatggtgctgtctcctgccgacaagaccaacgtcaaggccgcctggggtaaggtcggcgcgcacgctggcgagtatggtgcggaggccctggagaggatgttcctgtccttccccaccaccaagacctacttcccgcacttcgacctgagccacggctctgcccaggttaagggccacggcaagaaggtggccgacgcgctgaccaacgccgtggcgcacgtggacgacatgcccaacgcgctgtccgccctgagcgacctgcacgcgcacaagcttcgggtggacccggtcaacttcaagctcctaagccactgcctgctggtgaccctggccgcccacctccccgccgagttcacccctgcggtgcacgcctccctggacaagttcctggcttctgtgagcaccgtgctgacctccaaataccgttaagctggagcctcggtggccatgcttcttgccccttgggcctccccccagcccctcctccccttcctgcacccgtaccccggggggtttgaataaaagatggcgacccggcgcaatttggaactcgaaagaatctttttttttgggttggggggggca

SEQ ID NO: 150929 - DNA, 699 bp, Homo sapiens
  misc_feature (1)...(699): n = a,t,c or g
aggcctagaattcggcacgagccacagactcagagagaacccacccatggttgctgtctcctgcccgacaaagaccaacgtcaagggcccgcctgggggtaaggtcggcgcgcacgctggcgcagtatggcttcggaggccctggagaggatgttcctgtccttccccaccaaccaagacctacttcccgcacttcgaccttgagccacgggttttgcccaggttaaaggggccacggcaaagaaggtggccgaacgcgctgaccaaagccgtggccaacgtgggacgacatgcccaaacggcgctgtccgccctgaagcgaccttgcacgcgcacaaacttcgggtggaaccggtcaacttcaaagctcctaaagccactggcctgcttggttgaccctggcccggcccacctccccggccgagtttcacccctggcggttgcacgccttccctggaacaaagtttcctgggctttctgtgggcaaatttaaaatttgaactccaaataaccgtttaagcttggaagccttcgggttggccatgcttctttgcccctttgggcctttcccccagcccctcctcccctttcctgcacccgtacccccgtggtcttttgaataaaattttgaattgggggggcaaaaaaaaaaaaaaaaaaaagatctttnaatttaagggggcggaaagtttatttcaa

SEQ ID NO: 150930 - DNA, 637 bp, Homo sapiens; identical to SEQ ID NO: 144817
  misc_feature (1)...(637): n = a,t,c or g

SEQ ID NO: 150931 - DNA, 775 bp, Homo sapiens
  misc_feature (1)...(775): n = a,t,c or g
gacactcgctttttggaacgtctgaggttatcaataagctcctagtccagacgcccatgggtcatttcacagaggaggacaaggctactatcacaagcctgtggggcaaggtgaatgtggaaagatgctggaggagaaaccctgggaaggctcctggttgtctacccatggacccagaggttctttgaccagctttggcaacctgtcctctgccttctgccatccatgggcaacccccaaagtcaaggcacatggcaagaaggtgctgacttcctttgggagatgccataaagcacctgggatgatctcaaggggcacctttgcccaagcctgaagtgaaactgcacttgtgacaaagctgcatgttggatcctgaagaactttcaagcttcctggggaaatgttgctgggtgacccgtttttgggcaatcccattttcggcaaaagaatttcacccctggaggttggcaggctttcctgggcagaaagatgggtgacttggagttggccagttgccctggtccttcccagattaccactgaagctcaattgcccatgaatgcagagcttttcaaggatatggctttattcttgcaagcaattacaaataataaatctatttctgctaagagatcaccaaannnnnatnntnnnnnnncccccggattttttatttagcgggccgcacctttttccccttttagggggggtaaatttatattgggccttgggccggggttttcaaaagcggggggannnnnnnnnnaaagagccc

SEQ ID NO: 150932 - DNA, 493 bp, Homo sapiens
  misc_feature (1)...(493): n = a,t,c or g
gtttctnnnnnnnnnnnnnnntaaaccnnnnnnnnnnnntcccccctttattcccaacccttttggatttttagcaaagaaatttttaaggtcaaaaatttgggcccccccctcccccaaaggtaaaacccccttttttttaaaaaccaaaaaatttaccnnnnnnnnnnnncccccccttttattccagtttttcaaaaggaaaaaaaatccctttaccctggaaagcaaaagttccaataaaccaaattttgccccttcccccccacccgggggggggaaaaaaaaccccctttcctnnnnnnnnnnnnnnnnnngaaagaaagaaaaagaaaatggctactgttcaaaaaggaatgcccacaaatattaccatggcaaaactggaagttacaatgttatccagcatgctgttggcaatgctgtaacaaaccggacgcgtgggtcgncccgggtttccggnngcggttccgatagctactcaagtgcaatg

SEQ ID NO: 150933 - DNA, 467 bp, Homo sapiens; identical to SEQ ID NO: 129286

SEQ ID NO: 150934 - DNA, 1143 bp, Homo sapiens; identical to SEQ ID NO: 121076

SEQ ID NO: 150935 - DNA, 2643 bp, Homo sapiens; identical to SEQ ID NO: 129288

SEQ ID NO: 150936 - DNA, 717 bp, Homo sapiens; identical to SEQ ID NO: 129289

SEQ ID NO: 150937 - DNA, 546 bp, Homo sapiens; identical to SEQ ID NO: 129290

SEQ ID NO: 150938 - DNA, 735 bp, Homo sapiens; identical to SEQ ID NO: 129291

SEQ ID NO: 150939 - DNA, 1603 bp, Homo sapiens; identical to SEQ ID NO: 129292

SEQ ID NO: 150940 - DNA, 2223 bp, Homo sapiens; identical to SEQ ID NO: 129293

SEQ ID NO: 150941 - DNA, 1995 bp, Homo sapiens; identical to SEQ ID NO: 129294

SEQ ID NO: 150942 - DNA, 1300 bp, Homo sapiens
ggataaacatctgtagcacgcttacgccaagcttggcacgaggggagattgacgcggcagtgcacacctgctggtacgagcataagtagccgacaggccagagtttccagtttcgggggcttcgtaggcttttagcttctgaaatccgctaaaagcggcgggttcattcatcttcaagtacctagcctgactggtagggctgctcagcattccgaaacatttcgacctggggaggggggcggcggtgaaagaatactttctgtagagagtgcccctcgcgtcgcccctgctttgaaggctttatgtattaacggaatgccgaacatttgtgtcctacttgctgacagcgcacaggatccttctaacagtatttcttcaagtactttaacaaaaagattgaaaaacttggaagtcccaagccgtgctgctggattccgtctcacagttttaaagacttgtccagaaacttttaaggttttcaaaactgttacatttttaaattcccgtggcgttttatcttcatttttgctgggggagaaagccaaagtactggactgcctggttcagggctgaacgcctagtacacctgctaacttggagcttcagagccatggcaaccaaggagtcaagagacgccaaagcacagttggccctctcctcatcggccaatcagagcaaggaagtgcctgaaaacccaaactatgctctcaaatgtactcttgtgggacacacggaagcagtgtcatcagttaagtttagtcctaattggagaatggcttagcaagttcttctgctgataggctaatcataatttggggagcatatgatggaaaatatgagaaaacactctatggtcataatttggaaatatcggatgttgcctggtcatcagattccagtcgtcttgtttctgcctcagatgataaaactctaaaattatgggatgtgagatctggaaaatgtttgaaaacactgaaggggcacagtaattatgtcttttgttgtaacttcaatccgccatccaaccttataatctcgggatcttttgatgagactgtaaaaatatgggaggtgaaaacaggaaagtgtctcaagactttgtctgctcattctgacccagtttctgctgttcattttaattgtagtgggtccttgatagtgtcaggtagctatgatggcctctgtagaatctgggatgctgcatcaggtcagtgtttaaaaacgctcgttgatgacgataaccctcctgtctcttttgtaaaattttctccaaatggtaaatacattctcactgcaactt

SEQ ID NO: 150943 - DNA, 478 bp, Homo sapiens
tcgaacatcaggatcctttaccacacagtctcattaagctttctagcttcgtcacagcagctgtcagaaggttaagacacactaccgaaaaaaaaagtcctggaatccagggccaattatgaggccaacttttcccactacaaaacaaaaacaaaacccataggctttctttttcgtatggcagtgacagagaggagtcttactgaaaactgccaatgtactagttcctgaagatctaggcagagaaatgcggatttttttttctgtgaaaacttggaaaaccttcacctgcatatttactaagggtactaatatacatttatttttattttattttttttttgagacagcgtctctctctgaagcccaggctggagcgcaacctcggctcactgcaacctccgcctcctgggggttcaagtgattctccagcctcagcctccccaatagctgggattacaggcgcctgccaccacac

SEQ ID NO: 150944 - DNA, 722 bp, Homo sapiens
tgatgctccaggtgaagtcaaaggtgaatggggttgcccttgggtcttgaattgaaaaaaaggccgggagtgggtggctaggtaatgatcctgagatcattcctggttttcaaaaaaaggagatgtttaccagacagaatctgtttcggctttaaatgattatagttaataccaatagttatcaatttgcatattatcctcatctcaaaatccaaatgcatttttaaaattggctaacttttaatttactaatatattgccggtataattttaactttgatttttgttgttcactcacgtgtgtgtgtgtgcgtgtgtgtgtgtgtgtgtaggggttttcacacaaaagtctagagctttagtatttcggggtcttttagcgctagcattgcccttgtctgccagcttttgctggcagtaaaaggcagtgtatttgaggtaggtggcatttcttactgccctttaaatgtgtttcttttggattttacaggtagcccctgaagaagatgaaaggaaaaagaggcgacgagaaagaaataagattgcagctgcaaagtgccgaaacaagaagaaggagaagacggagtgcctgcagaaagtgagtgccttctagccttacccttcctctcgctcacgcctgtcttcaccagcttcatgtggctatcagaagaagagttagaaaaccccctacttggttatagtttcccaagaagggccttgta

SEQ ID NO: 150945 - DNA, 2059 bp, Homo sapiens
gcagccaggcgcgcactgcacagctctcttctctcgccgccgcccgagcgcacccttcagcccgcgcgccggccgtgagtcctcggtgctcgcccgccggccagacaaacagcccgcccgaccccgtcccgaccctggccgccccgagcggagcctggagcaaaatgatgcttcaacacccaggccaggtctctgcctcggaagtgagtgcttctgccatcgtcccctgcctgtcccctcctgggtcactggtgtttgaggattttgctaacctgacgccctttgtcaaggaagagctgaggtttgccatccagaacaagcacctctgccaccggatgtcctctgcgctggaatcagtcactgtcagcgacagacccctcggggtgtccatcacaaaagccgaggtagcccctgaagaagatgaaaggaaaaaagaggcgacgagaaagaaataagattgcagcctgcaaagtgccgaaacaagaagaaggagaagacggagtgcctgcagcttcagtattagcagagccacaggccgcctctgtggcatcaccagggtttctctgaagaagagggtctgcattttcctaaacccagtgctgctctcccatctcccatcttcctctcgcagcttgatgagccccggtgtgtcccaggagtcggagaagctggaaagtgtgaatgctgaactgaaggctcagattgaggagctcaagaacgagaagcagcatttgatatacatgctcaacctttcatcggcccacgtgtattgtccgggctcagaatgggaggactccagaagatgagagaaacctctttatccaacagataaaagaaggaacattgcagagctaagcagtcgtggtatgggggcgactggggagtcctcattgaatcctcattttatacccaaaaccctgaagccattggagagctgtcttcctgtgtacctctagaatcccagcagcagagaaccatcaaggcgggagggcctgcagtgattcagcaggcccttcccattctgccccagagtgggtcttggaccagggcaagtgcatctttgcctcaactccaggatttaggccttaacacactggccattcttatgttccagatggcccccagctggtgtcctgcccgcctttcatctggattctacaaaaaaccaggatgcccaccgttagattcaggcagcagtgtctgtacctcgggtgggagggatggggccatctccttcaccgtggctaccattgtcactcgtaggggatgtggagtgagaacagcatttagtgaagttgtgcaacggccagggttgtgctttctagcaaatatgctgttatgtccagaaattgtgtgtgcaagaaaactaggcaatgtactcttccgatgtttgtgtcacacaacactgatgtgacttttatatgctttttctcagatctggtttctaagagttttggggggcggggctgtcaccacgtgcagtatctcaagatattcaggtggccagaagagcttgtcagcaagaggaggaacagaattctcccagcgttaacacaaaatccatgggcagcatgatggcaggtcctctgttgcaaactcagttccaaagtcacaggaagaaagcagaaagttcaacttccaaagggttaggactctccactcaatgtcttaggtcaggagttgtgtctaggctggaagagccaaagaaatattccattttcctttccttgtggttgaaaccacagtcagtggagagatgtttggaacacagtcagtggagctggtggtaccaggtttagcattattggatgtcaaaagcattttttttgtcatgtagctgttttaagaaatctggcccagggtgtttgcagctgtgagaagtcactcacactggccacaaggacgctggctactgtctattaaaattctgatgtttctgtgaaattctcagagtgtttaattgtactcaatggtatcattacaattttctgtaagagaaaatattacttatttatcctagtattcctaacctgtcagaataataaatattgtggtaaaa

SEQ ID NO: 150946 - DNA, 567 bp, Homo sapiens
  misc_feature (1)...(567): n = a,t,c or g
gcctgcatgtcgcagcagcgtactgacgtcacgcaggacgccactgccctgtcgccccgcctgtgcagcccaggacctaggcgcggtagctggggctggcttttgaggggcgcgggcagccttctgactgggtcggaggcctgcgggcccgaagcctctgtccctcctgttcttgtccggcgctgcttagccccctcngcgtagtcatcatggatctgattttaaaccggaatggattatctgcaggtgggagtaacatctcagaagactatgaagcttaattcctgcctcaagacacagagctacacaaaaggtggttattggagatcatgatggggtagttatgtgctttggcatgaagaaaggagaagcagcagcagtgttcaagactttacccgggccgaagattgcaaggctggaactgggaggggttatcaacacacctcaggagaaaatttttattgctgcagcatctgagattagaggcttcacaaaaaagaggaaaacagttcctctcctttgaaacaaacctcactgaaagcattaaagctatgtatgtcaaatgtt

SEQ ID NO: 150947 - DNA, 849 bp, Homo sapiens
  misc_feature (1)...(849): n = a,t,c or g
gnaattcggccacgagaagnagcagagagagagagagagagagagagagagagagagagagagagagagagagagagagagagagagagagagagagagagagactcgtgccgaattcggcacgagtatggagctggagctgaagtttagcccaattgtttactagttgagtgaatgtggatgattggatgatcatttctcatctctgagcctcaggttccccatccataaaatgggatacacagtatgatctataaagtgggatatagtatgatctacttcactgggttatttgaaggntgaattgagataatttatttcaggtgcctagaacaatgcccagattagtacatttggtggaactgagaaatggcataacaccaaatttaatatatgtcagatgttactatgattatcattcaatctcatagttttgtcatggcccaatttatcctcacttgtgcctcaacaaattgaactgttaacaaaggaatctctgggtcctggggnaatggctgagcaccactgggcatttcccattcccagttnggcttcttnggggtttgcaagnctgcaaccaaccaaggcaaccttaaaaaaaatngaaggttttaaacncttttnaaaaaaaaaaaaaaaaaaaaaaacccccgaggggggggccncggggaccnaaattcgnnccccaanagggggggccgggnaaaacaaaatncccacngggngcgngcgnggttaaaaaacgggccggannccngggaaanccccgggggtnccncaacttaacccccctngnannaaaccccccctttnncaaaggggggaaaaacngaaagggncccccnngnt

SEQ ID NO: 150948 - DNA, 994 bp, Homo sapiens
tggcaaggacaaaaagacagagagagagagagaagggaagaaaaaaagagagaggggagagagacgagaggagacacgagaggggagacgagaggagagacaggagagggagaggagagaacaaagagagagagaggaggagagagagacacgagagaggagagagacgagagagagagagagagagagagagagacgagacacgaacgacgagagagagaagagagagagagagagagagagagagagagagaaagagagagcgagagagagagagaagagcgagagagacagagagagagagagacggagacagagagagagaagaagagagagagagagagagagagagagagagagagagagagagagagagagagagagagagagagagagagagacagagagagagagagagagagagagagagagagagagagagagagaaagagagagagagagcagagagaaagagagagagagagagacagagagagagagagaaagagagagagagagagagagagagagaaagagagagagagagagagagagaaagagagagggagagagagagagagagagagagaagagagagagagagagagagggagaaagagagagagaggagacagaacagagagagagaaagagagagggagagaaagagagagcactcaggccatgttcccgggacaacccaagacgagagctctggcaattgtctttcctgccaatgttcggcaaattaatggcgactaacgcagcagatattttcggtctgcagcaaaaaggccgtatcgccccaggaaaagatgccgacttcgtcttcattcagccgaatagcagctatgttcttaccaatgacgatctggaatatcgccacaaagtcagcccgtatgttggccgtaccattggcgcgcgtacacgtttcacagtgttccaaatctatgcccacaatatacaacgagattttttaaaagcaagaaaatga

SEQ ID NO: 150949 - DNA, 1256 bp, Homo sapiens
tgagttacgcaacatttcttttattgcctcgggttggaagctccagcgccccctcccttagccctacgtcccccccaccccgcccccgccccgcatgctctgactcctttggggtctgaagttcactgccccgcacctgcgccccagccccgcccagcgcttctgccgtggttccctggtgccgcctcccgcttgccgaagcgcaggccgaaggagttccagttgtagttcggcaggtccttctcccgctgcaccagcaccgcgccctggggtgcggggatctggcggctgtggggggcggacaggcccggctgctggcggctcccggagctctcggggggcggggacagcgaggtcccccgacggctcagcctggcagtagcagctggcttcctctcggtgcacggcaggctctgctccccgggggccaggaggcccagggattctagctgctggcctgtgggtctagaattccccacagaggccaccttttctaatggctccccaaagtgggtggcacagaggaaaagcagtagctgccaagaaaccagtgagttcatcttggtgagaagagccaggtcctagaagtgccttgaggcttgcctcagtcctggcctgggcaggagtctgcggagcctctgaggtgacgagaccacctggctgggtgaatgtccagagggtgggcagcctcgtgccgaattcggcacgaggagagagagagagagagagagagagagagagagagagagagagagagagagagagagagagccgagcagtgcttgctcctgctcggggcgctgcggccccgggcgtcgccatgaccagtgagctggacatcttcgtggggaacacgacccttatcgacgaggacgtgtatcgcctctggctcgatggttactcggtgaccgacgcggtggccctgcgggtgcgctcgggaatcctggagcagactggcgccacggcagcggtgctgcagagcgacaccatggaccattaccgcaccttccacatgctcgagcggctgctgcatgcgccgcccaagctactgcaccagctcatcttccagattccgccctcccggcaggcactactcatcgagaggtactatgcctttgatgaggcctttgttcgggaggtgctgggcaagaagctgtccaaaggcaccaagaaagacctggatgacatcagcaccaaaacaggcatcaccctcaagagctgccggagacagtttgacaactttaaacgggtcttca

SEQ ID NO: 150950 - DNA, 427 bp, Homo sapiens
  misc_feature (1)...(427): n = a,t,c or g
ctgtgtgcagggaaagagaacctcaccagaaagtattcaataaaatgccaaagtgatcttacagaacagtgcctgtgacaccggaggggattgttctgtctttgtgagtgaacatacaatgatggggataactggtcctcataccatgcaggtcccatttctgatcaccccactggcaggacaattcacagttcttgagcaaactgagttagggagggtatgctaacgacagaacctatgcaagttcttagaaatattttttgtttgctgaaataaagctcaatcaacacactaccttnnnnnnnnnnnnnnnnnnnnnnnngggggggccgttttaaagaatccttggaggggcccaagtttacccgggcttgcaaggttttagttttttccttatagggagccgaattaaaacctacctggggat

SEQ ID NO: 150951 - DNA, 542 bp, Homo sapiens
  misc_feature (1)...(542): n = a,t,c or g
cttgttaaacgccggcccgggcccagcttttaatacggccccccataaggaaaaaactaaaaccttgcaagcccgcgttaacttgggcccccccaaggattctttaaaacggccccccccccccnnnnnnnnnnnnngtcttctaagtcttcatgtctacagtgttattttttgctattattttttgtttcttcgacagtgacataaactgaggtaaacatctgtgaccaacacctctcctaaggggcaaagggtcccagcccgaccagcagaggaggtggcagcaccagggccccaacctggtgttccggttctgctctggggtcaggctggaggctggccctctgggtgcctctgggaatgagggggctgggctacataactatggtcccctcccaactctaacatactagatactacaacggctggggaaactcccgaacaggatcttaacagagagagggagagagagaaagagaggagagagagagagagagagagagagagagagagagagagagagagagggagagagagagcgc

SEQ ID NO: 150952 - DNA, 849 bp, Homo sapiens
  misc_feature (1)...(849): n = a,t,c or g
gccacagctaacatcattgcagctcttttcctccttggctgtctgaagatagatcgccatcatgaccgaccaccggaactatccccaactagaaaagttcatgacccaaccgactacttccagaaggaaacaaatgggtcatttgatgtcctttcaccccggggaaggccgacagtgcccctaagcacagaaattccggggaaaaacctagccccaaaatgtaccaagaccccacacccggatgtccatcctttgtatttggattccagaacctcattttggtggtggcaagacaactgggctttggccatgatttatgattccccctggattatgcaaagaaaaatgaaccccaaacatagactttgcaagaccatggcctgtatgagaaagaaaaagaccttcaagaaagcaaccgaaaggaaccgcaagaaccagaatgaaagaaagtccaggggggactggcaaagggccaatgttggtgctgggcaaaaagaagaaatgaagtgtctagcagttgagctggagattggatcacagccgaggagttaaaggtgctgcaatgatgttagctgtggccactgtggatttttcgcaagaacattaataaactaaaaacttcnnnnnnnnnnnnnnnnnnngggggggccgttttaaagaatccttgggggggccaaagttaaccgggcgtgtgcaaggattagttttttccttatagggagccgtattaaaacctacttgggaatttttggaaagaaactttatttttggggggggacttattgggccaacctccctacaaaaatttaaggctttagggaaaataaaaaattttaaagggtataaggg

SEQ ID NO: 150953 - DNA, 649 bp, Homo sapiens
gaagaattggtaccaatctttttaacattattccacaagatagagaaagaaggaaccctccctaattcattctatgaagccagcatcaccctaataccaaaaccaggaaaggacataaccaaaaaagaaaactacagatggatatccttgatgaacatagatgctaaaatccttaacaaaatacttgctaaccaaatccaacaaattaccaaaaagataatccaccatgatcaagtgggtttcataccagggatgcagggatggtttaacatgcacaagtcaataaatgtgatacaccacgtaaacagaattaaaaacaaaaatcacatgatcatttcaatagatgcagaaaaagcatttgacaaaatccagcatccctttatgattaaaactctcagcaaaatggcatacaagggacataccttagtgtaataaaagccatctatgataaacccacagccaatataaaacaaactttccagatacaagattaatgtacagaagtcagtagctcttttatacaccaacggcgaccaagtagagaatcacatcaagaactcaaccccttttacaatagctgcaaaacaaaaaacaaaaaacaaaaaaaaaccttaggaatatacctaaccacggagttgaaaaacccgga

SEQ ID NO: 150954 - DNA, 717 bp, Homo sapiens
gcggccgcctactactactaaattcgcggccgcgtcgaccaaagatgtattcctctaagattttatagctttttaccccttacattgggatttttgaatcactttgaattactttttggatatatcattaggaaggagttcattttattcttttctaatgtggctacgcacgtctcaataccatttgttgaaaagtctattcttttttttaaaatttatttattttattatactttaagttctagggtacatgtgcacaacgtcgagggtttattacatatgtatgcatgtgccatgttggtgtgctgcacccgttaactcaccatttacattcggtatatctcctaatgctatccctgccccatccccctcaccccacgacaggccccggtgtgtgatgtttccccatcctgtgtccaagtgttctttcattgttcaattcccacctatgagtgagaacatgcggtgtttggttttctgtccttgtgataagtttgctgagaatgatgggtttccagcttcatccacgtccctacaaaggacatgaacccatccttttttatggctgcatagtattccatggtggtatatggtgccacattttctttatccagtctatcattgatgggacatttgggttggttccaagtctttgctattgtgaatagtgccgcagtaaacatatgtgtgcatgtgtctttatagcagcatgattta

SEQ ID NO: 150955 - DNA, 1623 bp, Homo sapiens
atgaatccaaaccaagaagaaatctctgatttacctgaaagaattcaggagacagagaaggaaggaaccctccctaattcattctatgaagccagcatcaccctaataccaaaactaggaaaggacaaaaccaaaaaagaaaactacagaccaatatccatgatgaacatagaggctaacatccttaacaaaatactagctaaccaaatccaacaacatatcaaaaagataatccaccatgatcaagtgggtttcatatcacagatgcagggatggtttaacatacacaggtcaataaatgtgatacaccacataaacagaattaaaaacaaaaatcacatgatcatctcaatagatgcagaaaaagcatttgacaaaatccagcatcactttatgattaaaactctcagcaaaatcggcatacaaggggcatacctcaatgtaataaaagccatctatgacaaacccacagccaacataatactgaatgggaaaaaagttgaaagcattccctttgagaactggaacaagacaaggatacccactctcacaactcttcttcaacatagcactggaagtcctagccagagcaatcagacaagagaatgaaataaagggcatccacattggtaaagagaaagtcaaactgtcactgtttgctggtgatatgatcttttatcttgaaaaccccaaagactcctccaaaaaactcctagaactgataaaagaattgagcaaagtttccaggtgggaattgaacaatgagaacacttggacacagggtggggaacatcacacaccggggcctgtcgtggggtcgggggaggagagagggatagcattaggagatacacctaatgtaaatgacaagccgctcactggggccgccttggcaagtaccctaggggtgtgggaaaatgaaaacaaattcacacacctttttaacatacacagccagttctgcctacccagccaaggcatattcttcttgtgtggaacttcaacctatgtctgcctcaccactaactggacaagcacctgtaccctaatcttcctaagccccaaaattgacattgcccctggaaaccaaaccttaccagtccctgtcagagcccaagtccatcagcatagggctgtgcagataatacccttgcttataggactaggagttaccaatgccacaggaactggaatagcaggtttgtccccttccctgtcctactatcatacactctcaaaggatctctcagacagcctacaagacatagcaaaatccacccttactctccaatcccaaatagactccttagcagcagtaactctgcagaaccaccgtgggcttagacctcctaaccgtcgaaaaaggtgggctatgcacctttttaggggaagattgtttttccaccaaccagtctgggactagtacgagatgctgcctcgcgtttaaatggaaaagggttcttaaaattcaggacaatgtcttttcaggactttttaacaccaatctttgggagctggggctttgtgggtttttccctatagctggggcccctcatttccatcattctccttctcctatttggaccctgcctcttccgtctagcctctcagttcctacaaaag

SEQ ID NO: 150956 - DNA, 401 bp, Homo sapiens
  misc_feature (1)...(401): n = a,t,c or g
ccagggcggcgcgtggtctacgccgagtgacagagacgctcaggctgtgttctcaggatgaccgagtgggagacagcagcaccagcggtggcagagaccccagacatcaagctctttgggaagtggagcaccgatgatgtgcagatcaatgacatttccctgcaggccatctggctgctgtgcacaggcgctcgtgaggctgccttccggaacattaagaccattgctgagtgcctggcagatgagctcatcaatgctgccaagggctcctcgaactcctatgccattaagaagaaggacgagctggagcgtgtggccaagtccaaccgctgattttcccagctgctgcccaataaacctgtctgccctttggggcagccccagnnnnnnnnnnnnnnnnn

SEQ ID NO: 150957 - DNA, 437 bp, Homo sapiens
tttcgtgcgtggtctacgccgagtgacagagacgctcatgctgtgttctcaggatgaccgagtgggagacagcagcaccagcggtggcagagaccccagacatcaagctctttgggaagtggagcaccgatgatgtgcagatcaatgacatttccctgcaggtgaggggaacttggtgattggccttcctggctgggggcggacattattccaggaaggcacacatcaaacttgttgctgtgccattaagtcaagaatagagatcataacaggtaaagaagggatcccttgaccaccacatctaccacatctgctcttacgtcctgttcaaagatgactacaacttctgtcatgagaggactccttcaccagaaggagcatcacatctcacatatggtatttttgttactgtttttgtagtaaaatacataacatcc

SEQ ID NO: 150958 - DNA, 745 bp, Homo sapiens
  misc_feature (1)...(745): n = a,t,c or g
actgaaacccctgaagaacatctgaccagncnggnggaattcaccagggcggcgcgtggtctacgccgagtgacagagacgctcaggctgtgttcttaggatgaccgagtgggagacagcagcaccagcgttggcatgagaccccagacatcaagctctttgggaagtggagcaccgatgatgtgcagatcaatgacatttccctgcaggattacattgcagtgaaggagaagtatgccaagtacctgcctcacagtgcagggcggtatgccgccaaacgcttccgcaaagctcagtgtcccattgtggagcgcctcactaactccatgatgatgcacggccgcaacaacgggcaagaagctcatgactgtgcgcatcgtcaagcatgccttcgagatcataacacctgctcacaggcgaaaaaccttttggaggtccgggggaccgccatcatcaacagtggtccccgggaggactccacacgcattgggcgcgccgggactgtgagacgacaggctgtggatgtgtcccccctgcgccgtgtgaaccaggccatctggctgctgtgcacaggcgctcgtgaggctgccttccggaacattaagaccattgctgagtgcctggcagatgagctcatcaatgctgccaagggctcctcgaactcctatgccattaanaaaaaagacgagctggagcgtgtggccaagtccaaccgctgattntcccagctgctgcccaatatacg

SEQ ID NO: 150959 - DNA, 565 bp, Homo sapiens
ccagctcaagtcaacatcctgggctgttaacccgcgataaggtcggacggggcctcagtggagaatacgtggggaagttctctggggcgggcgcagtctgctgctgattctgagaaaccgaaactcagctgttaaaaccgctgcctctgcactttggaatcccatctggagactcgctaagcgtgccagccgcatccctcccgcagcgacggcggcccgggacccgcgggctgtgaaccatgaacacccgcaatagagtggtgaactccgggctcggcgcctcccctgcctcccgcccgacccgggattccccaggacccttctgggcggcaaggggagctgagccccgtgggaagaccagagagagggtttggaggcagcccctaagggcccttcgcgggagagcgtcgtgcacgcgggccagaggcggtgagtattttaacaacctggcttcggggcgggagcccgggccccaaacatactcactcacaagcaccttggtccttggagtttaaaaccacaggggcccaacaacagggattttgactgaatgaaagctcatttg

SEQ ID NO: 150960 - DNA, 1536 bp, Homo sapiens
ggaatcccatctggagactcgctaagcgtcccagccgcatccctcccgcagcgacggcggcccgggacccgcgggctgtgaaccatgaacacccgcaatagaggggtgaactccgggctcggcgcctcccctgcctcccgcccgacccgggatccccaggacccttctgggcggcaaggggagctgagccccgtggaagaccagagagagggtttggaggcagcccctaagggcccttcgcgggagagcgtcgtgcacgcgggccagaggcgcacaagtgcatacaccttgatagcaccaaatataaaccggagaaatgagatacaaagaattgcggagctggagctggccaacctggagaagtggaaggagcagaacagagctaaaccggttcacctggtgcccagacggctaggtggaagccagtcagaaactgaagtcagacagaaacaacaactccagctgatgcaatctaaatacaagcaaaagctaaaaagagaagaatctgtaagaatcaagaaggaagctgaagaagctgaactccaaaaaatgaaggcaattcagagagagaagagcaataaactggaggagaaaaaaagacttcaagaaaaccttagaagagaagcatttagagagcatcagcaatacaaaaccgctgagttcttgagcaaactgaacacagaatcgccagacagaagtgcctgtcaaagtgctgtttgtggcccacaatcctcaacatgggccagaagctgggcttacagagattctctaaaggcagaagaaaacagaaaattgcaaaagatgaaggatgaacaacatcaaaagagtgaattactggaactgaaacggcagcagcaagagcaagaaagagccaaaatccaccagactgaacacaggagggtaaataatgcttttctggaccgactccaaggcaaaagtcaaccaggtggcctcgagcaatctggaggctgttggaatatgaatagccggaacagctggggtatatgagaaaatattgactcctatctggccttcatcaactgacctcgaaaagcctcatgagatgctttttcttaatgtgattttgttcagcctcactgtttttaccttaatttcaactgcccacacacttgaccgtgcagtcagggagtgactgggcttctccttgtcctcattttatggcatgtttgggagggagctggattcctggacctggaactcatatttaatctctactgccagggaaatgctacattatttttctaattggaagtataattagagtgatgttggtagggtagaaaaagagggagtcacttgatgctttcaggttaatcagagctatgggtgctacaggcttgtctttctaagtgacatattcttatctaattctcagatcaggttttgaaaagctttgggggtctttttagattttaatccctactttctttatggtacaaatatgtacaaaagaaaaaggtcttatattcttttacacaaatttataaataaattttgaactccttctgtaaaaac

SEQ ID NO: 150961 - DNA, 1340 bp, Homo sapiens
atgaacaaacacccaagatccagagacagcaacacaaaaaaggaacggaacacaggacaaaacgaccgaagaaaccaacaaagacaaaaaagcacacgacaaaaagaagaacaagaactaggaagccgcaagcaagacgacgaaagacaatatttgcagttggaaggatgatacaatcggctgtaaagaaatgcccacctctgaaaactgtccatcttttgctctacatcagaaaataagtagacagaaaccacggtgaatgtcgggaatatggaaagaccctttgtcaagactcaaagcctgttcaacatgaaagaatacatagtagtgaaaaacccaacagatgtaaagaatgtgggaagaactttagtaatggacatcaactcaccatacatcagagattgcatgttggtgagaaaccctataaatatgaaaaatgtgggaaggcctttatcagtggctcagcctttgttaagcatgggagaattcacactggtgagaagccactcaaatgtaagcaatgtggaaagactattagcggtagctatcaacttacagtacataagagtattcatactgggaagaaaccatatgagtgcggggaatgtgggaaagcttttctagtatatggaaagcttacccggcatcagagtactcacactggtgaaaaaccctttgggtgtgaggagtgtgggaaggccttcagtaccttttcatacctggttcaacatcagcgaattcataccagtgaaaaaccttacgaatgcaaagaatgtgggaaggcctttagcactagctcaccccttgctaagcatcagagaattcatactggcgagaaaccctatgaatgtaaggagtgtgggaagtccttcactgtgtatggacagcttactcgacatcagagtattcatactggtgagaaaccttttgaatcgattcatgcagagataaagccctacagatgcaaggaatgcgggagaaccttcagtcgtgcctcatatcttgttcaacatggaagacttcacactggcgagaagccctatgaatgtaaggagtgtggcaaggcctttagtactggctcataccttgttcagcatcagaggatccatactggggagaaaccctatgaatgtaaggaatgtggcaaagcctttattagtcgccatcagcttaccgtacatcaaagggttcatactggagagaaaccctatgagtgtaaggaatgtggcaaggccttcagagtgcacgtacatctcacacagcatcggaaaattcatactgatgtaaagccctatgaatgtaaggaatgtggaaagacttttagtcgagcctcgtacctt

SEQ ID NO: 150962 - DNA, 1432 bp, Homo sapiens
ctaaaactgaaaaatctcaaaggagatcattggaactgacttgttcatttattttttgtttttaaattaagaaagattacacaaaataagtgttactgtactttaagctattacaaatatccaacttttaaagatatgtaagaatcactaatattctagaaagcacatatatagtaaaagggcatcctttaaatgtagaacgggtaaacatgaaacagttccatgcttgaattgttaagtatctagggggtaaacattgaatgggagaatcatttattgggttaaggtcccttccttgtcattctgggatctgtgaatcacattgtaattcctgttgacaaagctttacttgttaacatcagttgatactgacattctccataaagatatagaatgaaaatatctattaaaaatagtttatcattgttttagcttttttgttttgtttgttttgagacagagtctcactgtcacccaggcttgagtgcagcggtgtgatcttgggctcaatgcaacctccacctcccaggttcaatagattctcccaccttgggcctcccaagtaggctggggattactgggcatgcaccactatgcctgggccagttttttgtatttttagtagaggatgggggttttcaccatgttgggccaggctggactcgaactcctgacctcaagtgatccgcccacctcagcagtcccaaagtgccgggattataggcatgagccactgcgcctagcctgttgcagctttttaaagcaggaaaatatccatataaactgttgggttagaatctatattagaatctttcaaactaattgaaaacaggaagactatcatctaagtagccagataatctgggctcacatagaatgattccatggcactggcttaaaaaatactttgcaagtgttttaatttttaaagcgtaactaattcttcaaatatggtatgctggtagaatatgtattccataagtactttttgtatatgtattcttaaattttaaaaagtcaactgaatgcgcaaagatgatataattttggatgtagacatttaaactagattcccagtcctctccttcaaaagcttgggtctttgtttttcctataggggaaaaaagtccaaaattaagtttccaaaaactatcctccaaagtagtattgtgcttgtagtaaatgaaggttggatggatggatactgacaatggtggcaggcatttcaagccttttaaattagtactttttgtcgtcttgcttattaaaattttgttaattttagcaaagaccaattgttgtgataaactggtgttttttggatgcttcaagcacacgttaaccaattttttaattccccttttggttcctcccattgttctaaaataggactttcatattattaaaaccctcaaaagaagatccacccagg

SEQ ID NO: 150963 - DNA, 3208 bp, Homo sapiens
atggatagtagcatccacctgagtagtctgatcagtcggcatgatgacgaagccacgagaacatcgacctcagaaggactggaggaaggtgaagtggagggagagacgctcctgatcgtcgaatccgaggatcaggcatcagtggacttatcgcacgaccagagtggggattccctcaacagtgatgaaggagacgtgtcttggatggaggagcagctgtcctacttctgtgacaagtgccaaaaatggataccagccagtcagctgagggaacagctcagttaccttaagggtgataatttttttaggtttacttgttcggattgctcagcagatggcaaggagcagtatgaaaggctgaagctgacatggcagcaagtcgtcatgttggcaatgtacaacttgtctctggaaggaagtggacgtcaaggttatttcaggtggaaagaagatatctgtgcttttattgagaaacattggacttttttactagggaataggaaaaagacgtctacctggtggagcaccgtggcaggttgcctcagcgtgggaagtcccatgtacttccgttcaggtgctcaggaatttggagagccaggatggtggaaacttgttcataacaagcccccaacgatgaaacctgaaggagagaagttgtctgcctctactttgaaaataaaagcctcaaaaccaactttagatcccatcattactgttgagggacttagaaaacgagcaagtcggaatcctgtggaatctgccatggaattaaaagagaaaaggtctcgaactcaggaagcaaaagacattagaagagcccagaaggaggccgctggctttcttgacaggagcacatcttctacccctgtaaaattcataagccgaggccgcaggccagatgtgattctggaaaaaggcgaagtgattgacttttcctccttgagctcctctgaccgcaccccgctgacaagcccatctccttctccttctctggatttctctgcccctggtacacctgcctctcattctgccacacctagcttgctttcagaagcagatctgattccagatgtgatgcccccacaagccttgtttcatgatgacgatgagatggaaggcgatggagtcatagacccagggatggagtacgtcccaccccctgctgggtcagtagcttctgggccagtggttggggtcagaaagaaggtcagaggccctgaacagataaagcaggaggtagagagtgaggaggaaaaacccgacaggatggatattgacagtgaagacacagattcaaacacatctttgcaaacaagggctagagaaaagaggaagcctcagctggagaaggacacaaagccgaaagagcccaggtatactcccgtgagcatctacgaggaaaagctgctgctcaagaggctggaagcttgtcccggtgctgttgccatgactccggaagctcggagactgaaacgcaaactgattgtcagacaagcgaaaagggataggggattaccactttttgacttggatcaagttgttaatgctgctcttttgttagttgacgggatttatggagccaaagaaggaggaatttccagacttccagctggacaagccacgtacagaaccacctgtcaggacttcagaatccttgaccgataccagacttccttgccgtccaggaagggatttcgacaccagaccaccaagtttttgtatcgcttggtaggatcagaagatatggctgtggaccagagtattgtcagcccttatacctctcggatcttgaaaccttatatcaggagcgaccctcactggacgccggagcccgacgcacctctcgattactgttatgtgcggccaaatcacatcccaacgatcaactccatgtgtcaggagtttttttggcctggcattgacctgtctgagtgtctgcagtacccagacttcagtgttgttgttctttataaaaaagtcatcattgcctttggcttcatggttcctgatgtgaaatacaatgaagcttacatttcatttctgttcgtccaccctgaatggagaagagcagggattgcaactttcatgatctatcatctgattcagacctgcatgggcaaggacgtaacccttcacgtctcagcaagcaaccctgctatgctactgtaccagaagtttggattcaagactgaagaatatgtattagatttctatgataaatattacccattggagagtacagagtgtaaacacgcattctttctgaggctccggcgctgatgcgaatacagctcacagagaaacgcatgtgctattggagaacaggtctttgtggagatctaaaggcagtgattgatttcacagggagctctaatctctgtgattacatggtccttcaaactcccaaccaaagtgagaaaagcggcatgcagtgaaatgagcagtgagcagccctttagcaaaatcgccctccagtccttcctggagatgccttcagccagcatcccagactccacagttatttatgaatgatgtcgtgattctccctccacctgacagtttgtaagagtgaaagagcatctaacctgatgctcttggagagagataacctgtctgtcataacttaaaggatgagaaaatgtggtgtagctattaaagattcatgcagtcccaaaaggcactgtcctgggatgatgagagattataaggtgatttcataaaaggaatccaaccctgtgcccggccattgatgtgttgtcattgaatccaggaggatttctagggcactgaagttttgttgtttcttttgctgactttggttacagtcagaaaaaataaactagatgtttgtgtctacatgttctacctgttgtacctattagcatcttcctgcagggacttgggcccatggcctgggaggttggtttgggattggggttgttgggcagcctgccattcacctggcctatcctggcccttctcatgcccaagacagttgtttcacaggagtggaagtgtgggtgatgcaagtagaaccctctagatgtaccctgtgtggtctgcaggactggactgtttgctgtgtttgtggatgttggcgatagactgtcaattaggttgtttgtgatccaacaagaacatttccaaaagtatctaggtgttctcaaataaaaagctttctttgcacaacccatggccagagcgtcaa

SEQ ID NO: 150964 - DNA, 1262 bp, Homo sapiens
gctcccggcgggcgatgtgcagcccgagattcaggacgacccggctgcccggcttagcgcctttggagctccgcgctgaaggggccttgctccgcacaggcacggcacgcaagcttttggggtgcccagtggctctgttttcaagtcacagccggcccgcagattgcgaacctttccacatctcacttgggccgctagaaaatagaaggtggggaaggagtttcttggggtgcattctgcaagctaccagcctccctcctggcccaagaggcttcgtgacggagttatcagagacattgagaggcaaattcggaaaaaagaaaacattcgtcttttgggagaacagattattttgactgagcaacttgaagcagaaagagagaagatgttattggcaaaaggattctcaaaaatcatgacttgaatgtgaaatatctgttggacagacaacaccgagtttgtgtgtgtgtgttgatggagagtagcttagtagtatcttcatcttttttttttggtcactgtcccttttaaactttgatcaaataaagggacagcggggccatataagttactgctttcaggggccccttatatctgaataaagggagtgtgggcagacacctttttggaagagtctgtctgggtgatcctggtagaagccccattagggtcactgtcccagtgctttagggttgttactgagaaagcacctgccggagcttgtgagaaggaagggatggaatagttagccatccaccctgagtagtctgatccagtcggcatgatgacgaagccacgagaacatcgaccctcagaaggactggaggaaggtgaagtggaggtgagagacgctcctgatcgtcgaatccgcaggatcaggcatccagtggaccttatcgcacgacccagagtggggggatttccctcaacagtgatgaaggagacgtgtcttggatggaggagcagctgtccctacttctgtgacaagtgccaaaaatggataccagccagtaaggagcttctcaaatcctttgatttgtcaattcctgtgtgaaggtttgtttttccaacctgtgaaagaaacgtgaatgtaaaagagacctaaataaaaggataattatatttattctctaggttgatcagctattaaatttatataaaacataggcatgtttgtactaatgaaacgtactgtcaacctctatcacattgttaaattaacacttttggtggtaactcaataaaattgagaaaattggaaa

SEQ ID NO: 150965 - DNA, 664 bp, Homo sapiens
  misc_feature (1)...(664): n = a,t,c or g
ccctctcctaaatttaaanggatataatacataaattatgttctccctacacaatagaatgaaattaggaattgatatagtttgaatttttgttcactcccaaaactcatacttaaaagttaattccccattttggaaggtgtcgggaggtgggaactttaagaggtgttggggtcatgagggttatgtgctcattaatgggttaatgcccattatcacagaaatgtgttcattatcacaggaggagtactgttataaaagggcaggtctggcctccccttgctctctcttgcctttccacctcccaccatgggatgatgcagcacaagggtcctgccagatgctgccccctcattcttcggatttcccagcctccagagctgtgctaaataaatttctgttcattattaaatacccagtcttaagtattttgttatagcaggacaaattggaataagacagaaatcaacaggaaaaaatttggaaaactcccaagcatatggaaattgagcagcactctactaaataaccaatggatcagaggaaaacaaaagggaaataaaaaaataccctgacataaatgaaaatgaagacacaacatatcaaaatttatggaatgaactgaagcagtgttaaatgtctagctgcacatgcgtataataag

SEQ ID NO: 150966 - DNA, 2097 bp, Homo sapiens
tttttttttttttcctcacatattagctcccctttttattttttaaaaactcttcccattctgacctcagcctcctccattaagttttctgcatccgtgcgacaagtctggggccatggctgctccttgaggctgctgcctttgaggtgctcttgtcatcaatttggatgtataaactactaatgttgactcatggcctagggaaagctaattcaaaggcaaggacagatgattccacagagtagtcacttgaggctcacaaatcatcagacacctgaaatggttttctcctatgatcactttcttcacttttcatatccattttaagtttttccctttgcagctcagtagtaaaatgctctctgatgaatttttatggatgtccatattgtgtattccattctcttcttgttcaaatcttgacattgagaattctcttcatctcagaaagagctccatttggatagaatgcttgcaatttatttggataattatcccagtaaaattcctgaagatctggtttgcagaacgttgaactgtctccagatgaagaactggttgggccttgctatttcttctcatcttcacatccaccatgggcaagctaaagaaaagccaatgatgtcactgattggctgaagctgcagagctggcttcgagcatggccggattggctgctagctcttctggtgcctgcctgctcgggcagcggttgaaccagatactttctgtctctcttgttgtcgtttgaagcaaatcttgttcagcccagctgtgtctccatagtagtggcaccctaagagagagtctccctcctgcttcccacagctcgtctgtgaggcggtcgctgctgtgaaataccagctcttggtaccaagcccagacagcgttctcagatccatggtgctttctccaggtgtgcccatggccacccatgaaccaatcaacatgcacttcctcccctctgaagcccataaaaactctggactcagccagactcaggcaaacaatgggatggcctgcctgcagataggagctacccagtccaggtttcctctctgttgaggggtccttctccatcttcacacacttcactccaatctctgcttccatcatcccatctcctctgaacttcactcttttaaagaccctggtgattatactgggccttctgtgcaatccaggataatcttcttgtctcaagattcttaatataatcacattagcaaagtctctcttgctcttttggatataagcgtttgttattaccttttggatacaggcatttgttattgccttttggatataagcgtttgttattgtcttttggatataagcatttgttattgccttttggatacaagcgtttgttattgccttttggatataagcgtttgttattgccttttgaatataagcatttgttattaccttttggatacaggcatttgttactgccttttggatataagcgtttgttattgccttttggatataagcgtttgttattgccttttggatattagcgtttgttactgccttttggatataagcgtttgttattaccttttggatattagcgtttgttattgccttttggatataagcgtttgttgttgccttttggatattagcgtttgttattgccttttggatataagcgtttgttattaccttttggatattagcatttgttattgccttttggatataagcgtttgttactgccttttggatataagcgtttgttattgccttttggatattagcatttgttattgccttttggatataagcgtttgttactgccttttggatattagcgtttgtaattgccttttggatataagcttttgttattaccttttggatattagcgtttgttattgccttttggatattagcgtttgttattgccttttgggtataagcgtttgttattaccttttggatattagcgtttgttattgccttttggatattagcgtttgttattgccttttggatataagcgtttgttattaccttttggataatagcgtttgttattgccttttggatattagcatttgttgttgccttttggatattagccat

SEQ ID NO: 150967 - DNA, 372 bp, Homo sapiens
  misc_feature (1)...(372): n = a,t,c or g
annnnnnnnnnnnnnnnnnnnnnnnnnnnnnnnnnnnnnnnnnnnnnnnnnnnnnnnnnnnnnnnnnnnnnnnnnnnnnnnnnnnnnnnnnnnnatnnnnnnnnnnnntnnnnnnnnnnnggggggggcccccccnnnnnnnnnnnnnnnannnnnnnnnngatcagacaaagaaaagctaaattggtcgttttggctttcaacagacggggtttgaggaaacctgatttttttactatgctggggtgggtaaaattgttaaaaaaaaatacagtggcttttttattgaactggtcacaacatgcggaaaaaactacttaatgtgcgcgctggctgtcattgatccacgcgactctaacatcattagaagct

SEQ ID NO: 150968 - DNA, 1192 bp, Homo sapiens
ggtcaccaaggcttctggacggaaacgggtaatgagttacacatcttacaaatacacgttagcatgtgttgtctcaacagtccaagggtttttattattggactacaggtctaatcttctaaagggaattccccaccattaaagagcatctcaagttagatcaccaagagatcacaagctaaaaccagaagtttttttgtcattgtgggggtggaacagttactaattgcctatatttttaaagggaaacatttttttcactgggctgctccgttgaaaaaaatacaagcttaaacttgcccaaagtcacagtggtcaaactggaaattgcaccaaaacttggcatactggttctgaaatccatagttttagcccttatgtatactggttaatttggaaggaagaaatatatacgttctgaagtgaagagtgagtgaaaggaagaattcagtgaatacattgataccttgatattatctgcattgtggctacatgttacttttcttcacaagagtgatataagtgaaataaagaatgattggactgggagaaaaatggctcagaaaactttgcaaaagtacgactgtatgtaaagataagtattcaacattaaatgggaaggaggagatgcaagcagtttaatatatagaattttataattttaggcctgcaagggaccttataaaacatgagcaatggaacacttttttccaaactaaatttccgtgcagtggaacttggcccgactctgtccttcctctattctaagcaccctactctagcccggctgctctgagttcagtttgttacaaatatggacacgaaagtaccacaggctttgcacagcttaattgaagtttccccttcacaccatggtaaaaaaacatactgggatggaagggcttgtgtctagaacaagaacaagaaataaactcttggtcacttactaatatttcaaaatcacaaagcagaattttgcttggatgtttagtaaatcatccttggaaatttaactgcttgcagcttctacacttcttcattaaatgctgtctggctaataaaaagtgccatgttgcagctttattttattttcattttttggagatagaccctcgctgtgtcacccaggctggagtgcagtggtacaatctctgctcactgcaacctccacctcctgggctcaggctgaggc

SEQ ID NO: 150969 - DNA, 398 bp, Homo sapiens
  misc_feature (1)...(398): n = a,t,c or g
nnnnnnnnnnnnnnnnnnnnnnnnnnnnnnnnnnnnnnnnnnnnnnnnnnnnnnnnnnnnnnnnnnnnnnnnnnnatccaaaagcagaccaatagcaagtaacaagattgaagccataataaaaagtctcccagcaaagaagcccaggacctgatggcttcgctactgaattttaccaaacatttaaagaagaactaannnnnnnnnnnnnnnnnnnnnnnnnnnnnnnnnnnnnnnnnnnnnnnnnnnnnnnnnnnnnnnnnnnnnnnnnnnnnnnnnnnnnnnnnnnnnnnnnnnnnnnnntcnnnnnnnnnnnnnnggggaaatttttaaaccatttttttggaggaacttttttggaaaaattttctttaaaaaaataccaactggattttacg

SEQ ID NO: 150970 - DNA, 498 bp, Homo sapiens
ttgaccgatcgaaagctctgggacgacccacgcgtccgacgaagatggcggctgcgcgcttggcagctgtggcggcctgtgtaccttgtcggagctggggctgggcagccgtccccttcggtccccaccgtggcctcagcgtgctgcttgcacggatacctcagcgggcgccacggtggctcccaggtcagtgtccgaaaggcgggagtaggatgcgttctttcgaacgcctcgggttccgtcagttaccgtgcctgtgcagtgcgtctttggcgcccggttcaaaaatgctcctccccctttctcaacaccccagttctaggcgctttgtagacttctggtgaaggctgtgaggagagctctgccgcggccctgcggcattctgggcaccccgggccctcgctggcgttttacactgtgcagattaaagagctcctgctccttacctgcctcccctgcattaaaggccaacactataaaaaattaccatgtgcattt

SEQ ID NO: 150971 - DNA, 520 bp, Homo sapiens
atggcggttgcgcgcttggcagctgtggcggcctgggtaccttgtcggagctggggctgggcagccgtccccttcggtccccaccgtggcctcagcgtgctgcttgcacggatacctcagcgggcgccacggtggctcccagaccttccaaacctggcttataagaagctaaaaggcaaaagtccaggaattatcttcatccctggctatctttcttatatgaatggtacaaaagcgttggcgattgaggagttttgcaaatctctaggtcacgcctgcataaggtttgattactcaggagttggaagttcagatggtaactcagaggaaagcacactggggaaatggagaaaagaatgttctttctataattgatgacttagttgatgggccacagattcttgttggatctagccttggagggtggcttatgcttcatgctgcaattgcacgaccagagaaggtcgtggctcttattggtgtagctacacgctgcagataccttagtgacaaagtttaa

SEQ ID NO: 150972 - DNA, 604 bp, Homo sapiens
cagtaatgtcctgggccttcacattcattcaccactcactcactgactcacccagagcaacttccagtcctccaagccccattcatgagggagaccaagacatcattgttttgaagtttctgaaagtgttgggaggcaaaaattcaggtgcctgggggagaaatggaaggccacaaggcagaagaagaggtgctagatgttctccgactgaacgtgggtggctgtatttacacagcccggcgggagtccttgtgccgcttcaaggactccatgttggcatctatgttcagtggtcgctttcctctaaaaacagatgagtcaggggcttgtgttattgaccgtgatggacgtctatttaaataccttttggattaccttcatggagaagttcagattcccacagatgagcaaacccgcatcgccctacaggaagaggctgattactttggcatcccttatccatacagcctgtctgaccatttggccaatgaaatggagacatattctttaaggctttaacagacttctgtgattcatatggcttagtctgcaataaaccaacagtttgggttctccactatcttaacacatctggtgcaagctg

SEQ ID NO: 150973 - DNA, 842 bp, Homo sapiens
ccgcagagggagaccaagacatcattgttttgaagtttctgaaagtgttgggaggcaaaaattcaggtgcctgggggagaaatggaaggccacaaggcagaagaagaggtgctagatgttctccgactgaacgtgggtggctgtatttacacagcccggcgggagtccttgtgccgattcaaggactacaatgtggcatctatgttcagtggtcgctttcctctacaaacagatgagtcaggggcttgtgttattgaccgtgatggacgtctatttaaataccttttgcattacccttcatggagaagttcagaattcccacagatgagggatacccggggtcgccctacagggaagagggctgattactttggcatcccttatccatacagcctgtctgaccatttggccaatgaaatggagacatattctttaaggtcaaatatagaacttaaaaaggctttaacagacttctgtgattcatatggcttagtctgcaataaaccaacagtttgggttctccactatccttaacacacctggtgcaagctgtgagagtagaattattggtgtatatgccacaaaaactgatggaacagacgctattgaaaagcagctgggaggaagaattcacagcaaaggcatttttaaaagagaggcgggaaataatgttcagtacatttggagctattattcagtagcagagttgaagaaaatgatggatgcctttgatgcttgggaaggaaaaggtgttagctactggcgggtgcctcatgagctgatagagtgttggactctagaagaacggcctttacttggaagcctgcgtcacatggctccat

SEQ ID NO: 150974 - DNA, 1726 bp, Homo sapiens
ggccctcccgagaaagggaagtgcattctcgcttccgtagcggtctccgccggttgggggaaagtaattccggctgttgcaccatggcgtccatggggaccctcgccttcgatgaatatgggcgccctttcctcatcatcaaggatcaggaccgcaagtcccgtcttatgggacttgaggccctcaagtctcatataatggcagcaaaggctgtagcaaatacaatgagaacatcacttggaccaaatgggcttgataagatgatggtggataaggatggggatgtgactgtaactaatgatggggccaccatcttaagcatgatggatgttgatcatcagattgccaagctgatggtggaactgtccaagtctcaggatgatgaaattggagatggaaccacaggagtggttgtcctggctggtgccttgttagaagaagcggagcaattgctaagcccgaggggcatcaccccaatcagaatagccgatggctatgagcaggctgctcgtgttgctattgaacacccttggcaagatcagcgatagcgtccttgttgacataaaggacaccgaacccctgattcagacagcaaaaaaccacgctgggctccaaagtggtcaacatttgtcaccgacagatggctgaaattgcttgtgaatgccgtcctcaattgtagcagatatggagccggagagacggttgactttgagctttatcaaagtagaaggcaaagttgggcggcaggctggaggacactaaactgattaagggcgtgattgtgggacaaggatttcagtcaccccacagatgccaaaaaaaaaagtggaagatgcgaagattgcaattctcacatgtccatttgaaccacccaaaccaaaaacaaagcataagctggatgtgacctctgtcgaagattataaagcccttcagaaataccgaaaaggagaaatttgaagagatgattcaacaaattaaagagactggtgctaacctagcaatttgtcagtggggctttgatgatgaagcaaatcacttacttcttcagaacaacttgcctgcggttcgctgggtaggaggacctgaaattgagctgattgccatcgcaacaggagggcggatcgtccccaggttctcagagctcacagccgagaagctgggctttgctggtcttgtacaggagatctcatttgggacaactaaggataaaatgctggtcatcgagcagtgtaagaactccagagctgtaaccatttttattagaggaggaaataagatgatcattgaggaggcgaaacgatcccttcacgatgctttgtgtgtcatccggaacctcatccgcgataatcgtgtggtgtatggaggaggggctgctgagatatcctgtgccctggcagttagccaagaggcggataagtgccccaccttagaacagtatgccatgagagcgtttgccgacgcactggaggtcatccccatggccctctctgaaaacagtggcatgaatcccatccagactatgaccgaagtccgagccagacaggtgaaggagatgaaccctgctcttggcatcgactgtttgcacaaggggacaaatgatatgaagcaacagcatgtcatagaaaccttgattggcaaaaagcaacagatatctcttgcaacacaaatggttagaatgattttgaagattgatgacattcgtaagcctggagaatctgaagaatga

SEQ ID NO: 150975 - DNA, 492 bp, Homo sapiens
  misc_feature (1)...(492): n = a,t,c or g
tttttttttttttattttaagttgtttattttaagataatttacaaatatcttgctgtcttcagtaattcaaataatggaggaacagtttcttcggacaaaggcagcagtaagctaaaaacaaaatcaactggctgaattttccttctttacctgaaaaacaaagtacagaacaagtaagaaatcaaacagcattttttggggaaaataatgtcaagagataataatacatatttaacgtggggtacagagaactgaatttacacaataaagtgttaccctataccagtgattctaaaattttggtctggggaacctttcatgggggttcatgagggtcaaaactattttccatngataatgttattttgcctgttatattctcattcttcgagtatacagtagagttttccagaggccacatgatccatgacatcacaacaaaatgaatagagacagatgaaaatctagctggcttctgctacatgaatca

SEQ ID NO: 150976 - DNA, 1091 bp, Homo sapiens
ctgaccgaccttcagcagggctgtggctaccatgttctctcgcgcgggtgtcgctgggctgtcggcctggaccttgcagccgcaatggattcaagttcgaaatatggcaactttgaaagatatcaccaggagactaaagtccatcaaaaacatccagaaaattaccaagtctatgaaaatggtagcggcagcaaaatatgcccgagctgagagagagctgaaaccagctcgaatatatggattgggatctttagctctgtatgaaaaagctgatatcaaggggcctgaagacaagaagaaacacctccttattggtgtgtcctcagatcgaggactgtgtggtgctattcattcctccattgctaaacagatgaaaagcgaggttgctacactaacagcagctgggaaagaagttatgcttgttggaattggtgacaaaatcagaggcatactttataggactcattctgaccagtttctggtggcattcaaagaagtgggaagaaagccccccacttttggagatgcgtcagtcattgcccttgaattactaaattctggatatgaatttgatgaaggctccatcatctttaataaattcaggtctgtcatctcctataagacagaagaaaagccgatgcttttcccttaatacccgttgcaagttgctgacagcatggggtatcttatgacgatattgatgctgacgttgctgcaaaaattacccaagaatacaaatctggccaacatcatctacttactctctgaaggagtccaccactagtgagcagagtgcccaggatgacagccatggacaatgccagcaagaatgcttctgagatgattgacaaaattgacattgacattcaaccgtacccgccaagctgtcatcacaaaagagttgattgaaattatctctggtgctgcgagctctgtaaagaaggaaaattcagccagttgattttgtttttagcttactgctgcctttgtccgaagaaactgttcctccattatttgaattactgaagacagcaagatatttgtaaattatcttaaaataaacaacttaaaataaaatcattgtttttctt
